United States Patent Application Publication US 2017/0114356 A1 - sequence listing, part 92

SEQ ID NO: 150278 - DNA, 1320 bp, Zea Mays
tgcagattctgtccacaatggcccacgagggtgccatctccaattctccattctttcttcctgtcctgtcctggtgtcctgtcctgtccacctctcctccgactccgatcctctccgccatttccctgcgcttctggaactgttgttctaaacccccaaaccctaacggcctaacctctgcgctgccggcgtcgccaccgccggagctgcggccatgaacgccttccggttcctcggggacatgacccacctcttctcggtcctcgtgctcctcctcaagatctacgccaccaagtcctgctcaggggtgtcgaggaagacgcaggagctgtacatgttggtgttcgtggcgaggtacctcgacctcttcacggactacgtctcgctctacaactcagtgatgaagatggtgttcatcaccagctcggcggcgattgtgtggtgcatgcgccgccacccgcaggtacggaggacttacgacaaggagcaggacaccttccgccacgcggtgctcgtcgccgccgcgttcctgctcgcgctgatgttccacgaccggttcaccttccgagagatatgctgggcattttcgatctatttagaggcagtggcaattctcccacagttagtgttactccagagaagcagaaatgtggataacttaactggacaatatgttttcttccttggggcctaccgggcattttacattctaaactggatttaccgttatttcacggagggtcatcacagcagatggatcccttggcttgctggtttggtgcaaacagctctgtatgcagatttcttttactattatttcttaagttggaagaacaacgtgaagctcgagttgcctgcttgagcatgcttcgtcgtgccagaaagtgtgcatgctacatgactcaagttttctagaaatttgtttatatgggcatggggagacttggtaatgatgtgagcagttgagttgataccatacccttaatcttgcctgcgaaaattgatatttgtgtttccatggcaaagtcgatacgattcgaaagctaacagatgctgctgcacagaagtagactagttcctttttgtacctcgatacttttgatatggaaaatcacaaacagttcagttgtttaacatgctatttcactttacgtaaacgaaaatgaactgttcttacgagttctctgtaaaacatgtctttgactatcctgatttaatatctagctttttatgtccttgtgctactctggcctagtgtcaactatccgttttttgcgcttctaacaattctgaattatacaatttttgttgttgcaacaa

SEQ ID NO: 150279 - DNA, 720 bp, Zea Mays
gtactatacattatttgttgttggtcaaattttcagatccatcttatatgctgggcattttcgatctatttagaggcagtggcaattctcccacagttagtgttactccagagaagcagaaatgtggataacttaactggacaatatgttttcttccttggggcctaccgggcattttacattctaaactggatttaccgttatttcacggagggtcatcacagcagatggatcccttggcttgctggtttggtgcaaacagctctgtatgcagatttcttttactattatttcttaagttggaagaacaacgtgaagctcgagttgcctgcttgagcatgcttcgtcgtgccagaaagtgtgcatgctacatgactcaagttttctagaaatttgtttatatgggcatggggagacttggtaatgatgtgagcagttgagttgataccatacccttaatcttgcctgcgaaaattgatatttgtgtttccatggcaaagtcgatacgattcgaaagctaacagatgctgctgcacagaagtagactagttcctttttgtacctcgatacttttgatatggaaaatcacaaacagttcagttgtttaacatgctatttcactttacgtaaacgaaaatgaactgttcttacgagttctctgtaaaacatgtctttgactatcctgatttaatatctagctttttatgtccttgtgctact

SEQ ID NO: 150280 - DNA, 1174 bp, Zea Mays
tgcagattctgtccacaatggcccacgagggtgccatctccaattctccattctttcttcctgtcctgtcctggtgtcctgtcctgtccacctctcctccgactccgatcctctccgccatttccctgcgcttctggaactgttgttctaaacccccaaaccctaacggcctaacctctgcgctgccggcgtcgccaccgccggagctgcggccatgaacgccttccggttcctcggggacatgacccacctcttctcggtcctcgtgctcctcctcaagatctacgccaccaagtcctgctcaggggtgtcgaggaagacgcaggagctgtacatgttggtgttcgtggcgagctcggcggcgattgtgtggtgcatgcgccgccacccgcaggtacggaggacttacgacaaggagcaggacaccttccgccacgcggtgctcgtcgccgccgcgttcctgctcgcgctgatgttccacgaccggttcaccttccgagagatatgctgggcattttcgatctatttagaggcagtggcaattctcccacagttagtgttactccagagaagcagaaatgtggataacttaactggacaatatgttttcttccttggggcctaccgggcattttacattctaaactggatttaccgttatttcacggagggtcatcacagcagatggatcccttggcttgctggtttggtgcaaacagctctgtatgcagatttcttttactattatttcttaagttggaagaacaacgtgaagctcgagttgcctgcttgagcatgcttcgtcgtgccagaaagtgtgcatgctacatgactcaagttttctagaaatttgtttatatgggcatggggagacttggtaatgatgtgagcagttgagttgataccatacccttaatcttgcctgcgaaaattgatatttgtgtttccatggcaaagtcgatacgattcgaaagctaacagatgctgctgcacagaagtagactagttcctttttgtacctcgatacttttgatatggaaaatcacaaacagttcagttgtttaacatgctatttcactttacgtaaacgaaaatgaactgttcttacgagttctctgtaaaacatgtctttgactatcctgatttaatatctagctttttatgtccttgtgct

SEQ ID NO: 150281 - DNA, 1398 bp, Zea Mays
atggagggagctggaagagatgccaaccctttgggcggttaccgaattggcaaaaccctaggaatcgggtcgttcggtaaagtgaagatcgcggaacatatattgactggccataaggtggcaatcaagatcctcaatcgccgtaagatcagaagcatggaaatggaagagaaagtgaagagagaaatcaagatactgagattatttatgcatcctcatatcatacgcctttatgaggtgatagatacacctgctgatatttatgttgttatggagtatgttaaatctggagagttgtttgattacattgttgagaagggaagactacatgaagaagaagcccggcgcttttttcagcagatcatatctggtgttgaatattgccataggaacatggttgctcaccgtgatttaaagccagagaatcttcttttggattcgaaatgcaacattaagattgctgattttggcttaagtaatgttatgcgtgatggtcactttcttaagacgagttgtggtagcccgaattatgcagcacctgaggtcatatctggtaaactatatgctggtcctgaagttgatgtctggagctgcggcgttattctttatgctcttctttgtggcactcttccatttgacgatgagaatattccaaacctttttaagaaaataaagggtggaatatatacccttcctagtcatttgtcaccttcagcgagggacttgattcctagaatgctggttgttgatccgatgaaaaggattacaatacgtgaaatccgtgaacatatgtggttcaaaattcaacttccgcgctatttggctgtaccgcctccagacactgcccaacaagttaagaagctggacgaggaaacccttaatgatgttattaagatgggttttgacaagaatcagctaattgaatctctgcacaacagattgcagaatgaggcaacagttgcctattatttactcatggacaataggcttcgtacaaccagtggttatcttggatctgagtttcaagaatctatggacccatctttctctcaagtacatgctgaaacaccaacttcagcaactgaacatcggcagcatgtgtttacagaatctccggggtctggtttgaggcagcattttgcatctgaaaggaaatgggcccttggtcttcagtctcgagcacatccacgagaaataataagtgaagtgcttaaagcactgcaagaactgaatgtttactggaaaaagattggacactacaacatgaaatgcagatggagtcctggctgccttgagagtatgatgcataactgtgatggctttagtgcagagtctgctataattgaaactgatgatctcatagcgaaatcaacccgtatagtgaagtttgagattcag

SEQ ID NO: 150282 - DNA, 1398 bp, Zea Mays
atggcgccgccggcaccgtcctccaggacgaccctctcccgcgcggttctgtacctcctcctcctcctgtccctgcaggtcgccgcgcccgctgccgcggccatggaccccgccgagcgggagacgctgctccgcgtcatggagtccgtctccgccgaccgcgactggcgcgaggccgccggcgccgacccctgcagcgcgccgtggccggggctcgagtgcaggcccgggaccgcggcggcgcggatgcacgtcgcgcgccttgacttcggcgtgccgccccacccgacgtgcagggacacggccacgttcccgctcgccgcgttcgcgctgccggagctgcggtcgctgttcctcgtcggctgcttcaggaacccccgcgccgtcgccgccttcaccttaccgccggcgtccaacctctcggcgtcgcgcctgcagcagctcagcgtgcgctccaacccgtcgctggccggcgcgctgccgccgcagctggcccgcctccgctcgctccgggtgctcaccgtgtcccagaacgcgctcgtccgcggcgccgtcccggagggcatcggcgacctcgccggcctcgtgcacctcgacctcagctacaactccctcaccggcccgatcccggcccggctcggcggtctgcgcggcctcgtcggcctcgacctcagctacaactccttctccggccccatcccgggccgcctcggcgacctcgcccagctgcagaagctggacctcagctccaacaacctcaccggcggcgtcccggccgccgtcacccgcctcagggctctcaccttcctggcgctcgccaacaacgggctgcgcggccgcctccccgccggcctctccgccctccgcgacctgcagtacctcatcttggagaacaacccgatgggcggcgtcccgctgccgcccgagctgggcaacatccccaggctccaggagctccggctggccaactccggctactcgggccccataccggacacgttccgcctcctgtccagcctcaccacgctgtcgctggagaacaacaacctcaccgggcggatcccgccggggctcagccgtctcaagcgcatgtaccacctcaacctgagcaagaacgggctggacggcgtcgtccctttcgacgccgcgttcctcaggcggctcggccggaacctggacctgagcggcaacccggggctgtgcgtcaccaaccgggccgtcatgccgggcgtgggcgtcggagtctgcggcgacgacgtcgtcgactgcgaacggtccgccgccgcggagagctcggtcgtcgggagagtggtcaggggagaggtgacgacgggtcgctggccggccgggctgctcaggcccgccgcggttgcgctgtgcagctgccttttgctctga

SEQ ID NO: 150283 - DNA, 640 bp, Zea Mays
ctcgtaccatggaggaggaattccaggaggccgaaatcctatggccggctggcgtggacggcggcggcgaggcggcgcctgcttgctcggtccgtcatcgtcccagggcagccacgccggtcgacatctctcggcagaagcggcggtgccgcccctgcccggtgtcgtcgtcggagcattaatacgcccaccacgctcgacgaccaggaaaccgacgacgtcggcgatggtgcaaaagggacgactgcgaaccacgggctcggcagtcgtgccgccgcacgttcttgtcgcgcggcggaggaggctggtgcgcggccggacggcggcctactccatgtgcgctggcaaggggaggacgctcaaagggcgagacctccgcgacgtccggaacctcgtcctcaagatgacaggcttcatcgaggagtgaatgaatgcgtgccgtcgcatcgcatggatccagaggattcttttcagcaagccaatggaagaagcacccgtagcagtctagcagaaggatatacaactatacaagaagatgacgactgttcacgcgtaataattaatttgctagcttatgtaataactaggtatatgcccgtgcgttgctacggaatcaatatgataaaatccatatatatgt

SEQ ID NO: 150284 - DNA, 810 bp, Zea Mays
atgcctgggtcgccaacaaacccatgcctctccttctcatccccacctgccagtgtaggagaagaggacggagatctcgtcgcgctggtggagatggccgaagccgcggagtgcgaggaggagcgggacctgtttgccgatgcgaatgacgacgtagggatcgctggattggaggtcgcggatggcgaggttcacccccctcaccacgcgcagcttcagcagcccgacgagatggtccagcatggaaatgaacttccatcagacttgatagacacactactaaagtggatcccaagcaatgatgaggagcttaggcttcgactgtcctcccgtagcaccgccacaccgcacgcgtccgtggcggcgttcgcctcggcgccggtctcgcacaccgctccctggctggggaagttcatcgccttcgagcccttcaacgtggggggattcgactgggcgatctacttctaccccgatgggaagagcggcgaggatggtatgcttatccatggtggaaagaaaaagctaaatgcatacagcttgtttgaggtgagagtatctggtgacggaaattgtcagctcaaggaatgtaactccttatatgaaggttacgttccaatgaaatataaacattattgcaagaaaatgaagaagtatggtgaatggggtgaccatgtcacgctacaagcagctgctgacaagagactcaggatcagttctccaagtactcctgcacttggaaccatcaacaaagagtcaaagagtaaagatgttattccacaatggttatctttacgttatgttttgttgtag

SEQ ID NO: 150285 - DNA, 1257 bp, Zea Mays
atgcctgggtcgccaacaaacccatgcctctccttctcatccccacctgccagtgtaggagaagaggacggagatctcgtcgcgctggtggagatggccgaagccgcggagtgcgaggaggagcgggacctgtttgccgatgcgaatgacgacgtagggatcgctggattggaggtcgcggatggcgaggttcacccccctcaccacgcgcagcttcagcagcccgacgagatggtccagcatgtgaacccttcatcctatattctctttgagctaatcttcttgcaccttgatgtaaaccttgacatatctgatggttctgcttgcacaacatttattcagagaaagaaggtcggtgcaataatcggccacaaaggtgagagggtcaaaagactgtgtgaggaaacaagagcatgtgttcgtattattggcggtcatctttgtgcggcagagcaagctgtaatcatttttggaagggagcagcttgatgagccattacctccagccatggatgccctactaagagtatatcagcaaacaattaacaatgactctttagatgtgggacccgataatgtgattgtgaggcagattcttgcaccaagtgagcaggcagcaagccttattggcgagcatggtgtgatgattaattcaatcatggaagcttctcaaaccgacattcgtgtccttggaaatgaacttccatcagacttgatagacacactactaaagtggatcccaagcaatgatgaggagcttaggcttcgactgtcctcccgtagcaccgccacaccgcacgcgtccgtggcggcgttcgcctcggcgccggtctcgcacaccgctccctggctggggaagttcatcgccttcgagcccttcaacgtggggggattcgactgggcgatctacttctaccccgatgggaagagcggcgaggatggtatgcttatccatggtggaaagaaaaagctaaatgcatacagcttgtttgaggtgagagtatctggtgacggaaattgtcagctcaaggaatgtaactccttatatgaaggttacgttccaatgaaatataaacattattgcaagaaaatgaagaagtatggtgaatggggtgaccatgtcacgctacaagcagctgctgacaagagactcaggatcagttctccaagtactcctgcacttggaaccatcaacaaagagtcaaagagtaaagatgttattccacaatggttatctttacgttatgttttgttgtag

SEQ ID NO: 150286 - DNA, 345 bp, Zea Mays
atgaacaaatctcgccggggcacgattacaggccccagacctaatggaacaatgttcctgtgtgggactatccagactctgctactgagaaaaaaacttgcgtcacattggcatccaacccctgggcgatgggtttcgggagacgccgtcgcgagctcgattttttctcccttttccgtttcacggagggcttctttgtcggaggagctttcctgctacctacccggacattcgcgtgcgtcacagccgccgccaaagggggcatcctaccagatgcaatcatctgctccagtagctccctgtggtatacctgaacgacaaagttgcgcctttcgcagtccatga

SEQ ID NO: 150287 - DNA, 1961 bp, Zea Mays
aaattccccatctccaaaggcttcctcttcccgaccgttgcgccccaactatggagaagcagaagttcctcggagccaactcgacggcgcggcggcgcccgctcagctccctctccggaaacaagccgagcccggcgctgcaatccctgatctgcaaggcccaccctcacgccgaccccgccgcccaagcgaccaccgccgaggtagacgcggcgctcgaccgcctcctcttcgcccgcaccgacctcgtgggtatcgtttcccagattgacgaattgatctctgaagccttaaaatgccaaaatgtgtccaaaaaagcaacacgagagatagaatccttcaatggcttcttaacagacactaaggcttccttcaagcaatggtcttcaagactgaagcaagcactagagaccggtctggtgaaaaccgaagctatcccaaaaaacacaccgggaacttgcttaaatactgctgcaaaagggaatgacaagttgatcagctgcagtaccaagctacctgatacaggtagctcaaaaaacacaccaggaacatgcttaaataatgctgcaaaagggaatgacaagttgatcagaggcagcagcaagctacctgatacatatagttcacaaaacacaccaggaacatgcctacatactgctgtaaaagggagtggcaagttgatcagcggcagcagcaagctacctgatacagatccactggagtcaccttgcagcaactttactgaggtcgacatgattgtctcaccttcaccacttgtctcatggaacactggatcttgtatagttgagagcggaaagcagttgtttctcttgacaccactgccaaaaacaaaagcatgctcgtcaaggtgccaaacatcaaaaacccagatgaagacagtttctagcactgaccaattgaacaatcttctaaggcctgtttcaaagctaaccatttctgataataatcatcctgatctagagcaaagtgtgaaggtaaaggaatcatggactagcactacgacacctcatgttgctctagcaaacaaggcctcactagaagacaagctctgttcgcctcgtactttctcagttcagaagagcagaacactgcctagatcatgcctgaagacagcattatctagcaagcagcagctgttctctccaatcccggagggaaggaaggaggaagacattgacagcaatggttcaattggggatgacaaatgctcatctgataaaatctcaaaggatttagcatcaagatatgatatttatgggcttaatcaatcaaacagacaagtcgaagatcctcttcagtggtttctgtcaccactgaagacaatggtgttaatagatccatcagaggataatcaacttccaactccagcgaggagtaacatgggggaaagattggatattgccgatgacaagcccatccacactcctgctgtgcatagcaaggccttacttggtaccccctggaaaggcttggagagcacgaacctgaagggaaggtgtgctggagaaactactcttaagaaagaactgtggactcgatttgaggcggcttcaaccaatgagctgcactttgataaggtgcgcttccagcagacagacgcaaaatgttttctggacatgcttgaagaagaggcgtcgtgattctagaatgtacagtaggtcggttggcacttgggttagttttttttttttggttgtaacaagacgcctaggactgggactgggggactgcacactgcgatgtctgagtgcttaaagccgaactgaactgctcgaatgcaacagcagagttgccaaatgttattacggcagagtgcctttgccatggtcagcctgaggtctcgaagtttgtgctgaatggcatgaagtgttgcaactactacagtagtccattgtgcttataaatctaggctctaagataaaactgattatccttctgca

SEQ ID NO: 150288 - DNA, 1704 bp, Zea Mays
accgttgcgccccaactatggagaagcagaagttcctcggagccaactcgacggcgcggcggcgcccgctcagctccctctccggaaacaagccgagcccggcgctgcaatccctgatctgcaaggcccaccctcacgccgaccccgccgcccaagcgaccaccgccgagattgacgaattgatctctgaagccttaaaatgccaaaatgtgtccaaaaaagcaacacgagagatagaatccttcaatggcttcttaacagacactaaggcttccttcaagcaatggtcttcaagactgaagcaagcactagagaccggtctggtgaaaaccgaagctatcccaaaaaacacaccgggaacttgcttaaatactgctgcaaaagggaatgacaagttgatcagctgcagtaccaagctacctgatacaggtagctcaaaaaacacaccaggaacatgcttaaataatgctgcaaaagggaatgacaagttgatcagaggcagcagcaagctacctgatacatatagttcacaaaacacaccaggaacatgcctacatactgctgtaaaagggagtggcaagttgatcagcggcagcagcaagctacctgatacagatccactggagtcaccttgcagcaactttactgaggtcgacatgattgtctcaccttcaccacttgtctcatggaacactggatcttgtatagttgagagcggaaagcagttgtttctcttgacaccactgccaaaaacaaaagcatgctcgtcaaggtgccaaacatcaaaaacccagatgaagacagtttctagcactgaccaattgaacaatcttctaaggcctgtttcaaagctaaccatttctgataataatcatcctgatctagagcaaagtgtgaaggtaaaggaatcatggactagcactacgacacctcatgttgctctagcaaacaaggcctcactagaagacaagctctgttcgcctcgtactttctcagttcagaagagcagaacactgcctagatcatgcctgaagacagcattatctagcaagcagcagctgttctctccaatcccggagggaaggaaggaggaagacattgacagcaatggttcaattggggatgacaaatgctcatctgataaaatctcaaaggatttagcatcaagatatgatatttatgggcttaatcaatcaaacagacaagtcgaagatcctcttcagtggtttctgtcaccactgaagacaatggtgttaatagatccatcagaggataatcaacttccaactccagcgaggagtaacatgggggaaagattggatattgccgatgacaagcccatccacactcctgctgtgcatagcaaggccttacttggtaccccctggaaaggcttggagagcacgaacctgaagggaaggtgtgctggagaaactactcttaagaaagaactgtggactcgatttgaggcggcttcaaccaatgagctgcactttgataaggtgcgcttccagcagacagacgcaaaatgttttctggacatgcttgaagaagaggcgtcgtgattctagaatgtacagtaggtcggttggcacttgggttagttttttttttttggttgtaacaagacgcctaggactgggactgggggactgcacactgcgatgtctgagtgcttaaagccgaactgaactgctcgaatgc

SEQ ID NO: 150289 - DNA, 2899 bp, Zea Mays
cctcccctggataaaagcaatcctcccgcagaagcagaacgattccggaaagtgtctcgaatcttccaaattctttcccgagacctaaaattctctcgacggattcgcctgatctgacacgcgatctctcggctcgccccaatggccgacaaggagaagttggagtctgaagaggagtacgagagcgacctcgacgacgcacccctctccgcgttgcggcgccgggacgctgcgagcgatgacgaggacgaggatgaggacggagggatgcccttgaggcggaggaaggctggatccgacgcagattccgacgggcagggcgccgccgaggtgtacgacgaggatggcgcgtacgaagaaagcgaggagtacgaggaatacgagtacggggggttcaaagcagggggcggcggagtgcgcggggtggctgtcgaggcggttgccggtgcgggccatgaggaaggcgaggcgggggatggggaagctgaaaaggcgggtgaggcagcgccaggaggcgaagaggaggacaagaaggggaacgaaccctactccgttccgacgaccggcgccttctacatgcacgacgaccgcttccaggagggccgggggcgggggcgggggcgccaaagaatggtgaacagtagaaggttatggagtcctaaagatgagcaagcctgggttcatgacagatttgatgagatggacctgcatgattttcatggtgacaatccaaaaagaaagcagggaggtgtctttagaggacgtggtggtggacaaggtggtagaactcgtggtattagccgtggtaacttcagaggcagcagaactcgaacatactatcatgatggtagcaagaactacagctatgttccaaaggaatctcatgcataccgtgataacaccaagaatgcccatcattcttcacacattaatggaaagaatagagttccaaaaccatctcgtgaccactatgatggtgctaaaagttatgacattgtcccaaatgaatctcacatttaccatggtgatgctaagagccaaaaaaatgcaccaagagtagttcgagggagaggctccaagcgttaccaaccacgcttgaaaagcacctctgatgtatcttcagtgcaaaataccaaatctcagagtcttgaaggcacttcgtcaaatgcaaacttggtaaaagatgaagctcaaggaccaaattcacgacttgagcaagtccttcctattaagcagactgttgcatcaaacttgaattcagcttcgccaccattttatcctgcgaggtcatccagtcaagagtttgcagttggtcaaggagagaatacacaagaacttagtactaacctagtaagaggaaaggcttttgtgccatcggggcatgttgaagctgctataaatggcatgaatagacctgcactgcttccacctgcatcgtcatcaaatggtccatttcctgtagccactaatcaagtcaatagagattatggccatcctgcacatccaattgttcaacaaaacccagttcaaccccctacacgatctgcacccaggatgcctgcccagatgtttggtgcaacattcagcaatggcagtaaaatatcacctgcacaacctacatcaactattttagatgatgacgctgaaatttcttcacctagtggatcaaacaaatatgattctcggttaacagttaaaggacaacctgatgaccaaggagaagagcgagcttcgtttctctatggtggggctcgtgttcttggggctacaagcgcaatgggaatcacacttggtgatcaaaattttcatggtaccccagcattgctgccagttatgcagtttggaggtcagcgaccagttggacgtggtgttccttcaattggtatggctctgccaggatttgtgtctcaacagcaacttggtatcaataattctgagatgacttggctaccaatattgactggtgcctctggagctctaggagcaccttatggttcaccttatatagccgtcgatggaagttattactctcgaccgcctgaacaaccatcttcatcagtttctaatagagaatctagtgcaaataatgcttcttctctgaagtcccaagaaattacagaggttgcaggcgacgcaagaactcaacaccaaaataaacctcgtcgatactcggagatgaactttggccagtgaacatagtgatgatagtaaatcagtgagggttcattggagctttggatccaagtaagacttgtgcaagagaccctggccttaccaagtgcttccagcatttcactgtctgatgtctagcactatcttgtgacccaaacgaggtttgacaggaggtgttcaaaccatcgctgtggtcatttgctgtgattattctgacgggctggtgttgttacaatcattaggtgagattttctggtactctacgtcaccacaataccagacggtcggtccgtaagtgtgaaggtcttgatggaaatcgtgaggacggaggtctcggtcgtactgcaaagctcgtgtccccgctgtacagtgtacatcacgtctctgactgtgtttgggtgtgcgctgcctctgcctacgaactcttcggtggttgtcgcatttttgaactgacaaataaaaaagaacgtgttgagcaccaaattgagaagggcggacggtccagcccggtccggacagtccgcgcctgtgggctgcacggtctgcgcaagcgcagaacagattagggttccaagttttgtgctacagttgttagctagattcgcaggattcgcttggaaattagtttgtaaatggttcagtccccctcctctataaataaagaggtatacggtcgatttgtaataatcaatcgaatcaataaaacttctatctcgcatttattttc

SEQ ID NO: 150290 - DNA, 1766 bp, Zea Mays
gttgttgaaccttgagactactagctagagagagaaatatccaggccgaaggcgagagaggtctgagcggggagacgacgcccgcgccatggcaggcgccaccaacggcggaggcaacggcggaggcgggaaggtggtcagcatgccgctgcagtacttctgcgtgctggcggcggtggtggtggccgtgatggtgctgtcgctgtcgttcatgtcgccggcggccatggtggccgtccgccagaacctcagctctgtggcggccgcccccggtggcagcagcaacagcagcgccggcggcgccggagcgggaggcgccgccggcctggccaaggccgcgtcaccgccggcgggctggaaggagaaggagcaggagcaggagcaggagcaggcgcggcggccgcccgtggtgctgttcaacttcggcgactccaactccgacaccggaggcgtggcggcggccggcgggatacggatcatgccgccggagggccgcacctacttccaccaccccacgggccggctctccgacggccgcgtcatcatcgacttcatctgtgagagtctgggcacgcgtgaactgaacccatacctcaggggaattggttcggactacagcaacggcgtcaacttcgccatggcaggctcgacggtgacccacggcgtctctccctactccttgaacgtccaggtcgaccagttcgtctacttcaggcacagatcccttgagatgttcgaacgaggactggaaggcccggtgagcaaggaggggtttgagagcgctctgtacatgatggacatcggccacaacgacatggttggtgtggcgcacacaccgtccgatcagtgggacaagaagatcacagagatcgtcggcgaggtcagacaagccatctcgatcctgtacgacaacggagcgaggaagttctggatccacggcacgggcgccctggggtgcctgccggcgctggtggtgcaggagacgaagggcgagcaggacaagcacggctgcctcgccggcgtcaacagggccgccaaggcgttcaacaggaagctcagccagctctgcgacgacctccgcttccacctcaagggcgccaccgtcgtctacaccgacatgttcgccatcaagtacgacttcgtcgccaaccacaccaaatacgggatcgagtggccgttcatggtgtgctgtggcaacggcgggccgccgtacaacatgaagcagggaagacccggctgtggcgacctgtgcccaccggaggcgaaggtggtcagctgggatggcgtgcacttcacggatttcggcagcggccttgctgccaagcttgcgatgagcggggagtactccaagcccagggtgaagctggcaagcttgatccatggcggatccaagaaaacgtcagactcttgatgcggaccattgaccgagtcgtgacctttggatccacatctatggaatggaagatgggtagcggtgaagaattggagggatatcttgcaccaggctgtttcttgacgaagattgactccttgtacacactacacagaactactacagaaggcaaagtagcactgggaatgctcagttacaagcttaagttaatttgctgtctttttattttgggattttgtgctgcagagtacagagattttgtaccttgatgtacgtgtaactatttatgatagttcttacaagctccaaaaggaaaatatgatgtgtctcgtcatttccttctaatttcaaaatagtgctagaaagcaacgaa

SEQ ID NO: 150291 - DNA, 1734 bp, Zea Mays
gttgttgaaccttgagactactagctagagagagaaatatccaggccgaaggcgagagaggtctgagcggggagacgacgcccgcgccatggcaggcgccaccaacggcggaggcaacggcggaggcgggaaggtggtcagcatgccgctgcagtacttctgcgtgctggcggcggtggtggtggccgtgatggtgctgtcgctgtcgttcatgtcgccggcggccatggtggccgtccgccagaacctcagctctgtggcggccgcccccggtggcagcagcaacagcagcgccggcggcgccggagcgggaggcgccgccggcctggccaaggccgcgtcaccgccggcgggctggaaggagaaggagcaggagcaggagcaggagcaggcgcggcggccgcccgtggtgctgttcaacttcggcgactccaactccgacaccggaggcgtggcggcggccggcgggatacggatcatgccgccggagggccgcacctacttccaccaccccacgggccggctctccgacggccgcgtcatcatcgacttcatctgtgagagtctgggcacgcgtgaactgaacccatacctcaggggaattggttcggactacagcaacggcgtcaacttcgccatggcaggctcgacggtgacccacggcgtctctccctactccttgaacgtccaggtcgaccagttcgtctacttcaggcacagatcccttgagatgttcgaacgaggactggaaggcccggtgagcaaggaggggtttgagagcgctctgtacatgatggacatcggccacaacgacatggttggtgtggcgcacacaccgtccgatcagtgggacaagaagatcacagagatcgtcggcgaggtcagacaagccatctcgatcctgtacgacaacggagcgaggaagttctggatccacggcacgggcgccctggggtgcctgccggcgctggtggtgcaggagacgaagggcgagcaggacaagcacggctgcctcgccggcgtcaacagggccgccaaggcgttcaacaggaagctcagccagctctgcgacgacctccgcttccacctcaagggcgccaccgtcgtctacaccgacatgttcgccatcaaggatcgagtggccgttcatggtgtgctgtggcaacggcgggccgccgtacaacatgaagcagggaagacccggctgtggcgacctgtgcccaccggaggcgaaggtggtcagctgggatggcgtgcacttcacggatttcggcagcggccttgctgccaagcttgcgatgagcggggagtactccaagcccagggtgaagctggcaagcttgatccatggcggatccaagaaaacgtcagactcttgatgcggaccattgaccgagtcgtgacctttggatccacatctatggaatggaagatgggtagcggtgaagaattggagggatatcttgcaccaggctgtttcttgacgaagattgactccttgtacacactacacagaactactacagaaggcaaagtagcactgggaatgctcagttacaagcttaagttaatttgctgtctttttattttgggattttgtgctgcagagtacagagattttgtaccttgatgtacgtgtaactatttatgatagttcttacaagctccaaaaggaaaatatgatgtgtctcgtcatttccttctaatttcaaaatagtgctagaaagcaacgaa

SEQ ID NO: 150292 - DNA, 81 bp, Zea Mays
cgatcactgcggttgagccgcgcggcgtagtagaatgcgacggagacgagccacgagtcagagtgtacggcgacgagcgcg

SEQ ID NO: 150293 - DNA, 784 bp, Zea Mays
attatcttcgcataagctgcacattccacctatagaaagattacaaaggcttcctctgcccctattccttctccggcaacatacagactaccataactctccacggcatggagaaaccacaaaaagattataaattaatgtgtgatctttccctgctaacattagcatcatcatcgttcgtcatatgtaagcttaatcgaaaaggtacagtaaacatcgcaaggcggcattgaccttgcgcaagaggaaactctgacctgcttgtccagtcttcttccatccatggccgtcctcccgggaggagggcgatgctataggcctaaatcggcctaggtctttttgaattgcagcagcttgggcacttgtactgctttatgctctccgcctttgcaggtgtgatcttcacgcacttgccatggtaccacttctcgcacacgtcgcacccgatccagaactcatcagcgctgtatattccaccacatgtcccgcacaaggtttcgctgtggttgctgtcatcttcatcgtagccctcatcaggctccctggcgttattttctaatcgtggctcgcttgtttgctggagagacagatcaagttcaacatcataacatgacaatagaagatgtggtaaaaacagcgatgggttcttgttacctttaccgacagtttatttctaccaccattgtcagtaccggatctatccctctcttttgattgcttcacaccactggagacgacttcaaaaacagttggcagatcattcatcatgccgaacaaacgcttc

SEQ ID NO: 150294 - DNA, 830 bp, Zea Mays
tctttatagtaaataaaatatattaacatgaacatcacggattattattatcttcgcataagctgcacattccacctatagaaagattacaaaggcttcctctgcccctattccttctccggcaacatacagactaccataactctccacggcatggagaaaccacaaaaagattataaattaatgtgtgatctttccctgctaacattagcatcatcatcgttcgtcatatgtaagcttaatcgaaaaggtacagtaaacatcgcaaggcggcattgaccttgcgcaagaggaaactctgacctgcttgtccagtcttcttccatccatggccgtcctcccgggaggagggcgatgctataggcctaaatcggcctaggtctttttgaattgcagcagcttgggcacttgtactgctttatgctctccgcctttgcaggtgtgatcttcacgcacttgccatggtaccacttctcgcacacgtcgcacccgatccagaactcatcagcgctgtatattccaccacatgtcccgcacaaggtttcgctgtggttgctgtcatcttcatcgtagccctcatcaggctccctggcgttattttctaatcgtggctcgcttgtttgctggagagacagatcaagttcaacatcataacatgacaatagaagatgtggtaaaaacagcgatgggttcttgttacctttaccgacagtttatttctaccaccattgtcagtaccggatctatccctctcttttgattgcttcacaccactggagacgacttcaaaaacagttggcagatcattcatcatgccgaacaaacgcttc

SEQ ID NO: 150295 - DNA, 612 bp, Zea Mays
atgaacaacctggggcagatgggcgtggccatgggctacgtggacgtctccctcttcgtctccatgaccagcatctggggattcttcggtcgcatcgcctccggcaccatctccgagcacttcatcaagaaaagagcgccaagggagaatacaactaaaggttggtttcctaaagaagtgcctacatcatcacaggcagcacccaatattactcctccaagtgatgatgtgcctgcattttcagagattgtgctcacaatacctccgccaggagaggatgtgcttgcatcttcacagatagtgcaaccaatgtctcctacaagagagtttggacagttatctgcaaaactggtaatgtcatcagctattgggtgcatttttctgcaaaactgtttgagagaaaggagtgctatttattctgttattgacatactggaaggaacaagcatcaggcgacgaccgtctcgattgcgggagaagggagtgcccctcgagtatccgcagttcatcaggagccacaggccaagcggcgagacgaggcggtttggaactgccatggctgatgaggtaaggaaaatggaaggtttctgtgtaaaccagtgctacaagtga

SEQ ID NO: 150296 - DNA, 670 bp, Zea Mays
tatttttcttggaatgcactctgagaattttgttaacatgatcatcattatgctcatgttcattctctatgtgaacagggaaatactgctgtgtaccttcagtatgcacatgctcgtatttgttccattattcggaaaatccaacaagaacgtggaagagctgaagatgagtggagccatttctctcgaccatccggatgagcgcgtgttggggctgtatcttatccgatttgcagaggttgttgaagaggcatgcacgaatctacttccaaatgttgtgtgtgaatacttgtacaatctatctgaaatgttcacaaaattctataccaactgccaggtggttgggtcgccggaggagacgagccggttgttgctttgccaggcgactgctgttgtcatgcgacagtgcttcaacctgctcgggatcacgccagtatacaagctgtgattggctgcatgttcgattaatacattcaacatgtagaaaccccaattcatcatggttgcagttttggtcttgtaacctagttgaggcagttaacataatctactgtcctgtttgaaaacagaaggaactcaaaaggttgtatcaaaatgtgcttgcagagtttctgttactgttaggctagttttgcaactcccgatttttatttttctaagggctagttcg

SEQ ID NO: 150297 - DNA, 667 bp, Zea Mays
tacaggtacgctgattctaaaaataaccgggctcactaattacccatttagttttaacaaatgctgagcgataagggaaatactgctgtgtaccttcagtatgcacatgctcgtatttgttccattattcggaaaatccaacaagaacgtggaagagctgaagatgagtggagccatttctctcgaccatccggatgagcgcgtgttggggctgtatcttatccgatttgcagaggttgttgaagaggcatgcacgaatctacttccaaatgttgtgtgtgaatacttgtacaatctatctgaaatgttcacaaaattctataccaactgccaggtggttgggtcgccggaggagacgagccggttgttgctttgccaggcgactgctgttgtcatgcgacagtgcttcaacctgctcgggatcacgccagtatacaagctgtgattggctgcatgttcgattaatacattcaacatgtagaaaccccaattcatcatggttgcagttttggtcttgtaacctagttgaggcagttaacataatctactgtcctgtttgaaaacagaaggaactcaaaaggttgtatcaaaatgtgcttgcagagtttctgttactgttaggctagttttgcaactcccgatttttatttttctaagggctagttcg

SEQ ID NO: 150298 - DNA, 1582 bp, Zea Mays
accgtgagagggggagggggtatttaactgacggcgggacgaggatgcaagctctcgcggcagcagcaactgcagtggcggcgcctacccccgcgcgcctccgtctcccgctcctcttccgcgccccgcgctccggtcactgtagacccgcttcttcctccaggcttctgcggatctcgtgcagtgccaccactatgggagacgagacctcgacctccgttgctcctcaggagcaggaatccactgtgcgggctgggagtgtcaagcaacagctctccaggctggtcctttcatccctccagactacattgcccgatgtggaggtagaaccgatggttgaagtttcagcaaagtttgctgactaccagtgcaacaatgctatgggattatggtcaaaggttaaaggatctggaacaattttcaaaaaccctaattccattgggcaggccattgccaagaatctgccgtcttctgatattattgaatctgcatctgttgctggacctggttttgtgaacattaccttatcaaaccgctgggttgcacagagaatacaagatatgcttgttaacggcatcaagacttgggcaccagttctgccagtaaataggacagtggttgatttttcatcacctaatattgcaaaggaaatgcatgtgggacatttaaggtctacaattattggagatacattagcacgcatgtttgagttctcgaatgttgttgttctgcgcagaaaccatgtgggagattggggtacacagtttgggatgctaatagaatatctttttgagaaatttccaaattggcaggagataggttgccaggccattggggaccttcagattttctataaagcatccaagcataggtttgacagtgatccagactttaaagcaagggctcaacaaggagttgttcggctacagggaggggaggataaatatcgagaagcatggaaaaaaatttgtgacattagcaggagcgaatttgacttggtctacaagcgcctaaatgtggtgcttgaagaaaagggggagagtttctataatccttatattcctcaagtgctggaggaattgagtaacaaaggcttgatcaaggagagtgagggtgcccgagttatatttattcaaggtcatcaaatccctttgattgttgttaagagtgatggtggcttcaactatgcctcaacagacttaactgctctttggtatcggctcaatgttgagcaggcagagtggatcatatatgttacagatgttggtcagcagcagcactttgacatggttttcagtgctgcaaagatggccggttggctcccagatccaagtgaaaagaagtttccgaaaacaagccatgttggatttggtcttgttcttggttcagatggcaagcggttccgaacccgcagtactgaggttgttcgattggtagagctacttgatgaggctaaatctcggagcaaatcagaactactacaacggctcactgaaaatggcaaaattgttgactggacggatgaggaattagagcaaacttcagaggctgttggatatggtgctgtgaagtatgttctgga

SEQ ID NO: 150299 - DNA, 1493 bp, Zea Mays
accgtgagagggggagggggtatttaactgacggcgggacgaggatgcaagctctcgcggcagcagcaactgcagtggcggcgcctacccccgcgcgcctccgtctcccgctcctcttccgcgccccgcgctccgtcaggtcactgtagacccgcttcttcctccaggcttctgcggatctcgtgcagtgccaccactatgggagacgagacctcgacctccgttgctcctcaggagcaggaatccactgtgcgggctgggagtgtcaagcaacagctctccaggctggtcctttcatccctccagactacattgcccgatgtggaggtagaaccgatggttgaagtttcagcaaagtttgctgactaccagtgcaacaatgctatgggattatggtcaaaggttaaaggatctggaacaattttcaaaaaccctaattccattgggcaggccattgccaagaatctgccgtcttctgatattattgaatctgcatctgttgctggacctggttttgtgaacattaccttatcaaaccgctgggttgcacagagaatacaagatatgcttgttaacggcatcaagacttgggcaccagttctgccagtaaataggacagtggttgatttttcatcacctaatattgcaaaggaaatgcatgtgggacatttaaggtctacaattattggagatacattagcacgcatgtttgagttctcgaatgttgttgttctgcgcagaaaccatgtgggagattggggtacacagtttgggatgctaatagaatatctttttgagaaatttccaaattggcaggagataggttgccaggccattggggaccttcagattttctataaagcatccaagcataggtttgacagtgatccagactttaaagcaagggctcaacaaggagttgttcggctacagggaggggaggataaatatcgagaagcatggaaaaaaatttgtgacattagcaggagcgaatttgacttggtctacaagcgcctaaatgtggtgcttgaagaaaagggggagagtttctataatccttatattcctcaagtgctggaggaattgagtaacaaaggcttgatcaaggagagtgagggtgcccgagttatatttattcaaggtcatcaaatccctttgattgttgttaagagtgatggtggcttcaactatgcctcaacagacttaactgctctttggtatcggctcaatgttgagcaggcagagtggatcatatatgttacagatgttggtcagcagcagcactttgacatggttttcagtgtaagcacggagtggcaccaaggtattttccatttaatatgcttttattgaatcttctactgtctttctacaggctgcaaagatggccggttggctcccagatccaagtgaaaagaagtttccgaaaacaagccatgttggatttggtcttgttcttggttcagatggcaagcggttccgaacccgcagta

SEQ ID NO: 150300 - DNA, 1634 bp, Zea Mays
tcgtttcctcctcccagtccaagtctccagctacgagcctacgactgccaggtctccgcttgtcgccgtcacgcgcgcgcaggggcagggcgcaccatccccgcgccgccatgtccggcaccgggtgcctccccaccgacggcccggccctatcccgggtctgccgggacggcgcggccgccgcacggctcaagacggggtcgctgctggccattctcgtcgccagcgccgtcggcatctgcctccccgtcgcgctcacgcgggccttccgcggcagcccaaactacgcgcggggcctgctcctcgtcaagtgctacgcggctggggtcatcctctccacctcgctcgtccacgtgctccccgacgcgcacgccgccctcgccgactgcgccgtcgcctcgcgcaggccctggagggacttccccttcgcgggccttttcaccctcgtcggcgcgctgctcgcgctcctcgtcgacctctccgcctcctcccacctcgaggcccacgcccacgtcggcgcccaccacgaaactccctacgccccgatcccgaagaaggtacccgtgttcgagctcgccggcgaaatgagccccaagaagcgcgctttcttgggcgacgaccgagaagaggaccccgcgccgcacgccgccaccaacggcgcagacccggaccgcgacgacgtggcgctcttcggacccaagaagggcgcccgcagcgacgaggtcccggccatcactgccgggtgccatgccgtcgcccatgaagtggtggaggtaggggaggggcccggtgaggacgaggaggaggccaggaggaagcagaagatggtgtccaaagtgctggagattgggatagtcttccactccgtcatcatcggagttacgatggggatgtcccaggatgtctgtgcaatccggccacttgtggttgcgctctccttccatcaggtgttcgaggggatgggcctgggcggatgcatcgcacaggctggttttgggatggcaacagttggctacatgtgcataatgttctcagtgacgacgccattgggaattcttcttggaatgctagtgttccacatgactggctacgacgatagcaatccaaatgccttaataatggaagggatccttggttcactttcggctggaattctcatctatatggcgctagtcgacctagtttctcttgattttttccacaacaagatgatgtcagcgtctttgaagctgaagaaggcgtgttacattgccttggtgcttggatctgcttctatgtcggtattagctctctgggcataggcattttgaagaaaagccttatttacgatcttcagaggtattgctccttgatgtaaaggaatggataatttgggggccaacagtacactagtccctcatgtaaatttgaacacaaaggaaactgaaaattcacgaccacagtttgtgagctagctgtgtatactaagggctagtttgggagcctcaaacccggagggaattagaggggctaaaatcccttccttattcaattttgaataagaaggggattttagcccctccaatcccctccgggttttggtcttccaaactagccctaaggatgtatatggttatggaaaagtagctgcaaga

SEQ ID NO: 150301 - DNA, 1340 bp, Zea Mays
tcgtttcctcctcccagtccaagtctccagctacgagcctacgactgccaggtctccgcttgtcgccgtcacgcgcgcgcaggggcagggcgcaccatccccgcgccgccatgtccggcaccgggtgcctccccaccgacggcccggccctatcccgggtctgccgggacggcgcggccgccgcacggctcaagacggggtcgctgctggccattctcgtcgccagcgccgtcggcatctgcctccccgtcgcgctcacgcgggccttccgcggcagcccaaactacgcgcggggcctgctcctcgtcaagtgctacgcggctggggtcatcctctccacctcgctcgtccacgtgctccccgacgcgcacgccgccctcgccgactgcgccgtcgcctcgcgcaggccctggagggacttccccttcgcgggccttttcaccctcgtcggcgcgctgctcgcgctcctcgtcgacctctccgcctcctcccacctcgaggcccacgcccacgtcggcgcccaccacgaaactccctacgccccgatcccgaagaaggtacccgtgttcgagctcgccggcgaaatgagccccaagaagcgcgctttcttgggcgacgaccgagaagaggaccccgcgccgcacgccgccaccaacggcgcagacccggaccgcgacgacgtggcgctcttcggacccaagaagggcgcccgcagcgacgaggtcccggccatcactgccgggtgccatgccgtcgcccatgaagtggtggaggtaggggaggggcccggtgaggacgaggaggaggccaggaggaagcagaagatggtgtccaaagtgctggagattgggatagtcttccactccgtcatcatcggagttacgatggggatgtcccaggatgtctgtgcaatccggccacttgtggttgcgctctccttccatcaggtgttcgaggggatgggcctgggcggatgcatcgcacagcccccttgtgtcccctgatccctccgtctatggagtttaaaatgattcctggaccctggtcgaaggttccccgtggtccacaacaattaacctgagtgagcttttttgtactgctcattgcatttattttagcaataaaaagctgaatgctgaactttttgcaccatgaaaagccatgtggccaatccgtcctctttttgccaccaacttctgttggtttatgactcatcaaatgtttggacaatgtttaccttttgtcctccttcccccatagaaggcaatgaagctgatgtgttatgcacatataggaggagcgacaaagcatatggcattataaggcttaaaagtcctttt

SEQ ID NO: 150302 - DNA, 1732 bp, Zea Mays
ttcaacaacaacaataataatactgatgaagcttattgctgtttatttcatccaattattgcatgcaatgatacacatgcatggaaacgaacatgcaatccaaaagctacgccgaggcgacgctgccgaggcggacggcgttgacgtagtccctggggctgtgcgacgcgatgccgggcacgagcaggccggtggcgcggtagagcagcgagacggcgccctcgcggtagtccttgccctccttggcccacaggaaggcgcccttgaagaggtccccccacgcgttgccgtacatggacagcaggtacctggggtcgaagtagttcttgttgggcgcgtcgccgcccttggcgatctcgcggcccttgtaccagccgtcgaagtagacgcaggtgccgccgtgcgcgaagtcggcgacgggcggcgcgtcgaagggcacgcgcgggaccacgtcgtagcggtacaccacccggagcggctccacgggcacgttggcgcgcacgtagcccgcgaacaccttgtcgcccacgcgcggctgcccgtaggtgaccacggagagcaggcggtccaggacgccccgctccccgtggaacgccagcagcgccgggaagatggccgccagcgcggcgccgaggctgtggccggtgaccacgacgttggcgttcgggtgcttctgcagctgcttctggacctcctcgcgcagcgcgtagtaggccagcggcttgcccgggacggcgttgggggcggccttggggaacgcccgcgtggcgtccttgccgtcctcctcctgcaggcccagcgccttgaggaagccgacgtggacgtggcccagctcgcccatgcccagccacgacaggttcacgtccgtggaccagtcccgcatgttgaagggctccgtgccccggaacgacaccaccaccacgctcgcgtcctctgccttgtcggtgaacacgaacgcctgcgtcgtgtggtcgcccacgaacttgttccagcagttgtagaaccctacgaagtggaacttccagacgttgttgacgacgttctcgatgtaggcggcgttctcgtaggcgatcttggcggccatcatgctcacctcgaacacggagaaggtgcggaggcggacgagccgcccgttcacgtactgctgctgcaccagcggcaccgccgcgctgccgctctccacgtccaagtagtagtcatcgccgccggatccggcggcggcggagacgcccaccacctgcagccgccggtcctctgggccgccgctggctggcagcggcttcagctccgtcctcccgtcgatcatcccgatcatggaccggaagttgggcgcctcccggttcagtgggatcaccagcttacctctgaagaggttgagaaagatgccgagtatgccattgttgagcgcgacgaagttgaggaggaactcgacgacagcgccgaccacgagagccgggtagtaggcgccggcgagcgccttctggatgacctgcgtgagcgcgacgagccagtcgccgggcgtgctgcccaggtcggcggcggtccggtcgccggcctccacgaacgcgtagctggtgatggggcgcctcaggagcagcatcgacagcacgtctatgaaccgcaccttctccggccggatgatcagcttctcctcccccatcttggggtggccggaggcagcagcagcgacgaccgcctgcttcgccgccatatatatggtcgtcgtcgctag

SEQ ID NO: 150303 - DNA, 255 bp, Zea Mays
atggactacacatcagatggagattctgaggttgaagcttatggatccagcacttttgagcttctggaatcaggagatttaaaaatgatgagtgatgaaggcttgtaccgatgccccttttgttcagatgacgagaaggaccacagtctaaatgatctgctgcagcatgcctctattgtaggagctgcacatgatcggcaagccaaagagaaggcggaccaccgtgctcttgcaaggcatttgaagggatcctga

SEQ ID NO: 150304 - DNA, 2017 bp, Zea Mays
atgcatggtggaaccctagagcttcacccctttttagcaccagcattccgccgcacgacctcactcaccacaggtgcggcggcgcacactgctgcacactgcactccctccgtcccgcgtccccgttcggcgctctcggcacgaccgccggtagcccgggacgcacgtcgcacggccccatccctcctagcggccggtgacggcaccggcggccctttgctcggctgtgcccaagctgcgagggcgagatctacccccgcgtccgtgcatcttcgtcaggcccttctccggacgagcactcacaggatgtgttctgaagttcatgttgagggagatgcaagtgtcggacagaagggttgcaaggatataaggcgttacaaatgtgaattttgcacagttgtcaggtcaaagaaatgcctaattcaagctcacatggttgcacatcataaggatgaacttgataaatcagaaatatacaactcagatggggaaaagattgttcatgagcaggaacataggtgccaagagtgtggccgttgtttccagaaaccagctcatctgaagcagcacatgcaaagtcactcacatgagggcatagatagttaacagcgtgaagcattggatcccatttaaagaactccaaaatgcgacgagagactctttatttgcccactggaagactgccccttcagctataaaagaaaagatcacttgaaccgacacatgcttaagcatgagggcaaattgtttagttgcaccctggatggttgtgatatgaggttcagtatgaaggcagatatgcaacggcatgttaaggaaatccatgatagtaagaacccccatcaatttgtttgtaaggaggacggctgtaacaaggttttcaggtattcatcaaagctgaagaaacatgaggaatctcatggtaggtcagcattaacctgataattaggaaattaataaatgcagagtgttcatattactcacatcatgttcatgtactagtacaagtttttcatttgtccagcatattggttctccaaatttgagtttgtttccttgcagttaaattggactatgtggaggtagtgtgctgtgagccaggttgcatgaagatgttcagaaatgttgaatatctgagggctcataaccaatcttgccatcagtatgttcagtgtgagatatgtggagaaaagcacctgaagaagaacatcaagcggcatctgcaatcacatgacaaggtgccctctgatggaaggatgaaatgcacttttgatggttgtgaacacttcttttccaacaaatcaaatctgaccaagcatgtcaaggcatgccatgaccagctgaaacctttcaagtgcggaatcgttgggtgtggcaaggcgttcacctacaagcatgtcagggataaccatgagacatctggtgctcatgtatacatggaaggagactttgaagagttggatgagcagttgcgtgcccggccaagaggtggtcggaagaggaaagcattgacggtggaaacactgacacgcaagagggtgaccatctccggcgaggcttcatccttggatgatggagtggagtatcttcgctggttgctatctggtggggatgattcaattgattgtcagtagccggcgtctttttgctatcaccgctgctttgtacatgggttagattatgtaatgtaagttgtttggtagactacgatggtgttcatgacgcgtttgatatattgtcagcagtatggtagtgcagggctctcatagtaaagcttgccatttttgttgtatctttaacccacgtgggtccagatgatgtgtttattcctatgtatttacttatctacatgtatccacatgtgcgactttggcgtttgtttgagattataatctgttaaaatatgttggattatataatttgggcagattataattccaaacaaacactgactaatgctctatttgtttaccctctagtttatataatctagcttaaataagttaaaagaaacaaa

SEQ ID NO: 150305 - DNA, 1710 bp, Zea Mays
atgcatggtggaaccctagagcttcacccctttttagcaccagcattccgccgcacgacctcactcaccacaggtgcggcggcgcacactgctgcacactgcactccctccgtcccgcgtccccgttcggcgctctcggcacgaccgccggtagcccgggacgcacgtcgcacggccccatccctcctagcggccggtgacggcaccggcggccctttgctcggctgtgcccaagctgcgagggcgagatctacccccgcgtccgtgcatcttcgtcaggcccttctccggacgagcactcacaggatgtgttctgaagttcatgttgagggagatgcaagtgtcggacagaagggttgcaaggatataaggcgttacaaatgtgaattttgcacagttgtcaggtcaaagaaatgcctaattcaagctcacatggttgcacatcataaggatgaacttgataaatcagaaatatacaactcagatggggaaaagattgttcatgagcaggaacataggtgccaagagtgtggccgttgtttccagaaaccagctcatctgaagcagcacatgcaaagtcactcacatgagagactctttatttgcccactggaagactgccccttcagctataaaagaaaagatcacttgaaccgacacatgcttaagcatgagggcaaattgtttagttgcaccctggatggttgtgatatgaggttcagtatgaaggcagatatgcaacggcatgttaaggaaatccatgatagtaagaacccccatcaatttgtttgtaaggaggacggctgtaacaaggttttcaggtattcatcaaagctgaagaaacatgaggaatctcatgttaaattggactatgtggaggtagtgtgctgtgagccaggttgcatgaagatgttcagaaatgttgaatatctgagggctcataaccaatcttgccatcagtatgttcagtgtgagatatgtggagaaaagcacctgaagaagaacatcaagcggcatctgcaatcacatgacaaggtgccctctgatggaaggatgaaatgcacttttgatggttgtgaacacttcttttccaacaaatcaaatctgaccaagcatgtcaaggcatgccatgaccagctgaaacctttcaagtgcggaatcgttgggtgtggcaaggcgttcacctacaagcatgtcagggataaccatgagacatctggtgctcatgtatacatggaaggagactttgaagagttggatgagcagttgcgtgcccggccaagaggtggtcggaagaggaaagcattgacggtggaaacactgacacgcaagagggtgaccatctccggcgaggcttcatccttggatgatggagtggagtatcttcgctggttgctatctggtggggatgattcaattgattgtcagtagccggcgtctttttgctatcaccgctgctttgtacatgggttagattatgtaatgtaagttgtttggtagactacgatggtgttcatgacgcgtttgatatattgtcagcagtatggtagtgcagggctctcatagtaaagcttgccatttttgttgtatctttaacccacgtgggtccagatgatgtgtttattcctatgtatttacttatctacatgtatccacatgtgcgactttggcgtttgtttgagattataatctgttaaaatatgttggatt

SEQ ID NO: 150306 - DNA, 1805 bp, Zea Mays
atgcatggtggaaccctagagcttcacccctttttagcaccagcattccgccgcacgacctcactcaccacaggtgcggcggcgcacactgctgcacactgcactccctccgtcccgcgtccccgttcggcgctctcggcacgaccgccggtagcccgggacgcacgtcgcacggccccatccctcctagcggccggtgacggcaccggcggccctttgctcggctgtgcccaagctgcgagggcgagatctacccccgcgtccgtgcatcttcgtcaggcccttctccggacgagcactcacaggatgtgttctgaagttcatgttgagggagatgcaagtgtcggacagaagggttgcaaggatataaggcgttacaaatgtgaattttgcacagttgtcaggtcaaagaaatgcctaattcaagctcacatggttgcacatcataaggatgaacttgataaatcagaaatatacaactcagatggggaaaagattgttcatgagcaggaacataggtgccaagagtgtggccgttgtttccagaaaccagctcatctgaagcagcacatgcaaagtcactcacatgagggcatagatagttaacagcgtgaagcattggatcccatttaaagaactccaaaatgcgacgaggtattttttattcttgcctgaactagtaacaggttgggatgacctcctgtgaagcttcaacaagattgcctcagtcacgctcactgagtagagactctttatttgcccactggaagactgccccttcagctataaaagaaaagatcacttgaaccgacacatgcttaagcatgagggcaaattgtttagttgcaccctggatggttgtgatatgaggttcagtatgaaggcagatatgcaacggcatgttaaggaaatccatgatagtaagaacccccatcaatttgtttgtaaggaggacggctgtaacaaggttttcagttaaattggactatgtggaggtagtgtgctgtgagccaggttgcatgaagatgttcagaaatgttgaatatctgagggctcataaccaatcttgccatcagtatgttcagtgtgagatatgtggagaaaagcacctgaagaagaacatcaagcggcatctgcaatcacatgacaaggtgccctctgatggaaggatgaaatgcacttttgatggttgtgaacacttcttttccaacaaatcaaatctgaccaagcatgtcaaggcatgccatgaccagctgaaacctttcaagtgcggaatcgttgggtgtggcaaggcgttcacctacaagcatgtcagggataaccatgagacatctggtgctcatgtatacatggaaggagactttgaagagttggatgagcagttgcgtgcccggccaagaggtggtcggaagaggaaagcattgacggtggaaacactgacacgcaagagggtgaccatctccggcgaggcttcatccttggatgatggagtggagtatcttcgctggttgctatctggtggggatgattcaattgattgtcagtagccggcgtctttttgctatcaccgctgctttgtacatgggttagattatgtaatgtaagttgtttggtagactacgatggtgttcatgacgcgtttgatatattgtcagcagtatggtagtgcagggctctcatagtaaagcttgccatttttgttgtatctttaacccacgtgggtccagatgatgtgtttattcctatgtatttacttatctacatgtatccacatgtgcgactttggcgtttgtttgagattataa

SEQ ID NO: 150307 - DNA, 3701 bp, Zea Mays
atgcatggtggaaccctagagcttcacccctttttagcaccagcattccgccgcacgacctcactcaccacaggtgcggcggcgcacactgctgcacactgcactccctccgtcccgcgtccccgttcggcgctctcggcacgaccgccggtagcccgggacgcacgtcgcacggccccatccctcctagcggccggtgacggcaccggcggccctttgctcggctgtgcccaagctgcgagggcgagatctacccccgcgtccgtgcatcttcgtcaggcccttctccggacgagcactcacagggtatcaaggaacgcaaacctccagattttgttacctcaaggagaagatacatgaatagaagcatttgccaccacctccttgcccactgcaaaaagctaagagagctccagagaatccacgctctggctgttacccatggtctccaccccaaccatcagtctgtttcctgcaaaatcttccgctgctacgctgattttggccatgtagctgatgctcgcaagctgttcgatgagatcccacaccctgaccttatcttctttactagcctcatgtccctccatctcaagttagatcaccaacgcgaagctatatccttgtttgctcgtgttgttgccgctggccaccaccttgatggctttgcggttgttggtgccctgtctgcctctagtggtgctggtgatctagtggttggtagggcagtccatggccttatttttcggcttggattggatcacgaggtcgtcgttggcaatgcattaatagatatgtatagccagtgtggggagtttgagtctgcggtaaaggtgtttgataggatgtttctgaaagatgaggtcacatggggtagcatgctgcatggtcatatcaaatgtgctggtctggattctgcactgtcgttctttgatctggttcctgtgaggagtgcagttgcttggacaacactgataactggtcatgtgcaaggcaggcagcctgtacgggctctagagctttttggtaggatggtactggagggccatcgccctacccatgttacaatcgtaggtgtactctcagcttgtgctgacattggtgctctggatctagggagtgtcattcatgggtatggaagcaaatgcaatgccagctcgaatataattgttagcaatgctctgatggatatgtatgcaaagagtgggcgcattgagatgtcattttctgtgttccaagaaatccagtcaaaggatttttttacatggacgactatgatctcatgctgtacagtccagggagatgggaggaaagctcttgagctctttcaggacatgcttagagctggaatagttccaaacagtgtaacctttgtttctgttttgtcagcatgcagccatgctggcttgatagaagaaggtagagaattgttcaacagaatgcgtcaagtatacaaaattgatccccgacttgagcactatggttgcatgattgatctgttaggacggggaggattactagaggaagcagaagatctaatagctgatatgaatctggtgcctgatattgttatatggaggtcacttcttagtgcatgtctggttcatggcaataataggctggctgagattgctggaaaggaaattataaagatagagcctggagatgatggagtttatgtgctactttggaacatgtatgcatcatcaaataaatggagagaagctcaagagttgaggcagcaaatgttgactcttgaaatcttcaaaaaaccagggtgtagttggatagaacttgatggtgttgtccatgaattcttggtagaggacaagacacatgatgatcgaagggaaatttatgaaaccttggaatacatgacaaggcagctcaagacacatatcagattatcctcatgggagcaacatggttcatccatttctgttgatgaagaaatcatagaatcatatactgctcatttgttgcatgattgattcacatgagtcttcccattaaatagccttttttgtgccgaaatcaaattcgatgatctcattgtaatttatttattattagtcttatcttgcagcgtctctagatcaagattatagtgtagaaatccactgctgtaagttggtggcaagaaattattagatatatgttgaggttggttttacttttaccagtcacttaataaaggttttagttgcaatgctggactacagagaagtttcttctaaatggcaagattattttatcatacattatctattttattgcattgtattctactttctaaatctggaagttcttattatgtgcgttactttttttaactgtgattcactcattgtcagatgtgttctgaagttcatgttgagggagatgcaagtgtcggacagaagggttgcaaggatataaggcgttacaaatgtgaattttgcacagttgtcaggtcaaagaaatgcctaattcaagctcacatggttgcacatcataaggatgaacttgataaatcagaaatatacaactcagatggggaaaagattgttcatgagcaggaacataggtgccaagagtgtggccgttgtttccagaaaccagctcatctgaagcagcacatgcaaagtcactcacatgagagactctttatttgcccactggaagactgccccttcagctataaaagaaaagatcacttgaaccgacacatgcttaagcatgagggcaaattgtttagttgcaccctggatggttgtgatatgaggttcagtatgaaggcagatatgcaacggcatgttaaggaaatccatgatagtaagaacccccatcaatttgtttgtaaggaggacggctgtaacaaggttttcaggtattcatcaaagctgaagaaacatgaggaatctcatgttaaattggactatgtggaggtagtgtgctgtgagccaggttgcatgaagatgttcagaaatgttgaatatctgagggctcataaccaatcttgccatcagtatgttcagtgtgagatatgtggagaaaagcacctgaagaagaacatcaagcggcatctgcaatcacatgacaaggtgccctctgatggaaggatgaaatgcacttttgatggttgtgaacacttcttttccaacaaatcaaatctgaccaagcatgtcaaggcatgccatgaccagctgaaacctttcaagtgcggaatcgttgggtgtggcaaggcgttcacctacaagcatgtcagggataaccatgagacatctggtgctcatgtatacatggaaggagactttgaagagttggatgagcagttgcgtgcccggccaagaggtggtcggaagaggaaagcattgacggtggaaacactgacacgcaagagggtgaccatctccggcgaggcttcatccttggatgatggagtggagtatcttcgctggttgctatctggtggggatgattcaattgattgtcagtagccggcgtctttttgctatcaccgctgctttgtacatgggttagattatgtaatgtaagttgtttggtagactacgatggtgttcatgacgcgtttgatatattgtcagcagtatggtagtgcagggctctcatagtaaagcttgccatttttgttgtatctttaacccacgtgggtccagatgatgtgtttattcctatgtatttacttatctacatgtatccac

SEQ ID NO: 150308 - DNA, 1407 bp, Zea Mays
atggagttcgcccagctccctgctccggtgactagggctcggcgtccggctccctggatgcttgccctgctcgccgccatcctgctcggccagcgcagtcccttctctgctctctctctattccctgctcactggcagccgactccctctacctcccatggacgccagccgcgcccctggttcctgcctctgctcgccgtggagtctacgcgcgcgctgctcccctattggccgcgacgagctcgccctttcttcagcccggtttctgtttctcatctgctcctgcttcgcgcgcgagtccctctggccgtcttcgctcccagcgccgcgcacactgctccttggggctcggccgcgacctcgccgtcgttcggcagctccagcgcctctgttcttccctgcgcgcgcgttccatcccgcgctcggcgcctttcctgctcccaagtccggtgccctgccgagcttgacccttaccgcgcgcatctcagctggtgcccatggccacgcccggcttcttgctccacccatagtcgaagctccttccggttgccgtcgctcgccgtcgtctcttcgtgctggccgactagtttaccgtggtcgcgcgtagttccctgctcggctaggatagtcgcgccgtcgattccgcttgagccccttcgcgttcgtcgatgccctctggctcgactctgcccagttcgcgtcctgctcgtctttgcgtcgcgcgcgtagcgttttgttgttcctgcgcgtgctgccgcgaagctctctgttcagttcacctctgtcgtgttgtcgtacgcgcgaaactgctcgtggtcgatatcaagtccgtgacgcgcgctggacacggtaaaacgttgcgtgggcttgtgtccgagcccgcccaaccgtgacctcgctttgcttctcgcgtcgctactcgccaagttcttccccagtccgcgccataaaattcactcggacacgatctcgtcgtcgttccgcgcgtcagcaagaaatctcaagaatcggatgaagacaaagctagcagcgcgatattcctcaagcgctcgacaaattgcctggatcggaaaatcgctaccgatctcgtggattcatgtcagctgtggaaacggtaagctgatgaattattcagaatagttcgatcgctgaataaattattgtgctagtgcgatgttcattaggtgctcgataattgcatgagtcacgaaactctcgtcaacttcgcggttcttgcgattatcgagccagattcagttttagcaagttatttcactattccgattaattaactgaattagtggaccgagtagaattttggcaagcatgtgtgatgatgaaatattttaatcacttataaagatgtagtataataaataaagaaagggattaattcagaatttaatt

SEQ ID NO: 150309 - DNA, 1488 bp, Zea Mays
cgcggtgctccagtggcgtcttctccttgctgtgctcgccggagctcctccagctcgaccgctcggcttcccctagcctcttcccctgcgagctcgactcctgctcgcctatggagttcgcccagctccctgctccggtgactagggctcggcgtccggctccctggatgcttgccctgctcgccgccatcctgctcggccagcgcatcccttctctgctctctctctctattccctgctcactggcagccgactccctctacctcccatggacgccagccgcgcccctggttcctgcctctgctcgccgtggagtctacgcgcgcgctgctcccctattggccgcgacgagctcgccctttcttcagcccggtttctgtttctcatctgctcctgcgtcgcgcgcgagtccctctggccgtcttcgctcccagcgccgcgcacactgctccttggggctcggccgcgacctcgccgtcgttcggcagctccagcgcctctgttcttccctgcgcgcgcgttccatcccgcgctcggcgctttcctgctcccaagtccggtgccctgccgagcttgacccttaccgtgcgcatctcagctggtgcccatggccgcgcccggcttcttgctccacccatagtcgaagctccttccggttgccgtcgctcgtcgtcgtctcttcgtgctggacgactagtttgccgtggtcgcgcgtagttccctgctcggccaggatagtcgcaccgtcgattccgcttgagccccttcgcgttcgtcgatgccccctggctcgactctgcctagttcgcgtcctgctcgcctttgcgtcgcgcgcgtagcgtttcgttgttcctgcgcgtgctgccgcgaagctctctgttcagttcaccttcgtcgcgttgtcgtacgcgcgaaactgctcgtggtcaatatcaagtcagtgacgcgcgcgctggacacggtaaaacgttgcgtgagcttgtgtccgagcccgcccgaccgtgacctcgctttgcttctcgcgtcgctactcgccaagtccttccacagtccgcgccataaaattcactcggacacgatctcgtcgtcattccgcgcgtcagcaagaaattccaagaatcagatgaagacaaagctagcagcgcgatattccccaagcgcttgacaaattgcctagatcggaaaatcgctaccgatctcgtggattcgtgtcagctgtggaaatggtaagctgatgaattattcagaatagttcgatcgctgaataaattattgtgctagtgcgatgttcattaggtgctcgataattgcgtgagtcacgaaactctcgtcaacttcgcggttcttgcgattgtcgagccagattcagttttagcaagttatttcactattccgattaattaactgaattagtggaccgagtagaattttggcaagcatgtgtgatgatgaaatattttaatcacttataaagatgtagtataattt

SEQ ID NO: 150310 - DNA, 744 bp, Zea Mays
caatatgagtggcgaaatagcttaccacaactaaatcgcctcgaacccgagagatcgacaacaacctccgggttgagacgttccaccaagcacccggcgggcgttacctttagaacttcgagctcttcgccctccaacaccggaaagtttctcctccaagccacatacacaaacacgcaaaatacatcatctagatacaagtatcagcgaggaatactcgcaaaagaaatgacaagtcctcaccgaggcggacgacgcaccatggttggctgcttgagaacaagctgcaggggcatggggatggagacctaggtaccatggatggagagacgtcgaccatcaacagagggggttaagtgcagaggtgttttcaaccaagggaaaaagaccaggcgccattgggggggatcctgcaggggaaaaactcgaccatggagatccagggcggccatgggagagctaggcatcggtctgggcgtctatggagaggagcaagggatggagcggggagcaggacggatgccgcagccagaggaagtcgaggccgacggtgtccatggctgggggcgggggcgatcgccagggaggggctgtcgctgggcgagcagctctgtcaccggtggctgtactggatgctgtcacggcatgggaagagaagcaggaggctgccatgcgtccaagcgccaggagaccaatctagaaatagcgacgtctagaacaagccagggaaagtggagaggataa

SEQ ID NO: 150311 - DNA, 150 bp, Zea Mays
atgtgcccgtctgttctcaagaaatctgtcgatgaaacgacgccttggaatttgaatcaacgaacgtcgaatagtcttcaagtggtatgtagtgtgatgatctgggttgaaatgaacggtgttgtggtccgaggtttccaagcatcctat

SEQ ID NO: 150312 - DNA, 1416 bp, Zea Mays
atggcttccgctgaggatcgcgtggggcatctggaggcctcggtcgcgcaactggcggttgctgtgcaggacatccagtccaacatagcagagctcgccaaggttgtcgccgactcagtgcagctgacgggtggcgaggcatcgggggtagatggccggcaccgtcctcaacaacagggacgccgggacggacgagacgccgacgcgatgggcggtgagcgtggcggtcgtcgcgggtttccacacgcgccccgttacgacttgccgttgttcgatgggtcggaggacccattgctgtggctgcgtcagtgcgagcagtatgggcggttgcatgacattccaagggaggagtgggtgcagatggccggcatgcatctgcgcggcgaggctcaggaggttttggacaattgggaaactggggatcaattcatttcttggccggagttctatgacaccttcttgcagcgcttcacacggcattcaacctcgggaccgctgggagatctggcaaatttgaaacagcacaacagccgagcagacgtatatgcaagggagtttcagcgacttcttgcccgcacaccaaggttgtctcggcaggatcagatcgagctctttaccgcggggttatcgtccaccctcgcggccgaggtccgtcgggatcgcccccgggacttggatgacgccatgggtttggctcgtgaagcagaacggcgggaagatctctttcttgccaaggtgacccaggccacgcggtcacgcgggtctcgtagcacatcttgggcattgggcaccgatccatcggcaagtaatcgggcgacggcgccgtcatccagtgccctcccggtggcgcctgggggatccaagctggaagggggtcgagcgttgacgacggcttcacagacttcagggactgttcccactgctccaccatattgtcgtcgtctcagtcctgcagaaatgtctgaccgaagggagaagggtctctgttataactgtgatgaggtttactcgcgtggacatcgttgtcagcgcctgttccatttggaagtgctcagcgagggtgaagaggatgattcactggaggaggaaccaaccctatctgctatagccatgaagggtctgaaggccagtcgcactatgcaggtcattgtagtcatgggtggacaacgtctggtgggcttagtggatagtggtagcacccataactttattagtagctatgctgcttctgtggtgcagatcacacagtcgtcagggactggacagcaggtgcaggtagccaatggcgctcggttgccatgtcttgggcggttgaaagatgtccagttctgcattcaaactcacatcttctcagactcctttttggtgattcccttggaaggttttgatgttgttttgggggtgcagtggctgtag

SEQ ID NO: 150313 - DNA, 2047 bp, Zea Mays
acggcccaccttccagacgctcccccggaaactccgcccactcgcacaaaccaagacaaagttgcgatgctccatgctccacgtcacgacgccgcatctaaccctccggcgactcatcgccggcgagccggtccgccacgccatagcctcgtcctgaagcgcacttaatcctacgtctcgttcctctctcgcccccggtaccctccataggcatgggaatggggtctgcgagagggggcgcagggggatggctccccggcgagcggtggcggcgggtcatcttcctcgctctggcggccgtctcgttcctcatctcactcatactcctcttcctatccgcgccgcgtctccgcctcccaagtgtcgtcctgccttacaccaccgcttccgcttctgccgtccgccgcgggcccggcgagccgccctgcctggtgtacctgctgaccggcgcgcgcggcgacgggcgccgcctcctcaggctcctcctcgcggtttaccacccgcgcaaccggtacgtgctccacctctccgccgacgcgccagacgacgagcgcctgagcctcgccaccggggtcgtcgccgcggcgcccgccgtgggagcattcgagaacgtggttattattggcaatcccaccgccgggacgcccgtggggtcctccggactcgccggcacgctccgcgctgcggccgtgctgctccggctccacgctgactgggactggttcctcaccctcaatgccgccgactaccccctcgtcacacaggatgacctgattcatgtcctttcttctgtcccaagggatcttaacttcattgaccacaccggtgacgttggatcaaaagaacctgagaaagttcaacaaattatagtcgatgctggaatttacttgtcagggaggaccaacttctttcgaggaacacagaaacgagcagctcctgaggcttttaagttctttacaggttctccatgggtcatattaaaccggcaatttatagagtactgcattcttgcttgggagaatctccctaggattcttctcatgtacttcaacaatgtaatacaacctcaggaagggtatttccagacagtcatctgcaactcactggacttccgtaatttcactgtgaacaatgacttgaggttcatggtgcaagatgattccgctcagaaaaagtcccttttcacgagcagggaacattatggtcacatggtggatagtggggcacccttcgcaaggccgtttcaggagaatgatcctctgctggaccagatcgacggcaatatactcaagcgttggagccatggaccagttcctggtgcttggtgcacaggaaggaagaggtggttcagtgatccatgttcccagtggggcgatgtgaatgttttgagaccaggtcctcaagcagtgatgttgcaccaatatgtaaatcggaccttagaagaagcaaagtctagcagcaattcatgcaggcggtagcagcattggcgtctagaacctcatgtcccatggttgaaagctttgagctttttccgcttatccactaagggttctccactctgctgaataaatagctgccacatgtctaagctgaaacaagcactcgtcgcacctggaacaaagccatggagggatgttcttttctgatattttcatgatgactatcatagtcacggatcaggagtttcactttggtctgtgattaatctgtgcaatccccatatttggctcatataacacttccaggcgctgataataggctgaagcttatataactactgttgtttatatgttgcggttatttgttggacagcttatattcatgctagtagatcaagttacgaatcccttatgctcccctgttgtgaggactgtagactgtagaacaagggattttgttacttgttagtcttactgaattcatgttgtgctttggacttacataatatgcctagtcctgtattgtacctaaaatgagactccagtcatctcagtttacctttgaggggtgtttggaagcatattattttttgcagtttcaaagcaat

SEQ ID NO: 150314 - DNA, 679 bp, Zea Mays
cattaggaaggtcttgaggaagctacgtctgatgatgattgtcaatcttgaggccacaatggagttattcgtggagcttcgagttattggaggtcgagctgtaaaaagctagcgttttttgcatattgtacacagtatcaggaggatgagccagaagcacaagaatgggctgatgagctatcccctgatgagcttgagcgcctcttgaatcatgaccatggttggttgattgccaacccccaccagttcaaggtccctagctggttcctcaacaggaaaaagtactacaaggatggtaggttctctcaggttgtttccaacgcccttgacaagaagctcagcttagggatgactctaggctgaagaagaccaggaaccactatggtctgtcactactggggtctacttgtccgtggccagcacaccaagactaccaaaaggcatggaaagactataggtgtgtcggagaatagataaagtcaatttggtgcctaccttggatatttattatctgtaggatagatgaaccgttctggtttatgaaacttttgttgcgtattccaagctggttgaattgaatgttcttaagaaccaatgtcattagaaaagttaaaagattcaataatttgaaatggttttaccacacgaatttggtatatcatagtgatgcttatcgttt

SEQ ID NO: 150315 - DNA, 1316 bp, Zea Mays
tttcctccatcgacctcgtccatatcttgtaggccattgaagtcgacgctaaagcaggaatggagagcatgagggcccattcttcattctcccgaatctcatcgcgcctcgcactctccccgctccagccatagcggcgagggccggatcggttccggagacagcgcccatgtcttcgaagtcttggatctggtgggtctaggacgcggttatggggctggtggtgagcgccgccatgaggagcggctggacgatggtgttgggaatggagggaccaccgatggcaagctgagtctgcgggcaggcccgaggtgttgacactgccttggtccctcttcacaaaatcaccacggtggcgcatgcgggtggccttcgcctgcagcgtatgtgggcagcgtacgaccaaggccatcaatcctcatgcctacaccgatggaactatgtttgttcagatttgtaatgcagttgttcaatgcaactcttgtcctcccaatttttttgtgcagtaatgtttggctggccaaaaggatttggcaatcgcttatctttgactcaataccttatgacctcgaaaaggtttgaacccgttagggactaaagatgccaaaggttgctgtggagaagttcgtgagtttatctattctgataatgggactgtaaccatgatacaatcaatctcaaatgaacttaaggataataagggtcaacatgagatatgttgttctaaaattgaaacaataaaggcaatagtcctctgtctttttaaattttttggctcgaaattcattggtccaattttgacctcggaaagtcagaaaaaatgcttgtcatttggtcaattagctagcgacatgatattaagtgttgtagcgtggtcaagggtctggaagatgagtaggcggaacgtggttgcaatagatcctattcaagtgtactatgtggaagggatcttggagcagttggcgttcgtggaggagtcgaagcgcaaggaggactgggtcgtcaggaaccaggagcgcagggcggccaaacgcaatcgcatccgcgacgagcacaagtatcaggaggatgagccagaagcacaagaatgggctgatgagctatcccctgatgagcttgagcgcctcttgaatcatgaccatggttggttgattgccaacccccaccagttcaaggtccctagctggttcctcaacaggaaaaagtactacaaggatggtaggttctctcaggaaccactatggtctgtcactactggggtctacttgtccgtggccagcacaccaagactaccaaaaggcatggaaagactatag

SEQ ID NO: 150316 - DNA, 149 bp, Zea Mays
cattaggaaggtcttgaggaagctacgtctgatgatggtcctcaccggcataaccttttctttgcacactaactgattgaattgacacatcttgtgtaccattgaaatctgaccacttcttttgccaacccctcttttgttaaaaataa

SEQ ID NO: 150317 - DNA, 861 bp, Zea Mays
cccctgcctgagagaatcggctcggacagtcggactcgatcatcaattaagcgaacctcgccgcgatcgtatcagccatggcgaccgccgcgcacgagggcgtgacccagcgcgtcgctgccagtggcagcagggacgacggcgccagcggcggcatcgcggcggtctcgggtcccaacaagaagccgggcggcggcaggaggcggcgcggcctccgttcggtcgccgccgcggtgtccatccccgcggcgctcgtggctctgtccttcttcgccgcgggccactccacgccgccgccgagttccgccacggtggcggtggtgcgggccgggtcggtggcgtcggaggcggtgctggcgctggcggcgtggatggcgtgggcagagggcgggctgcacgcgcgtccggccgccacgctgctgccctacgccgcgcggctcggcgccgcgctcgcgtgggcgccgctcgtgctgggccgccacgccgcggcgcgcgcgggcctcgcctgctgcgccgccatggccgtgggcgccgtggcgtgcgcgcgcggcttcggcgccgtcaaccctgtggctggcgacctcgccaagcccgccgtcgcctgggccgtcatcctcgccgtcgtcaactacaagatgctctgagctcccgagaacacgcgcgcgctgttcgtgttcgatcctcggcagccaggcccctggttatttgttgtgaacatgtaataatgcgttggtttgtgtacagtatacgttctgagtatgttgttgtgtcctgcatattcatctgagaatgcagccaggcccctcgtcaactacaagatgttcttaaatttcgattgcgatgtaacaatgtatgtgtata

SEQ ID NO: 150318 - DNA, 1040 bp, Zea Mays
gcaaattcgcatagtatccactcatttcatatagcaaagcaacccccaagcataatctcatctcagttaactgaaacattgatacagacatataggtaaaacattggcatagatggcaaacaagtacttgagtgcctctcctattcctcatatcatcatcatatcatctaatgcaggtcaagattgtctattttaacggccaatttacaaatgcgagcagcccttgctgtggcaggacccataagcacgcaaatcaccataacgcacctcaaatcatggtaaaagttgacgcaccaccaccttgcaggagatcgccacccccgtggtattgcactagtctgggagctgttttggacttttgccactgaccaccaatcaggcaaggtatttgtacgtattagcgttgtccttgtcgcgctccaagtagtcccttgtaatgagatcctcaatcctcttctttatggctttgaagtcaggcttgaacatgcggctcagctgctcaacacattcagcaaccagctgttgatgacccataactttgcggctcttcataatgcgcacaattgatgcatcaattgcatacctcctgtctttgtcaacatcttcaacaacctttttcttctcatcaacaggagggagaaataccttgattcttctcattctgtcagtaaactttgaattgaactcaaaaacatcattgggagagatggatctactagccggttccttgttaaggatcttgtacttcgcacaagaaagagaatggagcaaacgcactacatcatcatctgacaggtttaattgtgttacaatctcagaataactaagcctgtcagatccattaaacaaaaagatccaagactacctgatatgttgtaacaataagttcaataggtttagcatcaaacttagcattgatgttgcaggttcccaaggaataaatccatgtcagcttcctgtgctttgttcttgtttgatagaactccttgaaaacctctacacatttcacctagaagcagacatatataaagtcatttcca

SEQ ID NO: 150319 - DNA, 123 bp, Zea Mays
tttttttttctttttttcttctcgtttctttctttcttctttttgtgctcacaaggattgtcgcgtttgtgcaatagcacatgtccaatgcgaaataggaaggaaaacgctgctaccaaaaac

SEQ ID NO: 150320 - DNA, 2449 bp, Zea Mays
cgagagcaggagacagaggggctccccccccacccccgagcccaaacgcagctagctccccattccacccaagctcccgcagccagatgctctcccccgctcgagccccaccgccgccgcccgtccccgccgccgggtagaccgcccgatccgacggcgcccgccgcacccatgggccgcggcggcgcgcgcgcggcccccgccgccgcggtgccgccctggcacgcgctcccggacgaggtctgggagcacgccttctccttcctccccgcggactcggaccggggcgccgccgcgtgcgcctgccacgcctggctccgcttcgagcgccgctcgcgccgccgccttgccgtcgccaactgctacgccgcgtccccgcgcgacgccgtcgagcgcttccccgccgtccgcgccgtcgaggtcaagggcaagccccacttcgccgacttcggcctcgttccgcccgcctggggcgccgacgccgcgccctgggtcgccgccgccgccgccggctggccgctgctcgaggagattagctttaagcgcatggtcgtcaccgacgactgcctcgagatgatcgcggcctccttcaggaacttccaggtgctgcgcctcgtctcctgcgagggcttcagtacagccggcctcgctgccattgccgctgcttgcagaaatctaagagaacttgaccttcaggagaatgagattgaggattgctctattcattggctcagtctatttccagtatctttcacttctttggtaactctaaatttttcatgcctagagggggatgtcaatatcactgtacttgaacaattagtaaccagatgcagcaacctcaagactctcaagctcaacaatgctatacctcttgacaagcttgctaacctccttcgcaaggctcctcagattgtagaactcggaacaggaagattctctgcagattaccatccggatctcttttcgaagcttgaagcagcatttgctggctgtaaaagcttaagaaggctctctggggcttgggatgccgttccagaatacctgccagcattttattgtgtatgcgaaggcctcacatcactaaatctgagctatgctactgtacgaggccctgaactgattaaattcattagcagatgcaaaaatttgcaactcttatgggtgatggacttgattgaagaccatggtcttgctgttgtggcatcgtcttgtaacaaactgcaggagttgcgggttttcccttctgctcctttcgaagcagctgagcaggtctctttgactgaaagaggtcttgttgatgtatctgccagttgcccaatgctggagtcagtcctctacttttgcagacggatgaccaacgaggcccttattaccatcgcgaagaaccggcccaacttcacttgcttccgcctatgcatcattgagcctcacacaccagattacattacacaccagcctcttgatgcaggttttagtgccattgtggaatcatgcaagggcctcaggcggctttctgtttcaggccttctcacggacagtgtatttaaatccatcggggcacatgctgaccgtcttgagatgctctcgattgccttcgccgggaacagtgatttgggcctccattacatcctatcgggctgcaagagcttgaagaagctagagattagggactgcccatttggtgacaagcccttgctggcaaacgctgccaagctggagacaatgcgatccctttggatgtcgacgtgctcaatgaccttgggcgcatgccggcagcttgcgcgcaagatgccccgtcttagtgtggaggtcatgaatgatcctcgacggggattccccttggactctctaacagatgagagccctgttgagacgttgtatgtctaccggacaatttcaggtccaaggtccgacacaccagcttgtgtccagattctctaaggggcagctgtggtctacaaaggtactatggaagcatccattttcaatcacatcatgtaccttcaacaccttactagcataacctggatcgtctccttgaagtagcaaggctggtgacctcggtaatcctgtcataatctctgcttagctgtacaactgtttctgggagtttagggtgagagactcagggtccctttcaggtgttaataactgtagggaggacactcgatgagttacaggaactactagatagcgtcttgaggaaacttgggtttgttttcttagcgtgcctagttcttttcatgtataaaaaaatatgggatcattccaatgctgccacaatgtactgtactattggaacaattgtacttggagcctctacttttttgagttttgaccccctccccccccccccccccccccccccccactgattatgggttgctgttgctcccgcctgtgatttgtgaatgctatataaaagcttgtacgtggctctgccttc

SEQ ID NO: 150321 - DNA, 1166 bp, Zea Mays
cgagagcaggagacagaggggctccccccccacccccgagcccaaacgcagctagctccccattccacccaagctcccgcagccagatgctctcccccgctcgagccccaccgccgccgcccgtccccgccgccgggtagaccgcccgatccgacggcgcccgccgcacccatgggccgcggcggcgcgcgcgcggcccccgccgccgcggtgccgccctggcacgcgctcccggacgaggtctgggagcacgccttctccttcctccccgcggactcggaccggggcgccgccgcgtgcgcctgccacgcctggctccgcttcgagcgccgctcgcgccgccgccttgccgtcgccaactgctacgccgcgtccccgcgcgacgccgtcgagcgcttccccgccgtccgcgccgtcgaggtcaagggcaagccccacttcgccgacttcggcctcgttccgcccgcctggggcgccgacgccgcgccctgggtcgccgccgccgccgccggctggccgctgctcgaggagattagctttaagcgcatggtcgtcaccgacgactgcctcgagatgatcgcggcctccttcaggaacttccaggtgctgcgcctcgtctcctgcgagggcttcagtacagccggcctcgctgccattgccgctgcttgcaggtgaggccgcgcatccaggcccagattcgacttatagactacaaagctgctctgcgtggttcttgctttcatttccgcaaagatttgatttgacctttcggggagtttcttacaggagtatttgacaaaataaaaaaacacctctggttccttctctcctcaccttttccatttacccccacaaattttggtgtcattttgggtagttgtgacctgaagtatatctttttaggagaaactgatttgaacttctttgggggagattttgagctcagcatttggtcttttttgtgtgcttgttgagtagtatttgtaaacagtagtcgcctccagtttagatttggtgtgatctgctgtgtttgtcctgaggtgaatactagcgtgctgttttagattcttactcaaaagattgatttgtactctatctgaaaggattcgcaggggatttcaatacaattttggtgctcatgtcgccatcaaaagtttgaccttaga

SEQ ID NO: 150322 - DNA, 207 bp, Zea Mays
atggcatggtggggccgcgggggctgcgagcggggctcgctggcggctcgacagagatggaacgagcgggcagcgcagatgcttttcaacggcagcagcacggcggagcatgagtgtgcagggaggggaggacgcgacacagggccgatggggtctactttggtctgggcactggggatgggagagctcgccgcgccgaggggctag

SEQ ID NO: 150323 - DNA, 88 bp, Zea Mays
ttcagtcgccttggcagagagccgcttgttatggtcccctgaatcacaatgcattatggtgatgaatcaggccgtgacatattgtaaa

SEQ ID NO: 150324 - DNA, 314 bp, Zea Mays
gatccggcctacagagacacaggtgctggtgtcaatcctgggaaaggaccttacactagctgcagagctcgcgagcgagctgtggaatgctgggttaaaggcagaattcaagctcactactagggtggcgaaccacatcaagtatgccttgcaatcaggcattccgtggatggtgctagtcggtgagtctgagttgcagaagggaagtgttaaattgaaggatgttgaagccaaccaggaagaagaggttgataggaaggattttgttcaagagctgaagaagagattgagtaaacccaacattcatttgaggc

SEQ ID NO: 150325 - DNA, 2696 bp, Zea Mays
gacggagacagtgggactgactgactgacatggcccactcggatggtgatgccttgcagcgcggccgctcaaagggggccccaggaagacggcggaccaggccacaccggcggccggccgccggaggggaggcgccggcggcgccgccgccaggctcatggagaagatcgtgcccggagcgcccgccatgaagaccaagtccagcaagaaggaccagtacctgctcaagcgccgggacgcgcccgaggcctccgcacacagccagccgcagctcccagacgcgccgccgccggcacccacgctcgcggcggaggacggaccacctggcttcccggccagcggcgacccgcccacaccgccgctgcccgggagctccgtcgctgacgaggacttcatgctgcagaggcgcgtcccgctcgtcgatgtccctcccgccgtccaggcccagccgagcgagggccccgccgcgcccaagaacgcgaccaagctcaagaagccccgcaagcgcgagcgggaggaaggccccgatgcaacccccgactccgcggacgccgccggcgaccccaagaagaagaagaaaaagaagaagctttccgacgtggacggcgctggcggcaaggtcgccttcgtggttgagggccgcgacgtgcttgatctgacgcaggtactatcggacatccggaacctcccgctggctcccttccatggcgccgaacgtctcatctctgacgccgctcgctccttcgtcctcgcgttccgctcaaaatactacaagaagagctacgagaacgacccacccgaggagttgaagagcctggacaagcccagtgccgccgccactgacggccagtcgcccaagaagaagaagcctgccccgaggcctggcgcagggaacgaccccaccaaagccggcgtcaagcgcgggccatcggaccgccagggggagctggccatcaagaagaaagccaagctcgataagatcaaggtactgtccagtgagaagaaggccgccggtctggagcagaaagacacggcggcggcggcggcgcagcagcaggcacgggctgcaggcgccaaggacaaggccgagatgggcgcagccaagaagaaggagccggcgtcggctcgcacagtcaggaccccgtcgccgacagcgctgatgatgaagttcccgctgaacagcacgctgccgtcggtggcgtcgctcaaggcgcggttcgcgcgcttcggcccgctggacgtggacggcatccgcgtgtactggaagtcccacatgtgccgggtcgtgtacaggttcaagttcgacgcggaggccgcgctcaggtacgccaaggccaacgccatgttcgggcaggtggacacgcagtaccacctccgcgaggtcgaggcgggggcgggccgcgagccgctggcggcgccggaagcagccccgcagcagcgctccgagctgcggctcatggagaccgctgcgttcaggcccggcacctccggcaacggagctccgctgcccatgtccagggccggggccgcgccggcgcgtccggccgtgggggtggggcagccgcccaagtcgatcttgaagaagagcaccgacgagggaagctctgggaccaccagggaggtctcccgtgtgaagttcgtgctggacggcgcggacggtggcacgctcgcgccgccgccgagcgtcggcggcaatggcaatggcgcagacgggggctcatcaatggtggccaaggccgctaaatccgtcgggttcgctccttcccaggctctgcagccaccaccgcgcacgctgcagccgcccatgcgcccggcgcaccagcagcctccgcgcgccgccgtcacgcagcagctcccgccgccgccgctgcctcagcatctcccgtaccaccagcacccccgcggcgccgacgggactccgctggcccctcccccaggtcagctgctggcatacccgcctcgtggccacggcgagggcccctccgcgcttcctgggctaccgccgccgctgccgtaccagcctcgccccaccggcttccccggtggacagcagctggggtacccgcctcgctccggtgacaacctgccactcctcgctggacagccgcagttcccgcctcgtcccagcaacgccaaggctggcagtgagggtccagcgtggaggaggggggagaaggagttcaaggaggaggtgtggaggctgatgacggggatcgccaagatggtggagcctctcacggacaagaacggcttcttcccctaccacctgttccgagcgcagtgagcctgctcccagttccccacgggctcgcatgcacgagcgcagcagaggtggggtcgccgcagctgagctgcatggagctgccgcgttgtatccgtcgggtcgggccccagggccagtggtagcaaaatagccgtaatagcaaccgggccggagagagtgaaggctggccggtgcctttgttcctttggtaacgtatgtgtggtttcgtagtactctggtttatgctccgtcgtgtagactctgggctgactgggaagtagacttgtacaataggatgttgtagtgcttgttttgttttgtttttgaaatcatcttcattttctatttaataataactgcagtattatcgatcgaaaaactcgggctagtttagaagccacaaaactggagaggattaaagattgaaaaactc

SEQ ID NO: 150326 - DNA, 834 bp, Zea Mays
gacggagacagtgggactgactgactgacatggcccactcggatggtgatgccttgcagcgcggccgctcaaagggggccccaggaagacggcggaccaggccacaccggcggccggccgccggaggggaggcgccggcggcgccgccgccaggctcatggagaagatcgtgcccggagcgcccgccatgaagaccaagtccagcaagaaggaccagtacctgctcaagcgccgggacgcgcccgaggcctccgcacacagccagccgcagctcccagacgcgccgccgccggcacccacgctcgcggcggaggacggaccacctggcttcccggccagcggcgacccgcccacaccgccgctgcccgggagctccgtcgctgacgaggacttcatgctgcagaggcgcgtcccgctcgtcgatgtccctcccgccgtccaggcccagccgagcgagggccccgccgcgcccaagaacgcgaccaagctcaagaagccccgcaagcgcgagcgggaggaaggccccgatgcaacccccgactccgcggacgccgccggcgaccccaagaagaagaagaaaaagaagaagctttccgacgtggacggcgctggcggcaaggtcgccttcgtggttgagggccgcgacgtgcttgatctgacgcagagctacgagaacgacccacccgaggagttgaagagcctggacaagcccagtgccgccgccactgacggccagtcgcccaagaagaagaagcctgccccgaggcctggcgcagggaacgaccccaccaaagccggcgtcaagcgcgggccatcggaccgccagggggagct

SEQ ID NO: 150327 - DNA, 1357 bp, Zea Mays
cgatcccggggtcacaccgtccgaagcccaaaccaagcccagaccgatcgaccctgtccaaagcttatctaggttttcggttcctccacaggatggccgatcccgccgccggaggcgccatggtccccgctgccggaggcggcagcgtgtgggcgaacggcgccccccgcttcggcgacatggtctgggccaaggtgaagtcgcacccgtggtggccgggccacatctacagcgtcagcctcaccgacgacgaggaggtgcaccgcggctaccgctacgggctggtcctggtcgccttcttcggcgacaaaagctacgggtggttcgagcccagcgagctcgtccccttcgaggagcacttcaccgagaaggcggcccagggcggcagcacccgcagtagtttcgccggcgccgtggcggaggccgtcgacgaggtagcccgtcgcagcgcgctagcgctgctctgcccgtgcaagagccccgacgccttccgcccccaccccagcgacggcaacttcctcctggtcgatgtcccggcattcgacactgacgctgactaccaccccgaccagatccaggccgcacggcagcggttcgtgccgcggaaggcgctcgactacctgctggacgccgccgtgactcagcgggacgcggcggaaaaagcggcgcgcaccgtgcctgggatggagatggccgcgctgttctcggcgtaccgtcgcgcagtgttctcgccgatagacaacacctacgcccaagcgttcggggtggatcccgagctggcgcttgctgccgagcagaaagccgcggcagagcgagctcaacgagggatctaacatgaaagattccgatggtacatcactgaccattgagcctgttggactagcgattggcgtgcgtgcgtgccccattgctgcgattggaggctttctgagcttcctcttgaggacgaagctctatggggaaagagtggtggcaatgtagattatacgctggggaaagagtgtagattcagcctaacttgatagctcttggcaatgttttgcacagggcttggagcatatagcaggctcctttttgcaagcctatttagattaagcacaggcaagcactagatcaaaatgaaacactaatcctggtctcctggaggtggcatcggaaacaggaagcagtgcagaatatgacgtaggagtattctccttggtggtggtggtcgtcagcgtacttttgtgttcttttccttgcctcctaggtcttggcttcctgctagcccggaccagtcaccctgcagctggtcgcttggcccagcagagcagtgtggttcagactctccccaacaaggttttgtttagttactcta

SEQ ID NO: 150328 - DNA, 1021 bp, Zea Mays
cgatcccggggtcacaccgtccgaagcccaaaccaagcccagaccgatcgaccctgtccaaagcttatctaggttttcggttcctccacaggatggccgatcccgccgccggaggcgccatggtccccgctgccggaggcggcagcgtgtgggcgaacggcgccccccgcttcggcgacatggtctgggccaaggtgaagtcgcacccgtggtggccgggccacatctacagcgtcagcctcaccgacgacgaggaggtgcaccgcggctaccgctacgggctggtcctggtcgccttcttcggcgacaaaagctacgggtggttcgagcccagcgagctcgtccccttcgaggagcacttcaccgagaaggcggcccagggcggcagcacccgcagtagtttcgccggcgccgtggcggaggccgtcgacgaggtagcccgtcgcagcgcgctagcgctgctctgcccgtgcaagagccccgacgccttccgcccccaccccagcgacggcaacttcctcctggtcgatgtcccggcattcgacactgacgctgactaccaccccgaccagatccaggccgcacggcagcggttcgtgccgcggaaggcgctcgactacctgctggacgccgccgtgactcagcgggacgcggcggaaaaagcggcgcgcaccgtgcctgggatggagatggccgcgctgttctcggcgtaccgtcgcgcagtgttctcgccgatagacaacacctacgcccaagcgttcggggtggatcccgagctggcgcttgctgccgagcagaaagccgcggcagagcgagctcaacgaggaggcactgcgataagctggttgggtccgcatgtacacggtgaaggggaaggcactgcgctccacattgatccattgtggtgctccttagctattggtatttatataagcatgtatacgatatgtcagaatagatatgttaatcagagcattcagagtaactggtttggttagactgtgctccttgagggcttgtt

SEQ ID NO: 150329 - DNA, 1031 bp, Zea Mays
cgatcccggggtcacaccgtccgaagcccaaaccaagcccagaccgatcgaccctgtccaaagcttatctaggttttcggttcctccacaggatggccgatcccgccgccggaggcgccatggtccccgctgccggaggcggcagcgtgtgggcgaacggcgccccccgcttcggcgacatggtctgggccaaggtgaagtcgcacccgtggtggccgggccacatctacagcgtcagcctcaccgacgacgaggaggtgcaccgcggctaccgctacgggctggtcctggtcgccttcttcggcgacaaaagctacgggtggttcgagcccagcgagctcgtccccttcgaggagcacttcaccgagaaggcggcccagggcggcagcacccgcagtagtttcgccggcgccgtggcggaggccgtcgacgaggtagcccgtcgcagcgcgctagcgctgctctgcccgtgcaagagccccgacgccttccgcccccaccccagcgacggcaacttcctcctggtcgatgtcccggcattcgacactgacgctgactaccaccccgaccagatccaggccgcacggcagcggttcgtgccgcggaaggcgctcgactacctgctggacgccgccgtgactcagcgggacgcggcggaaaaagcggcgcgcaccgtgcctgggatggagatggccgcgctgttctcggcgtaccgtcgcgcagtgttctcgccgatagacaacacctacgcccaagcgttcggggtggatcccgagctggcgcttgctgccgagcagaaagccgcggcagagcgagctcaacgaggtatcaacactcacacgcccaatcctagctgtattattgactgcgccgttgttcttgttgctctgtacttgaaattgatggctaaacaacgttattactgcactgcttctatagatcaagcaacgaattattttgatgtgaatagcggagtggatctgattcaaatagtttctattctgctttttctgttgaactgctggttgcat

SEQ ID NO: 150330 - DNA, 1142 bp, Zea Mays
caagcagcagcacccagcgccagcgcaaacgtcatgtcgcctctcctctgtctctctcgcagctgaagtaggcagaagctgcacacatctatatccattcctagctgctagtcgtcggatacttggaaaccttggatctcgcgcgcgcacgtaggggagcgcagcggagcaagaggaaagccatggctacgccggcggcggtgatgaagttgtacgggtgggctatctcgccgttcgtgtcgcgggctctgctggccctggaggaggccggcgtcgactacgagctcgtccccatgagcccccaggccggcgaccaccggcgcccggagcacctcgccaggaaccctttcgccatggtgccggtgctcgaggacggcgacctcacgctctttgaatcccgggcgatcgcgaggcacgttctccgcaagcacaggccggagctcctgggcgccggcgccggcggcagcctcgagcgggcggcgatggtggacgtgtggctcgaggtggaggcgcaccagctgagcccgccagcggtcgccatcgtggtggagtgcttcgctgcgccgctgctcggccgcgagcgcgaccagacggtcgtcgacgagaacgtggagaagctcaggaaggtgctcgaggtgtacgaggcgcggcttggcgagtgcaggtacctcgccggcgacttcctcagcctcgccgacctcagccccttcaccatcatgcactgcatcatggccaccgagtacgccgccgccctggtcgaggcgctcccgcgcgtcagcgcctggtgggagggcctcgccgcgcgccccgcggccaagaaggtggcggagttcataccggtcggcgcggccggactgctggagcaccctcccaaacaacaggattgatgcatgatgaagcaagcctgcctaatgtgcctgttgcgcttaatactttcccacgtgtactttcccacaacgttgacagaagttattcaataactagtctctatgtaacgtaatggtgtggtgtgcacttcaatgaataccatgaggtggctggttcaactccctcctgtcaacgttgtggggccgttcccttttgtaattcttttttttccaaaaagggacatctttagagcaactccaagagaatgttaaaaa

SEQ ID NO: 150331 - DNA, 542 bp, Zea Mays
aaaaattgaagagagtgcaatcccttagctatggagggtcaaagtttccacaaagacatttaaaattagtacttcaggaaagcattgtgattgcaaagagaataatgagaataacctggttaccatggttgagaataacatcacaattgcagcacacttgaagtgccaacacaaattgggcagtaggtagcttaattggagaatctagaatcttgtaaaatgaactaaaaatttattttaaaaatgctggcacgatactgaaaaggcataaaagatatgcaacggtcatggatatcacttggtattttagcacatatgtcaagtcagatcttcttggtttcaagcattctagaaaccttattcactgcttcaactgcacacataaaccgggtttcgatgtccttcatgcttgacacaaaatctttggctcaatgagtgatgaaccctgaaggatcctctgcctctacacatcatcacaatatacacatcatcatagtctgctatatataaaaagcttccaccaattagaaatcttgtttatg

SEQ ID NO: 150332 - DNA, 1123 bp, Zea Mays
ctggcccttgctttgcggtgcccctccactccatcaacgccagccgccagtccccccgggcggcgctaccctcagctagctccgtaaaccagcgagtacggccgaccagaccaatggcactgcggctacccatctcctcgacccacgggctggcctcctcgccagcgcccatctcctccacgacgacgtgccggccggccgccgccagtgggagcttgatcccgccagctgccctggtcgcagttgccatccgctgggcgtcggcgtcggcgtcccaaaagaggggcctgctgctgacgacggcgaggggcggcggagtcctcgcgccggtgaggtcgagcgggatcgagacgacgacgacctcggtgggagctgaggccgtcaccgggcaggtcacggaggtcaacaaggacaccttctggcccatcgtcgaggccgccggcgacaaggtcgtcgtcctcgacatgtacaccgaatggtgcgggccttgcaaagtgatggctcccaagttccaggagatgtccgagaagaacctggacgtcgtgttcctcaagctggactgcaaccaggacaacaagcctctcgcgaaggagctgggcataaaggttgtgccgacgttcaagatcctcaagggcgggaaggtcgtgaaggaggtcaccggcgccaagatcgacgagctagcggaagccatcgagatagccaacaagaagtcaggctgacaaaggaatagcaagatcgacgtgcagtgcaagcaaggatgaatggatgatcgatgaactagctagtgaagactgcgaatgaatgcgccccggccgcgcatttgtgggaccggcaacatgcatgcagaaaacaagctattctagttcttctgcttaggccgtccgcaattgctatctcaaatagctagctgatgtggagctgagagaagaatacaaatagtaatttatctcatcactagtatttgatctcacacgtccagtttctttcttggaatacgcggaatcttctatctatttgctagtcgctagctattctcgtttttactacattttctatccacgtagaaaaaaaaagtgaatctagctagtgaaatagcgcttacgatttattactcatcaacatg

SEQ ID NO: 150333 - DNA, 1225 bp, Zea Mays
aacgccagccgccagtccccccgggcggcgctaccctcagctagctccgtaaaccagcgagtacggccgaccagaccaatggcactgcggctacccatctcctcgacccacgggctggcctcctcgccagcgcccatctcctccacgacgacgtgccggccggccgccgccagtgggagcttgatcccgccagctgccctggtcgcagttgccatccgctgggcgtcggcgtcggcgtcccaaaagaggggcctgctgctgacgacggcgaggggcggcggagtcctcgcgccggtgaggtcgagcgggatcgagacgacgacgacctcggtgggagctgaggccgtcaccgggcaggtcacggaggtcaacaaggacaccttctggcccatcgtcgaggccgccggcgacaaggtcgtcgtcctcgacatgtacaccgaatggtacgtacgtacgcgtgcaaagtgatgcctcgatctagctcaagtcgttccaggagattgtagaaccatatatcctgagacgacgacgacagtacgtgttgcattgcagtacatactgatatactgcgcgcgttgtggtgtgtttgcatcatgcaggtgcgggccttgcaaagtgatggctcccaagttccaggagatgtccgagaagaacctggacgtcgtgttcctcaagctggactgcaaccaggacaacaaggtcagcaaactagatagtacgtacgcacgtacgtacctcctagctagctaggattacttagctgtgattgacatatatgatctacgacctagctcgatcttcccttgatctcttctgtgtgcatgcatggcgcttttgcttgttgttcttgcagcctctcgcgaaggagctgggcataaaggttgtgccgacgttcaagatcctcaagggcgggaaggtcgtgaaggaggtcaccggcgccaagatcgacgagctagcggaagccatcgagatagccaacaagaagtcaggctgacaaaggaatagcaagatcgacgtgcagtgcaagcaaggatgaatggatgatcgatgaactagctagtgaagactgcgaatgaatgcgccccggccgcgcatttgtgggaccggcaacatgcatgcagaaaacaagctattctagttcttctgcttaggccgtccgcaattgctatctcaaatagctagctgatgtggagctgagagaagaatacaaatagtaatttatctc

SEQ ID NO: 150334 - DNA, 1411 bp, Zea Mays
gtcagatcaccagccataccacacgaccgcagaggagtagcaagagcccgggggagaaatgagcgcggcggcgggcggactgcggcggctgctggcggcggcggcgacggcgggagccgcggaggtgcgggcgtccatcttcggccacgcgctgaaccctacggggaggcgcgcggcgacgaagctcctgcggaagaagatggtgggcgaccaggtggcgcagtggtacccctacgacatcaagcgcgacgacccgctcgtcatggcgcgcgaggagaaggagcgtctggctaaactggaaatgctgaagcgtcgtggcaagggcccgccgaagaagggtcagggaaggcgtgccgtcaagaggagcaagtagtcgagctgtgctaccctatcaatgctcatctctgtttctggagcttgccttgttcttacattgctgtaacgtactaccagtgatttgtcgggtgagtgggcgacgacagatgcaaaaaaaaacccaccttttctatcaagtttagcttacagatgttttttttttcatcaaattgcaatgaaaccgccttctatgttggatggctgatgtgcttacagtagagttcatgatgctgacacctaattaagtaccggctacagtgtttcggtgataatttccaggatggaccaggtgcctttcggtccgtcaagattaggatgaaataaattcgggatctgaattaatcattctcaattgtacgacatgtatggcgtggcacgaatgaatcaaccgaggtcaaacatcgtcggagcatgcattatcgtggtgtgatgcggcgtctagaactcgccgcgtacggcgtcgatgcaactgccgccatggaacgcgcctggtgcggcgccacggccgcccccgtcgcgcctgcgaggcaccgggaggctcatcacgcacgcgaagacgctcgccgcgccgtcccgagcgagcgccgcggccacggcgcgcgcgccggccgggcggcacgcgttgcacgccggcccacggcacgggcagtgcggcgcccccgccgatgcgctgtgtgaaccccggcagcgccacggcggcgcctagctcctgcccggcgcagaacggtgcggccctgatccccgtgtaccggctcgcgtgcaggctcggcgcgccgtcgaaccgcagcacggcggagaggttgtacgtgatggccgaggccgcggcgtcgaatgccagggcgcggagctcgcccgacgcgatgtacgggacgacgtggtgcggccggaggagcagccgcgggatgagggacggcgcaaggacgagcacggccaggaacacgaccaggggcgcgaggcaagccgcagccgtggctgccactactgccacgcactgccgccgccgccgactcgccggcgacggcgtctccgtggacat

SEQ ID NO: 150335 - DNA, 4002 bp, Zea Mays
atgcgcggcgaggctggcaatgacggcggtggcggggatacccaactcctggacggcgccacacctcggttaggttctccttcgagtgatgacgacggaacacagagtgaggcgtatgattgggcgctgtacgacgaaacacagcctctggatggtgctgagacccagtttgtagaccaggtggaggaggagggtgtggctggcgattggacggagacacagttggagagtggcgacgaggatggtggcagtggcaatgaggatggcggcgatgacagtgaccaagtgaagacacaacaacaggtggaagatggggaacggggcaatgatggtggtggtggggatgataatgctggcaattggactaagacccagttggatgaagtatgcgaggtgtatggagcgaacaactttgttggagacatggttgaggcccagttggttgaggaatctgaggaggaggatgatgacaaggatggattaactgatgatggtgagcatgatcttggtgagtgggggaagacccagttggttgaagactctgatgaagacataggtgacgatgagttgagtgatggcactgttgtcctaagtgacaatgagagcttgtcagaagatgagaggggcacaaagtcaggaacggataaaagggatgcaaagttgggaatggaaggaagcatcgaggggttaaatggtgggattaagaagcatgatgataacaataattcggtagattctgatgcatcaacagatgaggagggtgacacaagttcaggtcaccttcagatgaaattaccttctgttcatgttgcatcagtaaggacatgtggaatttctgaacctcggaactctctgtctgtgaactgtatgaagcaatggaaacagaaggcctgggtcaacacaatacatcccctgccgaaaattgtagatgaatctacttcgtgtagcacctccgttggttgggttgataacgactcccatggttatgtacagaaccatgatcaagacggagcaaaaagcagagacaagtgctcaacagctaaaaaactttttgccgacacaacagtggaggatggtgaaaacaacagcagatgtattgctggattaagctatgtgggatcacaagagcctggtgatctgtcacaagcaaatgcttttgatgttgtggacagattgatttcaatcaatggtggattatcatctcaagaaacgaccccaaataaattggaaatagcaaagccatgtgtttcaagtaagaggggaactttaatgttggctgagaaggtcgaccttggtagaagttccaatgggaaagcagaaatatttaaatttgtggatagccttgaggatgagggaggaggtgactttttcagtaaaaacaaagacatcttgttgctgaaaccaattggtagaggaaaaccaaggagtcattttacaggagcaaagaaatcttccccaaaactttcacggggagaaaataaaacaggggaagcgttgaacaaaagaaattccaaactacctgggaggttggaaaactattcctttaacatattcaagactattcaaaagtgatgtagagagtaagcggccttctgaaaacaggactaagaaaaaccttttgaaggtcttagatgatctatcaaatgacaaatcattggaagaacaggaaaaggctgatgtagttttgaatgatgttggtccagatactcaaatggctgttgaagcaatggatgccctggtacaatgttcacctgctaaaagtttatcttctgaacatcaatctgtgctcaatagagatatgatagctgagaagtctagaatagctaaaagtcattcgaagaatggttctcctcagagagctagcaacatacaggaaggtgtcacaacacgttctaaaaaaggaaaagtaactgacttcagtgccaaacctcagaaagaaagactaagaggatctaagatgcaacaaagttctgagtctatagtaaaagtgaaacataagcaaacaaagtctgtgccagagaagagcaaagtttcaaagaaatttatcagtgaaaataagtaccatgagacacctgttgctcaccgaactaggcattgtggtaggaatgatccttctgcatttatcgagttatctaataaacacttgaggagaggtaagaaaatgacaggtgacaactccactattgggcaagtgcaaaataaccacattgcaaccgaatctggtttgagttattttgaaaaagaaagcacagagcagacttgtacaaataatgatcaagatcttcagcaacctaggtatggaagcacacaacggacaagtgtaaataatgttcgaaaccttgaagcacgcagagttgaatcaacaactgttgttacatgcagagattccccatcacatcccaaacggcaaagaacacctacaaaaatgatacagtcaactgctccagctgctgcaagtcatgaaataccatcagaattggcaagaccatgcaagaaaaggcggattttcataagaagtgtttctgacctgctaaagtatgcaaagagagaaccttcccatgggaaatcagcttctatgctatccagcatcatagaaaagtcattagctgcttatcctgtacttaattcttctataagagatgacaggaaaacttctgatgtcattagctctgcacagagactgaaggaatcctcccatattgagaatacaagcaaatcaccaaaaacgaatcctcaggttctggacagtgctatgaaaacaccgtcaaaagtggttaatgaattgtcacccacttttagtcctgtgaatccatcaaaaggctcaagtaggagcttgttaaaagcttctgttgcgagagaattgctgaagctagatcctgaaaatgtactatcaaatcagcagaaaaaagattccagaagagggaaggataaggccaatgccagtattttattcagccagcatttggatgacgatgttatcaagcgtcagaagaagatcttggcacgcttaggagtttgtgaagcattttcgatggccgatgcaacacactttgttgcagatagattttgccgcacaaagaatatgctacaagcaataactatgggcaagccagtagttacatcaatgtggcttgaaaattgtgcacaagcaggctgttttattgatgaaaggaaatatattatgagggacgaaaaaaaggaaaaggagataggtttcagcatgcttatatcactggcctcagcttgcaaacaccctcttcttctgggaaaaagagtctttgtaacatcaaatgttaaaccaagtcaagtagtgatgactagcttggttaagtcatcatcagggcagccgctagagagggtaggacgatccataatggagggaaagggagtgcctcctgacctgctggtaatctcgtgcgaagaagactacgaagcttgtgcgccactactcgagaaaggtgctagtgttttcagcgtggagcttctactgaacggcatagtcatccagaaactggagtacgagaggcaccgccttttcatggaccgagtcaaacagacccgctcgtcgcggtggttgaaggacaccgtgcaaggccggttcgtccctgtacccaagcgtccccgggcctaggcagctcaagaccaatgtatatgtaagccatgcgaagctgttcttgctcgccccttggcctctctccagctgtaggcctgtgtaaatgtatgtgccggccgcaggtgcatctgccctgctgccgctgtgctggttgcttgatgcgggcctgatctttctgtttctctcccctgtatgttgtgcattataggtgttcatatgtattgtagcctgtttcttttttctctctctctctctagctcttctgaacatacatatgtttacccgacacaactgaaccttagtggcgatgagattgtcacgacggtggtaactgaggattgatctccttgttaagccggatggcgggagacaacatgtacaggtttatg

SEQ ID NO: 150336 - DNA, 207 bp, Zea Mays
gccattccagggatgcttctagctctggtactctttttttataacaggagattcaaggatgtgaattttccaccagctatgtctccccaaaacggtgggattatatgtggtatgcagtatgctctaatggggtatgatattggcttggtagctgcactagctgctgggatcttttcttagtctcctcaacggccttactgtacctgg

SEQ ID NO: 150337 - DNA, 2732 bp, Zea Mays
atccgacggacaatcaagttccttgcctccccccggcatcacccaccgtcccgatcccgaccagccagggtttatcgcgccgcgccgcgccgcctcataaacccacctcgcatccgccccgccgcggcggcgcctccagaagaactcccacaaacttcggcagcggcgggcgcgcacccaacaagccatgtggagcctcctacgggcagcctcgccattgctccgccgcagctccgggcgcttggccgcgaggggcgaggcggtcgccgcggcctcggcctccgctccggcgcccgcggggttgctggcggtgggagcgggagcctacagccggtggcggcgggcgatgtctaccaaggggaggagcatgcggagcaaggtggagaagcggatggcgagggagactggccgcacgcagcgggagctccgccgcgccgtcaagctcaggaagaagctcatgaccgaggacgagaagctcatctacaacctgcgcagggccaagaaaaaagttgctttgctcctacagaagctcaagaagtatgagctaccagacttaccagctccgcgtcatgatcctgagctgttaacggcagagcaactacaagcttacaagaagattggattcagaaacagaaactatgtgcctgttggagttcgtggagtctttggaggtgttgttcaaaacatgcatatgcactggaaattccatgagacggtgcaagtttgctgtgacaacttcccaaaggaaaagattaaggaaatggcagcaatgctgacaagattgagtggtggaatagtgatcaacattcataataccaaaacaatcatcatgttccgaggaagaaactaccgtcaaccaaagaaccttatacctttcaacacacttaccaaaaggaaggcactattcaaggctagatttgaacaagcacttgaatcacaaaaattaaacatcaagaaaatagaaacccaactccgtcgtaagggtatcaatccagaggacccagttgctatggctagcatccagcgtgttgcctctacgttcttccgagccatagatgagcagcaaggtactccgtatattttccgtggggacacacaaccttctgctgggacctctgaaataaaagaaccacgtgatgaaccatctgaagatagtgatcaggaggagcttgacaggttcatttcagagatagaaagtgcagcagagaagcaatgggaggaagaagaggctgcagagaaagaagaatcttcaagaatgcgatattgggagagggaagacgtaggtgatcgaaggggtttcaacagaaataatgaaaactcagattacgaggatagaggacatggaagatataggatagagcataacaacaacagaaggacttcagatgtgaggaagtgggatgatgatagcgagttcgaggcatcaggtgaagaatgggactctggtgatgacaggggtaatgctccgggctttgacagtgatcgagattctattgatgagcatcctcgacgatttggaagcatgcggaatgagaagagcagatccagttggacacaggattttgttcctacgcgagacgtgggcgaggggaaggttttcaatagaagctatgccaattctgatgtttacgatagaggccagggaagacataggatagataacaacagcagcaaaagggcatcagatgcaaggaggtgggatgatagtgagatcgaggcatcaggcgaagaatgggacactggtgttgacagtgataatgatctcgaagacgcaactgatggtcatcctcggcaattcaaaagtatgaggaatgagaagagcagatcccgtggcaggcagaattccattcctggcggattcagaggatccaatcggattacagggaattcagctgatgcttccgatggcgctatgttcagatgcagtaatggtgatgagttaggcactgaagacgaggacttgtcggtgtcggattataggggggaagcgacgaactcaagatcccccaaggtgaatttcccaaatttccacagcgggagtgaggatagcgatgagaacaggaaaaatgatggcaaggttggtaaaacgaataaaaatactgatgaaagttgggatagtgactgagataaagtaatgatgatatgtgatgcatgaaggtcagcatcaatggttgtcaagtccaagttctttcattggtggtgttgctcatgtactgtccaatggaaatctcgaggagctagaagaataagcatggtttccataggaacaactgtttgaacttttactgcaagttttcggacgtcttctattccagttgtcatagtaacctgaaaagctgttggagggcaagttgtcaagggtgtgctagcctcatcaaagccagaatgctgcatgacttgcacaagccgaggacaaagtaacagattacagatgtggtcagagttcactatcgaggtttctgaaggtctcagaaatgtgaaatcgtcactctgcgatcacatttatttctcatcttattcttttatttttgatgtgaagagaacatgcacatagatttatctcaaggccatgtgtaccttgtcttgttttggttaaaatgtccgatacacgttcttcagagcgtcctctacggtgtgaaactttaactctgttttagtgtcgtgtatgccatcaccgtgctcattgttctcttagtttagtcgatcgaaacgatgatcgaaaatttagactc

SEQ ID NO: 150338 - DNA, 3858 bp, Zea Mays
tgttcgctccctcggatcccacgcggctgcgggctgcggcgggggcggcgtccgaggcttagggtttagcgtttggaggagtttaggggtttgtgaggaggaagaggaggaggaggaggaggaggaggagcggatggggacagcggggaagggcgcgtgggtggtgccggcgccggcgtacagggaggtggaggggtgggagggcgcgggggacgacgcgccgggcttcaggtgcgcccactcgctcaccgccgtcgcgcctaccaagggccacggcccgcggctcatcctcttcggcggcgccaccgccatcgagaccggcgcatcttcgggcctccccggcatcaggctcgcgggggtgacgaactcggtgcactcgtacgacgtggagacgcgcaggtggacgaggttacatcctgctggagagcctccgtctccgagggccgcgcatgctgcagctgcagtgggcaccatggttgttttccagggtggaattggaccagcagggcactccacagacgatctctatgtccttgacctcacaaacgacaagtttaaatggcacagggttgttgttcaaggggcggggcctggtcctcgctatggtcactgcatggatttggtagctcaacggtatcttgttactgtctcaggaaatgacggaaagcgggccttgtcagatgcttgggcattggacacagcacagaaaccatataggtggcagaaacttaaccctgaaggtgatagaccttcagcaagaatgtatgctaccgccagtacacgctctgatggcatgcttttactttgtggtggaagggatgcttctggaatgccactgtctgatgcctatgggctactaatgcatacaaatggccagtgggaatggactctagccccaggggtatctccatctcctagatatcagcatgcagccgtttttgttggtgctcggttgcatgttactggaggtgtccttagaggaggcagagctattgaaggagagggcgcaatagcagtcctggacactgctgctggagtttggttggatagaaatggcattgtgacctctcgtactttgaagtcatccaatgaacatgatgcttcttcggatctacttcggcgctgtcgtcatgctgctgcctcagttggttctcagatttacatttatggtggactcaggggagatatcctcctcgatgatttcctggttgctgagaatgcacccttccaatcagaaatcacttcgtctatgtacaatgttgatagagtccctaggggggaaactcaaaatagaaacaataattttcattcagattcacctgtccatcaatctacaaataacagtgcggacaagaagtcaattgacatgttgatagaggcctcaactgcggaagctgaagctgtcagcgctgtatggcgagctgctaaggaagcatctgcagcgtcttcggaagacagtctttcggagggaataggatcagaatccccattgagtgaaacttcaccaatgcctgaagatttcgatgatggggggtctctagaaccagatgtgaaactacattctagagcagtatgtattctcatgaaattctttccgtttcctttttaaaattggatactgacagaatcatccttacaaaataattggactgaagaagagttctttccttagcatttgaaggcaactatccaatggttgtggagcatagagctgggactggttggctaactgttttcagtacaaattttcttcaatttgaataccgaattacctaagtagaaacttattcaatctaatataataatgtagcatctgtaattaactaggctttagctgtatcctgaatgagatttcattgttgactgtgttatccaaaggtttctgtacgattttcttgcaaatgaagctgttttcttcattcaagccctatgctttctcatttttttgtcaatgcaaattatttatcctgaactcctgatcttcgattttgaaggttgtggttgctaaagaagcagtaggagatttaggatgcttggtcaggcagctctcactggatcagtttgagaatgaaagcagacggatgcatccttcaaacaatgaccaatcttatccaggccggagaacattaaatagacaacgatcaccacaaggtttgcataagaaggttatttcgttcttacttaagccaagaaattggagagctcctgctgatagaacattttttctggattcttacgaagttggcgagctatgctacgctgccgagcagatttttatgcaagaaccaactgttttacaattaaaagcaccaattaaagtatttggtgatcttcatgggcagtttggggacttaatgcgcctttttgatgagtatggttttccgtcaactgctggtgacataacgtatattgattatctcttcttgggagactatgttgaccgaggtcagcacagcttagagacaatagctttgcttcttgctcttaaaatcgagtaccctgaaaatgtacacttgatcagaggaaatcatgaagctgctgacatcaatgccctttttggcttccgccttgaatgcattgagagaatgggtgaaagtgatggaatatgggcttggacaagattcaatcaactgttcaattatctcccactcgctgccatgatagaaaagaaaataatctgcatgcatggaggcataggaaggtcaataaacacagtggagcaaattgagaaacttgagaggcctatcacaatggatgttggttccattgtcctcatggacctgctatggtctgatcctacagaaaatgatagtgtggagggtttgagacctaatgcacgagggcccggcttagtgacatttgggcctgatcgagtaacagaattctgtaaacgaaacaaattgcagttgatcataagagcccatgagtgtgttatggatgggtttgagcgtttcgctcatggacaattgatcactttattttcagcaacaaattactgtggtactgcgaacaacgcaggggccatacttgttgtcggcaggggcttagttatcgtgccaaagttaattcatccacttccacctcctgttaattcacctgagtcctcccccgaacgtggggatgccacatggatgcaggagcttaacattcagcggccacctactccaaccagagggcggccacaagctgccggtgataggaattctcttgcttacatatgatacttgacacgacagagccacctccatctgctggatatgtttgtttgtaatcagaaatttctttaccagtttcaaggtacatatggtatagccaagaagaacaatcaaccaacaggacatcatggatacacttgtgatcagttccctggtaatcctttgtgatgcatcggttttaactgtagttgtgtgctaccgtgacttcagctcctaactggggagctgcataatcagcatttcagatctcaagcaacattgtatgattgcgataccagtggacaataatcaagtctgatgtagttgtaatagctaatctgtaatttcagtgtacatggatagattgttctttcgtcagagtaggaaggtttccaaatgtttgcatactatgcatgctgcagcctgggacgcggtttaaacaggacagctatacaagttgccagatctgagctagattgggcagagaagatttgaaccattttatttgctctccgcggagcgcgaatgtaagaggttgtgttgtgttgtgaaatactgaattcgttataggtatttgtgcaataaattaagttttgcttaaatcagtgaatgctttggtttagtgacctgagttacaacgacaacaaagccctttagttagaga

SEQ ID NO: 150339 - DNA, 1033 bp, Zea Mays
acatccaaacactgtaacaacttgtgtagtacttaatccctcgcacctcatgaatcccaacttcaacagtgtgtggagcgctcccgagatcaatatgatgaactcactcatcactagtcacatcgccaacaacacctacacaaacaaccagcatgttgtggcaagtcgtagtgccattgtgaaccacaataactttgggatgccaacggaggtcgttccacccgtggacaacatggacatgatgcaaggctatctaatggatgatacggatgccatgaggcttgttcagggacaacaacatatgccaaatgttgttcctaatcaaaggaggcatgcagtgaagttttggactacagatgagcacaggaatttccttcgtggtctagaagtgtttggccgtggtaaatggaagaacatctccaagtacttcgtccccacaaggacaccagtgcagatctctagccatgcacagaagtatttccgcaggcaggagtgcaccacagagaaacaacgctttagcatcaacgatgttggcctctacgacacacagccatgggtgcggcagaacaactcctctagcagctgggaggcgctcaccttcactgctggccgtgcgtacaataatacaaactactgtgcctttaacagcctcccgtatgccagcagccaggcaagtaacaaccaggtagctacatggattacagaccagcaggcaactgcaagttcttctatagctcctccagcgacggaggagagccagatatataaccgataatatatataatggtcatcagcagctgggagaggctttcttcatatataatcaataggtagatagatatggacaacgtccattgactagtttaatttctatctatatgttttgtatccaatgatgcatgtaaaacctagttggttgttaaaggtcattagtaccatactatatatgggctagaaacagtttcattgaaatttgcccctgagcaatacaatgaaattttaccaatgtgttatttatatattaatgtgtcta

SEQ ID NO: 150340 - DNA, 239 bp, Zea Mays
ttttactttgtttgtgttttatacaattttaaaacaactggatggcaagttcacggtcttgtttcgtgagcatggtgctcgaaaattccggtctgctcctaaaatagggcgtaacttgtgctaaataacatgaatatcatttttgcattcacagtttttcatatttcgagtgacttgcagttcaaatctgaattatccgaggaaattcaattaaacggacaaaatctaatagttatagc

SEQ ID NO: 150341 - DNA, 670 bp, Zea Mays
acccgcaccaccaagcaattaagctgtcaagggcaaacacctagctactaccatcctctaatctctccctagcatccagcagcagaaaactagctgacaatgtttcggcgcaccaagaccaccatggccgcgccagcgccaccacctactgacggcgaggtgaggattcagaaagttgacaagatcgagctcgtctacaacatcctttccaagccgaaactgtacaaggcgactgcgggaaccgggaagcatcctgccgctggacatgatcaggcatcgggctggaagaagaccgagaaccccagcaggcctgcctgctaggagtgtgttttctgtggaagacatcaacaagaggtctgaaacgtacatcacggagatgaagaaacggtttcttggctagctatatatagcagcagctgagcctgtgatgatgacaagaggtgaagatctggcagtcagtactggtgtcatccatgcatggaattggtttggctatagcctatatgtatatatttgatattaccatgtggaatggaatatttgagagactgtgctctagttatatttgcgtttatgtatgatatatgcatgttatgtacattatatatagagagaacataacgttgagtaacaagcttattagtatgagtatgagtatacatgatgcctg

SEQ ID NO: 150342 - DNA, 294 bp, Zea Mays
cttttatctatcagaactttctagtgcagaacatttatcgtcggcataaagccacatcattgatagatcagggtttcctttatggatttttgttccaaatgaaattctacgtttcattataaaaaacgaacattaaaaaagaaaataaaaattatttagctcataaagaaaataaaacattacaacacgtaaacaaaattacacagtatatagatcaaataaaaataattattacataatacattaaaaatgaaaataacttgacttaaataaaaaatacataaataataagaa

SEQ ID NO: 150343 - DNA, 303 bp, Zea Mays
atggaggacgctatgagggagcagcaagaaaggtttcgtgaagagctgcggcaacaacaaataacatttctccaacaacaattagagtacatggctgcttacaacgcacaggcgcaacacgcaatgaacggatccggggtcatgggccacaacacgccaccaccggtgataccagcaccaggaggagcttatgcaggggagggagctactacaggagagaatccaaacccgttacacgacttcgtcaacgagttttttgcttatggaggtagtggtcacaacttcaacaaccccgatatgtga

SEQ ID NO: 150344 - DNA, 132 bp, Zea Mays
ctttatgttccactcgttatactactttcagggaaggtgctgccggattttgctttacgttttgtttctatttcttttcttctgttgtttaagttttgtgggaagggtttttggtaacattcataatgtggg

SEQ ID NO: 150345 - DNA, 915 bp, Zea Mays
atgcccccgcctcccctccgcgctcgcacccgccctgttcccctcgcccgcacaaaccgccccatccaggagggatctgagaatgcagaacataacaacaacttggaaagcccaaaggaagccgatgccagtgctgaatcacgagaagcaaatggtaaatcagaagatctgaaagatgtaactaacttggacaaactgcaagagaagactggtagcagcagctctacagaagcaatcaaagccttagcgggcttgatggaaacaaacatggactttgaagaactaaaagatttgaatggaagatcagaagaattggaagaagataataatggcaacatggaaaagctggtagagctcttcttggataaggggttgttggatgaactgaagcccataaaagttgagtcccagcggcgggtacgtgcaacacttagcatcattgacaaaatgatgagctctcggatagtgaagggtggtaatggtgcaaatgatattcatggaaacgatggagcacaacttacttctattgaagaggaaggaaggactgcagaagcgagtgatgacggagatccagctgaggttgagtcttgtgttgcagagaaggtggaacttggacatgagacaactcatgattctacaggtactgctttggatggaggcaatgatgggtcctattttccttggagggaggagcttgagagcttggtttgtggaggtgtgccaatggctcttagaggagagatatggcaagcatttgtgggtgttggtgctcgaaggattcttgggtactacaacaaattgcttgatgacaggactgagacattggatgaaaaggatcttgtggacccagtggtcaagaacagggaagtgcacccagaaaagttacctagcttgagaaatggaaaggacatgtag

SEQ ID NO: 150346 - DNA, 97 bp, Zea Mays
tgcagaattggaacatcatatcgaattggcgagcgagttttgcagatttaaagagctatttcagtcaagcttcaagtggaagtagaccaagtactcg

SEQ ID NO: 150347 - DNA, 1415 bp, Zea Mays
tgctatctcattcagtcctgagttctgatcctctccgtctctccctcctccctctccatccaaagtgtagtgtagacagtaacccacatctcgtttcctcgccgcggccacggcgccgactgagcgaggtcttcatctgcgcttcaccagcgacgattatccactaggtaggggatcatccgatcatgtcgagcgcggcggtgaacgggctgtccggcgccggcggcggcatcatcgcgcagatcatcacctaccctctccaaaccgtgaacacccggcagcagacggagaggtcaacgaagaagaggaaggccaggagcggcgccagcgccaccccagcctccaccatgtaccagatgctccagtgactgcagctgattcaaaccgaaggatggagtgggttgtacagcggcctcaagccctctctcatcggcactgccgcgtcgcagggaatctattactacttctaccagatcctcaagaacaaggtggaagatatagcggttgctcgtagcaagaagggccttggggatggtactgtcgggatgctttcttggcttggtattgcagctgttgctgggtcaatcaatgttcttctaaccaatccaatatgggttcttgtgacacgtatgcagaaatgtctagggcgaattcgttggaggttgcagttctgaaggataggctggttaaattggagtcagaaaaagctcgtccatatggtactcttcaagcgatccaggaggtttaccatgagtctggtgtaagaggattttggaaagggcttattccaacattaatcatggtatgtaatccatcgattcagttcatgatctatgaaacattggcaaagcgtctgcagtcaaagcgttctggaaagcagctaccaaaaaggcacctcacagctatggaggtttttttattgggtgcattggcaaaacttggagctactgtagtcacctatccattgctagtcgtgaagtcaaggttgcaggcaaaacaagaaattggcagcaatgtgatgtccagatacacgggtacaatagatgcgataataaagatggttcgctacgaaggactacacgggttttacaaaggaatgggcacaaaaattgtacaaagtgtctttgctgcctcggttctctttatggttaaagaggaattggtcaagttagcagtgcttttagttgcgagtagtaggactatgcttattactacatccaagaaacaataggtggtggtgtatttgggagaaaagctcatttttttgcctcaacttgtaatgtatagggtcccattatacatatcctgttcaagatcaatatgaaattctttactggttactagagaaaaccttaaagcctctcaaaagccataccttccccttattaatgaaggataaaatcatctaaaagata

SEQ ID NO: 150348 - DNA, 1464 bp, Zea Mays
tgctatctcattcagtcctgagttctgatcctctccgtctctccctcctccctctccatccaaagtgtagtgtagacagtaacccacatctcgtttcctcgccgcggccacggcgccgactgagcgaggtcttcatctgcgcttcaccagcgacgattatccactaggtaggggatcatccgatcatgtcgagcgcggcggtgaacgggctgtccggcgccggcggcggcatcatcgcgcagatcatcacctaccctctccaaaccgtgaacacccggcagcagacggagaggtcaacgaagaagaggaaggccaggagcggcgccagcgccaccccagcctccaccatgtaccagatgctccagctgattcaaaccgaaggatggagtgggttgtacagcggcctcaagccctctctcatcggcactgccgcgtcgcagggaatctattactacttctaccagatcctcaagaacaaggtggaagatatagcggttgctcgtagcaagaagggccttggggatggtactgtcgggatgctttcttggcttggtattgcagctgttgctgggtcaatcaatgttcttctaaccaatccaatatgggttcttgtgacacgtatgcagacacatactcaagcgaaaagaaaaatattggagtctaagagggagcttttactgaaagaaatgtctagggcgaattcgttggaggttgcagttctgaaggataggctggttaaattggagtcagaaaaagctcgtccatatggtactcttcaagcgatccaggaggtttaccatgagtctggtgtaagaggattttggaaagggcttattccaacattaatcatggtatgtaatccatcgattcagttcatgatctatgaaacattggcaaagcgtctgcagtcaaagcgttctggaaagcagctaccaaaaaggcacctcacagctatggaggtttttttattgggtgcattggcaaaacttggagctactgtagtcacctatccattgctagtcgtgaagtcaaggttgcaggcaaaacaagaaattggcagcaatgtgatgtccagatacacgggtacaatagatgcgataataaagatggttcgctacgaaggactacacgggttttacaaaggaatgggcacaaaaattgtacaaagtgtctttgctgcctcggttctctttatggttaaagaggaattggtcaagttagcagtgcttttagttgcgagtagtaggactatgcttattactacatccaagaaacaataggtggtggtgtatttgggagaaaagctcatttttttgcctcaacttgtaatgtatagggtcccattatacatatcctgttcaagatcaatatgaaattctttactggttactagagaaaaccttaaagcctctcaaaagccataccttccccttattaatgaaggataaaatcatctaaaagata

SEQ ID NO: 150349 - DNA, 1205 bp, Zea Mays
agtagctgttgtgcttaccacagcacagtagtgtactcgttcgacagatccctatagctgctagctaggtatagtcctttggtgtgtacgatagaaaagctagcatcgatccagcgtagcatcaacatcaacatggggtcctgggtgcgcaccatcacgtcggcccttccggaaggatgctcagcccgcagcagcggcgacgggcaagaaagacgccgcgccgctgccaccaccaccaccaacgacggccagcagcaatctccttctcgttctccttcttcttcatcagccatggaggaggagcacagcggcgagatggagataagcaggtcgcagctctacggcgaggtgatggcgtgcacgtacgaggacgtgcaggtcatgtggtccatgctcgacaaggccaggatctgcagcgcgtcgtgaccggaccgccacacacggaccttcacatccgctcgatccgccgtccatggccgatccaatgcaccagtacataatatatactctcccagcagctgggcactgggcttcttcttcattcatggcaaagcaagctctcttggcgcgagacaactcgatctgccgaggcgcgcggcatgcaacctgctatgatccatcactacatatactagccctgaaaccttttttttttttgcagttggttttgtgtgtggtggcgtcgcatagcatgtacggttgagtctgatgaatcccggttgctggcagtggcacacagacacatggatgtatcatggctagttagttagttcatggtgtgtgtgcaagtgctatcttggagagatttagtgactgtataccacaaacattagtcatgttgctttcgaggccaccaccacctccgctcctcctctctaccgttggtgtcagtcagagatgcatgcatctctccagcagtaacttcttgctgcctgatcgagatgccaattgccaaccatatcggcgtgagcgccaataaagtaagtcatctgggcaccgtgcgcgtgccgcgggcttgttcctcggcccgagacgcgttccaggtcttcatcttcctcgccgcggcgagagcgccgcaatccccgtctgccctcctctatctgctaccaggacagagtttgctaatgcctgcttggtgttcgacgtattggttcttgcattgtttcggtttgtctttgtcctccatagttgtagtaaaaatcgga

SEQ ID NO: 150350 - DNA, 797 bp, Zea Mays
tgtgacaactgctcaagcagttctggaactgaaattataaggttgtagattcttgactacatgagctgacattcactagctgtgactacaagacagcttatatgggtttacatgaactagcagaaactgcgctacggattacaggccacaactatttttacagtttacagactaggattggatgtcggcaaattttggcatgcagtatgcacaactgcccaagcctacaagctaatgtaaacgctacattcacatctgcttaaactatgccgcttcaacgctttgcgaggatcactagcgccagcatcgacatagaggcaatgaacctgaagccctggctctcccagaaattatccttgtttccatggcacatgctgttgggctgcttcatggccacctggtccatgagctccttgagagccttgtctcttttctcccccatctgcagaataaatgtaaacaggatcagaccattgatagaaatattgtccacgcacaatcacggccaactgcattagctgaggatggtcaggttcacatattgaaggcaacacgtctagaatgcttgagtcccatcaccaattcaggtactgctccgggttggcattttggataatgtttgagtccaaccttttgaaactttgattaccaataactttatggatggtacctaggttagaaacttgaagatcatatgcatatatttgtattgaaatgtacttttaggatttcgcttatatactcgctttagttgcatgctaacaaacaaaggaaatgacaacaattatggaaccgga

SEQ ID NO: 150351 - DNA, 1758 bp, Zea Mays
ggcaacaggcacatggttgggcgggcggtttgccttttgcccgtttctcacacacgcattctgagtttctgacgagacgaccaacaccacacggagaagacggaggacagtagagtcgtcgaagcagctgtacgccggaaggcctacccccgctatactatctgccttcctactcgcttccctccccgagtccccgtcctcctcagctgccttccgccgccgtgcagcacccgcgcagcctccactccggcgtcgtctccctccctcctccgccatcgccaccgggacacgcaaagcttccaggtcttgtctttgggtagaacatgtcgtgctttgcatgctgtggtgatgaagatacacaagtaccagacaccaggactcaatacccaggacatcatccagcaagagccgacgcataccgccctgctgatcaacctcccaagggttcccaacctgtgaaaatgcaaccgattgcagtccctgccattcctgtggatgagcttagggaggtgactaagggttttggtgatgaagccttgattggtgagggctcctttggtagagtatacttaggtgttctaagaaatggcaggagtgccgcggtcaaaaagttggattctaataagcagccagaccaagaattcttggcgcaggtgtctatggtgtcaaggctgaagcacgaaaatgttgttgagttgcttggttactgtgctgatgggacactccgcgtccttgcctacgagtttgctactatgggttcccttcatgatatgcttcatggaaggaaaggtgttaaaggggctcaacccggcccggtcttatcatggttgcagcgtgtgaagatagctgttggggcagcaaaaggcctcgagtatcttcacgagaaggcgcagcctcatatcatgcaccgagacatcaagtctagcaacgttcttcttttcgatgacgacgtagctaagatcgctgacttcgatttgtcaaaccaagctccggacatggcagcccgacttcactcgactagggttcttggaacgttcggataccatgcgcctgagtatgcaatgaccgggcaactcagctccaagagcgatgtatatagttttggagtcgttcttctcgagctattgaccggaaggaaacctgtggaccatacattaccaaggggacagcagagtcttgtgacttgggctaccccaagacttagcgaagacaaggttagacaatgcgttgactcgaggcttggaggggactaccctcctaaagctgttgcgaagtttgcagctgttgccgcgctgtgtgttcagtacgaagcggacttccggccaaacatgagcattgttgtcaaggcgctacagcccctgctgaatgcgcatgcgcgggcgaccaacccttgagaaaaatgctagctcaaaagcttcgcattgctcctctccgccctcttgtatgatagataagtaagatacgagtcgccgatgtcgttcttgcggacacatggctggcagcgtgtgacatttgtgattatttgtcccctgaattgtaaacaagattcttgtatccccacaacacttgattctttctatcggttgcaagatgacctgccgttttcttcttaagaagtcaccttagcaaaactcacaaactttattactccctctgttcaattataggatgctttgattttgtctagtcgtatagtttttgttatataaatatcttacaatttggaatggtattgactattgagggcttgtttggatc

SEQ ID NO: 150352 - DNA, 1411 bp, Zea Mays
gctcaaagcataagtacaagtgcagtgcatccgttgctacggcatcgaagcccatgtcttgtctttgggtagaacatgtcgtgctttgcatgctgtggtgatgaagatacacaagtaccagacaccaggactcaatacccaggacatcatccagcaagagccgacgcataccgccctgctgatcaacctcccaagggttcccaacctgtgaaaatgcaaccgattgcagtccctgccattcctgtggatgagcttagggaggtgactaagggttttggtgatgaagccttgattggtgagggctcctttggtagagtatacttaggtgttctaagaaatggcaggagtgccgcggtcaaaaagttggattctaataagcagccagaccaagaattcttggcgcaggtgtctatggtgtcaaggctgaagcacgaaaatgttgttgagttgcttggttactgtgctgatgggacactccgcgtccttgcctacgagtttgctactatgggttcccttcatgatatgcttcatggaaggaaaggtgttaaaggggctcaacccggcccggtcttatcatggttgcagcgtgtgaagatagctgttggggcagcaaaaggcctcgagtatcttcacgagaaggcgcagcctcatatcatgcaccgagacatcaagtctagcaacgttcttcttttcgatgacgacgtagctaagatcgctgacttcgatttgtcaaaccaagctccggacatggcagcccgacttcactcgactagggttcttggaacgttcggataccatgcgcctgagtatgcaatgaccgggcaactcagctccaagagcgatgtatatagttttggagtcgttcttctcgagctattgaccggaaggaaacctgtggaccatacattaccaaggggacagcagagtcttgtgacttgggctaccccaagacttagcgaagacaaggttagacaatgcgttgactcgaggcttggaggggactaccctcctaaagctgttgcgaagtttgcagctgttgccgcgctgtgtgttcagtacgaagcggacttccggccaaacatgagcattgttgtcaaggcgctacagcccctgctgaatgcgcatgcgcgggcgaccaacccttgagaaaaatgctagctcaaaagcttcgcattgctcctctccgccctcttgtatgatagataagtaagatacgagtcgccgatgtcgttcttgcggacacatggctggcagcgtgtgacatttgtgattatttgtcccctgaattgtaaacaagattcttgtatccccacaacacttgattctttctatcggttgcaagatgacctgccgttttcttcttaagaagtcaccttagcaaaactcacaaactttattactccctctgttc

SEQ ID NO: 150353 - DNA, 1718 bp, Zea Mays
tatattaattgtgcagcgtgccaatctaatatgagttatgttctttttggtgttcctttcaagggaaacgctcggcggcgaagctaaagcagagcttgcgctacacgcgctgcgagcagtttctgtctaaagggcaaggtctgatctcatgtgagtcatgtctggttggtgtgatacattaatcttaatcaatttttgtgattttggggatttctggtttttggttgacaattcgccagtggtgtacatgacagatttgagctccccgtggcactgctcgcccggccagccaccatcccggtcttgcgctcggcggcgtgcatggtgtgctcgtccctgacagtggctagcttctgttttcttaattgatggctagcttctgttttcttaattgatgatttgttttttccttttctgatcgtcaatagggaagagacgacgataacatggacactgttttctaaatggatcagtatttttggtatatacacatgcttttactagtagaggagtatttattttcatttgtagcagccaaggaacttgtgcattccttatgaatcatgagaagaccatgaagatgcacacaaatttgcttgacttctgaccagtaataattagcgaaagaaagaaaatccagaaccatgaatcagcttgatagcagtaacaaatttgcttgacttctgacgagtaagaaattggcagcaagttcagcaggggccagactaataaatcagcttgatagcatccttgcagcggtgccttggactttggcggttagaagaggtttataattttatatgatgaaattatgtgcatcttcagttgtttttgcctcactgctctgtaaggacatataaaattggtatttgtactttctaaggttctccttggaatggtagagttttacagggaaccttccatcatcagttgctgacatagctcgaactcgacgtttcttcttcgccagttgcggctctggataaactcgaagctgacctatccaagttcgacgacgggcccttcttcctaggccaattcagcttggcggatgtagcgtacattacgattctggaaagggttcagatatactattcccatcttaggaactacgacatcgccgaaggcaggcccaacctccaggaattcatcgaggagatgaacaagattgaagcgtatgcgcagaccaagaacgatcctctgttcttgcttgatcttgccaagaaccatcttaagattgcctgaagatgtgacaaagcagcattagtccgttgatcggtggaagaccactcgtcagtgttgagttgaatgtttgatcaataaaatacggttgctgactttggacttgcaaagttcactactgataataacacccatgtttcaacaagagtaatgggtacttttgggtatttggcacctgagtatgcagcatctggcaagctcacagaaaaatccgatgtattttctttcggagtcatgcttcttgagcttattactgggcggcgaccaattgacacaacccaattggcactgcttgttataagcacatatgtacttccatttgcatgttgtataatactaataccaattgcaaaattatagttattttttctacccttgttagttaataagcatatttgtggtcaataggttgtattcttattcttgtaaccgtgttaattaatgttatggacttgtagtcttgtattaccttgtga

SEQ ID NO: 150354 - DNA, 1797 bp, Zea Mays
atctttggtccacgagtaagtgttttggatattcatgttagtgtacactgtaatcaacagagctggttttctttaacagttttgttatgaaatcatggaactggcaacatgatagaatttttcaaggaaaaaaagggaaacgctcggcggcgaagctaaagcagagcttgcgctacacgcgctgcgagcagtttctgtctaaagggcaaggtctgatctcatgtgagtcatgtctggttggtgtgatacattaatcttaatcaatttttgtgattttggggatttctggtttttggttgacaattcgccagtggtgtacatgacagatttgagctccccgtggcactgctcgcccggccagccaccatcccggtcttgcgctcggcggcgtgcatggtgtgctcgtccctgacagtggctagcttctgttttcttaattgatggctagcttctgttttcttaattgatgatttgttttttccttttctgatcgtcaatagggaagagacgacgataacatggacactgttttctaaatggatcagtatttttggtatatacacatgcttttactagtagaggagtatttattttcatttgtagcagccaaggaacttgtgcattccttatgaatcatgagaagaccatgaagatgcacacaaatttgcttgacttctgaccagtaataattagcgaaagaaagaaaatccagaaccatgaatcagcttgatagcagtaacaaatttgcttgacttctgacgagtaagaaattggcagcaagttcagcaggggccagactaataaatcagcttgatagcatccttgcagcggtgccttggactttggcggttagaagaggtttataattttatatgatgaaattatgtgcatcttcagttgtttttgcctcactgctctgtaaggacatataaaattggtatttgtactttctaaggttctccttggaatggtagagttttacagggaaccttccatcatcagttgctgacatagctcgaactcgacgtttcttcttcgccagttgcggctctggataaactcgaagctgacctatccaagttcgacgacgggcccttcttcctaggccaattcagcttggcggatgtagcgtacattacgattctggaaagggttcagatatactattcccatcttaggaactacgacatcgccgaaggcaggcccaacctccaggaattcatcgaggagatgaacaagattgaagcgtatgcgcagaccaagaacgatcctctgttcttgcttgatcttgccaagaaccatcttaagattgcctgaagatgtgacaaagcagcattagtccgttgatcggtggaagaccactcgtcagtgttgagttgaatgtttgatcaataaaatacggcatgttgttgctgactttggacttgcaaagttcactactgataataacacccatgtttcaacaagagtaatgggtacttttgggtatttggcacctgagtatgcagcatctggcaagctcacagaaaaatccgatgtattttctttcggagtcatgcttcttgagcttattactgggcggcgaccaattgacacaacccaattggcactgcttgttataagcacatatgtacttccatttgcatgttgtataatactaataccaattgcaaaattatagttattttttctacccttgttagttaataagcatatttgtggtcaataggttgtattcttattcttgtaaccgtgttaattaatgttatggacttgtagtcttgtattaccttgtga

SEQ ID NO: 150355 - DNA, 524 bp, Zea Mays
ctaaagcagagcttgcgctacacgcgctgcgagcagtttctgtctaaagggcaaggtctgatctcatttgcggctctggataaactcgaagctgacctatccaagttcgacgacgggcccttcttcctaggccaattcagcttggcggatgtagcgtacattacgattctggaaagggttcagatatactattcccatcttaggaactacgacatcgccgaaggcaggcccaacctccaggaattcatcgaggagatgaacaagattgaagcgtatgcgcagaccaagaacgatcctctgttcttgcttgatcttgccaagaaccatcttaagattgcctgaagatgtgacaaagcagcattagtccgttgatcggtggaagaccactcgtcagtgttgagttgaatgtttgatcaataaaatacggcatgttgtaagggttgttttacgctatttataatacaatgtactgttcagttgttgaactctatttcttagtcatgccaagtgcttttcttatttga

SEQ ID NO: 150356 - DNA, 1427 bp, Zea Mays
tatattaattgtgcagcgtgccaatctaatatgagttatgttctttttggtgttcctttcaagggaaacgctcggcggcgaagctaaagcagagcttgcgctacacgcgctgcgagcagtttctgtctaaagggcaaggtctgatctcatgtgagtcatgtctggttggtgtgatacattaatcttaatcaatttttgtgattttggggatttctggtttttggttgacaattcgccagtggtgtacatgacagatttgagctccccgtggcactgctcgcccggccagccaccatcccggtcttgcgctcggcggcgtgcatggtgtgctcgtccctgacagtggctagcttctgttttcttaattgatggctagcttctgttttcttaattgatgatttgttttttccttttctgatcgtcaatagggaagagacgacgataacatggacactgttttctaaatggatcagtatttttggtatatacacatgcttttactagtagaggagtatttattttcatttgtagcagccaaggaacttgtgcattccttatgaatcatgagaagaccatgaagatgcacacaaatttgcttgacttctgaccagtaataattagcgaaagaaagaaaatccagaaccatgaatcagcttgatagcagtaacaaatttgcttgacttctgacgagtaagaaattggcagcaagttcagcaggggccagactaataaatcagcttgatagcatccttgcagcggtgccttggactttggcggttagaagaggtttataattttatatgatgaaattatgtgcatcttcagttgtttttgcctcactgctctgtaaggacatataaaattggtatttgtactttctaaggttctccttggaatggtagagttttacagggaaccttccatcatcagttgctgacatagctcgaactcgacgtttcttcttcgccagttgcggctctggataaactcgaagctgacctatccaagttcgacgacgggcccttcttcctaggccaattcagcttggcggatgtagcgtacattacgattctggaaagggttcagatatactattcccatcttaggaactacgacatcgccgaaggcaggcccaacctccaggaattcatcgaggagatgaacaagattgaagcgtatgcgcagaccaagaacgatcctctgttcttgcttgatcttgccaagaaccatcttaagattgcctgaagatgtgacaaagcagcattagtccgttgatcggtggaagaccactcgtcagtgttgagttgaatgtttgatcaataaaatacggcatgttgtaagggttgttttacgctatttataatacaatgtactgttcagttgttgaactctatttcttagtcatgccaagtgcttttcttatttga

SEQ ID NO: 150357 - DNA, 1499 bp, Zea Mays
atctttggtccacgagtaagtgttttggatattcatgttagtgtacactgtaatcaacagagctggttttctttaacagttttgttatgaaatcatggaactggcaacatgatagaatttttcaaggaaaaaaagggaaacgctcggcggcgaagctaaagcagagcttgcgctacacgcgctgcgagcagtttctgtctaaagggcaaggtctgatctcatgtgagtcatgtctggttggtgtgatacattaatcttaatcaatttttgtgattttggggatttctggtttttggttgacaattcgccagtggtgtacatgacagatttgagctccccgtggcactgctcgcccggccagccaccatcccggtcttgcgctcggcggcgtgcatggtgtgctcgtccctgacagtggctagcttctgttttcttaattgatggctagcttctgttttcttaattgatgatttgttttttccttttctgatcgtcaatagggaagagacgacgataacatggacactgttttctaaatggatcagtatttttggtatatacacatgcttttactagtagaggagtatttattttcatttgtagcagccaaggaacttgtgcattccttatgaatcatgagaagaccatgaagatgcacacaaatttgcttgacttctgaccagtaataattagcgaaagaaagaaaatccagaaccatgaatcagcttgatagcagtaacaaatttgcttgacttctgacgagtaagaaattggcagcaagttcagcaggggccagactaataaatcagcttgatagcatccttgcagcggtgccttggactttggcggttagaagaggtttataattttatatgatgaaattatgtgcatcttcagttgtttttgcctcactgctctgtaaggacatataaaattggtatttgtactttctaaggttctccttggaatggtagagttttacagggaaccttccatcatcagttgctgacatagctcgaactcgacgtttcttcttcgccagttgcggctctggataaactcgaagctgacctatccaagttcgacgacgggcccttcttcctaggccaattcagcttggcggatgtagcgtacattacgattctggaaagggttcagatatactattcccatcttaggaactacgacatcgccgaaggcaggcccaacctccaggaattcatcgaggagatgaacaagattgaagcgtatgcgcagaccaagaacgatcctctgttcttgcttgatcttgccaagaaccatcttaagattgcctgaagatgtgacaaagcagcattagtccgttgatcggtggaagaccactcgtcagtgttgagttgaatgtttgatcaataaaatacggcatgttgtaagggttgttttacgctatttataatacaatgtactgttcagttgttgaactctatttcttagtcatgccaagtgcttttcttatttga

SEQ ID NO: 150358 - DNA, 1910 bp, Zea Mays
cccgcgcgcccaccgccgcgcgcagcaccgcgccgcccacccgcggccaccccagcgccccaaatgccgctccaaccctagcctctcgccatgcctttcgatctcgggcggccatgggaaactgatgccgctcgccggtcgccgtcgcgcgggaggacgtcagctcctcgcacttccccgcatccacctcgtcatggagctctgcgagggcggcgagttcttcgaccgcatcgtcgcgcgggggcactacaccgagcgcgccgccaccaatgtcactcgcaccatcgtcgaggtcgtccatttctgccatcggcacgacgtcatccaccgtgacctcaagccggagaacttccttttcgccaataagaaggagaactcgccgccgcgcagcgcccctctcgatatgccgccctgcttcctcctctcctcttgatccatctgccatcccatccccgctctgccagttgcccctcgcttcctcttcggctcttcatccccctcgatccgtcgcccgtgcttcctcctcactatgtcccgtcccctctccatcttgtcgccctgcctccccgcgtctgcgtctgcgcctgccttcggcgtccagagccatatccgcgttggcctccacctacgcacccgcctctagccataagagctcctcccgtgtctgcctttagagatctgctacctccacatcggtgtctagggctcctccattgcctagatctactagagtgagtgagcctacagagctggcctcatccaggctccagttccaccccacggtcatcctctgttgctctacgtttcatgcttctcacatcctctcctcaatctcatcaactgtgctgaaggaggcagatgaaagtatttccgtctcatcaactgtgctgaagaggaggaaaacacctcacttgttgaagggagcagtggagacccggaggaagatcatttggagtctgcagctactaatcttcagcctggcagtgacacttgcattgcaagggaagagttgccagatcagaaggatctggtgaaactgcaagctgttatccgtggacatctagaggcggcccatgcctcacggccaaagcagatcagatgagattttttggtcttgcgtggttctttttaatctactcacatgatacttcttattcattgccatccaatttaattaattgccctcgattgaattggttcctttgccattttacttaggaggataaaagaagacactaccttggcacatgcctgttgtcacaatggacaaaagaagattagtgttgtgtgagatttttttcattcctttgatctattgcatgctatttgtaccctaatcgacaaaatagatgagactcaattcaggagcaaatcaccagtcctgttcacagtccaattcactatggctaaaatatcaaacttatgctccttgaggtttgttttttccttatcttcctttaatatctgatgactgatggactggtgagttcatgatctgcttcatgcttttccttttatatatggtcactacctcactggttagttcatggtgctttttgtctacttctttgcccaaaaaaaatcccggggcgaatttcagcatgcttttcctgcttccgctgtgcaaattcacaggatgcgtgggaaatgtgttcttgtttcgtcgggtggtgttcttgccattcgttttagctcaacacaaaacaaatgcttcttgttcttcaggtcgccctgtgtttctttctcgccagtttgggccatggattctggtgtgcatttgttcaatatatcttagtatcttatttaacaatcagtacttctctgatgctcaagagatcaatttactcaaagtagcaaactgtatcatagttgtatactttatcaaacgaggaacctgatgcttgtagtat

SEQ ID NO: 150359 - DNA, 1344 bp, Zea Mays
cccgcgcgcccaccgccgcgcgcagcaccgcgccgcccacccgcggccaccccagcgccccaaatgccgctccaaccctagcctctcgccatgcctttcgatctcgggcggccatgggaaactgatgccgctcgccggtcgccgtcgcgcgggaggacgtcagctcctcgcacttccccgcatccacctcgtcatggagctctgcgagggcggcgagttcttcgaccgcatcgtcgcgcgggggcactacaccgagcgcgccgccaccaatgtcactcgcaccatcgtcgaggtcgtccatttctgccatcggcacgacgtcatccaccgtgacctcaagccggagaacttccttttcgccaataagaaggagaactcgccgccgcgcagcgcccctctcgatatgccgccctgcttcctcctctcctcttgatccatctgccatcccatccccgctctgccagttgcccctcgcttcctcttcggctcttcatccccctcgatccgtcgcccgtgcttcctcctcactatgtcccgtcccctctccatcttgtcgccctgcctccccgcgtctgcgtctgcgcctgccttcggcgtccagagccatatccgcgttggcctccacctacgcacccgcctctagccataagagctcctcccgtgtctgcctttagagatctgctacctccacatcggtgtctagggctcctccattgcctagatctactagagtgagtgagcctacagagctggcctcatccaggctccagttccaccccacggtcatcctctgttgctctacgtttcatgcttctcacatcctctcctcaatctcatcaactgtgctgaaggaggcagatgaaagtatttccgtctcatcaactgtgctgaagaggaggaaaacacctcacttgttgaagggagcagtggagacccggaggaagatcatttggagtctgcagctactaatcttcagcctggcagtgacacttgcattgcaagggaagagttgccagatcagaaggatctggtgaaactgcaagctgttatccgtggacatctagaggcggcccatgcctcacggccaaagcagatcagttaggaggataaaagaagacactaccttggcacatgcctgttgtcacaatggacaaaagaagattagtgttgtgtgagatttttttcattcctttgatctattgcatgctatttgtaccctaatcgacaaaatagatgagactcaattcaggagcaaatcaccagtcctgttcacagtccaattcactatggctaaaatatcaaacttatgctccttgaggtttgttttttccttatcttccttta

SEQ ID NO: 150360 - DNA, 1844 bp, Zea Mays
agcgctcggtctgcactactgcaggtttgtataattagacaagacaagattcgtgtacgttaattagcagctggtcatggctacaggcccaatcggatggcgtgcatgttcgtccagatgacaacacaccgctggccatgttgctaggtgccttcttcctcctccctacctctagctacgcacgcagtatacctaattaagtagccactgtacgttcttcaccagttcactctgcacatggatgcctggatcgatcgatcgatctgtatatataatagaaggttcctcgatcttcttttccttgccactccaccgagcaagctactagctgctggctgcttccttctgtcagtgtacagtagccggcttgcgagctgtgggccggccggtggcggtgctctcccgtctctatcctatccatcatagaatagaatagatagatagataggctactcagtgccactcgatcagtagtggtagcagctggcggctggcctgggacgacgatgagcgccaagaccagagctggggccgcccatgtacgccggcagctcgtcgcggccgtggcggtgacggtggcatgcttctactcctcggaggcgacgcagctgcaggtggggtactacaacggcagctgcccggccgccgagagcctcatcgagaccatcgtccacgccgccgtccgcaaggacgccggcaacgggccgggcctgatccggctcttcttccacgactgcttcgtcaggggatgcgacgcgtcggtgctgctggacgacccgacgggcagcccggggaacaggacggtggagaagacgtccccgcccaacttccctagcctgcgcgggttcagcgtgatcagccgcgcgaagcgcgtggtggagcggcggtgccccgggacggtgtcgtgcgcggacatcgtggcgttcgcggcgcgcgacgcggcgcgcatcatgggcggcatccggttcgcgatgccgtcggggcggctggacgggcgcgtgtcgaacgcgtcggaggccacggccaacctgccgccggcgtccttcaacctgacgcagctcctgggccgcttcgcgtccaagaacctgagcgccgacgacctggtgacgctgtcgggggcgcactccatcgggcgctcccactgctcgtccttcgcgcccgccaggctgtacccgcagctggacccggcgatgaacgccacgctgggggcgcggctcagggcgcggtgccccgccggcggcggcgggcggcgcgaccgcgtcgtcgacctcgacttcgccacgccgctgcagctggacaaccagtactaccgcaacgtggtgacgcacgaggccgtgttctcgtcggaccaggcgctcgcggggcgcaacgacacggccgcgctcgtggcgctgtacgccgccaaccgcacgctctggtcgcagcgattcgccgccgccatggtgaagatgggcagcatcgaggtgctcaccgggccgcccggggaggtcaggctcaagtgcaacaaggtcaactgatcggggggattggagttaggtgagggtcagctgcctgtactactaagctagctagtagcagcagcgggaatcgcgtcaagtcaagccggcccagagccagagattatttcaccatcactctcgacgatatgcacttcatctgcatgattcattcatgtgtgtacttaattgtacatgggatcacgtactacctgcacttttttttgcctagcttgtatactattattattgttgtttcttgaaaagaaaaaagtaacatatataccaattgcgcgcatgactgtaagtatgtatgaggcatacaattaagagatgatgattactgag

SEQ ID NO: 150361 - DNA, 879 bp, Zea Mays
cgccactatagagcttctgtgtacttagtggcggcggcagaggcctcccagtcccaccacggcagcggcctcgagctgggctactacaagacggcctgccccggcgtggagagcgtggtcaagtaccacgtcgccaaggccatcagcgccaaccgcggcgccggcgccgcgctcgtccgcctcatcttccacgactgcttcgtcagggggtgcgacgcgtcggttctccttgacccgacgccggccaacccggagacagagaagacggcgccgatcaacatcgggctggcggcgttcgacgtgatcgacgacatcaaggcggcgctggaggagcggtgccccggcacggtgtcgtgcgcggacatcctggtgtacgcggcgcgggacgcgtcgagcatcctgagcaacgggcgcgtgcgcttcgccgcgcccgcggggcggctggacggcgtggtctcccgcgccgccgacgcgcagcgcgacctgccggactccaccttcaccgtggccgagctggtccgcaacttccgccggaagaacttcacggtggaggagctagtgatcctgtcgggcgcgcacgccgtcggcgtcggccactgctcctcgttccgcgcccgcctgtcggcgccgccggcccagatcgtgccggcgtaccgggacctgctgtcggccaagtgcggcgcggaggggcccggagccgaccccgtggtgcccaacaacgtgcgcgacgaggacccgcgcgccgtggcggctgcgttcccgcccttcctcggcaagctgcgccggaccagggacttgttggacaacagctactaccacaacaacctggcgcgggtagtcacctttaattccgactggcagctgctcacggagaaggag

SEQ ID NO: 150362 - DNA, 1626 bp, Zea Mays
tcagggaaagactgaattactttatggtgtgatggagaaaacacttagcttgcttcagatgggctttaccgaggaagaggtatcatcagctattgacaattttgaccagagagcaactgttcaggagctggctgactcaattttggcaaggcgaatagccaatagcattgagcagaaagagataaaagttgaatctgacttcctagacgaggcagaaactgattattcttcataccagccctcatactctgatgtaagctattatgacgatgacaacaacaatacacgggttaaaagggctaagcatatatttatagatgacataggggcctccagtagtcaccttggcgatccatggtctatggggcagcgtgcagggacaaatgatatgtctgttaaggtagaactggaggcaatgacaccaggtcgccgtgcaaatgtacaaggtgaccttgctaaacccccatttttcctatatggaaatgtggttgaggttccaaaagacacatggcatcaactcaaacaattcttatataatgtggagcctgagtttgtgaacagtcagtccttctccgctctaactcgaagggaaggttacattcacaaccttccagtggagaaaagaagtgtcgtggttccaaagtctccaatgactattgaagaagcacttccattcactcgacagtggtggccatcatgggatacaagaaaacatatcagtgttattactacagaggctgcagggattgagcagacatgtgaaagattggggggcatggttagagagtcaagaggagtgctttcacaagcaagacaaatgcagattatacaccagtgcagggtttcaaaccttatttgggtcggtcgggacaggttaggccctttggagcctcgtcaagtggaaaagatactaggttacccttataaccacacaaatttgtttgaattaaaccaacctgatcgacttgctgccatgaaatatgcattccagactgatacattgtcatatcttttatcagtcctgaaaggtaagtatcaagatggaataagagtgttatccatctacagtggcattggaggtgcagaagtagcacttcatcgtctaggcatccctttgaaatgtgtgatatctgttgaggaatctgaggtgaatagaaaaattctaagaaggtggtggttgaaaactgaacaaactggagtactaaggcaacatgcaggaatttggaagctcaaaacacatgtgattgaagacttggtgaaagagtttggtggttttgatctgattatcggtgggaattatacttcttgcaaaggtggtactacagtaaatacgacaatgggcatggattcgaaccgcttctatgagtataaccgtgttgtcaaaagggtaaggactgcagttggactcagttgaagagtccatctttaatgaagatcgcacgtcttcataaaactagcctgtaggaggatatagaatcatctgatccgtaaatgtaggatgctacaagtaaactttacaagtcttgggacttgattattgcaagcaattgacttatcctttattttggtttgtgtttgttggtcacttctaatgtttgataatcattctgcgttactcctttcaaa

SEQ ID NO: 150363 - DNA, 849 bp, Zea Mays
acgtgcagccgaacaaagccgcgggcgctgctgttgcgttttgttcccactaccgtccgccacagcctacgcaccttgccggctcgcgggggttttgccgtgcgccttctccctcctcctcgctcgcggcgacgaccgggggaccgcagccaccgtacgccaggtgcgcaggtcttctttgggcccgtcgccggcgacgagcacccaccaggggcgtccgagtctggaatcctatctgatcggaaaatggttaaggtcgaagatcaggccgaggacggcggcgcagatgctgatgccaggggtctcagggagtctgctctggatccgctgcctgtctcggtgcatgccagcttgaaggaggaggaaggtcaaccaagttcttcatctggtaaactaagatcacagtttattggaatggggttttcatccaagctggtagacaaggttctccagagacatggtgatgatgattctaacacaattttggaatctcttctgtcctattctgaccttcagcagtctggatcagagtcatcagattctttcggaagtttttttgataatgataatgaagagaacaattctccttcagagtctaggaaaggaatctaccaagacatcaagccagagcttgattctttctcagagaagtggtcatttttactcagaacaatgaacttttcacaacaagaagttgatttagccttcaagcaactaggtacatacacttctgcgcagttgacaaatttgttattgagtgttcagattgcgcactgttagtttgttttatgtaattttttccaacaactatactgcactattgcccttgtagacccaaacagtactgat

SEQ ID NO: 150364 - DNA, 845 bp, Zea Mays
acgtgcagccgaacaaagccgcgggcgctgctgttgcgttttgttcccactaccgtccgccacagcctacgcaccttgccggctcgcgggggttttgccgtgcgccttctccctcctcctcgctcgcggcgacgaccgggggaccgcagccaccgtacgccaggtgcgcaggtcttctttgggcccgtcgccggcgacgagcacccaccaggggcgtccgagtctggaatcctatctgatcggaaaatggttaaggtcgaagatcaggccgaggacggcggcgcagatgctgatgccaggggtctcagggagtctgctctggatccgctgcctgtctcggtgcatgccagcttgaaggaggaggaaggtcaaccaagttcttcatctggtaaactaagatcacagtttattggaatggggttttcatccaagctggtagacaaggttctccagagacatggtgatgatgattctaacacaattttggaatctcttctgtcctattctgaccttcagcagtctggatcagagtcatcagattctttcggaagtttttttgataatgataatgaagagaacaattctccttcagagtctaggaaaggaatctaccaagacatcaagagcttgattctttctcagagaagtggtcatttttactcagaacaatgaacttttcacaacaagaagttgatttagccttcaagcaactaggtacatacacttctgcgcagttgacaaatttgttattgagtgttcagattgcgcactgttagtttgttttatgtaattttttccaacaactatactgcactattgcccttgtagacccaaacagtactgat

SEQ ID NO: 150365 - DNA, 112 bp, Zea Mays
gattttgatgtggttgtgtatgatgtactttatattttggcatactatgcacaaaaacaaatgccttctatgaccatcgtgatttatacattttcaaacaaaattttacgat

SEQ ID NO: 150366 - DNA, 1018 bp, Zea Mays
gcttgtccgttagttgctgctcccagttcagtaggccctctccataccacagcgcagcgtcagagatcccactacttcttgtttctagtctagtataaataaatgtgcatccaagtcactgatcaggagcaccaagccagctagcaactcaaaggaggaagactagaagatatatagccttctccttgtgtgacactcataaataaactgttagcagcttgcgagcactgcaagatctttctgctggcatctgaatagtcagctgctggcatctatccgggcacctctcgaccagccagaggcagatacctgatcccaaactagctggccaacatggcgaacgatgaccctgtggacgacgaaaaccccagatccaacaccactaataacagcatcaatgacaagttggctgaagtgttcgacatggtctcagtccacaaacatcagtataaaatgccgacgttcgccttccacaccaacaagacgatcaccgaagctttacatcggcctctactgcgagcacaagctagcatggtcacaacctcctagcctatatatgaactggtgttatcccgactgaacttttctttttgttgacacctttcgtcaggcctctccaccagaggttgactcgtatgtctgttttctggtttctcataccagaattaacgttcttgaccttgtaaggcctcttcttgaccttgtaaggctctcactctgtgtctgcatccttctcgcatcccttgtttccttctttcccactacatgcaggatcagtcccgatattgccgtgtttgccagccttctgcatccacctactttctgttcccttctatccctcctgagctaattgttgctcctatgtaatccgtgtttattatttcggtaccatgatgatgaaattagttttaatttattgtaagactagttcagttaatgttttcaccctgtggatgctctgcaatacatgaacatacatatgcaaacactcattcatccatttattttttattaaaca

SEQ ID NO: 150367 - DNA, 702 bp, Zea Mays
aagttctcaagctattccttactcctgacatgttgtatctgtctggtttttttttttttggaaacgggtattttttttcattgcctttctgcagatacctgatcccaaactagctggccaacatggcgaacgatgaccctgtggacgacgaaaaccccagatccaacaccactaataacagcatcaatgacaagttggctgaagtgttcgacatggtctcagtccacaaacatcagtataaaatgccgacgttcgccttccacaccaacaagacgatcaccgaagctttacatcggcctctactgcgagcacaagctagcatggtcacaacctcctagcctatatatgaactggtgttatcccgactgaacttttctttttgttgacacctttcgtcaggcctctccaccagaggttgactcgtatgtctgttttctggtttctcataccagaattaacgttcttgaccttgtaaggcctcttcttgaccttgtaaggctctcactctgtgtctgcatccttctcgcatcccttgtttccttctttcccactacatgcaggatcagtcccgatattgccgtgtttgccagccttctgcatccacctactttctgttcccttctatccctcctgagctaattgttgctcctatgtaatccgtgtttattatttcggtaccatgatgatgaaattagttttaat

SEQ ID NO: 150368 - DNA, 909 bp, Zea Mays
gcttgtccgttagttgctgctcccagttcagtaggccctctccataccacagcgcagcgtcagagatcccactacttcttgtttctagtctagtataaataaatgtgcatccaagtcactgatcaggagcaccaagccagctagcaactcaaaggaggaagactagaagatatatagccttctccttgtgtgacactcataaataaactgttagcagcttgcgagcactgcaagatctttctgctggcatctgaatagtcagctgctggcatctatccgggcacctctcgaccagccagagatacctgatcccaaactagctggccaacatggcgaacgatgaccctgtggacgacgaaaaccccagatccaacaccactaataacagcatcaatgacaagttggctgaagtgttcgacatggtctcagtccacaaacatcagtataaaatgccgacgttcgccttccacaccaacaagacgatcaccgaagctttacatcggcctctactgcgagcacaagctagcatggtcacaacctcctagcctatatatgaactggtgttatcccgactgaacttttctttttgttgacacctttcgtcaggcctctccaccagaggttgactcgtatgtctgttttctggtttctcataccagaattaacgttcttgaccttgtaaggcctcttcttgaccttgtaaggctctcactctgtgtctgcatccttctcgcatcccttgtttccttctttcccactacatgcaggatcagtcccgatattgccgtgtttgccagccttctgcatccacctactttctgttcccttctatccctcctgagctaattgttgctcctatgtaatccgtgtttattatttcggtaccatgatgatgaaattagttttaat

SEQ ID NO: 150369 - DNA, 719 bp, Zea Mays
gcttgtccgttagttgctgctcccagttcagtaggccctctccataccacagcgcagcgtcagagatcccactacttcttgtttctagtctagtataaataaatgtgcatccaagtcactgatcaggagcaccaagccagctagcaactcaaaggaggaagactagaagatatatagccttctccttgtgtgacactcataaataaactgttagcagcttgcgagcactgcaagatctttctgctggcatctgaatagtcagctgctggcatctatccgggcacctctcgaccagccagagatacctgatcccaaactagctggccaacatggcgaacgatgaccctgtggacgacgaaaaccccagatccaacaccactaataacagcatcaatgacaagttggctgaagtgttcgacatggtctcagtccacaaacatcagtataaaatgccgacgttcgccttccacaccaacaagacgatcaccgaagctttacatcggcctctactgcgagcacaagctagcatggcctctccaccagaggttgactcgtatgtctgttttctggtttctcataccagaattaacgttcttgaccttgtaaggcctcttcttgaccttgatcagtcccgatattgccgtgtttgccagccttctgcatccacctactttctgttcccttctatccctcctgagctaattgttgctcctatgtaa

SEQ ID NO: 150370 - DNA, 997 bp, Zea Mays
gcttgtccgttagttgctgctcccagttcagtaggccctctccataccacagcgcagcgtcagagatcccactacttcttgtttctagtctagtataaataaatgtgcatccaagtcactgatcaggagcaccaagccagctagcaactcaaaggaggaagactagaagatatatagccttctccttgtgtgacactcataaataaactgttagcagcttgcgagcactgcaagatctttctgctggcatctgaatagtcagctgctggcatctatccgggcacctctcgaccagccagaggcagatacctgatcccaaactagctggccaacatggcgaacgatgaccctgtggacgacgaaaaccccagatccaacaccactaataacagcatcaatgtaagtgtgttgattagcatcattcgtttgaagagtggacgagtggacagatagatagggcaaagaaatgcagtccgtgcatgtatatatatgcaacttctttaaatttaacatcgatctttatttctaggacaagttggctgaagtgttcgacatggtctcagtccacaaacatcagtataaaatgccgacgttcgccttccacaccaacaagacgatcaccgaagctttacatcggcctctactgcgagcacaagctagcatggtcacaacctcctagcctatatatgaactggtgttatcccgactgaacttttctttttgttgacacctttcgtcaggcctctccaccagaggttgactcgtatgtctgttttctggtttctcataccagaattaacgttcttgaccttgtaaggcctcttcttgaccttgtaaggctctcactctgtgtctgcatccttctcgcatcccttgtttccttctttcccactacatgcaggatcagtcccgatattgccgtgtttgccagccttctgcatccacctactttctgttcccttctatccctcctgagctaattgttgctcctatgtaa

SEQ ID NO: 150371 - DNA, 282 bp, Zea Mays
ctctgcgaaagctgcgacggaggcggaaccgctagcgggcggcggcggaggcaggtgaacgaacgagacgacggctgcttcggtgatggtggagaatccctggcgctgcttgtgcttggcgttggccgtgcatttgacgaagacgattccccggcacttcaccaccttgtagaaccagcacaggcacttcaccgccgcacagaccatcttcttctttgttcccccgctcgcctcggggccttctcgtcttccttccgtgcgattcatctagcaccgagtcgg

SEQ ID NO: 150372 - DNA, 107 bp, Zea Mays
ctcctaccccttcgtccatcggtggtctgtcgtctaaacgccacgaatattcaagagaaagacgaaggggtgcgaagactggagagagcaacaacaatgacgatgga

SEQ ID NO: 150373 - DNA, 1766 bp, Zea Mays
ctcgactggagcagtcagtccactccagtacctctgccgcacgctgctcccgccgcgccaccagctcaccaccgctgctagccacgatgcggtcgccgcgaatccccggccgccgcgacgcggcgtcgccgcagacgccaaaggggttcaacccgggcgaccccgtggaggtggtccccgacgaggcaggcctgcacggggcccacttcgctgccgtcgtcgtggggcccagcgccaagccccgcggctacaccgtcgaatacgactccctcctcgagtccgagggctccgaccgcccgctccgggaggcactgccggcgcggagccttcgccctcgcccgcgccggcgcgcccagcaaggtcagggtatgcttcccggagaccagggaggtcatggagttcgacgccgccgacgtccgcccgcacctcgagtgggttgacggcgagtggcgctccccagataacatggagatacccaagacaatgccatatgcaaaaggaatgcaaattgaagtttccaagttgggaagacaattctgttgttgcttggtcacctgcagttgtcgcaaagactatctggaagaataacctattagtcgactacactctttcaaagtgttacggtactacattgtctgaggagattgttgatgtgaagcatgtgaggccttgcccaccacaagcatcagagattagtttctgcatcaatgatgaggttgaagcattccaaggtgattgctggtggctaggggtgattactaatgttcttccagaattcaagtacacatttaagtcaacgcatttagggacggaagttgaggtgaaccagaaatttctgaggcttcgatatgactgggttggtgatcaatgggaacaagaatcaaagaatgtgcccaaggcaaaatttacacaaggtgtcaaggttgaagtctgcagcgacgatgaaggttttcgtggagcctggttcgaggcgactgttgttaaagctgtcggcagcaagttcctcgtggagtatgctacgctgaaggccgatgacgggaccaagcctctgaaagaatctgtagaagcacggcacatcagaccttgccctccagatatccctgccactgatggattcaaactacttgacgaggtcgatgccttctgcaacgacgcgtggtgggtcggtgtggtatccaaggtcctcggcgagaagaggtgcacggtctacttcaggccttggaaggaagagatggagttcgagcatgcgcagctgaggttgcactgtgactggatgggcgggaggtggatgcgggcttccccggcactggagatgtgaaggctgaagagccacgcgatggcgttagacagtagcttggtgattgtatggggtaatacccatagttaaaagtgtgtcgtcactaaggtaccatgttatgttgtcttcctgcatgaagttgtcctgtgccatctgcagcaagttggatgatgatcattgtgcagttgctgcaagttgccacaccaccatcaggtctgaatctgaacgcttgccaatggttgatcccattgtgttgtactaggaactagtaagcgcattcagccagtgttaagggtgaagaaccgggagctgtggtgctaaatgttaggggtgtcgagtgaacccttattgatcgccggcgacttgtttgttttgcactagactgcttgttttagcatccctatatgctatcttaaggttgtctccaacagtgaactgtaaatggtctgctccgctaaatttagagttc

SEQ ID NO: 150374 - DNA, 1870 bp, Zea Mays
gttgccctcgactggagcagtcagtccactccagtacctctgccgcacgctgctcccgccgcgccaccagctcaccaccgctgctagccacgatgcggtcgccgcgaatccccggccgccgcgacgcggcgtcgccgcagacgccaaaggggttcaacccgggcgaccccgtggaggtggtccccgacgaggcaggcctgcacggggcccacttcgctgccgtcgtcgtggggcccagcgccaagccccgcggctacaccgtcgaatacgactccctcctcgagtccgagggctccgaccgcccgctccgggaggcactgccggcgcggagccttcgccctcgcccaccgccgccgcccgcgcccgcatcggaggccccgcccgcggagcacgccgccgtcgacgcgctcatcgacgacgcctggtggctcggggtcgccctcgcccgcgccggcgcgcccagcaaggtcagggtatgcttcccggagaccagggaggtcatggagttcgacgccgccgacgtccgcccgcacctcgagtgggttgacggcgagtggcgctccccagataacatgatacccaagacaatgccatatgcaaaaggaatgcaaattgaagtttccaagttgggaagacaattctgttgttgcttggtcacctgcagttgtcgcaaagactatctggaagaataacctattagtcgactacactctttcaaagtgttacggtactacattgtctgaggagattgttgatgtgaagcatgtgaggccttgcccaccacaagcatcagagattagtttctgcatcaatgatgaggttgaagcattccaaggtgattgctggtggctaggggtgattactaatgttcttccagaattcaagtacacatttaagtcaacgcatttagggacggaagttgaggtgaaccagaaatttctgaggcttcgatatgactgggttggtgatcaatgggaacaagaatcaaagaatgtgcccaaggcaaaatttacacaaggtgtcaaggttgaagtctgcagcgacgatgaaggttttcgtggagcctggttcgaggcgactgttgttaaagctgtcggcagcaagttcctcgtggagtatgctacgctgaaggccgatgacgggaccaagcctctgaaagaatctgtagaagcacggcacatcagaccttgccctccagatatccctgccactgatggattcaaactacttgacgaggtcgatgccttctgcaacgacgcgtggtgggtcggtgtggtatccaaggtcctcggcgagaagaggtgcacggtctacttcaggccttggaaggaagagatggagttcgagcatgcgcagctgaggttgcactgtgactggatgggcgggaggtggatgcgggcttccccggcactggagatgtgaaggctgaagagccacgcgatggcgttagacagtagcttggtgattgtatggggtaatacccatagttaaaagtgtgtcgtcactaaggtaccatgttatgttgtcttcctgcatgaagttgtcctgtgccatctgcagcaagttggatgatgatcattgtgcagttgctgcaagttgccacaccaccatcaggtctgaatctgaacgcttgccaatggttgatcccattgtgttgtactaggaactagtaagcgcattcagccagtgttaagggtgaagaaccgggagctgtggtgctaaatgttaggggtgtcgagtgaacccttattgatcgccggcgacttgtttgttttgcactagactgcttgttttagcatccctatatgctatcttaaggttgtctccaacagtgaactgtaaatggtctgctccgctaaatttagagttc

SEQ ID NO: 150375 - DNA, 1873 bp, Zea Mays
gttgccctcgactggagcagtcagtccactccagtacctctgccgcacgctgctcccgccgcgccaccagctcaccaccgctgctagccacgatgcggtcgccgcgaatccccggccgccgcgacgcggcgtcgccgcagacgccaaaggggttcaacccgggcgaccccgtggaggtggtccccgacgaggcaggcctgcacggggcccacttcgctgccgtcgtcgtggggcccagcgccaagccccgcggctacaccgtcgaatacgactccctcctcgagtccgagggctccgaccgcccgctccgggaggcactgccggcgcggagccttcgccctcgcccaccgccgccgcccgcgcccgcatcggaggccccgcccgcggagcacgccgccgtcgacgcgctcatcgacgacgcctggtggctcggggtcgccctcgcccgcgccggcgcgcccagcaaggtcagggtatgcttcccggagaccagggaggtcatggagttcgacgccgccgacgtccgcccgcacctcgagtgggttgacggcgagtggcgctccccagataacatggagatacccaagacaatgccatatgcaaaaggaatgcaaattgaagtttccaagttgggaagacaattctgttgttgcttggtcacctgcagttgtcgcaaagactatctggaagaataacctattagtcgactacactctttcaaagtgttacggtactacattgtctgaggagattgttgatgtgaagcatgtgaggccttgcccaccacaagcatcagagattagtttctgcatcaatgatgaggttgaagcattccaaggtgattgctggtggctaggggtgattactaatgttcttccagaattcaagtacacatttaagtcaacgcatttagggacggaagttgaggtgaaccagaaatttctgaggcttcgatatgactgggttggtgatcaatgggaacaagaatcaaagaatgtgcccaaggcaaaatttacacaaggtgtcaaggttgaagtctgcagcgacgatgaaggttttcgtggagcctggttcgaggcgactgttgttaaagctgtcggcagcaagttcctcgtggagtatgctacgctgaaggccgatgacgggaccaagcctctgaaagaatctgtagaagcacggcacatcagaccttgccctccagatatccctgccactgatggattcaaactacttgacgaggtcgatgccttctgcaacgacgcgtggtgggtcggtgtggtatccaaggtcctcggcgagaagaggtgcacggtctacttcaggccttggaaggaagagatggagttcgagcatgcgcagctgaggttgcactgtgactggatgggcgggaggtggatgcgggcttccccggcactggagatgtgaaggctgaagagccacgcgatggcgttagacagtagcttggtgattgtatggggtaatacccatagttaaaagtgtgtcgtcactaaggtaccatgttatgttgtcttcctgcatgaagttgtcctgtgccatctgcagcaagttggatgatgatcattgtgcagttgctgcaagttgccacaccaccatcaggtctgaatctgaacgcttgccaatggttgatcccattgtgttgtactaggaactagtaagcgcattcagccagtgttaagggtgaagaaccgggagctgtggtgctaaatgttaggggtgtcgagtgaacccttattgatcgccggcgacttgtttgttttgcactagactgcttgttttagcatccctatatgctatcttaaggttgtctccaacagtgaactgtaaatggtctgctccgctaaatttagagttc

SEQ ID NO: 150376 - DNA, 270 bp, Zea Mays
atgtccttcaactcccgcccttccacccgctccttcaacacactcctccaatctctcatctacgcatgttgcctctgcctcgccaccgcgctcttctgcgccacaacaaccaagctctacatcatgcccaacctcgtctcctacaacatcgtgctcatggaccttgtcgtcatcggtgacttctactctatgctgaaggtgctcgacaaaatgactgactgggggatcatcccggatgtcgtcatttacactatggttctcactacctaa

SEQ ID NO: 150377 - DNA, 1491 bp, Zea Mays
ccatggcgctcgaaagcagcttagcttggtggcctcaggagtcgtagagaaatttctcacggatttctggatttattttctttcttattaatggcagcgcgtcgcatcgctgtcatcgtggtggcatcggtcttgtcggcaatggcggtcatgggcatagcgttcatctggacaaggatgaggtccagatcaagggacgatctcctccgtgcagacatgggcgacgacgggtcgtccggcgagatgatccgcgccatcgcggcgtcgcagctgagcttcaagtaccaggagctgcgcgcggcgacggacgagttcagccagacgaacaagctcgggcagggaggctacggctccgtgtacaggggcgtgctggcggacgggcgggaggtggcggtgaagcggctcttcttcaacacgcggcagtgggcggagcagttcttcaacgaggtgaagctggtgagccaggtgcagcacaagaacctggtcaagctgctgggctgcagcgtggaggggcccgagagcctgctcgtctacgagtacctctgcaacaccagcctcgaccactacctcttcgacgcgttcaagaagaacgcgctggactgggagcggaggttcgagatcgtgctgggcacggcggagggcctctcctacctgcacagcgcctcggaggtccggatcatacaccgcgacatcaaggccagcaacgtcctgctggacgacaggttcaggccgaagatcgccgacttcggcctcgccaggaacttcatggacgaccagagccacctcagcaccggcctcgccggaacttttgggtacatggctccggagtacatcgtccacgggcagctcaccgagaaggccgacatctacagctacggcgtgctggtcctcgagatcgtcaccggccggaagagccacaactcggtggcgtcatctgcagaaggcctctcactcatggcactgatatggagacactacaccgcgggcaccctgacggagctgctggacccgaacctccgcgagcagtgctcggaggaggacgccctccgggtgttccacgtcggcctgctgtgcgcccaggcgtcgccgaaccttcggccgcccatgtggaaggtggtggagatgctgagcggcagggatcacaaggcggtggcgcttccccggcccacccagcctcccttcatcaacgtcaaggggtccagcggcaagagcgacagctccggcgggtcggcgtccaactccgacaagtcgcccttctcgctgaaccagctgtcagtcagtggggtgcaggccaggtaaaagctagctagctagctgcggatatcatgtgtttgggctagcggcattttttttcaagttttgtaagtcgtggcgtggatatatcataggtttgacttcgattttctggcttcgttgatctggtaacatactctgattattgctagtatgtgcaagtctttggaagaaagattcatgtttgcaaataaaaca

SEQ ID NO: 150378 - DNA, 1454 bp, Zea Mays
gtggattggggcgagtatcatgcaaatacaaacgatcgagaggttgaaactgcaaaatgacgcgtcgcatcgctgtcatcgtggtggcatcggtcttgtcggcaatggcggtcatgggcatagcgttcatctggacaaggatgaggtccagatcaagggacgatctcctccgtgcagacatgggcgacgacgggtcgtccggcgagatgatccgcgccatcgcggcgtcgcagctgagcttcaagtaccaggagctgcgcgcggcgacggacgagttcagccagacgaacaagctcgggcagggaggctacggctccgtgtacaggggcgtgctggcggacgggcgggaggtggcggtgaagcggctcttcttcaacacgcggcagtgggcggagcagttcttcaacgaggtgaagctggtgagccaggtgcagcacaagaacctggtcaagctgctgggctgcagcgtggaggggcccgagagcctgctcgtctacgagtacctctgcaacaccagcctcgaccactacctcttcgacgcgttcaagaagaacgcgctggactgggagcggaggttcgagatcgtgctgggcacggcggagggcctctcctacctgcacagcgcctcggaggtccggatcatacaccgcgacatcaaggccagcaacgtcctgctggacgacaggttcaggccgaagatcgccgacttcggcctcgccaggaacttcatggacgaccagagccacctcagcaccggcctcgccggaacttttgggtacatggctccggagtacatcgtccacgggcagctcaccgagaaggccgacatctacagctacggcgtgctggtcctcgagatcgtcaccggccggaagagccacaactcggtggcgtcatctgcagaaggcctctcactcatggcactgatatggagacactacaccgcgggcaccctgacggagctgctggacccgaacctccgcgagcagtgctcggaggaggacgccctccgggtgttccacgtcggcctgctgtgcgcccaggcgtcgccgaaccttcggccgcccatgtggaaggtggtggagatgctgagcggcagggatcacaaggcggtggcgcttccccggcccacccagcctcccttcatcaacgtcaaggggtccagcggcaagagcgacagctccggcgggtcggcgtccaactccgacaagtcgcccttctcgctgaaccagctgtcagtcagtggggtgcaggccaggtaaaagctagctagctagctgcggatatcatgtgtttgggctagcggcattttttttcaagttttgtaagtcgtggcgtggatatatcataggtttgacttcgattttctggcttcgttgatctggtaacatactctgattattgctagtatgtgcaagtctttggaagaaagattcatgtttgcaaataaaaca

SEQ ID NO: 150379 - DNA, 1687 bp, Zea Mays
cgccgccgcgctcgtgcggaacgtcacggccgccgcgccggccgccaaggactactactacgcggcgtcggcgtccggccgcgcgccgccggcgtacgcggcggcgcagtgctggaggtcgctcaacgccagcgcgtgcgccacgtgcgtggccagcgcccgcgaccggctcctccgcaactgcctcccggccgcgcccgaggggtacggcctcaacgccggctgcgtcgtcaggtactccacgcggcccttctacctgccggccagcgccggcggcggcgggggatcgtccgcgcgtcgcatcgctgtcatcgtggtggcatcggtcttgtcggcaatggcggtcatgggcatagcgttcatctggacaaggatgaggtccagatcaagggacgatctcctccgtgcagacatgggcgacgacgggtcgtccggcgagatgatccgcgccatcgcggcgtcgcagctgagcttcaagtaccaggagctgcgcgcggcgacggacgagttcagccagacgaacaagctcgggcagggaggctacggctccgtgtacaggggcgtgctggcggacgggcgggaggtggcggtgaagcggctcttcttcaacacgcggcagtgggcggagcagttcttcaacgaggtgaagctggtgagccaggtgcagcacaagaacctggtcaagctgctgggctgcagcgtggaggggcccgagagcctgctcgtctacgagtacctctgcaacaccagcctcgaccactacctcttcgacgcgttcaagaagaacgcgctggactgggagcggaggttcgagatcgtgctgggcacggcggagggcctctcctacctgcacagcgcctcggaggtccggatcatacaccgcgacatcaaggccagcaacgtcctgctggacgacaggttcaggccgaagatcgccgacttcggcctcgccaggaacttcatggacgaccagagccacctcagcaccggcctcgccggaacttttgggtacatggctccggagtacatcgtccacgggcagctcaccgagaaggccgacatctacagctacggcgtgctggtcctcgagatcgtcaccggccggaagagccacaactcggtggcgtcatctgcagaaggcctctcactcatggcactgatatggagacactacaccgcgggcaccctgacggagctgctggacccgaacctccgcgagcagtgctcggaggaggacgccctccgggtgttccacgtcggcctgctgtgcgcccaggcgtcgccgaaccttcggccgcccatgtggaaggtggtggagatgctgagcggcagggatcacaaggcggtggcgcttccccggcccacccagcctcccttcatcaacgtcaaggggtccagcggcaagagcgacagctccggcgggtcggcgtccaactccgacaagtcgcccttctcgctgaaccagctgtcagtcagtggggtgcaggccaggtaaaagctagctagctagctgcggatatcatgtgtttgggctagcggcattttttttcaagttttgtaagtcgtggcgtggatatatcataggtttgacttcgattttctggcttcgttgatctggtaacatactctgattattgctagtatgtgcaagtctttggaagaaagattcatgtttgcaaataaaaca

SEQ ID NO: 150380 - DNA, 241 bp, Zea Mays
aacaaaatttcccagagttattcagtacttgcaatcacatcagagcaactcagcagttgcatccacaccacaccagtagttgcaattacaacacaccagcagttgcaatcattttgtttacattttttaacagatatttggatagaattatacagcagttgcaatcacacctaatgcggggttgcaatcacaccacaccagcagttgcaattacacctctttgtcctgacactaaaaccag

SEQ ID NO: 150381 - DNA, 1836 bp, Zea Mays
gtctcggcaatgatgctcctctgattctccccacccgtggctgcgcccatccgtctacaagtaccacctggccgcgcggttggttccaatttccagacggcagtccactggtttttgcttgcatatcctttgtttaggccagagttgagttgtgttccaacttccaagtcttgggttgcggaatcgccggcctcgctcaatcgatggaaaaccataatccattacattctcagattgctgaagtgaaaatggacatctcagcatcagcttctgttgcatcagggaacaaattctgcaagggtggtgcctgtgatttctctgattccagtaactcctcgaaagatgccaaggagagatccacgtccatgaggaagcttataatcgcagtgatcctttgcatcatattcatgacggtggaagtggtcgggggcatcaaagcaaacagtcttgccatcttaactgatgcggcgcaccttctttctgatgtggcagcatttgccatatcgttattctctctctgggctgctggatgggaagcaacaccgcagcagtcatatgggttcttccggattgagattcttggtgccttggtctccattcagctcatatggctacttgctggcatactggtatatgaggctattgtaaggctcattaacgagagtggcgatgtgcagggctccctcatgtttgctgtgtcggcgtttggactgtttgtcaacattataatggctgtattgctaggccatgaccacgggcacggccatggacacagccatggacatccacatgaccatggtcatggtgattcagacgatggccattctcaccatgaagaaccagaacagggccatgttcatcatcatgagcatagccatggaagttctattactgtcacaacacatcaccaccaccactcaggcactggacaacaccatgacgctgaggagccactgatcaagcacgaggccgactgtgagggcacccaatctgctgctaagaagcctcgacgcaatataaacgtacacagcgcttaccttcatgtgcttggggactccatccagagcatcggggtgatgatcggcggggctatcatctggtacaagcccgagtggaaaatcatcgatctgatctgcaccctcatcttctcggtggtcgtgctgttcaccacgatcaggatgctgcgcaacatcctcgaggtcctgatggaaagcacgccccgtgagatcgacgccaccaggctggagagggggctctgcgagatggaaggcgtggttgccgtccacgagctgcatatctgggccatcacagtggggaaggtgctactggcttgccatgtgacggtcgccagggaagccgacgcagacgagatccttgacaaggtgattgggtacatcaagacggagtacaacatcagccatgtgaccattcaggtcgagcgtgaatagagggggagctgtcttttgggctgtcagggcataaatggcgtcacgccttcactggttatcttactctgtcggttaaaacttttttttggcacctgggaaggcatcaggcagccatcggagtcttgatgtgcttgcaagttcatctgtggttcaagctttgatggtcagtagtgttatctgttactactagtctattaggcgggggtaggcgtcaaccagtgtgtacgggtttgattttcggtcatgctgttaacagcattgcggttcgtcgaactggatatgtagtttagtacgctgtgtcatcacctcttgtgtaagggaacgcttcttttctgtggtatggaagatgtgaacttcgtgatataaacaaaatagtaatataaagcaa

SEQ ID NO: 150382 - DNA, 1900 bp, Zea Mays
gaggggtctcggcaatgatgctcctctgattctccccacccgtggctgcgcccatccgtctacaagtaccacctggccgcgcggttggttccaatttccagacggcagtccactggtttttgcttgcatatcctttgtttaggccagagttgagttgtgttccaacttccaagtcttgggttgcggaatcgccggcctcgctcaatcgatggaaaaccataatccattacattctcagattgctgaagtgaaaatggacatctcagcatcagcttctgttgcatcagggaacaaattctgcaagggtggtgcctgtgatttctctgattccagtaactcctcgaaagatgccaaggagagatccacgtccatgaggaagcttataatcgcagtgatcctttgcatcatattcatgacggtggaagtggtcgggggcatcaaagcaaacagtcttgccatcttaactgatgcggcgcaccttctttctgatgtggcagcatttgccatatcgttattctctctctgggctgctggatgggaagcaacaccgcagcagtcatatgggttcttccggattgagattcttggtgccttggtctccattcagctcatatggctacttgctggcatactggtatatgaggctattgtaaggctcattaacgagagtggcgatgtgcagggctccctcatgtttgctgtgtcggcgtttggactgtttgtcaacattataatggctgtattgctaggccatgaccacgggcacggccatggacacagccatggacatccacatgaccatggtcatggtgattcagacgatggccattctcaccatgaagaaccagaacagggccatgttcatcatcatgagcatagccatggaagttctattactgtcacaacacatcaccaccaccactcaggcactggacaacaccatgacgctgaggagccactgatcaagcacgaggccgactgtgagggcacccaatctgctgctaagaagcctcgacgcaatataaacgtacacagcgcttaccttcatgtgcttggggactccatccagagcatcggggtgatgatcggcggggctatcatctggtacaagcccgagtggaaaatcatcgatctgatctgcaccctcatcttctcggtggtcgtgctgttcaccacgatcaggatgctgcgcaacatcctcgaggtcctgatggaaagcacgccccgtgagatcgacgccaccaggctggagagggggctctgcgagatggaaggcgtggttgccgtccacgagctgcatatctgggccatcacagtggggaaggtgctactggcttgccatgtgacggtcgccagggaagccgacgcagacgagatccttgacaaggtgattgggtacatcaagacggagtacaacatcagccatgtgaccattcaggtcgagcgtgaatagagggggagctgtcttttgggctgtcagggcataaatggcgtcacgccttcactggttatcttactctgtcggttaaaacttttttttggcacctgggaaggcatcaggcagccatcggagtcttgatgtgcttgcaagttcatctgtggttcaagctttgatggtcagtagtgttatctgttactactagtctattaggcgggggtaggcgtcaaccagtgtgtacgggtttgattttcggtcatgctgttaacagcattgcggttcgtcgaactggatatgtagtttagtacgctgtgtcatcacctcttgtgtaagggaacgcttcttttctgtggtatggaagatgtgaacttcgtgattggcctgttaccgtttgtactgagcatgcttggacgtgttctctcggttgactcgactgtatgcttatggatgggggtctcaagc

SEQ ID NO: 150383 - DNA, 1895 bp, Zea Mays
attggttgcagtagcagccagccagtcacgctgttcgagcagagccccatcccctgatccccgtgccaggccgctcggccctcgacgccgtgagtcaggcaggcaggcgcctctttctgtccctccactcgggtctccacgccgccgccgccgccgccgcctcgaccgccccacgcatccgccgctcctctacccatcctcggcccgcggcccagggagaagaccgcacgggcgggcgagatggaaaaccataatccattacattctcagattgctgaagtgaaaatggacatctcagcatcagcttctgttgcatcagggaacaaattctgcaagggtggtgcctgtgatttctctgattccagtaactcctcgaaagatgccaaggagagatccacgtccatgaggaagcttataatcgcagtgatcctttgcatcatattcatgacggtggaagtggtcgggggcatcaaagcaaacagtcttgccatcttaactgatgcggcgcaccttctttctgatgtggcagcatttgccatatcgttattctctctctgggctgctggatgggaagcaacaccgcagcagtcatatgggttcttccggattgagattcttggtgccttggtctccattcagctcatatggctacttgctggcatactggtatatgaggctattgtaaggctcattaacgagagtggcgatgtgcagggctccctcatgtttgctgtgtcggcgtttggactgtttgtcaacattataatggctgtattgctaggccatgaccacgggcacggccatggacacagccatggacatccacatgaccatggtcatggtgattcagacgatggccattctcaccatgaagaaccagaacagggccatgttcatcatcatgagcatagccatggaagttctattactgtcacaacacatcaccaccaccactcaggcactggacaacaccatgacgctgaggagccactgatcaagcacgaggccgactgtgagggcacccaatctgctgctaagaagcctcgacgcaatataaacgtacacagcgcttaccttcatgtgcttggggactccatccagagcatcggggtgatgatcggcggggctatcatctggtacaagcccgagtggaaaatcatcgatctgatctgcaccctcatcttctcggtggtcgtgctgttcaccacgatcaggatgctgcgcaacatcctcgaggtcctgatggaaagcacgccccgtgagatcgacgccaccaggctggagagggggctctgcgagatggaaggcgtggttgccgtccacgagctgcatatctgggccatcacagtggggaaggtgctactggcttgccatgtgacggtcgccagggaagccgacgcagacgagatccttgacaaggtgattgggtacatcaagacggagtacaacatcagccatgtgaccattcaggtcgagcgtgaatagagggggagctgtcttttgggctgtcagggcataaatggcgtcacgccttcactggttatcttactctgtcggttaaaacttttttttggcacctgggaaggcatcaggcagccatcggagtcttgatgtgcttgcaagttcatctgtggttcaagctttgatggtcagtagtgttatctgttactactagtctattaggcgggggtaggcgtcaaccagtgtgtacgggtttgattttcggtcatgctgttaacagcattgcggttcgtcgaactggatatgtagtttagtacgctgtgtcatcacctcttgtgtaagggaacgcttcttttctgtggtatggaagatgtgaacttcgtgattggcctgttaccgtttgtactgagcatgcttggacgtgttctctcggt

SEQ ID NO: 150384 - DNA, 1466 bp, Zea Mays
gactgttcagcaaccgacgagttccgcatgtacaacttcaaagtgaagccctgctcccgcgcctactcgcacgactggaccgagtgccccttcgtgcacccgggcgagaacgcgcggcgccgcgacccgcgccgctactcctacagctgcgtgccctgccccgagttccgtaagggcggcgcctgccgcaagggcgacggctgcgagtacgcgcacggcgtcttcgagtgctggctccacccggcgcagtaccggacgcgcctctgcaaggacgaggtgggctgcgcgcgccgcatctgcttcttcgcgcacaagcgcgaggagctccgcgccgtcaacccctccgcggtgtccgtcggcatgcagatgcagcccaccgtgtcgccgccgccgcccagcggcctcggcgacatgctcagcccggcggcctggccctcctccccggcgagcaggctcaacaaggccgcgctcggcggcggccgggacctggacctggaccagtaccagcacatgctgttcgacacggtgtcgtcgccgagggccaactggggctcggccggcgggatcggctcgccgcttccccccgccagggccgtgccggactacgccgacctgctcggctccgtcgacgcggccagcatgttgtcccagctgcacgcgctgtcgctgaagcaggccggcggcgacatgccggcatacggctccatggtggcggacacgcagccgcacatggcgacgacgtcgcccatggtgggcctgggctccagcaccgcgttcgggctcgaccactccatggccaaggccatcctgagctcccgcgcctccgcgttcgccaagcgcagccagagcttcgtcgaccgcggcggccgcgccccggccgcgcgctcgctcatgtcgcagcaggccgccgccgccggcgcgccgcccgtgctctccgactgggcttcgccggacggcaggctggactggggagtccagggcgacgagctgcacaagttccgcaagtccgcatcgttcgcgttccgcgcgcgatccccaccgccccccgccgagccggacgtctcgtgggtcagctctcttgtcaaggacggccacgccggcgacatatttgcgcagtggccggagctggagcagatggtggcctgatccaccggccctcactggctcatagcatctagctgaccaaagttatttccttgaatcattttttcccctcctttctttgcttaattccattcgtacgagatgttttttttactagtacatagatagggctgtttcacaataacatttggtcatcaacaagaagcatagatacccaaagggagctttatagtatactgatgaggaggaacagccatcggtttataaatagttgtacacacgaattccctacatcacaaaggagtttatatttattttacttgatgtataagatatcggcagacacggtaagatttgattca

SEQ ID NO: 150385 - DNA, 1362 bp, Zea Mays
accaaccaaaatccaaaaacctcgtcagtttgggaacagcggaaaaccggccccccgcccgcctgctaggtgctagcaacagcagtcgccgccgatgggggtggactactacaaggtgctgggcgtcggccgcggcgccaccgacgacgagctcaagaaggcctaccgccgcctagccatgaagtaccatcccgataagaaccctacgccgcaggccgacaccctcttcaagcaggtctccgaggcctacgacgtgctcagcgacccgcagaagcgagccatctacgaccagtacggcgaggaaggcctcaaggccggcgcgcctccgcccgccgcctccacgcacggcgccggcgccggcgtccacaggttccgcttcaacacgaggagcgccgaggagatcttctccgagatattcggcggcgggtttgctggggcaggcccccgtacccccggcggcggcgtcccctccgggttcccgatgttcggcggcgctgctggggcaggggaggcgtcgagcgcggcgtcgcagaggaaggcgccgccgatcgagcggccgctggcttgcaccttggaggacctgtacaaaggggccactaagaagatgaagatctctagggatgtccttgacgccaccgggagaccaacaaaccgtgaggagatcctgacgatcgacatcaagccaggatggaagaagggcacaaagataacctttcccgagaaaggcaacgaggcacgcaacgttgtgccatcggatctggtgttcatagtagaagaacgggcgcaccccaggttcaggagagacgggaacgacctcatctacactcataagatctctctggtggaggcattgacaggctgcacagtccaagtgacgactctggacgggcggaccctgaccgttccggtgaagtcggtcgtcagccctacatacgaagaagtcgtgccgggcgaaggcatgccgatcacgagggagccgtctaggaaggggagcctgaggatcaagttccagatcaagttccccactagcctaacaggcgaccagaaggcggccatccaacagcttctgtcttgaagctctctctctctctctctctgtgtgtgtgtgtgtgtgtacaatgcgaggagtgttttcgtttgtggagtagttgtagtagtgacattagctgaatgcaccgtcacgtttttttttcatgctagtgttggcctattcttttctagctttggtggagctgcagctgtttgcgacatggtcatgacgctattcagtattcagatagattatcagttgctatgtctttgttggatcgggcctgtttgtttggtttctatagcttctacagtgttttttgtctctataaa

SEQ ID NO: 150386 - DNA, 2344 bp, Zea Mays
cttccacaaaccccataaccctagcaccgccgccaccatgtcctcatctccatcttcagtgaaccgccgtcccccgggcccgctagcgttggggctggagtccttggggaagaagatcagcatcggctggtctccgtcccgggcggcatcctctccatctcgtgtcgcacctacgcgaccccactgggccatggcttctttccccgtggtgcaggtcttttcggtcctcaggcttcatccctgtgcaagtgcagggataattgcttctaatctcccgaggctgcataacctaattcagaggcagagcaagggggcgtgagggagatgagggagatcatcagcatccatatcgcgtaggcaggcatccagtgacacctctgtcgggatcgcgagggatgcgttcaacacgttcttcagtgaaacgggcgcagggaagcacgttccaagggccctgtttgtcgacttggagcccactgtgattgacgaggtgaagaccggggcgtaccgccggcttttccatcctgagcagctcatctcacacaaggaagatgctgcgaacaacttcgcccgtggacattacacaggctcaaaatgttcttggaaacaaggggactgaaattgcaaaggtagcacatcggcgaactgatgcggaggcgggcgtggaggcgctcgatgccgtccagcaatcagtagttgtcgctgcatcggcgacttctttcccccaccagcatggccgcgtgaatggttcagttctttccaaagcctacagcttctaggaaatcggatacgatcacccgaaaaaggcaagggggaaatcttcttatagatctgttccgtcattgtgacaatcatttgggagagaaacaagtaaacaacccttttttccataaaactccatctggaagtgcacgacagccactacagttgactaccgatgtaaccaagatgatgcaaaagcatcagctggaaacgccatagttgctgctactgagtaccatccttatatccttatttcctaattgttgtggtgcatgtacaagtttttttaaaacgaattccgaattggttattgctgttagaactcatctgagtgctaccttctcatatgctccttttttctctctggctgttatgttaaaggaccagatacaagtcaatcttcccttcaaattacaatttaattattttatatctggattctgcaagacacttcaaaaaaaaatataacaacatgtggtccctatgttatctactagcatgagccattgttccatgcagtttggtacatagtggcgcatattttgttacatttactttctatattcttagtatatttatagcctatatccccaaactatatcatatacttagcacacacccattgttataatccacgtgcgcatggcgcgcgcactttactagtatacaacattgttggcaacaggagctgatctctttattacacgatgtattggcttggtttctaatgtccactttcccatccctgttttcccctccttcaggacttctttagtgatcttttggtacatcgctgctgatacaaacagcctacccagactgcttttgtgaagcacactgctttctgagaagccatttgcagtgcaaggatgaaacttggtcagagtgtttaccatatggattggcagccccaaataaagctctggattgtcctattcccatgacaaggttgtgctcttctcctgcagtgaaaccaaaaaagaaggcgcgctactgttcttccgttttcatgtcaatgcaacaacagataagtggaggtggcactaccaattccttgatgtaccaggaatgtttggattgttgtattctgacattgtttggctcaacatattcaagttggagtgtcaggtctccaacaattaaacaagatacggaatctgtgtaagcaagagcattcataccttgttagcttccttctctctctctcaagatcgatctagagaccaacaagatcatggacttcttcaagtttgacgtcgataacgtggtcatggtgaccggcgggaggaacaccgggcgtgtaggagtgatcaagaactaggagaagcacaaaggcagcttcgaggtcatcgacgtgctgcttggagctttttgcatgctatgtctagttttctcctatttgttgtacaggaaaacatagaatggaattcaaatttggtggtcgcaaaagtgtggagacttgaattcatataaagttaggcttaacattagtgcaaacagttgtattttagtttagatttagagtacacttatgtatgccttgtttgacaatgcttatttatgatatattgaatggtacttattt

SEQ ID NO: 150387 - DNA, 3347 bp, Zea Mays
gcctcgcagatgtcggcggccgccgcaggggcgcgctcctcctccacctccacccaatgaccccgcggccgcgcctcctcctgctcctcctcgccattgccttgcccgccgcctccgccgcgtccacgctcgccgtctcggcctcctccacctcccccaccgtctgcggcgtcgccgagcccaacggcaccgtctactgcgcgccgctccaggggccctccagctccaactccgccagccccgtcgcgccgtccgccatcgccttcgcggagctctccgcggggcgaggcttcgtgtgcggcctgcaagcggggggcgccgcgctcttctgctggccgtccacgccggcgccgcagtgggggcagctccggcggctctacaacgggcccgccccgctcgcggacctcgccgtcggcggcggccacgtcgcggcctacgacgcctccgggaaggtggtcctatggtggcgcggcgggggccggttccccgcgcgggccgacggcgcgttccgctccctcgtctccggggacggcttctcctgcgccgtccaggccaacgcgtccgccgccgtccgctgctggggcccgcagggtagcgccgtgcaggcgggcctcgccaacgcgtccgccgccccgtacctcgccgcggggggcgcccgcgcctgcgccgtgctcgcctccggcgccgcgctctgctcgggctcggacgcctccgccggcgccctgccgcgggacctcttcggctacggcctcgccgtcggcgactcccacgcgtgcgcgctccgccggcccgaccacaccgcggtttgctggaccctcgggggacccaccaccaccctgtacgagccggccctggggatctccttcgccttcctcgtcgccggcggcaacttcacctgcggcgtcgcgtccagcgacttcagcgtgtactgctggtccgcgggcgccgtggccgcgccggtgccgctcccgaggatccgcccgggcgtctgcgtcagcgacgacagctcatgccgcgggtgcggcttcatgtcgcagtcgcagaagttctgcggaggctccggcgggatctgcgacgccctctgcgacgattcgccgccgccgcctgctcccgcacccccttctccgccgccgtcgtcgagtagacgcgtgtccaaggcctggatcgcgttctgcgtggtcggcgcggtgggtggtttcgcggggctctgctccatcgtctactgcctcgtcttcggcttctgcagcaacaagcgggtgcacaactcggtgcagcccaacatcagtgccgccgccgccggcacgggtgccgacaacaacggcggcggcggaggtgccgcagcctccgggagcccctacgggtcgccgaacgggtcgcgggcgcgcggcctgttccggcggcagctgtcgcgcgcgatgacgcggcagcgcagcgggccgtcgtcgttcaaggaccccgccgaggagttcaccttcgcgcagctggaggcggccaccaaagggttcgcgctggaggcgaagatcggggagggcagcttcggcaccgtgtaccggggcaagctccccgacgggcgcgaggtggccatcaagcgcggcgagtcaggcccccgcgcgcgccggttccaggagaaggagagcgcgttccggtcggagctggtgttcctgtcccggctccaccacaagcacctcgtgggcctggtgggctactgcgaggaggcggaggagcggctgctggtgtacgagtacatgaagaacggcgcgctctacgaccacctgcaccccaaggcctcggcggcgccgtcgcccgtggcgtcgtcgtggaagctgcgcatcaagatcctgctggacgcgtcccgcggcatcgagtacctgcactcctacgccgtgccgcccatcatccaccgcgacatcaagtcgtccaacatcctgctggacggcgggtggacggcgcgcgtgtcggacttcgggctgtcgctgacggggtccccggagccatcgtcggaggagtcgcggtcgcagcagctggcggtgacgacgaaggccgccggcacggtggggtacatggacccggagtactacgggctgcaccacctgacggtgaagagcgacgtgtacgggttcggtgtggtgatgctggagtcgctgacggggcggcgcgccatcttcaaggaggcggagggcgggagccccgtgagcgtggtggactacgcggtgcccagcatcatgggcggggagctcgggaaggtgctggacccgcgcgcgccggagcccgcggcgcacgaggccgaggcggtggagctggtggcgtacaccgccgtgcactgcgtccagctggagggcaaggaccgccccgccatggccgacatcgtggccaacctggagacggccttcgcgctctgcgagggaagcgaccgcgaccgcgggaccggcgcgttcgggaacagctcctccagcgccagcctctccgtcacgtccatggaccggtcgggagccctggcctgagctgagcctgacggacggacggatggatgagtccattcttttccggttttcgttcatgcatcaaccgccgcccatggcgaagggagggtggtcgaattcattgccgttcattcttcattcctcgttgcgaggtgtgtgattctgtcacacgttttgttcatggtgaatgtacattcatgattcttgctctgatgattccacgcgtcgtcgagacgaaacacaagagaggattcgaattcattcgtgtagactgtgaccccccaattaatgggataaaaaaaaggggaaagaaacttctccccggtgatggtggatgcacagcaccaagcaggatgtggcaccagttttaacttctcccctggagcgttgaatgggaaaagaaacagagatggaaggagaagaaacacgcaggttgttgttgacgagatcagtcggtcagaggcggcatttccgtccagtctaccacaagcgtccagtctaccacaaggtgagagccgccgggtcaacagggacagggaaggaagccgccgggtcaacaggagaggagaagaggggagcagtggttgttgtttggtggttggcgtactacagtgacggtagcagcggagcgaatggcgaatgcgatctcatgaaatgccgccgaggttcacggtcatcatcccgatccggcgatccatgctcaacagggcagggggcaggcaggtggaattttaaacatccatagtcttaactttggatttattaccttagttccaaaaaatgaggctacaaggatacaacagtttcgtccaatttgtttgttgaatgtaagctttaaaatctttgcaaaagtacttataaatttgt

SEQ ID NO: 150388 - DNA, 708 bp, Zea Mays
tctacgaccacctgcaccccaaggcctcggcggcgccgtcgcccgtggcgtcgtcgtggaagctgcgcatcaagatcctgctggacgcgtcccgcggcatcgagtacctgcactcctacgccgtgccgcccatcatccaccgcgacatcaagtcgtccaacatcctgctggacggcgggtggacggcgcgcgtgtcggacttcgggctgtcgctgacggggtccccggagccatcgtcggaggagtcgcggtcgcagcagctggcggtgacgacgaaggccgccggcacggtggggtacatggacccggagtactacgggctgcaccacctgacggtgaagagcgacgtgtacgggttcggtgtggtgatgctggagtcgctgacggggcggcgcgccatcttcaaggaggcggagggcgggagccccgtgagcgtggtggactacgcggtgcccagcatcatgggcggggagctcgggaaggtgctggacccgcgcgcgccggagcagctcctccagcgccagcctctccgtcacgtccatggaccggtcgggagccctggcctgagctgagcctgacggacggacggatggatgagtccattcttttccggttttcgttcatgcatcaaccgccgcccatggcgaagggagggtggtcgaattcattgccgttcattcttcattcctcgttgcgaggtgtgtgatt

SEQ ID NO: 150389 - DNA, 501 bp, Zea Mays
aaaaaagggcatgaacctagaatcagttataatttttggatgtgtctggatagaattgggaagcttcacgaatcgctgagttagagtgggaactatatcgaaaacttctgatatttttcgatggatagtctctccactatgttggaaagccttttgaagcatttggttactggcattgtgggagatcatatacataaacatcccaagctgctcttcgacgttaactcctcgtgtatcacgtaacaaaccctctcttctaaggaattctgatgtggctctaaatatttctggctccattcgaaactcggacttgcaccaactctcatgcccttcaagaatctccttaaccttttgggcaccagagagagaggaggtatggatagaccttttctcttcagagaggaatggaagtatagcagggagaagaataaagaaaaactcctcatcgtcttcttcttcctccaacaaaaactgcctagctagctcttcccaagaacccat

SEQ ID NO: 150390 - DNA, 135 bp, Zea Mays
atgtgttgcttccacttaacacactgcaagcccatctcttcatcgccacattcacctcacatgccaacatcacgttttgtgaaagtgaccctttcctatttcggtaaggaggagccttatcttctgcaatggtga

SEQ ID NO: 150391 - DNA, 1338 bp, Zea Mays
atggagaatttaaatgaactcattcgtgagagtgatagaaaatgtattagtgagcttcgtatggatacaagaactttctttattttgtgtgagatgcttagagatgttggtgggctaaaggccacacgcaatatgaccctagaggaggtagtggctcaatttttgtatacgttggctcatcatttgaagaaccgaacaattggaaggtttttctttcgaagcggcgagacggttagtaggcaattcaacttatgccttctagctgttctaaagttgcaacatttgcttctaaagacccctgacccaattccagagaatagcacagataatacttggaaaaactttaagaattgtttgggtgcattagacggaaccgctatcaagggggaaaacaaaaggaagtggatccctgttgaagatgatgaactgatcaaagcattggttgatgtttctttggatccgaggtggaggagtgatgggagtttcaagaatggttacacttcagtacttgaagctcgcctcgctgaaaagctacctgattcaagaatttctgcaactcctcatatcgattcaaggttaagatacttcaagacaaagtattctgctttggagcagatgttgaacaagagtgggttcacatgggatccgaccaagaagatgattcagtgcgagaaacaacaatatgagacacattgcaagctgggtttgagtttaactacaatccaggtttttggttgcctaaagaagtgtcataataatccagatgcaaaagggttgtatggagtctcctttccttactatgatgaactctcaatggtatattccaaagacatggccataggtgaaggtgcggaagacatgacagatgttgttcaaaacttggaagaagagttagttcgtgtaaatgctaatgatgaagagaatggagaggatatgacatctgtagagacaccaaggcgttctgttgactcaacatcatctagctccaagaagcggaagaaagagtggaaaggaatgaagacttcatcaagtgacccgcttcttgatgtgttcaatgaagtgagtggtgatctcaaggttgccaccatgtcaattggaaaaatggcgcaagctatggatcgtgaggcatccaaccaagagaaggcaagagatgaggatccacaacaaaagctaagagagaaggcgatcaatgaggtccggagacttgaatttactggctcagaagttatcaaagcagctggtgtgtttgtcaggatgccagatcaaatgggtatgttgtttgcacttccagaaccattgaggagggaatacattgtcgacatgctacgtggtaactag

SEQ ID NO: 150392 - DNA, 107 bp, Zea Mays
agagacctgatggggtattattcaaaatctgttgtaatctatttctacatgttgtttctgtttacaaaggatctgttgtaatttatttctacatgttggtcataatc

SEQ ID NO: 150393 - DNA, 304 bp, Zea Mays
aggactcagcatcacccttattctaccatgcaaaccgacttctcacttttcttgcagcaccacctaatcacctcaatgtaagtggagctgtgctggttgtcacatatctgaatgaccatcctaggcacaaccacaaaccaaaaaggggtgattaaaataggcttcatgtggggagagggttagctcaaagtagacacttgtagcagccttcattgatcagtgccatgcattttggaaaaggttgagcatcatcgcccctcatcactcatcaacagttcaacattcctttcaaaaaattggaccc

SEQ ID NO: 150394 - DNA, 744 bp, Zea Mays
gtatttggcgctccgaaaaggcgtcaacaattactattactgcgcactccgctcccttcctcctctcttcttctccggtcatcttacgttgcgtggctgacgagtcgagggcgccgtgcgcgcgcggcgacgcatgcatgcagctgcggcgcgtgcgggtacgacctgcgcctgcggtcgtccgaccgcaacacggcggggatcgtgggcgccggcggcgcggcgtacggacgcgcggcccggcgcggggtcgtggcgttcgacgccatcgacgacgcgcggttcgggcacgccgacgagttccgctgcgtcgacctgcgcgcgcgtcgcctcttcgtgcgccgcacccgcctgctctgccgcaagtgcggcgccggcctcggcttcggctacgacgaccgcggtcaggacggcgccaggcccccgcgctacgacatcaagatccgcgcgctccagcccctggcagcagacgacgaccaccaccaccacggcgacgcggccgcaccgccgacgtcggatgcatgatccttccttcttccgttccgtcctcggtgggcgtgtgcttgcttccctgacacgttagctgctggattttttttttctctgtctgtctgtctgtctgcaagaaagtcactcgcttgcatctcaagaaatgtacaaactgaagggtgtcactttcttccctgcttttcctttgtgatttttttattcagttcaagacagaaaagaaaatggagattcgag

SEQ ID NO: 150395 - DNA, 1609 bp, Zea Mays
aaaagcttgaggaaagtggcaagaggcgcctgcctaagatttccaagaaccgacacgggcattattaaagacagaccgcgcatgcacagtcaccagggatcaaaagggtgacagtccaagggaagaagaagaagaaaaggagaaccactgctcgcgctttgcaccagaccactagctccgagaagcggcaggcaggcaggcactcgaacaaatcagcagagccgggacacatgatatatatatataatatataaaccgagagagcacagagccaacccaagagagcagctgagcagccagccgtggaggaagagatgtacccataccgcatgagcaacgtgatgatcgggtacctgaacctggccacgctcctggcctcgctccccatcatcggggcggggctgtggctggcaaggggtagctcctcctcctcctccaccacgtgctcgtcgatcctgcagacgccgctcctcgccgtgggcttcgcggcgctgctggtctcgctcgccggcttcgtgggcgcctgcttccacgtggcctgggcgctgcggctgtacctcgccgccgtcgcactgctcgtcgccttcctcctcggcctcaccgcgttcggcttcgcggtcaccgcgggcggcggcggcgcgcaggtgtacggccggccgtaccgggagtaccgcgtcacggactactcggcgtggctccagaagcgcatgcaggacgacaggtactggcgccccgccctcgcctgcgtcgtcgggtccaaggcctgccccaagatccagaactggacgcccatggactacctccagcacgatctcacgccaatacagtccggctgctgcaagccgccgacggcgtgccagtacagcggaggcatgccagtcggggcgcaggacgaggactgctaccggtggaacaacgccccggacatcctctgctaccggtgcgactcgtgcagggccggcgtgatggagcaggtgcgccaggactggcacaagatctttgtgctcgacgtcgccgtgctcgccgctctcgtctgcatctgctcatgcgggtgctgcgccttcaggaacgctcgccgctcccggtcccagtacccatacggggtaaaccaaacgtccaagataaacccacgctgggactactggtggcgatgatggggtggtagaagagaacagatctactaggctagctgtagcttctcaatgcctgtatgatattttgatccagtcttctgtggaaaaagataaaataacacttgggatctgtatgtgttattagcccctgtggtactctgtttgtttccaggtccgcagagtttagtttctgtagatatttgagttaagaggagactaagccatgaagtaaaagagatgcctagtttttttccccttcaatatggtagccagcattgtatcatgtagaattttaatccaggacagaagtggttccatgtatatgggggaaaccaaaccacaccagaagctatcagctatgcctgttctactgttggcgtggcttccttatgatgtgattacactggattcctttacactgaagtcaaatcgggggcaggctattcagcaatgtttcagaaacatgttcactggaa

SEQ ID NO: 150396 - DNA, 1698 bp, Zea Mays
aaaagcttgaggaaagtggcaagaggcgcctgcctaagatttccaagaaccgacacgggcattattaaagacagaccgcgcatgcacagtcaccagggatcaaaagggtgacagtccaagggaagaagaagaagaaaaggagaaccactgctcgcgctttgcaccagaccactagctccgagaagcggcaggcaggcaggcactcgaacaaatcagcagagccgggacacatgatatatatatataatatataaaccgagagagcacagagccaacccaagagagcagctgagcagccagccgtggaggaagagatgtacccataccgcatgagcaacgtgatgatcgggtacctgaacctggccacgctcctggcctcgctccccatcatcggggcggggctgtggctggcaaggggtagctcctcctcctcctccaccacgtgctcgtcgatcctgcagacgccgctcctcgccgtgggcttcgcggcgctgctggtctcgctcgccggcttcgtgggcgcctgcttccacgtggcctgggcgctgcggctgtacctcgccgccgtcgcactgctcgtcgccttcctcctcggcctcaccgcgttcggcttcgcggtcaccgcgggcggcggcggcgcgcaggtgtacggccggccgtaccgggagtaccgcgtcacggactactcggcgtggctccagaagcgcatgcaggacgacaggtactggcgccccgccctcgcctgcgtcgtcgggtccaaggcctgccccaagatccagaactggacgcccatggactacctccagcacgatctcacgccaatacagtccggctgctgcaagccgccgacggcgtgccagtacagcggaggcatgccagtcggggcgcaggacgaggactgctaccggtggaacaacgccccggacatcctctgctaccggtgcgactcgtgcagggccggcgtgatggagcaggtgcgccaggactggcacaagatctttgtgctcgacgtcgccgtgctcgccgctctcgtctgcatctgctcatgcgggtgctgcgccttcaggaacgctcgccgctcccggtcccagtacccatacggggtaaaccaaacgtccaagataaacccacgctgggactactggtactctaagagagagagttctgttgtttactctctctgctttctgcctcttattgtttgtagagtaaaatttaaaataggagatgtgattagtacgaccgctgaagataaccttattgggcagtaaacaatcccatgaccaaaacaaaacatgaatctatgtgcttttatgcctgtttgttttctatggtttttaacgctgctttatatgtgcttttgtttttgctgtaggtggcgatgatggggtggtagaagagaacagatctactaggctagctgtagcttctcaatgcctgtatgatattttgatccagtcttctgtggaaaaagataaaataacacttgggatctgtatgtgttattagcccctgtggtactctgtttgtttccaggtccgcagagtttagtttctgtagatatttgagttaagaggagactaagccatgaagtaaaagagatgcctagtttttttccccttcaatatggtagccagcattgtatcatgtagaattttaatccaggacagaagtggttccatgtatatgggggaaacc

SEQ ID NO: 150397 - DNA, 80 bp, Zea Mays
tcttctcttccaaatctgtgcaaatctggctggctggacggatctagctccagccgcaccatggtcgagcgagcctactc

SEQ ID NO: 150398 - DNA, 557 bp, Zea Mays
gcgcaacattggcgagtggcgaccgaggaggcggagcgaagtgacatcgcagcgcagcctcgacggtgaccctcctcgtcttcttctcactagtaattgccgcatcctaccctcgtgttcttgatgtcgctaagcaccacgacgacggggattaatgtccgatcgccgccgcccagagaaccagacccgcacggggggctctgtccggacgctcgatgcaggaaaaagaaagagcagcaataccaccattcttgcttccattggaaagtgcagcgttcagttactggtaaccccgcaagctgattgaaaatgatggatatacactgcatctgaatagtgtgagaatccactagttgcaagctgattcaaatagtttcagtttgagtttcagtttctgcttgagattgtcaccattcttacaagtgtatccatggtttatataaacaaatacactagttgcacatttggatgtaaatatatgagcagttcatgtttctgcaatagaatacactagttcattgtctgaaaaaatatgaagtgaggcatatttaatagaa

SEQ ID NO: 150399 - DNA, 214 bp, Zea Mays
gtcgtttttgagaccatattggcgcaatggactccatgatgtttgaggttgctgaattggatggagcaacaatgatttgtcacactaacagtaaaatgaaaggttatttgttggttttaaacgttagtaattgctacaaagtagcataatttatatagagtgcatcccgtttttattgatgcctgactttagcaatcactccatattttgatcc

SEQ ID NO: 150400 - DNA, 1812 bp, Zea Mays
ctattcttagctcagcaaatcctcctccgcgcaaaggcatgaagcaaatgctcatcccgtctgaccacatttccccccacagagatcacatttaccgcgcacaaagcaccaacaacgatcgatagactgtatgcgagatcatcagcacagggagggagggaggaaggaggatgcggcatatagactctacccaccaccggtgctcccatcgtcaacacgacgaggtctgcagattggtctgtgcgttctagagagagcctgagagggggagaggtttaccaactgcaagagcggagaaggaacacggatccaaggtttcacacgtaccgttgggagaagatgagttgctttggatgcttcaagaaagagaacaagatgccgcccaggaggattgaatccagggaggttgcggttgtgaagacggccccgagccagaatgaagcgcctcccagggaatctgggtccatcaggccatcactggtcacttcaaagcacaagcacaagccatcatctgaaacggcagcaagcattgagcctcctaaaggaagctgttccgttgccaaaaccgcaaaagcgttcacattccgtgagctagccacggccacaaagaacttccgttccgactgccttcttggagaagggggctttggcagggtatacaagggcaagcttgaaaatggacagcttgttgctgtcaagcaactagacctgaatgggtatcaaggcaacagagagttcctagttgaggtccttatgctcagtctattgcaccatccaaacctagtcaatttggtcggctactgcgcagatggagatcaaaggcttctggtgtacgagtacatggcacttggctcacttgcagatcacctgcttgacagcactcctgaacaagtgccgctgagttggtatctcaggatgaagatagctcatggaactgctaaagggcttgaatacctccatgagaaggcgaacccacctgtcatttaccgggatctcaagtcccccaacatcctccttgatgagaagtacaaccctaagctctcagattttgggcttgcaaagcttggtccagtcgagggaaagacacacatctccactcgggtgatgggaacatatgggtactgcgctccggaatacataagaacaggccaactaactgtcaagactgacgtgtacagttttggggttttcatactagagttgatcacaggaagaagagcagtggacacctccaggccagcaagtgaacaaatcctagttaactgggtcaagcccatgctgagagacaggaagaggtacaatgagctagtagaccctcatcttagaggtgagtacccagaaaaagacttgagccaggcggtaggtgtggcagcaatgtgcctacaagaggaagcctcagtccggccttacatgagtgatgctgttgtggccctgggattccttgcagaaatgcctgctggctataaacacaaatctggccctatactccaaatgaaagttggagatccctcactaaccggtagcgctaagcaagataaggatgcatacaatcgtcaaaaagctgtagccgaggccattgagtggggctcactgaggcagaaacagaaggctcaaagccaaggtacagtatcccctccagaagccagcagattgtgaaacacctttgttgtgcactaggctaccttctgacttgtaaccctccaattttgcataagccttagggccaaattgtcccacatagctgagagtttgtaaatgaagttctcccataaagatgtaaggggtccataacgtatttgctgttaacatata

SEQ ID NO: 150401 - DNA, 2848 bp, Zea Mays
ctgtcatgctcgctcggcgctcgctactccatccacactcttcttcctccattgcgttgcgcacgtgtcccagcatccctccctcctccccgtccctaaagcggccggccactctctctctctctctctccaccctaccgtccgtcccgtccctcacctcaccaatctcgcgcacgctccccaatgacccaatctccccgaccctgccactgccagcgccagctcctccctgccatcccagtcccagccacgtatcgcttcacgggcggggcagcagcagaaccagtgctccgcggctgatgcgcgcaaccaatgccggcgctcgcgtccgccaacatggcccgagccgccgccgccgccgccgcgctccccctcctcctcctcctcctcctcctcctcctcgctgaccacgccgccgcggtgcgcttcgactacgcctcgctgaccctcggaagcctgaggctgctgggcgacgcgcacctcaagaacggcaccatccgcctctcccgggacctcccggtcccgacctcgggcgccggccgcgcgctctacgccaccgcggtgccgctccgcgggggcttctccacgcagttcgccttcaccgtggccacgctcaacccgtcctccgtcggcggggggctggccttcgtgctcgccaccgacggggccacgctcggcgacgcgggcgcctacatcggcgtgtccgtcgccaccgacgccgccgccgtcgagttcgacacgctcatggacgcccagttcgccgaccccaacggcaaccacgtcgccctggatctcggctccatggtctccgccgccgcagccgacctcggcgccgccggcgtcgtcctcgccagcgggaggaccgtcaacgcctggatcgactaccacccctctgcttcccccggttctggcggtaccttggaggtcttcgtgtcctacgcacccaagcgcccgcccaggcccgtcctgtccgcgccgctcgacctcagcgaggacgtcaaggacgccgcgttcgtcggcttctccgcctccacgcaggggagcacggaggcgcacgccatcgagtggtggagcttctccaccgcgtcgccggccccgtccccacgttcggcgccgcccgagtcccctgcgctcccgcctcccgtttccaaccaggtgctcccgggagtgacgacgacgacggcgccgccgccgccgccgccgacaggcagtgtcgctgcgccggccggctcgatcgcaccgtcgggcgccgcagcggggaggaatgccggcccgcgcccgcccgtgcacgcggccgtggccggcgccgccacggcgggcgccttcgtggcggcctcgttcgcgggcgtggcggtctgggtgctggcgcgccgcgccaaggccaggaggcgccagaccgcgctggcggtgggcaccaagcgcgacagcaacgtggcgtcggcggcggcgctggcgcggtccccgcgggagttcagctacaaggagctgagcgccgccacgcggggcttcgacgcgtcccgcgtcatcggcaacggcgcgttcggcaccgtgtacaagggcatcgtgccggacacgggcgccatggtggccgtgaagcgctgcagcagcaccggcgcgcgcggcggaggcaacgcgagcggcgagcaggcgcggtcggagttcctgtcggagctgtccatcatcgcggggctccggcaccgcaacctgctccggctgcaggggtggtgctacgagaagggggagatcctgctggtgtacgactacatgcgcaacggcagcctggaccgggcgctgttcgacgcgtcggcgcccgtgctgccgtggcgccaccggcgcgaggccctggccggcgtggcgtcggcgctggcgtacctccaccacgagtgcgagcggcgcgtggtccaccgcgacgtcaagtccagcaacgtgatgctggacgaggcctaccgcgcgcggctgggggacttcgggctggcgcggcaggcggagcacggcgagtcccccgacgcgacggcggcggcgggcaccatggggtacctggcgcccgagtacctcctgacgggccgcgccaccgagtgcaccgacgtgttcagcttcggcgtgctggcgctggaggtggcgtgcgggcggcggccgatcggcgccgccggcacggccgagggcggcaacctggtggagtgggtgtggagcctgcacggggaggcccggctgctggacgcggtggacccgcggctgggcggggagttcgaggagggcgaggcgaggcgcgtgctgctgctggggctggcgtgctccagcccggagccggcgctgcggcccgggatgcgcgccgtggtgcaggtgctgggcggcgaggcggacccgccgttcgtgccggcggcccggccgtccatgagcctcagcagcgctaacaaccagcagctgctgctcagcctgcaggacagcgtgtcggactacaacgccatgctggggctcgccctgtcggactcgtcctcggactcgctcagctcgtcgtcgctcaccagcacgctgcggaggggcggccacgacatcgggttcagcagcaccgccggcgacgccaggtgacctggctgaaccttgccggcgtccggcggagggtagcttagatagagttttactttctgaaatcatgcatcgaagcaactaagcaatgcaccatcgacggtgcctccaaagaacagcatgtatgtatgcattgagtagtacatagaattagtagcagcagtcaatggactcctcagtcctcatcaaatcgagcctcccatttgttacattttacgtacatttctctagataataattcggatctcacatgattcattcgacc

SEQ ID NO: 150402 - DNA, 3912 bp, Zea Mays
cgagccgggcggcggagagagtgccgggcggcgatggctgagctcgcgtcgggcgccgtgagctcgctgctgggcgtgatcgggaacgaggcgcggctgctgcgcggcgtccgtggcgacgtgcagttcatcaaggaggagatggagagcatgaacagcttcttggtgcacctggcccgcacgtcgcacaccggcggcgagcacggcgtgcaggtgcgcacgtggatgaaccaggtccgtatcctcgccaacgactgcaacaactgcatcgacaagtacgtgtaccgcggcaaccccgacgtgcacctccgcaggagcggcctcttgcgctacctcctgtggcctccatggtttgtgaggaagatgttcgcgcagcacgacgccgccggccagctgcgggtgctcaaggaccgggcgcgggaggtcggcgagcggaggatgcggtatgacgtgaaggagggggcgctgacgacggaggctgcctatgccgccggcgacgaagacgacgaccaacctgatgccgatgggtcggcgttggcaagtcatcgaagagcagtcctattcaagcatagggctctggacgactacttccaggggaagctagtcgagtggacggagcaagtgatggagagaggcgacgtcatgcactccgccgccgtcgtggcgccggaggcagaccaggaggtcatcgctctcgcacgcagggccttggcccaggggcatcgcagcgtcttggtggacattccgcaggtgcacatggatttcgagccgctgcggccccaggagatcctctactacatcctgtgccagctccagcaggatcgagcgtcatcgccgccgcaactcgggtcgttagaaggaagcccagacacattggtgaagcagtatctcctctacagaagcaaacgggagatcagccatggaaaagagagtctactcggcgaaactgagatccagcaggacattcagaatgtgatgggcaagcttgacgaggtgaagaggggcattcaagatgagcaacttctgttgcagctgctggaagggatcagggacgtcaaggagctggaagagaagcccatatccgtgctcttcgagctgctggtgctgcaacagcaagctgcccggcgagaccaagcgaggggcaaagccatgcgcaaactggcagcatggcacgcccacatcctccggataacagcagagagtctcaagaagtacatagaggcagagcatctgccgcaacaggaggcggagaagaagacggccaagaagtttgatttctatgatgcaagatatggatatgtcatacacaaggtgtttgcaacgaaggccagcaacagcaaaaggcgccatgggcatgtcaagatccaaggcatgatcagcaaagtcccacaagatgttgccaccgaaaccgaggagaagatcgatgagatcaagaagacggtccaagagcagatggaaacggggtggatcgtacgcaagatcatcgagaatcacttcgaggacgacaagaggcctctggttgttatcctcagaatcggcgacaagatctatgaatccaactgggacgagaatagatacgctttcacccgcctggagaaacatgttgccggtgtactgaccgtcaccaccacaaggagcacccagcaggccaaagaaagcctccggcagcaggagcttatagacagcttccgacaaggggagcctctggactattcccttgctggcctctaccatgacattgtgctccagtttacaagccatctcatgagtgaagacaagaacgaagaatacagcgatccccagatcatccgtgacatcctgggggagtgcgagcagttcgagttctgcatgaagatcttggcgcattctttctacgccagacccaaacggagcaaccaagaactgaccaagctgcgcgacagccttcaggcagtttcccccaagtcgttcgaaggcgttgctgccaagatgctcaagttctcctacaatgacctgcccaaagagtacaagtcctgcttgctgtacctggccatcttccctccaggacgcagcatcaggaggtcgacgctggtagcacggtgggttgtcgaaggtctgatcaaccgggatgattggaacgccgcggttcgtcagtccgatcgatgtttcgaagccctcatcgaccgggggcttgtcgatcctgctgagatcagtggtaccgggaaggccaagagctgcatcgtgggcaatcgggttcatggattcattaccatgatcgccaagaaacagcacatagtggagactcgcctgtcacagcacttggcccagcacttctccattttcagtgacgtccgactccgcgcctccgagaagatccgagatttcctgcaagttctccccaaacagtaccacttttcccggctcaaggtgctagatctagaaggctgcaagtgtgttggtacgaagaacacgagttacctcaaggacgtctgctgcaacctgctactgctcaagtacctgaacctaaggagcacaaatgttacgcagctgccaggagaaatcaaccgcctccacgagctggaagtactggatatccgccacaacaatgtgcacaagactgcaacgagatacctccggctcctaaagctgaagcggctgctggctggttgcattgacgacccaactctaccaagtgtcgagcttcctgaaaagattgggaaaatggaaggcatggaggtattgcttggtgtcatgccgcgtcataagaaagatctgaaaagaggatttcctgtatgcctgaggaagcttggtgtggttatcaacaaggatagttacctccagcccttgcttaaggcaatcgatgacttgcatgagaacctccggtctctgtcaatcactcttcctattgtcagaggtgaggccacgccacccaaaagaaactcacaaccatcagctcatagccttgaacgtacgctggaccaacttgagagcctaagcataagtggaatcacacagatggggtggcagcttcttccattgctgactgaaaaaagtaatcagctgacaaaggtgactctaagaagcaccatgctgaagcaggacggtctggaggtcctcgcccatctgccaaaactacactatctcaagctccggcacgaggcatacaaggacactgagctcaccttcaaggaggacgaattcaaatatctcaagtgctttcttgttgagggttccaatatgacccacatcatctttgctcatggagcgacccctatgcttgagaagatgcttttgcccgtcaccgccagcctaaagctttctggagttgagaaccttgagaaactggaggagcttgagctcagaaacagcaccaccaccaccaccaccacttccattgacaacaagaacacgctgggttcattgcttgagcagggtaggcgaataaccaaggtgactctccgtggtaaaatgctagagcaagatgatctacaaatccttggcaagaagccatccatacgctgtttggttctcttggacacgttcactgaccaaacggagcttgccttcaaagaaaatgagttcctaaacctcgaccttcttatcgtggagtgctccaagaaagccaagatcagcttcgccgccggatcttgtcctaagctcgagaagctcgtcaccaacatagagtccctctccggcatcggcaaccttgtacgattgaaggagctcgagctcaaggtcgagggtgactctgtccctgcagaggtaaaagtagccgtcaacaggcttaaagatagactccattttacacactacaagtcagaaaatcaagacaaggaagaagggaaccaagacgacgatgtcgggaaatccccttcatccttttggaagaacaagggttggtgcccatgtggtttgcgttgcgcgtgcgtctga

SEQ ID NO: 150403 - DNA, 1047 bp, Zea Mays
tgctatctatatatgcttgattttgtgtagggttgtctccagaaagcttgcttgttacttatatcccacacacttgcgcgcacgcaacccggcctttgtccctctcttgcctctcactgctgctgcccctcgctattcttctctgatcgatttctgtcatggcttcattctggttcagctgccgctgtagcgggatgacccaggtttgccgcagatgacccaggtgggactatgcggtggccggcagccccagatttggtgggggatgagataggaggtggctgcatggcctttcttgttggttttctatcgatttcctatgttgtgctctctaatcctctcagctctctacttttggctaggcgtcaaggacgcccacgcgatgccttaaaaacactgcttatgtgaatattgtttcaaaatacgtctgcttgattgtttagcatgaattgagtcgatgtgagtgcctgtagtttctttgctagtccaaccgacgtggtaactgatatgttttatgtatttcaggttggtacaggatattttctaactgggagtggtttaacgtggctagtggagcaggctgtacattttccctgacatttactgggtataaggaatagggggccatcacttggcacaagacaaatacatgtgaatgttttgtgtgtaccatcattgtatttagggttcgggtgttaatttagatgtttatgaccctgatgtttgatggaaaataaattattccttgatgaagcggcggtcaatgaacagagcccttcggttttcagtcggagctactgacccttcatctgttcctgtggtgaagtggttgctgccgcttccgtggtgggaccaaccatgccgaagtcgtgtctagcagagggcaatcaatctccttggtgtctagcaggtttctttgtgcatcatgctgtattattctggtgtcctttgcaggtggtggtggattgtatcggtgttgtgaacccttctgattgaaaggtgctgggatggagtactggtatgaagaacttatcttctttcagaaca

SEQ ID NO: 150404 - DNA, 3632 bp, Zea Mays
cgtcccacaagcacgcgcgacgcgagccaaggaagacgagagcgaggtggagagagagagagagaggaaaaccctgccccgtccaggcagccgtcgtcgacgcaaacggcggaggccacagagacgccacgcgagggagccccgccgcagcagcacccgcgccgtcccaattcggcgccccgatcgccggatctcctcgccggcgccggggccctcgatcgccctctccccatgcccgtgcccctccgggggtttcattgcgcgggcgccggccatgtcggacctcgcttccagctgcaaggataaacttgcgtattttagaataaaggagctcaaagatatcttaaatcagctggggttaccgaagcaaggaaagaagcaggaccttgttgacagggtattggctattttatcagatgagcaaggtcaacatcatcatggatggggaaggaaaaatgctcttacaagggaggcggtggcaaaagttgttgatgacacatacaggaaaatgcaagtatgtgctcctgaccttccctctagaagccacagtggatcagatttcagtcatttcaggcccaaagaggaagcgcctgacttctaccatgtggatactaaggtccgctgcctttgcaatagcacattgctaaatgacaatatgattaagtgcgaagatggcaaatgccaggtgtggcagcatattacctgcgtactcattccagataagcccacggagggtgctggccctgatattccacctcatttttattgtgaactgtgccgactgaaacgggcagacccgttttgggtgactaccggaaatccattactacctgtgaaatttatgtcatctggtgttggaaatgatggagcaagtgtacctcaaattgtggagaagactttccaactttcccgagcagatagagaaacagttcagagacaagaatatgatctccaggtttggtgcatccttataaatgacaaagtccagttcaggatgcaatggcctcaatatgcagaattgcaagtgaacggtattcctgtacgagtaatgaccaggcccggttctcagttactagggataaatgggcgggatgatgggccactggtaaccacatgcagtagagaagggatcaacaaaattagcttatctagagtggatgctcgaaccttttgctttggagttcgaattgttaggaggaggactgttcctcaggtattaaatttgatcccaaaggaaggtgaaggggagtcttttgaggatgctcttgctcgtgttcgtcgctgtcttggaggtggaggtgctacggacaatgctgatagtgatagcgacctggaagtggttactgaatctgttacagtcaaccttcgttgccctaatagcggatccagaatgaggattgctggaaggttcaagccttgtgttcacatgggctgttttgatcttgaaacttttgtggaattgaatcaacgctcacgcaagtggcaatgcccaatatgtttaaagaattactctctcgagaacttgatgatcgatccttatttcaaccggattacatctttgttgcacaattgcagtgaagatgttaatgagcttgatgttaaacctgatgggtcatggcgtgtgaagggtgatgccgctaccagagatctatctcagtggcatatgcctgatggtactctttgtgactcaaaggaagatacaaaccctggtgtcgttagtgttaatgagttcaagagagagggtacttctgatggacatagaactttgaaacttggaattaaaaaaacccctaatggattatggcaggttagcagtaaaccagatgataagaaacccgtggttagaaatcacatccaaaacaacacggggtactcaataccaaacatagtacctatgatcagtagccccactgggagttgcagagatggtgaagatgtaagtgtgaaccaagaagggggtggtattcagtttgatatatcattgaaccaagagtttgacagttttgcgcataactttggtcaaacatacaatacagaggataggcaacaagagccacaacataatgctgcagatgtcattgttcttagtgattctgatgaagaaaatgacccgattgttcgcctgccagctgtctatgcaaatactcctacaaatggtgacagtttccctttcgtcactgatgctgctgtatctggatatcctgaagggtaccaggaggatgctggggttggtacaagtggccttggtttattgagcaacaatactggtgattttgaaataaataactggcaaatgcattcttatccacaaccagagcaagggttccagttttttgggactgatactgatgttggcaatccttttgttggtccgcataattcctttagtattacaccagaagactactcccttgactgtaatgttggcatagaggatccatctgcagctcacgatgtctcaatttgccgaaacagtaatgatgtgcatggaagcttggttgataacccattggctttagcaggtgacgatccatctttgcaaattttccttccaagtcaaccttctactgttccccttcaggaagaactgagtgagcgcgctaatactccaaatggagtccaccctgatgattggaggatatctcttacgcttgcggctggtggagggggtaatgaagaacctacaagtgttgatggcctaaaatcacagccaaaagttccatcaaaagaggcaggagttgaacctttacttgatgctgcttctgctctcccaagcatgaacaatgacagatgtaatggatctaatctaaacccgagaaggattgaaaatatattttctcatcctcgccaaccacggtctgttaggcctcgtttgtgtttgtcattagattctgattcagagtagttcggacatcacactgggatagctgaatttgctattaatctggcaaagttggcttccagaatcttgatttttattgtggagggctatcaagttattctggttgatacaaagagaaacaccagtgtggatgctttattgcattaacctggtaagattcaagtgttctatatgatccaagtgggatctccatagagttcatctaatggttggtacaggatattttctaactgggagtggtttaacgtggctagtggagcaggctgtacattttccctgacatttactgggtataaggaatagggggccatcacttggcacaagacaaatacatgtgaatgttttgtgtgtaccatcattgtatttagggttcgggtgttaatttagatgtttatgaccctgatgtttgatggaaaataaattattccttgatgaagcggcggtcaatgaacagagcccttcggttttcagtcggagctactgacccttcatctgttcctgtggtgaagtggttgctgccgcttccgtggtgggaccaaccatgccgaagtcgtgtctagcagagggcaatcaatctccttggtgtctagcaggtttctttgtgcatcatgctgtattattctggtgtcctttgcaggtggtggtggattgtatcggtgttgtgaacccttctgattgaaaggtgctgggatggagtactggtatgaagaacttatcttctttcagaaca

SEQ ID NO: 150405 - DNA, 3271 bp, Zea Mays
cgtcccacaagcacgcgcgacgcgagccaaggaagacgagagcgaggtggagagagagagagagaggaaaaccctgccccgtccaggcagccgtcgtcgacgcaaacggcggaggccacagagacgccacgcgagggagccccgccgcagcagcacccgcgccgtcccaattcggcgccccgatcgccggatctcctcgccggcgccggggccctcgatcgccctctccccatgcccgtgcccctccgggggtttcattgcgcgggcgccggccatgtcggacctcgcttccagctgcaaggataaacttgcgtattttagaataaaggagctcaaagatatcttaaatcagctggggttaccgaagcaaggaaagaagcaggaccttgttgacagggtattggctattttatcagatgagcaaggtcaacatcatcatggatggggaaggaaaaatgctcttacaagggaggcggtggcaaaagttgttgatgacacatacaggaaaatgcaagtatgtgctcctgaccttccctctagaagccacagtggatcagatttcagtcatttcaggcccaaagaggaagcgcctgacttctaccatgtggatactaaggtccgctgcctttgcaatagcacattgctaaatgacaatatgattaagtgcgaagatggcaaatgccaggtgtggcagcatattacctgcgtactcattccagataagcccacggagggtgctggccctgatattccacctcatttttattgtgaactgtgccgactgaaacgggcagacccgttttgggtgactaccggaaatccattactacctgtgaaatttatgtcatctggtgttggaaatgatggagcaagtgtacctcaaattgtggagaagactttccaactttcccgagcagatagagaaacagttcagagacaagaatatgatctccaggtttggtgcatccttataaatgacaaagtccagttcaggatgcaatggcctcaatatgcagaattgcaagtgaacggtattcctgtacgagtaatgaccaggcccggttctcagttactagggataaatgggcgggatgatgggccactggtaaccacatgcagtagagaagggatcaacaaaattagcttatctagagtggatgctcgaaccttttgctttggagttcgaattgttaggaggaggactgttcctcaggtattaaatttgatcccaaaggaaggtgaaggggagtcttttgaggatgctcttgctcgtgttcgtcgctgtcttggaggtggaggtgctacggacaatgctgatagtgatagcgacctggaagtggttactgaatctgttacagtcaaccttcgttgccctaatagcggatccagaatgaggattgctggaaggttcaagccttgtgttcacatgggctgttttgatcttgaaacttttgtggaattgaatcaacgctcacgcaagtggcaatgcccaatatgtttaaagaattactctctcgagaacttgatgatcgatccttatttcaaccggattacatctttgttgcacaattgcagtgaagatgttaatgagcttgatgttaaacctgatgggtcatggcgtgtgaagggtgatgccgctaccagagatctatctcagtggcatatgcctgatggtactctttgtgactcaaaggaagatacaaaccctggtgtcgttagtgttaatgagttcaagagagagggtacttctgatggacatagaactttgaaacttggaattaaaaaaacccctaatggattatggcaggttagcagtaaaccagatgataagaaacccgtggttagaaatcacatccaaaacaacacggggtactcaataccaaacatagtacctatgatcagtagccccactgggagttgcagagatggtgaagatgtaagtgtgaaccaagaagggggtggtattcagtttgatatatcattgaaccaagagtttgacagttttgcgcataactttggtcaaacatacaatacagaggataggcaacaagagccacaacataatgctgcagatgtcattgttcttagtgattctgatgaagaaaatgacccgattgttcgcctgccagctgtctatgcaaatactcctacaaatggtgacagtttccctttcgtcactgatgctgctgtatctggatatcctgaagggtaccaggaggatgctggggttggtacaagtggccttggtttattgagcaacaatactggtgattttgaaataaataactggcaaatgcattcttatccacaaccagagcaagggttccagttttttgggactgatactgatgttggcaatccttttgttggtccgcataattcctttagtattacaccagaagactactcccttgactgtaatgttggcatagaggatccatctgcagctcacgatgtctcaatttgccgaaacagtaatgatgtgcatggaagcttggttgataacccattggctttagcaggtgacgatccatctttgcaaattttccttccaagtcaaccttctactgttccccttcaggaagaactgagtgagcgcgctaatactccaaatggagtccaccctgatgattggaggatatctcttacgcttgcggctggtggagggggtaatgaagaacctacaagtgttgatggcctaaaatcacagccaaaagttccatcaaaagaggcaggagttgaacctttacttgatgctgcttctgctctcccaagcatgaacaatgacagatgtaatggatctaatctaaacccgagaaggattgaaaatatattttctcatcctcgccaaccacggtctgttaggcctcgtttgtgtttgtcattagattctgattcagagtagttcggacatcacactgggatagctgaatttgctattaatctggcaaagttggcttccagaatcttgatttttattgtggagggctatcaagttattctggttgatacaaagagaaacaccagtgtggatgctttattgcattaacctggtaagattcaagtgttctatatgatccaagtgggatctccatagagttcatctaatggtaaggacagatgattagcctcttcatgtgatggatttgctgctatgttttatgaactatttcattgcagtttttgtgattcaagtagctgagttgtaattaaacatgttgaacttcaatgccctatgaaataaaaatgaagttgaccaggataaaaagaa

SEQ ID NO: 150406 - DNA, 1382 bp, Zea Mays
tcaccctttctcgacgaacccgtcccacaagcacgcgcgacgcgagccaaggaagacgagagcgaggtggagagagagagagagaggaaaaccctgccccgtccaggcagccgtcgtcgacgcaaacggcggaggccacagagacgccacgcgagggagccccgccgcagcagcacccgcgccgtcccaattcggcgccccgatcgccggatctcctcgccggcgccggggccctcgatcgccctctccccatgcccgtgcccctccgggggtttcattgcgcgggcgccggccatgtcggacctcgcttccagctgcaaggataaacttgcgtattttagaataaaggagctcaaagatatcttaaatcagctggggttaccgaagcaaggaaagaagcaggaccttgttgacagggtattggctattttatcagatgagcaaggtcaacatcatcatggatggggaaggaaaaatgctcttacaagggaggcggtggcaaaagttgttgatgacacatacaggaaaatgcaagtatgtgctcctgaccttccctctagaagccacagtggatcagatttcagtcatttcaggcccaaagaggaagcgcctgacttctaccatgtggatactaaggtccgctgcctttgcaatagcacattgctaaatgacaatatgattaagtgcgaagatggcaaatgccaggtgtggcagcatattacctgcgtactcattccagataagcccacggagggtgctggccctgatattccacctcatttttattgtgaactgtgccgactgaaacgggcagacccgttttgggtgactaccggaaatccattactacctgtgaaatttatgtcatctggtgttggaaatgatggagcaagtgtacctcaaattgtggagaagactttccaactttcccgagcagatagagaaacagttcagagacaagaatatgatctccaggtttggtgcatccttataaatgacaaagtccagttcaggatgcaatggcctcaatatgcagaattgcaagtgaacggtattcctgtacgagtaatgaccaggcccggttctcagttactagggataaatgggcgggatgatgggccactggtaaccacatgcagtagagaagggatcaacaaaattagcttatctagagtggatgctcgaaccttttgctttggagttcgaattgttaggaggaggactgttcctcaggttttgtccatttagctttctacttatcatatagttgaaatgactaggttcacatgattttctgttttgtaaatggtccctatgtattgtgaacttttatcttgtttcatgttaaatatcatctagacagcaatattttgtgttgacaa

SEQ ID NO: 150407 - DNA, 1788 bp, Zea Mays
gacgcatcgcaacgccaacactcacagttgactatcccaccaaggttcaggcaggggagagtgcctgtttcgatggggaagaagggcaagtggttcggcgccgtcaagaaggtcttcagccctgaatccaaggagaagaaagaggagaggctaaggaggaagtcagcagctagcaacccgacgccggtagatctgaccccgtctacctccttggaagtcaatctttcggtgccaccgcctccagctcctcccccagttcttcaccaggccgaggaggttggggtccctgaagccgagcaggagcagagcaagcatgtcgccgtggaggaggcccctgctgccgccccagcgcaggcgtcggtgctgccacctgctgtgccaacccaggagctcgccgcagtcaagatccagaccgccttccgaggttacctggcaaggagggcactacgagcactgcgaggccttgttcgattgaagtcattggttgagggtaattcagtaaagcgtcaatctgcaagcactctgcgctgcatgcaaactctatcacgggtgcagtcacagatatcttccaggagagcaaagatgtccgaggagaaccaggctctccaacgccagctcctacttaaacaggaactggagaatttcagaatgggtgagaactgggatgacagcacccaatccaaggagcaaatcgaggcaagcctgataagcaggcaagaggcggcgataagaagagaaagagcgcttgcatatgcattttcacaccagtggaagagtacatcgagatctgtcaacccaatgtttgtagacccaaacaacctgcagtggggctggagctggctggagcgctggatggcagcaaaaccatgggaaggccgcaatggggctgacaaggagagcaacattgaccggggatccgttaagagcatgagcttgaaccttggagagggtgagatcacaaaagctttcaaccgccgggactcaaagctagaaaagccatcgccgccaactccaagaccggcccgtccaacttccaggcattcccctttgacgccctctgctagagtggcaccgatacctgcgaggagaaaatttgtcacgcccaagaacgggctttcacaggtggacgatgacgcgaggagcgtgctcagtgtgcagtctgagcggccaagaaggcacagtatagccacctcgactgtgcgggacgacgagagcctcacgagctccccgtcgctcccaagctacatggttcccacagaatctgcaagggccaaatctcgcctccagggttcagcaacggccaatggcgcagagacacctgagaaaggaggctcgactggaccagccaagaagaggttatccttccagggtggaactgtgtctgcctcgccaatgcgacgacattctggtcctcccaaggtggagatcgcgccaccacaaccagaggccttggtagtcaatggtggaagcaagtgacacatatgtgatgagtaccaggatgagaaacggattatgaagatattagtttcattttcatccatgaatagaagttaaaagtggtatcatatctatgaatggtttcaattgtttttctgttacaaccacattatttgctatatacgattcacagtacctgccagttgattccattggttgtttctgtaaaacaaatatcaatttgtcactagaatctgtgatgtttgtatgtaaacaggtcctctatttatgtgagacatatatttcttttctttcagaagatccccttgaagtgtgttacccttgcaagct

SEQ ID NO: 150408 - DNA, 2268 bp, Zea Mays
atctccaagctgtccaaagtcgtcagtttccctccccctacaggctacaaactcctcaccgcaccaccgcgactgcgagagaaaagggggagggggaggagcgaggaggagtaggactgtaggaggagcgacgcatcgcaacgccaacactcacagttgactatcccaccaaggtaacggacacaagcttccctgcagctcgctctcgcattctatctccctcccagtcccagacccagtcccagctgttgcagcctccgaacatccaaagctcctgcactgcacccctgtcagtcaggcctctagctgcagccaaaaaccgctggccttgaacatctccccatccgcctcccgcggcctgccacgcgacatgattgcgtcgcgggctgctgcggagctcagctgcccccgcacgccgctggcgacgccttctgcttgcccgcctctgcccgcccgtcttccctgatccctcctcccctttgcttccgcacgaagatctgggcgtgtcttcttccgacaaagctgttcaggcaggggagagtgcctgtttcgatggggaagaagggcaagtggttcggcgccgtcaagaaggtcttcagccctgaatccaaggagaagaaagaggagaggctaaggaggaagtcagcagctagcaacccgacgccggtagatctgaccccgtctacctccttggaagtcaatctttcggtgccaccgcctccagctcctcccccagttcttcaccaggccgaggaggttggggtccctgaagccgagcaggagcagagcaagcatgtcgccgtggaggaggcccctgctgccgccccagcgcaggcgtcggtgctgccacctgctgtgccaacccaggagctcgccgcagtcaagatccagaccgccttccgaggttacctggcaaggagggcactacgagcactgcgaggccttgttcgattgaagtcattggttgagggtaattcagtaaagcgtcaatctgcaagcactctgcgctgcatgcaaactctatcacgggtgcagtcacagatatcttccaggagagcaaagatgtccgaggagaaccaggctctccaacgccagctcctacttaaacaggaactggagaatttcagaatgggtgagaactgggatgacagcacccaatccaaggagcaaatcgaggcaagcctgataagcaggcaagaggcggcgataagaagagaaagagcgcttgcatatgcattttcacaccagtggaagagtacatcgagatctgtcaacccaatgtttgtagacccaaacaacctgcagtggggctggagctggctggagcgctggatggcagcaaaaccatgggaaggccgcaatggggctgacaaggagagcaacattgaccggggatccgttaagagcatgagcttgaaccttggagagggtgagatcacaaaagctttcaaccgccgggactcaaagctagaaaagccatcgccgccaactccaagaccggcccgtccaacttccaggcattcccctttgacgccctctgctagagtggcaccgatacctgcgaggagaaaatttgtcacgcccaagaacgggctttcacaggtggacgatgacgcgaggagcgtgctcagtgtgcagtctgagcggccaagaaggcacagtatagccacctcgactgtgcgggacgacgagagcctcacgagctccccgtcgctcccaagctacatggttcccacagaatctgcaagggccaaatctcgcctccagggttcagcaacggccaatggcgcagagacacctgagaaaggaggctcgactggaccagccaagaagaggttatccttccagggtggaactgtgtctgcctcgccaatgcgacgacattctggtcctcccaaggtggagatcgcgccaccacaaccagaggccttggtagtcaatggtggaagcaagtgacacatatgtgatgagtaccaggatgagaaacggattatgaagatattagtttcattttcatccatgaatagaagttaaaagtggtatcatatctatgaatggtttcaattgtttttctgttacaaccacattatttgctatatacgattcacagtacctgccagttgattccattggttgtttctgtaaaacaaatatcaatttgtcactagaatctgtgatgtttgtatgtaaacaggtcctctatttatgtgagacatatatttcttttctttcagaagatccccttgaagtgtgttacccttgcaagct

SEQ ID NO: 150409 - DNA, 2465 bp, Zea Mays
cacgctcggaggctcccctttcattttcacctcgctccggggccaagtcgccagttcaccaccttcacttcacttcgcaccggaccaccggccgtattcattcctcctccctccctcctcgccatacggctgcagcatcttcccctcaccctcctcattaccccgcgtctctccctcaaaactactcattgctctcaccgttccattgcccccgcggccccgccgtacgctcattcccggctagctcctcctccgcacggccatgatcttgagttcttggcattgatgacgttctagtaccgagcgagccagcccctctttaacccaccttaacaataaacacagcctgcccccaccggccacctcttcttcccccgtgcagctcgagctgattcggcgggctctgccccaacatccacccaccttcgtccaatcccgatccaagaccgtgccgtgatccggcagcagcttccgcgcggccatgggcacgggcgcggtggcggtggcggcgccggaccgggccaagcagcggcgggccggcggccacctgtggaagaaggcactgctccacttctccctctgcttcgtcatgggcttcttcacgggcttcgcgccttcctcctcctcctcctggaagtccgccgccgccaccccccagcaccacccgccgcaccgtcccggggaccgcctcgccgcctcccgcgtggccgtcgacgcgcgcgccaccctgtcgccgcccgcggaggccgccgatgcgctctccgccggcgccacggtggacttgggcgacgacgaggaggacgccgcccagcgccgcctcctgatcgtggtcaccaccacgcgctccggccccggggagcgccgccgccgccggggcgagctgctgcgcctcgcccacacgctgcgcctcgtgcgcccgcccgtcgtctgggtcgtcgtcgagcccgccgccgacgcgcccgccaccgctgaggtgctccgcggcaccggcgtcatgtacaggcacctcgccttcaagcccgaggacaacttcaccaccgccgacgccgaggctcacgtgcagcggaacgccgcgctcgcgcatgtcgagaagcaccgactcgccggcgtcctgcacttcgccgacgccgccggcgtctacgacgtcggcttcttcgaacagatccgccagatcgaggcgtttggtacatggcctgtggcaacaatgtcggcgggcgagaagaaagtggtagtggagggtccactgtgcagtgcctcaaaggtcgtcggttggttctcaagggacttcaacgacgggaccacccgttcagtgacgtataacacggaagctgacctgaatcctgctggtgccgctggtacacgagcccacacgatcgacgtctcaggttttgcgttcaatagctctattttgtgggatcctgagcggtggggacggccaacgtcattaccagacacttcacaggactcgatcaagttcgtgcaagaagtgctacttgaagaccgagctaagctgaaggggatcccctccgactgctcccagatcatggtgtggcagtacagcgtgcccagctcgcgatagagggcagccgagaggacgcacaagaggcgtcgcaacctcgcaggcaggggaagaactgcagggggttggatcggagtcgctgtaaatgtggtgggcgatggtaacggcaaggaaagcaagaaggctgattactaagggttctttttctctctctctcctttttgtgttccctttttctttcccctcagttttagttttcaggtttgggaggggggccatgaatgatgaactgtccgtgggagcaaaagaattgcgatagtatttattcagattcatttgtgattctttagcctggtcggttggtcctgttgtgtttgggttaaaaaaaatggcagtggcgtgaggaatggagaaagtttttattgtgttatggcatgaaatcccagcaaggcagcagcaattaacatctggagaacataaaaatcatgtgcaaagggaaagaaaaaaaagagagaagagactgaatctgcgctcaggtcttgctgtcatcgtccctggtgtttccttgcgggacagtgtttatttgcttttgaaaaaggtctgtgctttgcttgtaagtagagatggcaatgggtacccgaaacccgatgggtaaaaaccctattagggtacgggtatggcgaattttgatacccatgggtattttattgggtcatttgttatgcccatcgggtacggtgggcgtgagtatgttctctgttgccccatacccgctacccgatggggaacccgctaacatatgacacgtgggtcggatttatatgtcccaattagatttgaaggcatgattttgtccacggttttgtagaatcaatgctatgttttgtgtgatttgaagtcatggtgttgccatttaatgttgaatattgttgaacctgtgataaaa

SEQ ID NO: 150410 - DNA, 2615 bp, Zea Mays
ttcattcctcctccctccctcctcgccatacggctgcagcatcttcccctcaccctcctcattaccccgcgtctctccctcaaaactactcattgctctcaccgttccattgcccccgcggccccgccgtacgctcattcccggctagctcctcctccgcacggccatgatcttgagttcttggcattgatgacgttctagtaccgagcgagccagcccctctttaacccaccttaacaataaacacagcctgcccccaccggccacctcttcttcccccgtgcagctcgagctgattcggcgggctctgccccaacatccacccaccttcgtccaatcccgatccaagaccgtgccgtgatccggcagcagcttccgcgcggccatgggcacgggcgcggtggcggtggcggcgccggaccgggccaagcagcggcgggccggcggccacctgtggaagaaggcactgctccacttctccctctgcttcgtcatgggcttcttcacgggcttcgcgccttcctcctcctcctcctggaagtccgccgccgccaccccccagcaccacccgccgcaccgtcccggggaccgcctcgccgcctcccgcgtggccgtcgacgcgcgcgccaccctgtcgccgcccgcggaggccgccgatgcgctctccgccggcgccacggtggacttgggcgacgacgaggaggacgccgcccagcgccgcctcctgatcgtggtcaccaccacgcgctccggccccggggagcgccgccgccgccggggcgagctgctgcgcctcgcccacacgctgcgcctcgtgcgcccgcccgtcgtctgggtcgtcgtcgagcccgccgccgacgcgcccgccaccgctgaggtgctccgcggcaccggcgtcatgtacaggcacctcgccttcaagcccgaggacaacttcaccaccgccgacgccgaggctcacgtgcagcggaacgccgcgctcgcgcatgtcgagaagcaccgactcgccggcgtcctgcacttcgccgacgccgccggcgtctacgacgtcggcttcttcgaacagatccgccagatcgaggcgtttggtacatggcctgtggcaacaatgtcggcgggcgagaagaaagtggtagtggagggtccactgtgcagtgcctcaaaggtcgtcggttggttctcaagggacttcaacgacgggaccacccgttcagtgacgtataacacggaagctgacctgaatcctgctggtgccgctggtacacgagcccacacgatcgacgtctcaggttttgcgttcaatagctctattttgtgggatcctgagcggtggggacggccaacgtcattaccagacacttcacaggttagtccaaccccgcctttgtggagagagtgttagtgaccgagcaagtctagttcaattaaattttgctttggcatgatacaacatactccctccgattttttttatttgacgtttgttagtataaagttgaactatctcaaacaaaaaatgggggtagtacttagcatttagcaagctatggtatgtggttgactcagtgaagggactggttctcagatattagcaatctttggctgtccatctcttgagaatgtcgtcgtataaaaactctgaattgagattattaatttgaagatgaaatgttaagccattggcattagtaatttgaagtgttatgtcaaggaatggtttcatactctgaattgttttccttctgttacttgaaaaatgaaaggcatcagtttctaatataacagtgtctacgatgtgggctgtgattggcttgtatgtgttacaaggtcctgtaaaatcttcctttttcttgataaaaaacgtgctaaacacaatctcaaagaaaaaaaaaggcaagcggttggaacagattggatgctgaccttgtcaatggttcaagtcaatcactgcaggtcaagcatgtccactcatgttccttctgaacaaggttcgggtatagtagataaattgtctggattcaattcatgatctttttttatctagaataatcactctcaacatatctcatgatctacttgtcatgtgcaagcaataagctaccaacagttagttactgatgtgattgcaggactcgatcaagttcgtgcaagaagtgctacttgaagaccgagctaagctgaaggggatcccctccgactgctcccagatcatggtgtggcagtacagcgtgcccagctcgcgatagagggcagccgagaggacgcacaagaggcgtcgcaacctcgcaggcaggggaagaactgcagggggttggatcggagtcgctgtaaatgtggtgggcgatggtaacggcaaggaaagcaagaaggctgattactaagggttctttttctctctctctcctttttgtgttccctttttctttcccctcagttttagttttcaggtttgggaggggggccatgaatgatgaactgtccgtgggagcaaaagaattgcgatagtatttattcagattcatttgtgattctttagcctggtcggttggtcctgttgtgtttgggttaaaaaaaatggcagtggcgtgaggaatggagaaagtttttattgtgtt

SEQ ID NO: 150411 - DNA, 1667 bp, Zea Mays
ggcttatgctgccttgcatctgctctcccgtacagccgcagcgtgctcctcgacctcgctaaaaaccaaccgccctgtctccctccctcactcaccacgcacgcacaaagcagagcaggcaacggcacagcccagcacaggtagagagagaaagagaagcgcggagtcaagaagcggagcaacaacagcaggccgaggaagagaagagaaggccaggaggcagcagccaggaggaagagcaagagcaagatgctgcgcgggggctcgagcgtgctggggatcatcaacttcatcaccttcctgatctcgatcccgatcctgggcggcggcatctggctggcgtcgcgggccaactccaccgactgcatccgcttcctgcagtggcccatcatcattgtggggctcgtcctcatggtcatctccctcatgggcttcgccggcgcctgctaccgccagacctggctgctccgcctctacctcttcgccatgttcttcgtcgtcctcgcgcttctcttcttcatcgtcttcgccttcgccgtcaccgaccgcggcgacggccaggtcgtcatgaaccgccgcttccccgagtaccagctctccgactacggaggctggctccgcgaccgcgtcgccgacccacagtactgggccaccatcagcgcctgcctccgcgacggccacgcctgcgccggcatgaggcgcctcgcgcgggaccccaacactggcatgctcgtgccggagacgtccaccatgttctacggccgcaacctctccccgatccagtctggatgctgcaagccaccgacgtcatgtgcgttcagctacatgaatgagacgtactggacacaaaaccccagcgtcccgacggtgaccaacgacccagactgcaaaaggtggagcaacgaccagcagacgctgtgcttccagtgcgactcgtgcaaggctggcgtcctcgcgggcatcaagaagagctggcgcaaggtggccgtcctgaacatcgtggtgctgattatccttgtgatcgtctacgtcgcgggctgcgccgcgttccgcaacgcgaagaggatcgagaacggcgaggcggtcggcatggcgcggatgaccaagtcccatccgagcaggttccagttctaggccgctgctccgctgccactgcgggttcgaaagctcttgccttgtacaaatggcctgtggggtgtggtcctaaggcttgggcttcgctatgtcttgctgaattgcggattctactgcatttggtggtggaaatggaaagtccagtgtagtttggggttgtgtttgtttgagtgtttagggtaggcctattatgtggggttggctggggtacaatatgagatctgcaagaaacaagagaagttgaatcatctaggagttgttttgtaaggggagatctttaaattctagggggatagttgtatgatggtgccagccatgatgcagtgttttctgaatttctcagattgtatggcaatactagaggtatgatgatatggctgtactgcagcttccaggactgtaggggtgcttcagctctgtgaagtgtgaactgtgtggtatggggagaattctgatgcctgttgcaatttgtcaatggccaagtcctaggtgattgttgtgggccctcattgcagcctacaaaacccttttct

SEQ ID NO: 150412 - DNA, 366 bp, Zea Mays
atggcagtccatgaatcaagagatcacatgctacaagtaagggcaagcatcagtgctaacgaagttgggatttgggctggtgaccttgtaggtcgcatgtatcagagatattatgagcacaacaaatggaagtttaagtcaatttcttgctcatacgctgatgaagttgatgtggttattgatccaaaagatatcgaccttaaaataacaatatctgtggagaagggcatcttcggcatttatgaggatgtcgagaagttgttgcaggcactgtccaaggaggaggaggtcgtgcctggtcaccttctgcgccaacgtccttatcaacttctacgtgaagctcgatcctcaagccaccacgtgtag

SEQ ID NO: 150413 - DNA, 4127 bp, Zea Mays
gctagggttagggtttcgccgcatcccggccgctccgcccgcctggggtcgttccggtgagtgggaagccatggcgatcgtgaggaccggaggcggcgtccgcctccccaggcttgacggcggcgcggaggcctcactggaggccacggaggacgaagacgaggaggaggaggggtcacgggcaacgccgtcgcatgagtccgatgccgacggcttctccgccgaggaggagaacggcggaggaggaggagacgatgagccagaggcggaggaggaggaagaggagttcgaggaagaggaggacgagggggactcggggatgggctccgacgagctggacgttgcggagctgggcgagcccagcacggagatgtgccaggtcggggaccagagcatggccgtgccgttggagctctacgacctcgatggtctcggtgacgtgctctcactccacgcctggaatgacctgctcagcgatgacgagcgtctgcgcctcgccgccttcctgcccgatatggaccaggagacctttgcgcgcacactcgtcgagctcctcgcggggcaaaacttccacttcgggagccccctcgccgatttcctcaagcgcctcaagggcgggctgtgtgacccgagggtcaatctgtaccgccgcggcattcgcttcgtggagcggcgcaagcattactactggctgcagagctaccacaactccatggtacggaggctccgggagattaaggattgctggaagggccgcgagggatacagccttgatgagaggctgaggatgttggacacgatgaaggcaaagcagcagcaccaacaacaacagcagagaaaagctctagatttcacaaggcgggctgggtcggagactgattcagagagcaggggatctggggaacaggtcttagctcgacccaagcacgataagagtaggcagaagaaggcagggaagttagcgaaggagaagtcgaaggggctgttgcgggtgggtacaccgaaaggagtggatgaggatgacatgggagggtctggccgtgatgctgtggtggcactctctgagctttctcgtcgagggtatgattctggcacacatagagggaagcttcacaggagcatagatggcctttactcggagtcggaggaccttggatatgaaagggattcgtcaagacctcggtttccgaggccgcttcccaagccagtgaagaaggaattgtctacgagctgtgatgtcaatctgtatgcaaataactacagtgataaccatactgcatctccttactactacagcaggaatctcagtgctaatcagggagtcaccttagcagcagcatatgatcctccatattttgataccagaaggaatgcaaggtacttggagagagactgggtgcaaggtggaaaaggtgtgcacattaacgctttaatgggtgatgagatgaacttgccagctggtaatcacactggtaactcagatgactggcagaaggggcaatctgcaggtgattacaggagcaggaaagatcaagctggctatggtctgaaggttaagtcctataaaagtattgagaaagaggttaatgatgcccgtgttggttctgaccctagaagcaagatatcacaagcgaaggtggcaggtaaatccagtagacaactagataggactggccagaagcactggagcaatgctgtctatggtcaaagtgacgagacagaatctgattcatcagaaaagtttgaagatggcagggaagcacattatctcgagcggaagccagagcgtcaccattctgggtatcatagaccagcacatggtgccaaaaaatcaaacaagcttgctaaagtggccaaaatgaactatcctactgctgatgcagatttagaaccttcccagagcaaaggattcaaagggaaggtttcagagactggttatttacgtgatgtggatgtgatgatgacaggacagattagtgatgtcatgaaacctctagcagcaagtggtgaaaggaaacgcaaaggggtggcaaatttggacatgcgtgtttatgataactctgatctgcatgaagtcaatgaagatgcaaatgactctttcaggttggcggaatatgaaaggcttgccagtagatcaggccatgcagtccaagattctaatggtggttatggtggtactgaaagaaccagctctagctccaaaaaagcaaaaggaagagtcgaagttcctagcctggatgagcatggtgagcatttgtcatctggcccaaaggttgttgagaacactggtggatccaagaagaaaagcaaaaagaagccagagagcagcaccacagatgcagttattttagcagaaccagctgttgctgtacctgaaaataatgtgatagctgcagagcctgagaaggttgagaagcccaagaagaagtatgtaccgataacaccaacgatccatactggtttttcattctctgttgtacatcttttaactgccgtaaagaaggctatggtcactcctgctgaagatactcctccagccacagcgacacaaccggatggagaggagggcaaaaagtggttcaacagtggagagcgcagcaaaacgccccatcaagaacaaagtgcaacagatcaaactgaacaggtccttgagggtgcaaatgccagtgctgtagaacagactgtaccaatcaatacaccagcgcttactgttcaagagattgtcaatcgaattagagcaaatcctggagatcctaggatacttgaaacacaggagcccctccaggatttagttcgaggagtattaaaagtactttcatctagaacagctcctctaggcgcaaagggctggaaagcactagttgcctatgagaagtcaaacaaaagttggttctgggttggtccagcaccttctgtttcatcatatgatgaccccgatgaagaaacctctgctgaagcatggagtataccacacaagatgctcgttaagttggtcgacgcattttctaattggctgaaaagtggtcaggaaacccttaagcagataggttccctcccaccacctccaccgccaaatcctgcaaacttggatctgaaggaaaggttcaaggagcttaaagcgcagaagagtctgaacacaataagcccgagctcagatgaagcgaggacatatttccagcgtgaggaatttctgaggtactcaatacctgatagagcattctgctacaccgctgctgacggggagaagtctatagttgcacccttgagaagaggaggtggaaagccaacagcgaaagcgaggggccaccccatgctcttaccggacaggccgccgcacgtcaccatcctgtgtctcgtaagggatgccgcgtctaggttgcctgcaaggactggaaccagagccgacgtctgcacactgctcagagattcacagtacctaaaccatgaagaagccaacaaagaggccgcaattaatcaagtcgtcagtggagctctcgaccgtctgcattacgagcgcgacccttgcgttctgtatgacaacgacaaaaagctgtggacctatctgcacaggggcagggaggaggaggatttcgaggacgacggcacgtcgtctacaaagaaatggaagaggccaaggagggatgtctccgatgctgcagagccaggtgcagcgaatgatgatatcgacgacgatggcgctggcacccctccatcaaacaatgtgaaaaaacagaagacaacattgtcaggagaagctgccaacgatgagggaaatcatccgactcagaatccggcttctggtggcctggaaggtgattctgatctcaatgctgttccgtcttcaaaattttttgaagaaccatgtggagatgcctacattgatgcaagaccagatgacggtggcccaaattcagtagatgcgaaaccgggcagcacagctgacgacaacacggcactccctgggaacaccggcatggacgctaccaccccaccatgaataaagaacgtatcatggttcaatcagctagagatttgctgaagggtcagcgtaggtaacttgtgcagaaaccgtatctcatctgcgttgttcttatcgctacagttggctagtattaggagagtttgat

SEQ ID NO: 150414 - DNA, 1039 bp, Zea Mays
aggccaaggtcggatgatttttgattttttccattatctaaaaactgtttggtcaaatggggatccaacgcgcgatacccgcccgagagcctccccaagaactcagcatcaacagtgacaccgaaagccacagctcttagctctgtttctacctcaaaaggctcaaacaactgggactcggttacattacaatccagcatgtatcttagtctgcaaagaccctgtcgtcgagctggaaggccttggtgaagaaggccggccagcagaggtaggtggagaggatgctgctgacggtggaggcgcccatgagcatgttcatgacgacgatctgcagctggatggcctccagcggcgacgcgccgcccatgatgagccccgtcatggcgcccggcagcgcgatgagccccaccgtcttggcgctgtcgatcaccggggacagcgcgatgaccagcgaccgcttcacctgctgcagcgtcgcctgccgcggcgtcgcgcccagcgccagcgccgtctccaccaggttcctctggatcttgacgtcctcccggagcttcttcatggtgacgccggtgacggtcatggcgttgccgaccatcatgccggcgacggggatgatgtagcgcggggtgaaggggaagacgtcgaggaggacgagcaggagcatggtgacggcggtgccgacgaggatggagacgcaggcgatgcgcttcccgcgcggcacctgcctggcgcgctgccccgccgtgtacccggcgaccgtcacctgcaagagagagatttggaggctgagcagcaggtaccatacccctaggtaccataccatccatacatacatacataccatgaagaggtaggcgaggaggatccagagcgcgttcttctgggcgaagatgaactggaggacgaagccgatggcggagagctggaggaaggcgcgtgcgatggcgtagagcatctcgccctcgagccccaggcgctgcgagaagctgagcccgacggccatggccaccacggccgtggccgccgccggcttgagcat

SEQ ID NO: 150415 - DNA, 1712 bp, Zea Mays
gcaccggcctccaagaccaagacatataccggccggcaggtcggtcggctgctagctgcagcttcctccagatttcttcctcgatatggggatgcaatggggaccacagttcactgggaaaattggccagtacatgcacagcatggacatgagcgacgggggcaagaaacaggaggcggcggcggagcactacggtgctgctggatacgtatacaacgtgcatgcgcacggaggagctgctgctgctggcggcggtcctccagcatatcaccatcaatcgtctgctggtggatacgcatacaaatggagcactcctcctcggaatcatccgccgccggcgtacggcggggcgtacgatgagtaccatgctcatcagaagccaccagcgtatggtggtgacattggcgccggcggcggcggcgggtatcctcaaaacccaccagcgtatggtggtggcggcggcggcgggtatcgtcaaaacccaccagcgtatggtggtggtgggtatcctcaaaacccaccagcgtatggtggcggcggcgacggcgggtatcctcaaaacccaccagcgtgtggtggtggtggtggtgggtatcctgctcctgaacgtggaggatgggacgatgggcgccctcctcctcgagagcagcagccgccgccaggctaccctcctgctcgtcccgtggagtgtgatgaacgacaccctccatcacagcagaagcctcctccttcatgccaggaagtggacaagaagccgcaaccagcagagaaccagcgggaaccaccaccagatcatgcaggtagcaaagagaccaacaagcaggacgtggctgcttggaagccgaaagcgagtcccaagcatgagggcaacaagcctccggccacagacgtacctcctcaaaaacagccgccgtatgggtaccctcacccgggttggggcggtggtgagggtggctactatggcggcggcggcggcggctatcctccaccgccataccaaggcggctatcacggcgggggcggctatggcggggcgcacatggggtggccagcgccagcacctcccgccggtgcttatgctggctatggagcataccacggcggatacggcggcggccatggcggtgctggtagttacgcgggcaacggcaagtacacgctccgaaacgagggcaagtttaagcactacgctcacctccatggcaaattctaactacaagcatatatatataccatgacgcagtacgtacacgcccggcctgatgcatatatgcatgcatggatggctaatacgtgcatacgtgcctactgattaaataaagtttgttacgctgcacatctgcatgcatggtgcagtacgtacacccttagctagtgtgatatgcatgtttaccagctacctactgtactcctcaattagcagcgtgatatataattatataccccttcttcatatcctagctagctacgaagacctagctctatcttgcaagatgcatgtaagcaagtatgtatgtaattatgtactctcgtcctcgttcttttttatttgtcgcgttttagtttaaaaataaactagcggacgacaaatattcaagaatggaggaagtatatatacgtatgtaaaccaatctctagcgttctgctcgtaataagatacccatcttttttatgtatcaatcgctgaataataattatactgatgctgactg

SEQ ID NO: 150416 - DNA, 1715 bp, Zea Mays
gcaccggcctccaagaccaagacatataccggccggcaggtcggtcggctgctagctgcagcttcctccagatttcttcctcgatatggggatgcaatggggaccacagttcactgggaaaattggccagtacatgcacagcatggacatgagcgacgggggcaagaaacaggaggcggcggcggagcactacggtgctgctggatacgtatacaacgtgcatgcgcacggaggagctgctgctgctggcggcggtcctccagcatatcaccatcaatcgtctgctggtggatacgcatacaaatggagcactcctcctcggaatcatccgccgccggcgtacggcggggcgtacgatgagtaccatgctcatcagaagccaccagcgtatggtggtgacattggcgccggcggcggcggcgggtatcctcaaaacccaccagcgtatggtggtggcggcggcggcgggtatcgtcaaaacccaccagcgtatggtggtggtgggtatcctcaaaacccaccagcgtatggtggcggcggcgacggcgggtatcctcaaaacccaccagcgtgtggtggtggtggtggtgggtatcctgctcctgaacgtggaggatgggacgatgggcgccctcctcctcgagagcagcagccgccgccaggctaccctcctgctcgtcccgtggagtgtgatgaacgacaccctccatcacagcagaagcctcctccttcatgccaggaagtggacaagaagccgcaaccagcagagaaccagcgggaaccaccaccagatcatgcaggtagcaaagagaccaacaagcaggacgtggctgcttggaagccgaaagcgagtcccaagcatgagggcaacaagcctccggccacagacgtacctcctcaaaaacagccgccgtatgggtaccctcacccgggttggggcggtggtgagggtggctactatggcggcggcggcggcggctatcctccaccgccataccaagcaggcggctatcacggcgggggcggctatggcggggcgcacatggggtggccagcgccagcacctcccgccggtgcttatgctggctatggagcataccacggcggatacggcggcggccatggcggtgctggtagttacgcgggcaacggcaagtacacgctccgaaacgagggcaagtttaagcactacgctcacctccatggcaaattctaactacaagcatatatatataccatgacgcagtacgtacacgcccggcctgatgcatatatgcatgcatggatggctaatacgtgcatacgtgcctactgattaaataaagtttgttacgctgcacatctgcatgcatggtgcagtacgtacacccttagctagtgtgatatgcatgtttaccagctacctactgtactcctcaattagcagcgtgatatataattatataccccttcttcatatcctagctagctacgaagacctagctctatcttgcaagatgcatgtaagcaagtatgtatgtaattatgtactctcgtcctcgttcttttttatttgtcgcgttttagtttaaaaataaactagcggacgacaaatattcaagaatggaggaagtatatatacgtatgtaaaccaatctctagcgttctgctcgtaataagatacccatcttttttatgtatcaatcgctgaataataattatactgatgctgactg

SEQ ID NO: 150417 - DNA, 1523 bp, Zea Mays
aaccaaccatatcctttccccaccccgcatcgtcggacaccctccaaagtccaaaccctctccccgccgcatcgccgccgccggaagcgcctccctcgatccagatccaggagatatgcctcgcaatgatgatcgctatgggaatacacgcttgtatgttggaagattgtctccccgcacccgttctcgtgacctagaataccttttcagcaaatatgggaggtttttcggttttttacacaaccatggaggtgtggtggaagggtgcccttgatggaattggtggccatagttccaatgtttgtggaggactttggtgaagggcgcccttggtgtaatcttattgactgttgtagatgatgaagttgcaagttaatgtatttgagtacttcgactcacgtcagcttattgtttgtggcaaccatttccgcagaattcgagaagtggagttgaagcgtgactatgcattcattgaattcagtgacccccgtgatgctgatgatgcacagtacaacctagatggcagggacgtcgatggaagccgcattattgttgaatttgctaaaggggttcctcgtggttctggtggttcacgtgattacaacggaagaggacctccaccaggaacaggccgttgttttaactgtggagttgatggtcactgggcaagagactgtcaggctggtgactggaagaacaaatgctaccgttgtggcgaaaggggccatatagaaagaaattgccagaacagtccaaggaacctcaggcgtgagagaagctattcacggtctccatccccacgccgaggacggggccgcagccggagctacagcagaagccggagctatagccgatccagatccccgtctggatctcctaggggtggacgccgagaccgtgatgagaggagatcaaggagtcttagctacagcaggagcgcaagccctaggcgttctgtgtcacctgtaaaggaaaaggagcgcagccgcacacctgatggcagtaggagccccagcccaagggacaaggtgagcccaccaccaaaggataatggtgcccacaatggctcggaccgtgaagacagccctgggggcagggagatgagcaagaggagtcggagcccgtctgatggctaccgtagccctgtgggcaatgggcgcagcccgagccgtagcccaagccccaaggtcaacaatggtgatgacccaagccccaagggcaacaatggtgacgacccaagccccaagggcaacaatggtgatgacgagcaccgcggttcaccaagaggaagtcagtccccctgaactgaaaaactccccgtgcaatttggggagcagtgtgcctgatttgagaaaacaaactgtattttgccatttctcagacttgtgatctttttgagcaagaaaactcggtgtaagaatttgttgccctcgggtgtaagacagatttgtggtatttgagcttttcatcctgccaaaagctgaatattcattcaattgccaagtatctcgagtttatctgct

SEQ ID NO: 150418 - DNA, 1326 bp, Zea Mays
tagtaggccagaccaaccaaccatatcctttccccaccccgcatcgtcggacaccctccaaagtccaaaccctctccccgccgcatcgccgccgccggaagcgcctccctcgatccagatccaggagatatgcctcgcaatgatgatcgctatgggaatacacgcttgtatgttggaagattgtctccccgcacccgttctcgtgacctagaataccttttcagcaaatatgggagaattcgagaagtggagttgaagcgtgactatgcattcattgaattcagtgacccccgtgatgctgatgatgcacagtacaacctagatggcagggacgtcgatggaagccgcattattgttgaatttgctaaaggggttcctcgtggttctggtggttcacgtgattacaacggaagaggacctccaccaggaacaggccgttgttttaactgtggagttgatggtcactgggcaagagactgtcaggctggtgactggaagaacaaatgctaccgttgtggcgaaaggggccatatagaaagaaattgccagaacagtccaaggaacctcaggcgtgagagaagctattcacggtctccatccccacgccgaggacggggccgcagccggagctacagcagaagccggagctatagccgatccagatccccgtctggatctcctaggggtggacgccgagaccgtgatgagaggagatcaaggagtcttagctacagcaggagcgcaagccctaggcgttctgtgtcacctgtaaaggaaaaggagcgcagccgcacacctgatggcagtaggagccccagcccaagggacaaggtgagcccaccaccaaaggataatggtgcccacaatggctcggaccgtgaagacagccctgggggcagggagatgagcaagaggagtcggagcccgtctgatggctaccgtagccctgtgggcaatgggcgcagcccgagccgtagcccaagccccaaggtcaacaatggtgatgacccaagccccaagggcaacaatggtgacgacccaagccccaagggcaacaatggtgatgacgagcaccgcggttcaccaagaggaagtcagtccccctgaactgaaaaactccccgtgcaatttggggagcagtgtgcctgatttgagaaaacaaactgtattttgccatttctcagacttgtgatctttttgagcaagaaaactcggtgtaagaatttgttgccctcgggtgtaagacagatttgtggtatttgagcttttcatcctgccaaaagctgaatattcattcaattgccaagtatctcgagtttatctgct

SEQ ID NO: 150419 - DNA, 839 bp, Zea Mays
tagtaggccagaccaaccaaccatatcctttccccaccccgcatcgtcggacaccctccaaagtccaaaccctctccccgccgcatcgccgccgccggaagcgcctccctcgatccagatccaggagatatgcctcgcaatgatgatcgctatgggaatacacgcttgtatgttggaagattgtctccccgcacccgttctcgtgacctagaataccttttcagcaaatatgggaggtaagcatcacattatatgcacatagaactattctgaaactcagagtgtgctggcgtgctgctttttgttatgtggtcggacaccagttatgctctactacctccgtttttatatatttgacgccatacaattccacttttacatgccgacgtcaaataaaaatgaacggagggagtagtatatatcatgagcacgtgatgttaactctgcatggttaaattttgtggtacacaactacacatcaatccagatataaaatacaatagcaagctaggggctttcctatcgtgttcaaaaaaaactcgacctgtgggggtaagaccgtctgtacaatattatattaagaagaccttctcacacaggtcaagaagaccttccacgcaggtcgagaaaacctctaaactcctgccccaccacccccacccatacacaatggcaccgtagcccaagtgagaacgaccgggccaggcctgtgctttggcttgggacaggcgaggggatgttttaacttttaaccacagcctgaaaattcgctcccacggggagtcaaacctagaacctgacaagtgctactcagaccacctaaccaactcgcctgttca

SEQ ID NO: 150420 - DNA, 474 bp, Zea Mays
atggggcggtggagtgtagactgtccgcctgtgggagatcgaccgccctaccgcgcggtgaaggctggcaaacggcggggacgctggaggccgcgggtcaggtggcggctggcaatcggcggtcgggacgctggaggccgtgggtcgagtggcggctggcaagcgacggccgggacgctggagggcgcggaatatgcaattacaaatggtgttgttaatggcagtgaagctatgtccaaagaatcccatgaaaatttgacatctaaagaactagaggacagtggaataaagaatatgttaccaggggaccttgatatacccgttcaatcttcagaatctactccctattgtccttctcatgaatcatttgctatcagtgaccatgagtctgttgttcccactattgttgaaggtgataaagaaaccagtagagaacagtttgatatacaatcaaggttttataagccaaactga

SEQ ID NO: 150421 - DNA, 110 bp, Zea Mays
aatacgattttttgtttctatgcatgcaattcatttccttttattgtacattctttccatcataaattcgtgcgcatgcagctggtaacagatttttacgtagtataccg

SEQ ID NO: 150422 - DNA, 1257 bp, Zea Mays
agcatcgcagttcgcacacagcagcagcagcccttctttttggagcagcaccacaggggagatcgatcaatcaatcagcaagcaaagcgcgcacggcacaggtgggtagctagcaatggcgacgccgccgaaccctcctcctccgagcactcccatagctgcggcggcgcccttattgccagcagagttcaccagattcaccttccgggccttgtacgtccgccggaccggcccaagcagcagggagatgattcagccggggagaccttacgatgagctgggcagaagactcaccagtgactacccggtgtacgatggccgtggctccgacgccgcccttgtcgctcgcatgcaggggatcaccgtcctcgtcggtaacgcgcaccagctgttcaccatcgtgttcgagaccgggaggttcaagggctccacgctcctcaccaacgggatggtgacggaaggggtccgacgagtgggcggtctacggcgggactggagcgtttgcgatggccaccggcgtcatcagaaggaagaaccttcttgccggcggcggtgacagtggcgggaactccgacgagcttagcgtggaagtgttctgcccggtgttcggatcaccgcagcagccgccaaaggacgacgacgatggctccgccgtcaccaagattggactatggggtgggccgggaggatcggcacaggacatcacgacgacagaggcaccaaggcgtctgaacagcgtcaccattcgcgccggtattgccgtcgactcgattgagttcacttacactggcaaggacaggcagaggcgcacagctgggcgatggggtggacttggcggcaatgttcgaacgatcgatcttggcgacaacgaacacatcagggaggtgtcaggaacgtacggcacatttgaaggtgctactaccctaacctcgctcaggttcatcaccagcaccagagcctggggcccatggggcaccgagaacgggacacgcttctgcatcaccgcgcccatcggcagcagcgtcgtgggattctacggacgcgcgggaaccaggctcgtcgacgctatcggtgtctacctgcgtcaactttgatttcaacggcatgatgcttgatttcaaatagatatattaattagttcctcgtcacagtcgatcctgtgtcaaataataaagaagctcttgtatgcatgtgtatatgttagtccttcgttctgtatgtgtcaaataaaggttgatcaaaaagacctagaataag

SEQ ID NO: 150423 - DNA, 1373 bp, Zea Mays
agcatcgcagttcgcacacagcagcagcagcccttctttttggagcagcaccacaggggagatcgatcaatcaatcagcaagcaaagcgcgcacggcacaggtgggtagctagcaatggcgacgccgccgaaccctcctcctccgagcactcccatagctgcggcggcgcccttattgccagcagagttcaccagattcaccttccgggccttgtacgtccgccggaccggcccaagcagcagggagatgattcagccggggagaccttacgatgagctgggcagaagactcaccagtgactacccggtgtacgatggccgtggctccgacgccgcccttgtcgctcgcatgcaggggatcaccgtcctcgtcggtaacgcgcaccagctgttcaccatcgtgttcgagaccgggaggttcaagggctccacgctcctcaccaacgggatggtgacggaaggggtccgacgagtgggcggtctacggcgggactggagcgtttgcgatggccaccggcgtcatcagaaggaagaaccttcttgccggcggcggtgacagtggcgggaactccgacgagcttagcgtggaagtgttctgcccggtgttcggatcaccgcagcagccgccaaaggtacgtacgtcgtgtttggctcactagctagggactcgaattctatctatggaagagttctatggcaatagttcgggtactgtactgtactgctggatacacatgcgtgcgtgcaggacgacgacgatggctccgccgtcaccaagattggactatggggtgggccgggaggatcggcacaggacatcacgacgacagaggcaccaaggcgtctgaacagcgtcaccattcgcgccggtattgccgtcgactcgattgagttcacttacactggcaaggacaggcagaggcgcacagctgggcgatggggtggacttggcggcaatgttcgaacgatcgatcttggcgacaacgaacacatcagggaggtgtcaggaacgtacggcacatttgaaggtgctactaccctaacctcgctcaggttcatcaccagcaccagagcctggggcccatggggcaccgagaacgggacacgcttctgcatcaccgcgcccatcggcagcagcgtcgtgggattctacggacgcgcgggaaccaggctcgtcgacgctatcggtgtctacctgcgtcaactttgatttcaacggcatgatgcttgatttcaaatagatatattaattagttcctcgtcacagtcgatcctgtgtcaaataataaagaagctcttgtatgcatgtgtatatgttagtccttcgttctgtatgtgtcaaataaaggttgatcaaaaagacctagaataag

SEQ ID NO: 150424 - DNA, 787 bp, Zea Mays
acaacgatctcctatgcacaaacatccacaaaaacaaaagaagggaaaaacacaagctagccatggttagcagcaagattagtattgtcggagccatcacatctccaattgtggttgtggtggcactgacactattgatcacacttttggcaccgacagtagatgcacaaccatactcaacaatgccacctagcatgatcggagatttattgccacggacgagagtacctccgtctgggcctagccatcctccacccatggcggcgatgccaccatcatggagaatgccatccgctggacctatgaagcctccttccatggcggcgatgtcacctgatgttgttggggatttgctaccacgaggacctagccatccgccaccaagggtggcgatgtcacctgatgttgttggggatttgctaccacgaggacctagccatccgccaccaagggtagcgatgtcacctgatgttgttggggatttgctaccacgaggacctagccatccgccaccaagggtggcgatgtcacctgatgttgttggggatttgctaccacgaggacctagccatccgccaccaagggtagcgatgtcacctgatgttgttggggatttgctaccacgaggacctagccatccaccacccttggaggaaatgatcgagtatagcaatgatgtcctcggtgcgaatgataaacttgttggtaatgtaaggatgaatacataaggataatgtgatgtaacttatagacaataacataaataaaaagaataccctgtgttgtt

SEQ ID NO: 150425 - DNA, 953 bp, Zea Mays
ccatccaccacaacgatctcctatgcacaaacatccacaaaaacaaaagaagggaaaaaccacaagctagccatggttagcagcaagattagtattgtcggagccatcacatctccaattgtggttgtggtggcactgacactattgatcacacttttggcatcgacagtagatgcacaaccatactcaacaatgccacctagcatgatcggagatttattgccacggacgagagtacctccgtccgggcctagccatcctccacccatggcggcgatgccaccatcatggagaatgccagccgctggacctacgaagcctccttccatggcggcaatgtcacctgatgttgttggggatttgctaccacgaggaagagtaccaccctccgggcctagccatccaccacccttggtggcgatgtcacctgatgttgttggcgatttgctaccacgaggacctagccatccgccaccaagggtggcgatgtcacctgatgttgttggggatttgctaccacgaggaagagtaccaccctccgggcctagccatccaccacccttggtggcgatgtcacctgatgttgttggggatttgctaccacgaggacctagccatccgccaccaagggtagcgatgtcacctgatgttgttggggatttgctaccacgaggacctagccatccgccaccaagggtggcgatgtcacctgatgttgttggggatttgctaccacgaggacctagccatccgccaccaagggtagcgatgtcacctgatgttgttggggatttgctaccacgaggacctagccatccgccaccaagggtggcgatgtcacctgatgttgttggggatttgctaccacgaggacctagccatccgccaccaaggaaaatgtgatgtaacttatagacaataacataaataaaaagaataccctgtgttgttta

SEQ ID NO: 150426 - DNA, 1030 bp, Zea Mays
accacaacgatctcctatgcacaaacatccacaaaaacaaaagaagggaaaaaccacaagctagccatggttagcagcaagattagtattgtcggagccatcacatctccaattgtggttgtggtggcacttacactattgatcacacttttggcaccgacagtagatgcacaaccatactcaacaatgccacctagcatgattggagatttattgccacggacgagagtacctccgtccgggcctagccatcctccacccatcgtggcgatgcaaccatcatggagaatgccatctgctggacctatgaagcctccttccatggcggcgatgtcacctgatgttgttggggatttgctaccacgaggaagagtaccaccctccgggcctagccatccaccaaccttggtggcgatgtcacctgatgttgttggggatttgctaccacgaggacctagccatccgccaccaagggtggcgatgtcacctgatgttgttggggatttgctaccacgaggacctagccatccgccaccaagggtagcgatgtcacctgatgttgttggggatttgctaccacgaggacctagccatccgccaccaagggtggcgatgtcacctgatgttgttggggatttgctaccacgaggacctagccatccgccaccaagggtggcgatgtcacgtgatgttgtttgggatttgctaccacaaggacctagccatccgccaccaagggtggcgatgtcacctgatgttgttggggatttgctaccacgaggaagagtaccaccctcaggacctagccatcccccacccttggtggcgatgtcacctagcattgttggggatttgctaccacgaggacctagcccatccaccacccttggaggaaatgatcgagtatagcaatgatgtcctcggtgcaaatgataaacttgttggtaatgtaaggatgaatacataaggataatgtgatgtaacttatagacaataacataaataaaaagaatatcctatgttgtttatt

SEQ ID NO: 150427 - DNA, 381 bp, Zea Mays
cacgaggacctagccatccgccaccaagggtggcgatgtcacctgatgttgttggggatttgctaccacgaggacctagccatccgccaccaagggtggcgatgtcacttgatgttgttggggatttgctaccacgaggaagagtaccaccctcaggacctagccatcccccacccttggtggtgatgtcacctagcattgttggggatttgctaccacgaggacctagccatccaccacccttggaggaaatgatcgagtatagcaatgatgtcctcggtgcgaatgataaacttgttggtaatgtaaggatgaatacataaggataatgtgatgtaacttatagacaataacataaataaaaagaataccctgtgttgt

SEQ ID NO: 150428 - DNA, 390 bp, Zea Mays
atggagaaacagggagctggggcctggggcgagctgcgcgcagagaagaagccggggaggagctgggcgcgccatgagagaaaccttgagaaatctgcgcgcgtctatgacaaacgcagggcgcgatggagggactcggtcagggcgcagtccgagcagaagccaaggacgcgtggaggggcgagccagggaacaggagcgccgcacaaaggaagctcgagtcggaccaggagaagctcgagcgccatgggggaaaaattggagctggataccagagaaaggaggggcggccgtgagagctcacggcgagcggaactgaaggccgaaggatggcgcctgcgtatggtgagaagaggcatggaggacaccggcagggagacgcagggataa

SEQ ID NO: 150429 - DNA, 190 bp, Zea Mays
atgattaaacagaacattcacagtggcgagggtggtgagcggtggctctacgtcgagtcagaggttatattgcaatctgaatatatacagaaataaaaaataaaacccttaacaagaaagtaaaagagtcatcaagtagtcattgaaaatatctcatgaactttaggctcatggtgggttttgtaggaaa

SEQ ID NO: 150430 - DNA, 516 bp, Zea Mays
atggagtgggcgtcgatgcggaccaggtcggcgcccagcccgacctccttgaccagcggcaggttggccgtgttgagcaccacgacgcggcccccgcccgggatgtccacgtccagcggcgcctccaggcagttgagcgccaccccctcgcggtcccgcggcgacggcgccggcagcggggacgaggacgcccggacgatgcccgaggccggctggctcgacaccagcgccgccgcgtccgcctccggaaggtcccacgcgcgcgacacgaactcggtggagaagcccgtgaagatgccggtcgcgcccgtcagctggaagttggtgaattgccccggcctgtggcccttggaggtgtcgccgaggaagagcaccgtgagcggggtcggcgcggcggggccgttgtgccaccacgtcaccacgccgaagggcagcgccagcgcgtcgccctccttcacggccaccaccttctccttcgtcgcctctgggaggacgatgccgcaggtgcccgtgcct

SEQ ID NO: 150431 - DNA, 2640 bp, Zea Mays
taatgtaaaatataccagaaactgcagtttagctcatttagtaaattgtatggaactggagattaccagctagcaactgagttctacatggtttagaagttatgaccaatggagccatttacatagtcaaaaggattacaactctgttcctttcaaagatgtacaagaatgtttaggctaaaaagtaactgtcgacacaccagctcccagtatctgagcttacattacaggggagcggataatatacaccgaatcggccgattgcgcctacaccacgaatgctaatttgcaacggatacaacgcccatggcagcctcctgccatctggacaaaatatagatcatgaggcgcagttgcagaacggaatctgtttgtagcttattatgttcaagggaatggctgtggctttatacctcgctgacaatcatcggtaccgactgatgctggagggcatgccttcgttgagtttgttaagcaactacaatatcctgatagctactgcctaatgttaactaacattcagtagttccaaaagattctcagcttcatgctccttgaaaacctgtatcgaagaacattgctgaggccctttagatgaagaaaatcactagtgacctgttgccaatcgacagagtcaacactcttgctgctctcattttcgcctcctacccatacatacaccattttaactgcttctcctctcctgatggcattcgaagtaacaaaaattaaaaccgacttcgggtcaagatccttgcgtgcaaatgtagttagctttcccatgctgggccactggtagactacaagttgtgcattactgcagacttctgagttactgtcagtacgctcaattaatctagtttcagaatgcgagctcaaactattaccagtgcatttttctgagcaaaactcactagtcagctgtttaaccccatttgtactattatctgaggcatcctcggtcctgcgaatactagatggcgcccttggtggcaatacaatagacggcacccttggtggcaatacaagatccttttggagagatggtagctttagaagtgtgaagcctcctctcctttctgctatagaagaggtcttggaaggagagtgtattgattccatgccagaaggctttgaagctccttcattagatgattgagaaaggggagacctggatgatggcaccaaagcatgtgtcagattagatgaagcaggcgagaggccaaatgatggtggagagccagttgtaggtgataaggagggtgagtctgaactatacttcgagctgacacttgaatccgatgataaggagcttggagaaaggaaaggaggtgaggttgatgcctcagcagccaggtgttgtacccgtggatcaaaatccttcattagagcagaatctgaataaacacgagctagcgacctggagataaacttgtgcctcagtaaactccagctactttctctagctggaagatgggtctcatcaccagccccagaagttgaaaatgcagggaccactcccccagtgattgctttgtagacaagctcaaaatcagcgtcataggactcatttttccggcttcctgggtcactcttggatgctgaatcgatctggtccttgctaatctttgtattactatctgaattaggtggcatacttgaaaatgcatcccagaactcctgcggctccagaccttctctcacaaccttgatgtgcccctgcaccttctcatacctcactacctgaaacgcagcagcctttgcatccttttccattaccggatcacacttcattccaacccagacatagagcgacgagagaacatgcacaatgaacgcgcctctagagtcaagggtggctggggatgggtcgttgagcattttgggcaccaaatgcagaggggcatactgggagtgaggcgccatgcggtacatcctgagcactgaatttggtgacagcggaatcgcatgcacacgcttctggcactggagaagctggcatgcaaagcccatgtttggatttgcgatcccccgggcagccttgacaaactggaaggcgtcatcgaagctctggccttccctccacatcaagtaggcgatgaccagcgacgtggagcgtgacaccccctggcagcaatgcacaagcacgcggccgccctgctccctgacgtcctcgaagtagtcaaacacgtcgtacaggatgctggtgatgtcctcggtggggctgtcctgcagccagagggtgcggtagactaggtccgacttgaagtactccgggcagacaaagcccacacagttgagcacgtgggtgatgccgttcttcctgaggatgtcgcggttcttggcgacggcgtcgccgccgaggtagacgtggtcggcgaccttggagcactccttgtcgaagaaggcgatctggtccttgcgcccctgcgaccggagcgaggagaggtcgaggcggagcccctccccgggcttggcgggggaggacccgcccccgccgccgcccgccctggaggcgcccggcgtggtggggttgggccactcgccaacgtcgtcggaccccgccttgggccactcgtccaggctgcggcgggtgatggcgagcggctgcagcggcgggaggcacgaccgcgccttgga

SEQ ID NO: 150432 - DNA, 1820 bp, Zea Mays
caaagtggccggccgtacgtctcgtcgcctttccagtttccacgccggaagtggaggcgagccagccagccggtcgctccccactgcttccacacccaccctcgctctctctctttcgctgtcacgcggggcccacccgccgtgcgtgcgccccatccaccaccgaccaggcgccgtcgccgccatcgaagcgtttcgtttgatttgggtttcgaggcaagtggtgccgcggcggggtcgggagaggaggggccatggcggacgaggcggcgccgaggctgctgccggtggcggcagacagggacaaggacgaccgccgccgctgggcggcccgctgcggcttcgccgtcctcggcatcatgagtaccctcctcgtctacggcgtcctccaggagaagatcatgagagtcccgtatggagtggagaaggagttcttcagatactcgcttttccttgttttctgtaaccgcatcaccacatccatggtgtctgcaatggtgttactggcaagtaagaaatccttggaccctgtggctccgctacacaaatatggtgttgtctccatatcaaatatactgaccactacctgccagtatgaggccctcaagtatgtaagcttccctgtccaaacgcttgccaaatgcgccaagatgatacctgtcatgatctggggcacaataataatgagaaagaagtatgttgcaaaagattacttcttttctgtcgtcgtgactatgggttgcgcattgttcattctatatccggcgtcgatggatgtgagtccatttaataaaggcagagaaagcactatttggggtgtttcactcatgctcggttatcttggttttgatgggttcacaagcacgttccaagataaactcttcaaagggtatgacatggaaatacacaaccaaatattctacacaacagtctgctcttgtcttcttagtttaagcgggctgattctccagaatcatctgattccagctgtggattttatgttccgtcacccagattgcttctccgatgttgtaatcctgtccagcgttgcaacagcgagtcagttcttcatatcctacaccattcggacatttggcgctctcacatttgctaccataatgacaactagacagcttgtgagcatattgctgtcctgcatctggtttgtacatcctctcagctggatgcagtgggttggcgcggccattgtgttcgtagccctatacacaaagagcttcctgaggagtaaaccgcagaagctagcggggtcaagcccgccacgtggttccagtccgaaccctgttagcaatagttgacaattggtgacataataacataggaaacaatggacttgttgcggtgtaacgggacgaagtctccgtgtctgagatcaatggcaccatggctgcatatgcaaggcgaggtaactggacagataggttccagatgttgctgtgttactgctccctgacattttttcaaggtcatgaaggtggccattttttcaagctagtcgaccctagtgttagtttagtgtccagagacccaattttgtagcccagtgagctgtgttaccaattttgtagcctcaacaaagcatcgtgtgtgtgtgtatttgtcgagcgttggcgactgagagttgaagaagtcacagcagaccatctgcaaaaactcaccagataactagaactgcgatgcgtaacaaattgcaaaacacaggagattgtcagctaacagctgtggtccgatgtaaagatcagcagataacaactgaaggcctgtttaccatggtttttgagtataccgtagtattttatacc

SEQ ID NO: 150433 - DNA, 1359 bp, Zea Mays
aagagattaggagacagtcggccgccctcccgatcggggaagaagacgcgatcgatcaccccggcccccatggaagtgttcaacggggtgcggttcgtgcgcctgcggtgctgcgcgcggcgcggcaagtacctggctgccggctccgacggctccagcgtgtgcctgacggggcagcgcggcgtgcacaacgcggtgtgggcggtgcaccacgcggcggggcccgacggcgggccctgcgtgctcctccgcggcgcctacggccggtacctcctggccaccagcgcgcaggccggcacggggccctcgcacggcgtggtcacggcgcaggacgggctcggcggcgccacgccgctgcccgggatgctgtggcaggccatccccaggcggtccaccttcgtcatccgcagcggcacggggcggtacctccgcgccaacggccggtacctgcggtggcgcagggccgtcacctccgccggcgacaacggcagcaccatgatgcagtgggacatcgagaacgtgcccatcagcatgacccgcccatgcattcttgatcccacctaccagctgacgcatgcgcggcggcgtccgctgacggagagcgaggtggctcggcagatccggtacgtccgcggcgagacggacgggagcgtgaacgagggagcctggaggacgatgcagctcaacacccacaacctgatgcagctgcggctcacgctggcgtgccgcctcggcgccagcatggacgtcacccgcaccaccctctgcgtccgcgccggccgctacgcccacctcagcccgctgctcgtcgacctgcccatcggcaacgaccccatcgacattgtcatcctcaaccacggcacagaagcggacaacgatctgcggtacccagatctgcatgctccaagagtgttagatagcagcaaggtctctaacaaaaatgaacagcggacaacgatctgaacacacatcttacagaggtgacgacatcgtcctgggactctttttgtcagttctcttggagtgcttgaataagagcagaagaatagtagttcagttctctcacataactaactcccaatagatgtatgttctgacctcagttctactcattctgtcctgaaactaggacggtgttagttttgctgacaaacgatctggacttcttactgaaactagtcactgaacatgttcatataacaggaattaaaactgtatttataaccttggcgaaaacagcgagacagcaactgccaactaatggttttcagtactacttccgttaaacagctctattctagagttctcagtaaactcagtatttttttcctatgtatacactgctgatacaatttataa

SEQ ID NO: 150434 - DNA, 966 bp, Zea Mays
aagagattaggagacagtcggccgccctcccgatcggggaagaagacgcgatcgatcaccccggcccccatggaagtgttcaacggggtgcggttcgtgcgcctgcggtgctgcgcgcggcgcggcaagtacctggctgccggctccgacggctccagcgtgtgcctgacggggcagcgcggcgtgcacaacgcggtgtgggcggtgcaccacgcggcggggcccgacggcgggccctgcgtgctcctccgcggcgcctacggccggtacctcctggccaccagcgcgcaggccggcacggggccctcgcacggcgtggtcacggcgcaggacgggctcggcggcgccacgccgctgcccgggatgctgtggcaggccatccccaggcggtccaccttcgtcatccgcagcggcacggggcggtacctccgcgccaacggccggtacctgcggtggcgcagggccgtcacctccgccggcgacaacggcagcaccatgatgcagtgggacatcgagaacgtgcccatcagcatgacccgcccatgcattcttgatcccacctaccagctgacgcatgcgcggcggcgtccgctgacggagagcgaggtggctcggcagatccggtacgtccgcggcgagacggacgggagcgtgaacgagggagcctggaggacgatgcagctcaacacccacaacctgatgcagctgcggctcacgctggcgtgccgcctcggcgccagcatggacgtcacccgcaccaccctctgcgtccgcgccggccgctacgcccacctcagcccgctgctcgtcgacctgcccatcggcaacgaccccatcgacattgtcatcctcaaccacggcacagaaggtggcactctcagctcagaatcctcagatcagatcagattagttgacaggggtagtgcagatatgattcataagctgcatctgtcgttgcccttctaa

SEQ ID NO: 150435 - DNA, 104 bp, Zea Mays
ctatatatacaaaagtactaattacagcagctcagttcacgacgtacctggaagctggagttgtactgcaactgcgtccagcattttccttctcccctgaagaa

SEQ ID NO: 150436 - DNA, 1569 bp, Zea Mays
gttctgcctcgcgtgtgtgactgacttgacacatttttctttttcctcctcctttttggttgatgcagcatgccaatgcctgtttgttttttgcagtgagaaaaaaaaggtttttgttttcattttgaggggaaagggtgaggagcccagcattggattggaggttggattttggctcccaggtctccaacggacttgagtactactagtagtggtggttgcatggtgcaatcatttgcaggaatccaaatcattcgccctctagatcgtgctgccatgtctctgtccacccccaccaccttgtgttccgcgacgtctcctctctctctctctctctctagagttgctgataggttttttactaactcactccaccaaatccgttccaattccggtgcaaactgcttgttcgtgcgagacaataaagccatggaactagctaacccttgctgaactgtggaatggtttctgagcagagcgtggcggagctgaagcagaccctgctggcgaccacgctggagctggaggcggcgagggaggagctgaggcggaaggagcagagcatcgccaagctgtcggacctggtgcgcgaggtggccaaggagcgcgacgacgcgcgggaccaggcgcagagcctccgcctcctcgctgcccaggccgcgccgccgctcgtcacgtccagcgtcaccgactccgactgcagcctcgcgtcgtcccccgtggacccgttcttcgaccccgtcacgtccgccgacaacaggcggcgctgcaagttcagccccgccacgccgccggccgcgcccaggcagcagcagcagcgccagcccggcgccgggctcgggtcggcggccgacgccgcgctcgagatgctcgccgccaagaggcccctgccgcacaggggccgcctgctggccgccgtcatggaggccgggcccctgctgcagaacctgctcgtcgccgggcagctcccgcgctggcgcaacccgcccacggtgcgcgcaccggacacgctgccgctcggcgcctcccgcgccgccgggtacgccgacgacgcggtcacgctggccgccagcggctgcacgaagcggccgatggccgcggccttgcccgtgctgcccgccgccagctgctcgccgggcttcatcgccaagcgacagaggctgcactgacggactgacggcaggatccaccgtcgtcttgtgtttgatgatgacgagcgaaacgaaacgtttgaagaagcgatcgatgatggtattagatgctaactgcacagtagtgttatctgagccatagaaagtaacttatgttactagaagtacagtcagtcaggttctgaattttgataatgcgatccatgtgaatagcaggtttttttcccacccgcacttgctcgttttctcttccgtttttcatttttgagcttgtcagtctgaaggctgttcatagctccacatggcttggcttggggtcagcaaatctatgtatctatataagtctgtcattcagtggagagcttgttcttgaaatgttctctgcaagtcaatatatgctactacgtttcatccgtgt

SEQ ID NO: 150437 - DNA, 1426 bp, Zea Mays
catagcagatggcaagaggtgataggtcggcgagcatgccatataaaatagtagtataatcaacctcccttccctaaattccaacccttgttttaggtgtgtgtatatatatatctctctcgctcggcttcgcctctgcttcccctcccctcctctgtctcaggcttcaaatacagacgcgagcggcggcggcggcagcagcagcagcagcgaagcgatcaagcgaacgagatggccatggagcttcctctcttcctcggggacggcccggacgccgccctcttctcctccctctggtcctccttccccgacgacctgcagccgccgccgcaacaagagagcgtggcggagctgaagcagaccctgctggcgaccacgctggagctggaggcggcgagggaggagctgaggcggaaggagcagagcatcgccaagctgtcggacctggtgcgcgaggtggccaaggagcgcgacgacgcgcgggaccaggcgcagagcctccgcctcctcgctgcccaggccgcgccgccgctcgtcacgtccagcgtcaccgactccgactgcagcctcgcgtcgtcccccgtggacccgttcttcgaccccgtcacgtccgccgacaacaggcggcgctgcaagttcagccccgccacgccgccggccgcgcccaggcagcagcagcagcgccagcccggcgccgggctcgggtcggcggccgacgccgcgctcgagatgctcgccgccaagaggcccctgccgcacaggggccgcctgctggccgccgtcatggaggccgggcccctgctgcagaacctgctcgtcgccgggcagctcccgcgctggcgcaacccgcccacggtgcgcgcaccggacacgctgccgctcggcgcctcccgcgccgccgggtacgccgacgacgcggtcacgctggccgccagcggctgcacgaagcggccgatggccgcggccttgcccgtgctgcccgccgccagctgctcgccgggcttcatcgccaagcgacagaggctgcactgacggactgacggcaggatccaccgtcgtcttgtgtttgatgatgacgagcgaaacgaaacgtttgaagaagcgatcgatgatggtattagatgctaactgcacagtagtgttatctgagccatagaaagtaacttatgttactagaagtacagtcagtcaggttctgaattttgataatgcgatccatgtgaatagcaggtttttttcccacccgcacttgctcgttttctcttccgtttttcatttttgagcttgtcagtctgaaggctgttcatagctccacatggcttggcttggggtcagcaaatctatgtatctatataagtctgtcattcagtggagagcttgttcttgaaatgttctctgcaagtcaatatatgctactacgtttcat

SEQ ID NO: 150438 - DNA, 1355 bp, Zea Mays
gaaaaattcaaggatgttgtcaactggctaaggcaaaatcaagcaggttcaatagttgtttcatccccaagttcactgaaggctgataagttcaatctgctagcagcagatgatagcaaactcttagtacaaccaagttcatataacaaacagaaggctccaattatggcttctagttcttcatcttttcataactcaagcttaccgaaccttttttcatcgccttctcagcaaaaaaacaccagattacagtggtatgtttgctgacaagaagaacacgtccagtgatagcagtaaaccagctttccagtttggtggaaataatgtcatatttggtggcaagaaggatgcacctgttgacagtagtaaacctttccagtttggtccgaataatggcaaccgtgcagtttacaggcaaggaagttctattaaccccagcgagagaacatatccagaggagatgatccaaactggcatatccaccattgatgtcatgaattccattgctcgtggacaaaagattccactgttttctgctgctgggctccctcacaatgaaattgctgctcagatttgtcgtcaggctagccttgtgaagacattggagaaagaaaagcatgctgagcaattcaaatcttatgagggtctttactttttcttgggatcctatctgagctccagcgaggacccagatatccatttcaagtacatagaagcagcagcaaaaattggacaaatcaaagaagttgaacatgtaaccagagagtcaaacttatatgatgctgagaagacaaagattgacaggctcagtgatattgaggaattctcaaatttagtgaagtaccttctgatggtaaggcaaaaggcacgggtcaccaaagtcgatggagaactcatttttgcatatgctaagattgacaggctcagtgatattgaggaattcattcttatgccaaatgttgccaaccttcaaaatgttggtgaccgtctgtatgacgaagaactatatgaagctgcaaagatcatctatgctttcatctcaaactgggctaaactggttgttaccctggttaagctgaagcagtttcaaggtgatgtggatgctgctcgcaaggctaacagtgccaaaacatggaaggagttctgctttgcttgtgttgacgccgaggagttccgttttgcacaaatttgtggtctcaatattattattcaggtatacaagtaggagcacatacttgataattttttgtagtatctgctttatagcagagcttctatcactatgatctatttgttttctcatatctgcttttgtatttttgtttatggtgatgacttggaagaagtcagtgagt

SEQ ID NO: 150439 - DNA, 1056 bp, Zea Mays
atttactagtctgcagcagcttctggtgtctagaagctggaaaaaaaagctgcggacctggtctctccctcgcccacttatgtgccattaaagcccaatacatgagctacaatgtggcccagcctcagaaggcccaataggtggtcactctactacccgaagccgcgggctgaaccctaactgacccagagcgatcggagctgacgacgatggccgggaaggcggcggccgcgacggcggcgaggtgggcggaggggtacccgtggaaggagaagctggcaaagtacaagggtgagctcgggaagggggtgtggggatactgggagctcggcgcgtggaagccgctcggcatcagcgctcgcaagcgcgcccgcctccgcaaggaggtgctcctcgccggcgaggactggagctacgatcctccccgcggggagatgcgtaccaagcgcaagggccacaagtgcgaccgcatctccgccgagaagcgagcaaatactgttgagctgatgaagaagatgccccagatgctgctcgactacaagaaacgtaggtgggagaagaagatgaaagcggaggagagcggcaagaattgataccacgcggctcgtccagggtgcttctcttcctaaataaggtccaaactttatccaggaggtttgcaggacggctagattctgacgcgtcatttccttgtggattccttctctcctgtgatgcgactttggacgcactatcctgattgtgatgctttccaacacttgtgccactggatcgtgatttcagtgagccccaacttctgcagcactagtattttgttgagacaaatcagctataagcatgccatctgcccaataaacttgttcatcatgtaagatcaatgctgttagtttttgtccgagtttgtgcttgcgtttgattacacttacctgcagaagaatgattgtctgaaaagtttgtccttgtgtaataagtgttgaatgttggaaatcctaaccctctcaaggattgggagattaatatatagaattagttggatgggctaggcccattacaata

SEQ ID NO: 150440 - DNA, 896 bp, Zea Mays
tttgctttattttttgtaaggtgcgaagcaataatcaaactccccagttcggtaaaagtacccagaatacctagcaagtgcagaaagtagttaatggagcgacaacaatggagcacatctaaagctaggaagatgcacttgtagctagcaagcagaattagaagaaactagtcatagttattccagtaataattctcaaagcaagggaagaaaataacagaaagggcgcattaagttgaccagtactagggtttccatctgcagatcgaaagtaaggaccaaccaaaagctaggcaacacaacaagctgcgcgtctcgccatacacaaattcatcacccaaaaaccaaaaccttcaccgtctgatctgtctgtctgatccgatgtgtgggagcaagagcggtcggatcggatcggatcacgcggaggccgcggccgtccgggagcggtagagcttgccgaagatgtggagggcggtgacgaagccgatgaagcagagggacatgacgagcaccatggtaggcgagagccggagccccggcgcctcgtcggtgtagaagcggagcatgttgctcccgccgccccccgagaatccgccacccccgccggacgcggtggcgcggcggcggcgcatcccggcggccgccgcggccgtgccgcgcggccccacggtggccgggcgcgcgccggcgccggcgccagcgccaacggaggactgcgactgcgaggaggagcgggccatggctggcgggcggcgtacgtagggatctgcggcacgaggcggaggatgagtggagaactcgctcgtatgctcgggatcggcggcgcttatgctcctcccgctgcttcgtcgtcgtcgtcgcctagacgggaggagataagctcggtggtggggtcg

SEQ ID NO: 150441 - DNA, 2314 bp, Zea Mays
ctgtttctgtttctattctcacgtcacgcgcaggctgcgggcaagcaatggcaggtgggccctgtcgcgctggccgatccagcgctgactcagcccccgcaccgcatacatgagagatgagaagccgccacccgccgctgcggctgcggcgcccgcgccaccacgagtgacccatcgtgctcggatcgtacggcctcaaccgcaaaatccagtatttaagcgctgcggaacactcgtcgagaggagaggacagagcagaggaccaccaccggaccgggctggagctggaggcgtggcggcgccggcgcgtccatcaggaggagaaggggcagggatggtgctgggcggcggcatggcggcagcggccgtaggcggggacgacgccgtcgtcatgcagctgggcggcgccgagggcgaggagaccgtcgtcaccgtcaactgccccgaccagacaggcctgggctgcgacctctgccgcaccatcctcgagttcggcctccgcatcacccgcgccgacgtgtccacggacggccactggtgcttcgtggtgttctgggtcgtgccccgctcctcgtccatcaaggtccggtgggcgagcctcaagaaccggctcatgtccatgtgcccttcctcctactccatccccttcttctaccgggacgtgagccagccagagccaggccccttgcagttctacctcctcaagctcatgtcgccggaccgcaaaggattgctgcatgatgtgacgcacatactatcggatctggagctcataatccacagggtgaaggtgtcgaccacaccggacggaagagttgtggacctcttctttatcactgatggcatgtaagcgagcaaccatttggtatctgttctgttcttccccgaggcattagctatagcttcacaaatatgactgctctgtgaagggaactgctgcacagaaaggagaggcaagaggagacctgctcggcgctaactgcaaccctgggcccttccatcagctgcgaggtcgtaccagcagaagggttccagcaggggttctcttccctcccgccggagatcgccgaggaactgttcagggcggagctagctgacactgacagcgaggtgtgctcgagcccgctcagcgcggagctgaggaaggtccggacgacggccactgtcaacttcgacaactccctgagccccgcgcacacgctggttcagatcgtctgcgctgaccagaaggggctcatttacgatatcttgaggacgatgaaggactgcaacatccagatattttatggccggttcagatcagacaagaaagggtcagccagcaaaggttcatcaggttgccgtgaggtggatcttttcgtgaagcaagtagacgggaagaaggtgactgatcctgcgaaacaggacgcgctgcggtcacgcctgaggtccgagacgctccatccgctcagggtcatggtcgtcggccgtggacccgacacggagctcctcgtcgccaacccggtcgaggcctccgggaagggacggccgcgcgtgttctacgacgccactcttgctctgaaggcgcttgggatctgcatcttctctgtaagaactgcttcttttgtttgttccatttcaggcttagtatttcactccattgggtcttcttcttttgctccgtttcaggctgagatcgggaggcaagcggcgtccgagcgccactgggaggtgtacaggttcctcctggatgacagcaaggagttccccttggcaagcagcctcgctaacaggaactgtgtcgtcgatagggcgaggaagacgctgatgggatgctacaactgagacttgggtgggtgtcgatctgtatctgtctgcaagaatccaacgaagcagtgcaagtgcaatgcaaggcttcccccatccacagatgcatttgcatgctatgctgcttcctggagttgtgcacggggatggtttgaaaccagagttgtggacagcacagactggaatgaatgaacatcttgctgccatggatccattgtctacggaaaaaggagcatgcttggtgtggaggtgcgatgcaatggcgggagctttttttttttgataatggaagaaacatgttccagccttttgcatcatatcaaggatgcatatggcttcatagcatattcaacctgacaaaagcagcaacaagtagcaatgaagcacatggttctcatgaacaataataagaaactaagaggcctcaatcctagcattgcatcgccatccatgtattgtaaaaatgttcattgccaccacttccaatgcgtgacaaatatctttgata

SEQ ID NO: 150442 - DNA, 2231 bp, Zea Mays
ctgtttctgtttctattctcacgtcacgcgcaggctgcgggcaagcaatggcaggtgggccctgtcgcgctggccgatccagcgctgactcagcccccgcaccgcatacatgagagatgagaagccgccacccgccgctgcggctgcggcgcccgcgccaccacgagtgacccatcgtgctcggatcgtacggcctcaaccgcaaaatccagtatttaagcgctgcggaacactcgtcgagaggagaggacagagcagaggaccaccaccggaccgggctggagctggaggcgtggcggcgccggcgcgtccatcaggaggagaaggggcagggatggtgctgggcggcggcatggcggcagcggccgtaggcggggacgacgccgtcgtcatgcagctgggcggcgccgagggcgaggagaccgtcgtcaccgtcaactgccccgaccagacaggcctgggctgcgacctctgccgcaccatcctcgagttcggcctccgcatcacccgcgccgacgtgtccacggacggccactggtgcttcgtggtgttctgggtcgtgccccgctcctcgtccatcaaggtccggtgggcgagcctcaagaaccggctcatgtccatgtgcccttcctcctactccatccccttcttctaccgggacgtgagccagccagagccaggccccttgcagttctacctcctcaagctcatgtcgccggaccgcaaaggattgctgcatgatgtgacgcacatactatcggatctggagctcataatccacagggtgaaggtgtcgaccacaccggacggaagagttgtggacctcttctttatcactgatggcatggaactgctgcacagaaaggagaggcaagaggagacctgctcggcgctaactgcaaccctgggcccttccatcagctgcgaggtcgtaccagcagaagggttccagcaggggttctcttccctcccgccggagatcgccgaggaactgttcagggcggagctagctgacactgacagcgaggtgtgctcgagcccgctcagcgcggagctgaggaaggtccggacgacggccactgtcaacttcgacaactccctgagccccgcgcacacgctggttcagatcgtctgcgctgaccagaaggggctcatttacgatatcttgaggacgatgaaggactgcaacatccagatattttatggccggttcagatcagacaagaaagggtcagccagcaaaggttcatcaggttgccgtgaggtggatcttttcgtgaagcaagtagacgggaagaaggtgactgatcctgcgaaacaggacgcgctgcggtcacgcctgaggtccgagacgctccatccgctcagggtcatggtcgtcggccgtggacccgacacggagctcctcgtcgccaacccggtcgaggcctccgggaagggacggccgcgcgtgttctacgacgccactcttgctctgaaggcgcttgggatctgcatcttctctgtaagaactgcttcttttgtttgttccatttcaggcttagtatttcactccattgggtcttcttcttttgctccgtttcaggctgagatcgggaggcaagcggcgtccgagcgccactgggaggtgtacaggttcctcctggatgacagcaaggagttccccttggcaagcagcctcgctaacaggaactgtgtcgtcgatagggcgaggaagacgctgatgggatgctacaactgagacttgggtgggtgtcgatctgtatctgtctgcaagaatccaacgaagcagtgcaagtgcaatgcaaggcttcccccatccacagatgcatttgcatgctatgctgcttcctggagttgtgcacggggatggtttgaaaccagagttgtggacagcacagactggaatgaatgaacatcttgctgccatggatccattgtctacggaaaaaggagcatgcttggtgtggaggtgcgatgcaatggcgggagctttttttttttgataatggaagaaacatgttccagccttttgcatcatatcaaggatgcatatggcttcatagcatattcaacctgacaaaagcagcaacaagtagcaatgaagcacatggttctcatgaacaataataagaaactaagaggcctcaatcctagcattgcatcgccatccatgtattgtaaaaatgttcattgccaccacttccaatgcgtgacaaatatctttgata

SEQ ID NO: 150443 - DNA, 2234 bp, Zea Mays
ctgtttctgtttctattctcacgtcacgcgcaggctgcgggcaagcaatggcaggtgggccctgtcgcgctggccgatccagcgctgactcagcccccgcaccgcatacatgagagatgagaagccgccacccgccgctgcggctgcggcgcccgcgccaccacgagtgacccatcgtgctcggatcgtacggcctcaaccgcaaaatccagtatttaagcgctgcggaacactcgtcgagaggagaggacagagcagaggaccaccaccggaccgggctggagctggaggcgtggcggcgccggcgcgtccatcaggaggagaaggggcagggatggtgctgggcggcggcatggcggcagcggccgtaggcggggacgacgccgtcgtcatgcagctgggcggcgccgagggcgaggagaccgtcgtcaccgtcaactgccccgaccagacaggcctgggctgcgacctctgccgcaccatcctcgagttcggcctccgcatcacccgcgccgcagacgtgtccacggacggccactggtgcttcgtggtgttctgggtcgtgccccgctcctcgtccatcaaggtccggtgggcgagcctcaagaaccggctcatgtccatgtgcccttcctcctactccatccccttcttctaccgggacgtgagccagccagagccaggccccttgcagttctacctcctcaagctcatgtcgccggaccgcaaaggattgctgcatgatgtgacgcacatactatcggatctggagctcataatccacagggtgaaggtgtcgaccacaccggacggaagagttgtggacctcttctttatcactgatggcatggaactgctgcacagaaaggagaggcaagaggagacctgctcggcgctaactgcaaccctgggcccttccatcagctgcgaggtcgtaccagcagaagggttccagcaggggttctcttccctcccgccggagatcgccgaggaactgttcagggcggagctagctgacactgacagcgaggtgtgctcgagcccgctcagcgcggagctgaggaaggtccggacgacggccactgtcaacttcgacaactccctgagccccgcgcacacgctggttcagatcgtctgcgctgaccagaaggggctcatttacgatatcttgaggacgatgaaggactgcaacatccagatattttatggccggttcagatcagacaagaaagggtcagccagcaaaggttcatcaggttgccgtgaggtggatcttttcgtgaagcaagtagacgggaagaaggtgactgatcctgcgaaacaggacgcgctgcggtcacgcctgaggtccgagacgctccatccgctcagggtcatggtcgtcggccgtggacccgacacggagctcctcgtcgccaacccggtcgaggcctccgggaagggacggccgcgcgtgttctacgacgccactcttgctctgaaggcgcttgggatctgcatcttctctgtaagaactgcttcttttgtttgttccatttcaggcttagtatttcactccattgggtcttcttcttttgctccgtttcaggctgagatcgggaggcaagcggcgtccgagcgccactgggaggtgtacaggttcctcctggatgacagcaaggagttccccttggcaagcagcctcgctaacaggaactgtgtcgtcgatagggcgaggaagacgctgatgggatgctacaactgagacttgggtgggtgtcgatctgtatctgtctgcaagaatccaacgaagcagtgcaagtgcaatgcaaggcttcccccatccacagatgcatttgcatgctatgctgcttcctggagttgtgcacggggatggtttgaaaccagagttgtggacagcacagactggaatgaatgaacatcttgctgccatggatccattgtctacggaaaaaggagcatgcttggtgtggaggtgcgatgcaatggcgggagctttttttttttgataatggaagaaacatgttccagccttttgcatcatatcaaggatgcatatggcttcatagcatattcaacctgacaaaagcagcaacaagtagcaatgaagcacatggttctcatgaacaataataagaaactaagaggcctcaatcctagcattgcatcgccatccatgtattgtaaaaatgttcattgccaccacttccaatgcgtgacaaatatctttgata

SEQ ID NO: 150444 - DNA, 1924 bp, Zea Mays
ctgtttctgtttctattctcacgtcacgcgcaggctgcgggcaagcaatggcaggtgggccctgtcgcgctggccgatccagcgctgactcagcccccgcaccgcatacatgagagatgagaagccgccacccgccgctgcggctgcggcgcccgcgccaccacgagtgacccatcgtgctcggatcgtacggcctcaaccgcaaaatccagtatttaagcgctgcggaacactcgtcgagaggagaggacagagcagaggaccaccaccggaccgggctggagctggaggcgtggcggcgccggcgcgtccatcaggaggagaaggggcagggatggtgctgggcggcggcatggcggcagcggccgtaggcggggacgacgccgtcgtcatgcagctgggcggcgccgagggcgaggagaccgtcgtcaccgtcaactgccccgaccagacaggcctgggctgcgacctctgccgcaccatcctcgagttcggcctccgcatcacccgcgccgatgtgacgcacatactatcggatctggagctcataatccacagggtgaaggtgtcgaccacaccggacggaagagttgtggacctcttctttatcactgatggcatggaactgctgcacagaaaggagaggcaagaggagacctgctcggcgctaactgcaaccctgggcccttccatcagctgcgaggtcgtaccagcagaagggttccagcaggggttctcttccctcccgccggagatcgccgaggaactgttcagggcggagctagctgacactgacagcgaggtgtgctcgagcccgctcagcgcggagctgaggaaggtccggacgacggccactgtcaacttcgacaactccctgagccccgcgcacacgctggttcagatcgtctgcgctgaccagaaggggctcatttacgatatcttgaggacgatgaaggactgcaacatccagatattttatggccggttcagatcagacaagaaagggtcagccagcaaaggttcatcaggttgccgtgaggtggatcttttcgtgaagcaagtagacgggaagaaggtgactgatcctgcgaaacaggacgcgctgcggtcacgcctgaggtccgagacgctccatccgctcagggtcatggtcgtcggccgtggacccgacacggagctcctcgtcgccaacccggtcgaggcctccgggaagggacggccgcgcgtgttctacgacgccactcttgctctgaaggcgcttgggatctgcatcttctctgctgagatcgggaggcaagcggcgtccgagcgccactgggaggtgtacaggttcctcctggatgacagcaaggagttccccttggcaagcagcctcgctaacaggaactgtgtcgtcgatagggcgaggaagacgctgatgggatgctacaactgagacttgggtgggtgtcgatctgtatctgtctgcaagaatccaacgaagcagtgcaagtgcaatgcaaggcttcccccatccacagatgcatttgcatgctatgctgcttcctggagttgtgcacggggatggtttgaaaccagagttgtggacagcacagactggaatgaatgaacatcttgctgccatggatccattgtctacggaaaaaggagcatgcttggtgtggaggtgcgatgcaatggcgggagctttttttttttgataatggaagaaacatgttccagccttttgcatcatatcaaggatgcatatggcttcatagcatattcaacctgacaaaagcagcaacaagtagcaatgaagcacatggttctcatgaacaataataagaaactaagaggcctcaatcctagcattgcatcgccatccatgtattgtaaaaatgttcattgccaccacttccaatgcgtgacaaatatctttgat

SEQ ID NO: 150445 - DNA, 2149 bp, Zea Mays
ctgtttctgtttctattctcacgtcacgcgcaggctgcgggcaagcaatggcaggtgggccctgtcgcgctggccgatccagcgctgactcagcccccgcaccgcatacatgagagatgagaagccgccacccgccgctgcggctgcggcgcccgcgccaccacgagtgacccatcgtgctcggatcgtacggcctcaaccgcaaaatccagtatttaagcgctgcggaacactcgtcgagaggagaggacagagcagaggaccaccaccggaccgggctggagctggaggcgtggcggcgccggcgcgtccatcaggaggagaaggggcagggatggtgctgggcggcggcatggcggcagcggccgtaggcggggacgacgccgtcgtcatgcagctgggcggcgccgagggcgaggagaccgtcgtcaccgtcaactgccccgaccagacaggcctgggctgcgacctctgccgcaccatcctcgagttcggcctccgcatcacccgcgccgacgtgtccacggacggccactggtgcttcgtggtgttctgggtcgtgccccgctcctcgtccatcaaggtccggtgggcgagcctcaagaaccggctcatgtccatgtgcccttcctcctactccatccccttcttctaccgggacgtgagccagccagagccaggccccttgcagttctacctcctcaagctcatgtcgccggaccgcaaaggattgctgcatgatgtgacgcacatactatcggatctggagctcataatccacagggtgaaggtgtcgaccacaccggacggaagagttgtggacctcttctttatcactgatggcatggaactgctgcacagaaaggagaggcaagaggagacctgctcggcgctaactgcaaccctgggcccttccatcagctgcgaggtcgtaccagcagaagggttccagcaggggttctcttccctcccgccggagatcgccgaggaactgttcagggcggagctagctgacactgacagcgaggtgtgctcgagcccgctcagcgcggagctgaggaaggtccggacgacggccactgtcaacttcgacaactccctgagccccgcgcacacgctggttcagatcgtctgcgctgaccagaaggggctcatttacgatatcttgaggacgatgaaggactgcaacatccagatattttatggccggttcagatcagacaagaaagggtcagccagcaaaggttcatcaggttgccgtgaggtggatcttttcgtgaagcaagtagacgggaagaaggtgactgatcctgcgaaacaggacgcgctgcggtcacgcctgaggtccgagacgctccatccgctcagggtcatggtcgtcggccgtggacccgacacggagctcctcgtcgccaacccggtcgaggcctccgggaagggacggccgcgcgtgttctacgacgccactcttgctctgaaggcgcttgggatctgcatcttctctgctgagatcgggaggcaagcggcgtccgagcgccactgggaggtgtacaggttcctcctggatgacagcaaggagttccccttggcaagcagcctcgctaacaggaactgtgtcgtcgatagggcgaggaagacgctgatgggatgctacaactgagacttgggtgggtgtcgatctgtatctgtctgcaagaatccaacgaagcagtgcaagtgcaatgcaaggcttcccccatccacagatgcatttgcatgctatgctgcttcctggagttgtgcacggggatggtttgaaaccagagttgtggacagcacagactggaatgaatgaacatcttgctgccatggatccattgtctacggaaaaaggagcatgcttggtgtggaggtgcgatgcaatggcgggagctttttttttttgataatggaagaaacatgttccagccttttgcatcatatcaaggatgcatatggcttcatagcatattcaacctgacaaaagcagcaacaagtagcaatgaagcacatggttctcatgaacaataataagaaactaagaggcctcaatcctagcattgcatcgccatccatgtattgtaaaaatgttcattgccaccacttccaatgcgtgacaaatatctttgat

SEQ ID NO: 150446 - DNA, 1137 bp, Zea Mays
ctgtttctgtttctattctcacgtcacgcgcaggctgcgggcaagcaatggcaggtgggccctgtcgcgctggccgatccagcgctgactcagcccccgcaccgcatacatgagagatgagaagccgccacccgccgctgcggctgcggcgcccgcgccaccacgagtgacccatcgtgctcggatcgtacggcctcaaccgcaaaatccagtatttaagcgctgcggaacactcgtcgagaggagaggacagagcagaggaccaccaccggaccgggctggagctggaggcgtggcggcgccggcgcgtccatcaggaggagaaggggcagggatggtgctgggcggcggcatggcggcagcggccgtaggcggggacgacgccgtcgtcatgcagctgggcggcgccgagggcgaggagaccgtcgtcaccgtcaactgccccgaccagacaggcctgggctgcgacctctgccgcaccatcctcgagttcggcctccgcatcacccgcgccggtacgtctccgctccccatcggccaaatccatcgcttcttctcctcctttccagatttattttttcatcgttatctgtctgcttcttctgctcttcctacaacggaaagcctttccccttttttctatactgccgaagttgccagccaccaccaatcttgctacagttcatgtcgtctccttaataaactcttttacgcatcattgcctgttcctaatcataaacaactgtggagtccagaattctgcgaacctggaaccatttgacccttcgttcgttcattcatcgttgtcgtcgcctaaaattcgattcggttcctttttcgtgtgtggttggttggttctagcagacgtgtccacggacggccactggtgcttcgtggtgttctgggtcgtgccccgctcctcgtccatcaaggtccggtgggcgagcctcaagaaccggctcatgtccatgtgcccttcctcctactccatccccttcttctaccgggacgtgagccagccagagccaggccccttgcagttctacctcctcaagctcatgtcgccggaccgcaaaggattgctgcatggtaactatctatgtcctcattcatccatgctgcatcaagtgtttaaaa

SEQ ID NO: 150447 - DNA, 340 bp, Zea Mays
gttcagaatggttagaggcagaacacaaaaaggatatatttccttatatatacatcaacacatgcaaacaacaccaagctcctaggaacgtgatataagagaaaaaaataaaaactctctagcggtgttgggagcaccctctcctccacttccttcccaatctccctcgccccggccaaacactgagtttcagatagctgcaaggggttactgtgatgctaattgttttattgtgatgctgcaatgcattacctatttgtcccctgcagattttcaatctcggctataaatcgagcgaagcaacagactccattaccacacatctgaaaaacaaaaaaaa

SEQ ID NO: 150448 - DNA, 116 bp, Zea Mays
ttttttttttgttccctttctaataaaatttttggcaaccctcttaccattagccctgctaatgagttgaaactcactctaaattagacctactctaacctatcgcaaataagttg

SEQ ID NO: 150449 - DNA, 684 bp, Zea Mays
atgtctctcatcttggaaagccagtggcaatgcctgcttcagcttttaaaatggtcgtgctctgctgtctgctcagccacgcacagcatcaaatgccgatcacaggtcgtgctcgggcttgtccacgccgtcgccgccgcccatctgaggttgtgcgaccgccgccggacgagctgcggggacgaggcggcggcggccttgtcgtcgtcatcggcgtcggggctcgcccgggccaccagcagcctcgagatgctgccgcggcagaacgggcaggccggcgacggcggcgtcagcgtcgccgggttcggcttgctgtggcagcacagcgccagtgtgcacgccgcgcacatctggtgcccgcagtcctgcacctcgatgctgcacgcctgctcgaagcagatgcagcacagctccccgtcgctggcctccaaggacgcttcgtcaatggcatcgtgctcgcaaggcgaagtaggcgatggctgcgaatacttggtgatgcccttgaggatcttctcctccctctccctattggcgtccatcagtgccgcttccaggagagccttcgcctccgggtccagctcgctgatgaacttgagcggggaaggccacaccatgggctccgccgccgacgggttcagcagcgccgcgcacgccgcgtggttgcgcttcagcgccacggcgtaa

SEQ ID NO: 150450 - DNA, 771 bp, Zea Mays
ggaattgtaccactatgctgtgtactatgttcctatctaattccttgctttgttcttcaataacagagaagacatttctgggaggaggacaatgcactctttctacagtgatattgtgcgccttcagggtctaagggaaaggttttcgcattgtaactcaaacatggacgcaggccagtgtttctttccacgtgaagttgtgaagcacattgtcaacccagttttcgttcttaatccagcatatgatgcctggcaggtacaacatgcgttggctccagaagcatctgaccctcaacattcatggctggactgcagattggatattagcaagtgcagccctaaacaacttggaattctccaaggtttcaggaaagaactgcatgacgctataagtgaagctaagcagaaaaggggctggggattttatatcaactcgtgctttgttcattgtcagtcgctgaactcgttgacttggcactctccaacttcccccagagtcaacaataagagcattgcagaagcagttggagactggttctttgacagaagagaggtgaaggagatagattgcgaatacccctgcaacccgacgtgccacaacttggtcttcgcaaggcctttcaagatatgaaattttatctctcttcttccgctatgattttgttgtaaaatcagaaaaaaaatataaacttgttattataaatcattttacccgattggtggagtcgacggagaagcttgagaagcagccttgagttcacagttgccaag

SEQ ID NO: 150451 - DNA, 1547 bp, Zea Mays
gcagtccgcatcagatcctgcgctgccctgccctgccctgccccgaccatgccgccgccgccaccgtcggccccggcctcgcaccacctgcgcctgtggtggaggcgccggggccgggccggcgcggtcggggccaccttcgccgtcgcgctgctcgcgaccgctttgctcctcgcgctctccagctacgcctccatagtattccctgcgtccagtggccgccgcggccccgccctcgtcggactcaccctcgtccgccgcgccagcgagaagggcgcgctgtgcttggatgggagcgcgcccgggtaccatctgcagggagggtctgggagtggatcgcggagctggctaatccacttggagggtggaggctggtgtcgtaatctcaaatcatgtgcctcacgtcagagatcaatgttgggatcatcccggtacatggaaggccaggttgagtttacagggatcttgagcgatgacaaatctcagaatcccgatttttacaattggaataaagtgaagataagatattgcgacggggcatcattctctggggatgtaaaagatgaattgcagaatggtacacgattcttcttcagaggccagcgtatctgggaagcagttatgaacgaacttgtagttaaggggctcaggaatgctaaacaggagcgggacgagagtacgggataggatgagacaatcctttagataagctttcaggctttcctaacaggatgctctgctggtggactagccacttacattcactgtgattcttttcgtgcgctactaccaaaggattctagggttaagtgtctcgcggatggtggttttttccttgatgtagaagacatttctgggaggaggacaatgcactctttctacagtgatattgtgcgccttcagggtctaagggaaaggttttcgcattgtaactcaaacatggacgcaggccagtgtttctttccacgtgaagttgtgaagcacattgtcaacccagttttcgttcttaatccagcatatgatgcctggcaggtacaacatgcgttggctccagaagcatctgaccctcaacattcatggctggactgcagattggatattagcaagtgcagccctaaacaacttggaattctccaaggtttcaggaaagaactgcatgacgctataagtgaagctaagcagaaaaggggctggggattttatatcaactcgtgctttgttcattgtcagtcgctgaactcgttgacttggcactctccaacttcccccagagtcaacaataagagcattgcagaagcagttggagactggttctttgacagaagagaggtgaaggagatagattgcgaatacccctgcaacccgacgtgccacaacttggtcttcgcaaggcctttcaagatatgaaattttatctctcttcttccgctatgattttgttgtaaaatcagaaaaaaaatataaacttgttattataaatcattttacccgattggtggagtcgacggagaagcttgagaagcagccttgagttcacagttgccaag

SEQ ID NO: 150452 - DNA, 1924 bp, Zea Mays
cgcagtccgcatcagatcctgcgctgccctgccctgccctgccccgaccatgccgccgccgccaccgtcggccccggcctcgcaccacctgcgcctgtggtggaggcgccggggccgggccggcgcggtcggggccaccttcgccgtcgcgctgctcgcgaccgctttgctcctcgcgctctccagctacgcctccatagtattccctgcgtccagtggccgccgcggccccgccctcgtcggactcaccctcgtccgccgcgccagcgagaagggcgcgctgtgcttggatgggagcgcgcccgggtaccatctgcagggagggtctgggagtggatcgcggagctggctaatccacttggagggtggaggctggtgtcgtaatctcaaatcatgtgcctcacgtcagagatcaatgttgggatcatcccggtacatggaaggccaggttgagtttacagggatcttgagcgatgacaaatctcagaatcccgatttttacaattggaataaagtgaagataagatattgcgacggggcatcattctctggggatgtaaaagatgaattgcagaatggtacacgattcttcttcagaggccagcgtatctgggaagcagttatgaacgaacttgtagttaaggggctcaggaatgctaaacaggagcgggacgagagtacgggataggatgagacaatcctttagataaggttgtttggttcagggtcaggggttggaacatgatcatcctaattttatcccagttgtccgtcaaaattggacgaatgagaggggacaccgaaggacatgtctgtctctggctgtctcgcaaccaaacacaccctaagtttctctctatcattaactaatagtatatgaattagtgaaggacgaatattttggatgctttacattgatgattttattgccaatagtagtatgttgtataattgtatccgcttgcaattttagttctaggtgtgatcaggaatgtataatcttgattgcatactaatttcatctttgcccatataaagtaattataaaccactgtactgatagtgtgatgctgatattctatttcagctttcaggctttcctaacaggatgctctgctggtggactagccacttacattcactgtgattcttttcgtgcgctactaccaaaggattctagggttaagtgtctcgcggatggtggttttttccttgatgtagaagacatttctgggaggaggacaatgcactctttctacagtgatattgtgcgccttcagggtctaagggaaaggttttcgcattgtaactcaaacatggacgcaggccagtgtttctttccacgtgaagttgtgaagcacattgtcaacccagttttcgttcttaatccagcatatgatgcctggcaggtacaacatgcgttggctccagaagcatctgaccctcaacattcatggctggactgcagattggatattagcaagtgcagccctaaacaacttggaattctccaaggtttcaggaaagaactgcatgacgctataagtgaagctaagcagaaaaggggctggggattttatatcaactcgtgctttgttcattgtcagtcgctgaactcgttgacttggcactctccaacttcccccagagtcaacaataagagcattgcagaagcagttggagactggttctttgacagaagagaggtgaaggagatagattgcgaatacccctgcaacccgacgtgccacaacttggtcttcgcaaggcctttcaagatatgaaattttatctctcttcttccgctatgattttgttgtaaaatcagaaaaaaaatataaacttgttattataaatcattttacccgattggtggagtcgacggagaagcttgagaagcagccttgagttcacagttgccaag

SEQ ID NO: 150453 - DNA, 1679 bp, Zea Mays
cggtaccgcctgcctgcaggctgcagcccagccgtccgcagtccgcatcagatcctgcgctgccctgccctgccctgccccgaccatgccgccgccgccaccgtcggccccggcctcgcaccacctgcgcctgtggtggaggcgccggggccgggccggcgcggtcggggccaccttcgccgtcgcgctgctcgcgaccgctttgctcctcgcgctctccagctacgcctccatagtattccctgcgtccagtggccgccgcggccccgccctcgtcggactcaccctcgtccgccgcgccagcgagaagggcgcgctgtgcttggatgggagcgcgcccgggtaccatctgcagggagggtctgggagtggatcgcggagctggctaatccacttggagggtggaggctggtgtcgtaatctcaaatcatgtgcctcacgtcagagatcaatgttgggatcatcccggtacatggaaggccaggttgagtttacagggatcttgagcgatgacaaatctcagaatcccgatttttacaattggaataaagtgaagataagatattgcgacggggcatcattctctggggatgtaaaagatgaattgcagaatggtacacgattcttcttcagaggccagcgtatctgggaagcagttatgaacgaacttgtagttaaggggctcaggaatgctaaacaggagcgggacgagagtacgggataggatgagacaatcctttagataaggttgtttggttcagggtcaggggttggaacatgatcatcctaattttatcccagttgtccgtcaaaattggacgaatgagaggggacaccgaaggacatctttcaggctttcctaacaggatgctctgctggtggactagccacttacattcactgtgattcttttcgtgcgctactaccaaaggattctagggttaagtgtctcgcggatggtggttttttccttgatgtagaagacatttctgggaggaggacaatgcactctttctacagtgatattgtgcgccttcagggtctaagggaaaggttttcgcattgtaactcaaacatggacgcaggccagtgtttctttccacgtgaagttgtgaagcacattgtcaacccagttttcgttcttaatccagcatatgatgcctggtacaacatgcgttggctccagaagcatctgaccctcaacattcatggctggactgcagattggatattagcaagtgcagccctaaacaacttggaattctccaaggtttcaggaaagaactgcatgacgctataagtgaagctaagcagaaaaggggctggggattttatatcaactcgtgctttgttcattgtcagtcgctgaactcgttgacttggcactctccaacttcccccagagtcaacaataagagcattgcagaagcagttggagactggttctttgacagaagagaggtgaaggagatagattgcgaatacccctgcaacccgacgtgccacaacttggtcttcgcaaggcctttcaagatatgaaattttatctctcttcttccgctatgattttgttgtaaaatcagaaaaaaaatataaacttgttattataaatcattttacccgattggtggagtcgacggagaagcttgagaagcagccttgagttcacagttgccaag

SEQ ID NO: 150454 - DNA, 1826 bp, Zea Mays
cacgagcactctgcactccactaccgcggtaccgcctgcctgcaggctgcagcccagccgtccgcagtccgcatcagatcctgcgctgccctgccctgccctgccccgaccatgccgccgccgccaccgtcggccccggcctcgcaccacctgcgcctgtggtggaggcgccggggccgggccggcgcggtcggggccaccttcgccgtcgcgctgctcgcgaccgctttgctcctcgcgctctccagctacgcctccatagtattccctgcgtccagtggccgccgcggccccgccctcgtcggactcaccctcgtccgccgcgccagcgagaagggcgcgctgtgcttggatgggagcgcgcccgggtaccatctgcagggagggtctgggagtggatcgcggagctggctaatccacttggagggtggaggctggtgtcgtaatctcaaatcatgtgcctcacgtcagagatcaatgttgggatcatcccggtacatggaaggccaggttgagtttacagggatcttgagcgatgacaaatctcagaatcccgatttttacaattggaataaagtgaagataagatattgcgacggggcatcattctctggggatgtaaaagatgaattgcagaatggtacacgattcttcttcagaggccagcgtatctgggaagcagttatgaacgaacttgtagttaaggggctcaggaatgctaaacaggtcattccttgcaagtagaatcaattgccttttcttaagggaaaaattgtatgtattacaatagtactagtctcatttactttggcattcactctaagggtatgtttggttgcaatggcaggagcgggacgagagtacgggataggatgagacaatcctttagataaggttgtttggttcagggtcaggggttggaacatgatcatcctaattttatcccagttgtccgtcaaaattggacgaatgagaggggacaccgaaggacatctttcaggctttcctaacaggatgctctgctggtggactagccacttacattcactgtgattcttttcgtgcgctactaccaaaggattctagggttaagtgtctcgcggatggtggttttttccttgatgtagaagacatttctgggaggaggacaatgcactctttctacagtgatattgtgcgccttcagggtctaagggaaaggttttcgcattgtaactcaaacatggacgcaggccagtgtttctttccacgtgaagttgtgaagcacattgtcaacccagttttcgttcttaatccagcatatgatgcctggtacaacatgcgttggctccagaagcatctgaccctcaacattcatggctggactgcagattggatattagcaagtgcagccctaaacaacttggaattctccaaggtttcaggaaagaactgcatgacgctataagtgaagctaagcagaaaaggggctggggattttatatcaactcgtgctttgttcattgtcagtcgctgaactcgttgacttggcactctccaacttcccccagagtcaacaataagagcattgcagaagcagttggagactggttctttgacagaagagaggtgaaggagatagattgcgaatacccctgcaacccgacgtgccacaacttggtcttcgcaaggcctttcaagatatgaaattttatctctcttcttccgctatgattttgttgtaaaatcagaaaaaaaatataaacttgttattataaatcattttacccgattggtggagtcgacggagaagcttgagaagcagccttgagttcacagttgccaag

SEQ ID NO: 150455 - DNA, 1561 bp, Zea Mays
cacgacacgagcactctgcactccactaccgcggtaccgcctgcctgcaggctgcagcccagccgtccgcagtccgcatcagatcctgcgctgccctgccctgccctgccccgaccatgccgccgccgccaccgtcggccccggcctcgcaccacctgcgcctgtggtggaggcgccggggccgggccggcgcggtcggggccaccttcgccgtcgcgctgctcgcgaccgctttgctcctcgcgctctccagctacgcctccatagtattccctgcgtccagtggccgccgcggccccgccctcgtcggactcaccctcgtccgccgcgccagcgagaagggcgcgctgtgcttggatgggagcgcgcccgggtaccatctgcagggagggtctgggagtggatcgcggagctggctaatccacttggagggtggaggctggtgtcgtaatctcaaatcatgtgcctcacgtcagagatcaatgttgggatcatcccggtacatggaaggccaggttgagtttacagggatcttgagcgatgacaaatctcagaatcccgatttttacaattggaataaagtgaagataagatattgcgacggggcatcattctctggggatgtaaaagatgaattgcagaatggtacacgattcttcttcagaggccagcgtatctgggaagcagttatgaacgaacttgtagttaaggggctcaggaatgctaaacaggctttcctaacaggatgctctgctggtggactagccacttacattcactgtgattcttttcgtgcgctactaccaaaggattctagggttaagtgtctcgcggatggtggttttttccttgatgtagaagacatttctgggaggaggacaatgcactctttctacagtgatattgtgcgccttcagggtctaagggaaaggttttcgcattgtaactcaaacatggacgcaggccagtgtttctttccacgtgaagttgtgaagcacattgtcaacccagttttcgttcttaatccagcatatgatgcctggcaggtacaacatgcgttggctccagaagcatctgaccctcaacattcatggctggactgcagattggatattagcaagtgcagccctaaacaacttggaattctccaaggtttcaggaaagaactgcatgacgctataagtgaagctaagcagaaaaggggctggggattttatatcaactcgtgctttgttcattgtcagtcgctgaactcgttgacttggcactctccaacttcccccagagtcaacaataagagcattgcagaagcagttggagactggttctttgacagaagagaggtgaaggagatagattgcgaatacccctgcaacccgacgtgccacaacttggtcttcgcaaggcctttcaagatatgaaattttatctctcttcttccgctatgattttgttgtaaaatcagaaaaaaaatataaacttgttattataaatcattttacccgattggtggagtcgacggagaagcttgagaagcagccttgagttcacagttgccaag

SEQ ID NO: 150456 - DNA, 1571 bp, Zea Mays
cagcacgacacgagcactctgcactccactaccgcggtaccgcctgcctgcaggctgcagcccagccgtccgcagtccgcatcagatcctgcgctgccctgccctgccctgccccgaccatgccgccgccgccaccgtcggccccggcctcgcaccacctgcgcctgtggtggaggcgccggggccgggccggcgcggtcggggccaccttcgccgtcgcgctgctcgcgaccgctttgctcctcgcgctctccagctacgcctccatagtattccctgcgtccagtggccgccgcggccccgccctcgtcggactcaccctcgtccgccgcgccagcgagaagggcgcgctgtgcttggatgggagcgcgcccgggtaccatctgcagggagggtctgggagtggatcgcggagctggctaatccacttggagggtggaggctggtgtcgtaatctcaaatcatgtgcctcacgtcagagatcaatgttgggatcatcccggtacatggaaggccaggttgagtttacagggatcttgagcgatgacaaatctcagaatcccgatttttacaattggaataaagtgaagataagatattgcgacggggcatcattctctggggatgtaaaagatgaattgcagaatggtacacgattcttcttcagaggccagcgtatctgggaagcagttatgaacgaacttgtagttaaggggctcaggaatgctaaacagctttcaggctttcctaacaggatgctctgctggtggactagccacttacattcactgtgattcttttcgtgcgctactaccaaaggattctagggttaagtgtctcgcggatggtggttttttccttgatgtagaagacatttctgggaggaggacaatgcactctttctacagtgatattgtgcgccttcagggtctaagggaaaggttttcgcattgtaactcaaacatggacgcaggccagtgtttctttccacgtgaagttgtgaagcacattgtcaacccagttttcgttcttaatccagcatatgatgcctggcaggtacaacatgcgttggctccagaagcatctgaccctcaacattcatggctggactgcagattggatattagcaagtgcagccctaaacaacttggaattctccaaggtttcaggaaagaactgcatgacgctataagtgaagctaagcagaaaaggggctggggattttatatcaactcgtgctttgttcattgtcagtcgctgaactcgttgacttggcactctccaacttcccccagagtcaacaataagagcattgcagaagcagttggagactggttctttgacagaagagaggtgaaggagatagattgcgaatacccctgcaacccgacgtgccacaacttggtcttcgcaaggcctttcaagatatgaaattttatctctcttcttccgctatgattttgttgtaaaatcagaaaaaaaatataaacttgttattataaatcattttacccgattggtggagtcgacggagaagcttgagaagcagccttgagttcacagttgccaag

SEQ ID NO: 150457 - DNA, 444 bp, Zea Mays
gcccgtcctgccgtccactccgccgcctatttatacccctcctcgcccaccctgccatcctcaccatcgcaattcacaagcaaagcaatcagagccaagcacccaccgtcctcctttctttccttcgactcatcaaagcatgtcttgctgcggcggcaactgcgcgtgcacctccggctgcaactgcggcagcggatgcggcggctgcaagatgttccctgacgtggagaccgccggcgtcgccagcgtgaagcccacggtcctcgccgcccccgccaccaaggcgagcgccggcgggttcgaggcggccgccgagggcggcggctgcgactgcaacacctgcaactgcggcaccagctgcggctgctcctgctgcagctgcaactgagccacccgcgatgacgagacaaccacccggcctcccccccacccatcgtactacaa

SEQ ID NO: 150458 - DNA, 867 bp, Zea Mays
ggtgacccgtggggattgccgtcgatttcgtgccttcccagacacggccactgcatggcctccactctccctcccgtaaatcttctccgaggcgagggcccagcaggatgccccgcagcggcatttcggggaccctcaggtcgccccagatcgacgtggtcatcgacacggggaaccccttcctgaaccgcaccgtcgacggcttcctcaagatcggcgccgtcggcgcctgcaaggtggcggccgaggagaccttcgactgcctccacaggggggatgtttcaaagcgcaaggttgagcatgccctgaagaagatgtgcaaggagggcgcatattgggggactgttgctggcgtctacgtgggcgtggtgtatggcgtggagagggtccgtgggcgcagtgactggaacgcgatggtcggaggcgccttgtccggcgcgctggtctccgccgccagcagcaaccacggagacaagatcgtcaaggacgccatcaccgccggcgccgtcgcaacggccgtcgagttcgccaactacctcacctagctgagcaaactgcatctgcagcgccgctgttcataagccagcgtcttcaggcttcgtttcttctgacaggcaggcagcagttttgctttgcgtgagtgtctcctgaatccgttgcctctgcggttcgcaaatgcagccggggggttggagctggagccgtagctacggacaaacaaaaatcacattacgcaattgtttcagacctaataagacactgcctgcaatttgccaaaacttggtttcggagttccaaaataaacttgtaatgttagccacggtgtacgtataaggccttttgtattgccatttttgttattatgtt

SEQ ID NO: 150459 - DNA, 782 bp, Zea Mays
ggtgacccgtggggattgccgtcgatttcgtgccttcccagacacggccactgcatggcctccactctccctcccgtaaatcttctccgaggcgagggcccagcaggatgccccgcagcggcatttcggggaccctcaggtcgccccagatcgacgtggtcatcgacacggggaaccccttcctgaaccgcaccgtcgacggcttcctcaagatcggcgccgtcggcgcctgcaaggtggcggccgaggagaccttcgactgcctccacaggggggatgtttcaaagcgcaaggttgagcatgccctgaagaagatgtgcaaggagggcgcatattgggggactgttgctggcgtctacgtgggcgtggtgtatggcgtggagagggtccgtgggcgcagtgactggaagaacgcgatggtcggaggcgccttgtccggcgcgctggtctccgccgccagcagcaaccacggagacaagatcgtcaaggacgccatcaccgccggcgccgtcgcaacggccgtcgagttcgccaactacctcacctagctgagcaaactgcatctgcagcgccgctgttcataagccagcgtcttcaggcttcgtttcttctgacaggcaggcagcagttttgctttgcgtgagtgtctcctgaatccgttgcctctgcggttcgcaaatgcagccggggggttggagctggagccgtagctacggacaaacaaaaatcacattacgcaattgtttcagacctaataagacactgcctgcaatttgccaaaa

SEQ ID NO: 150460 - DNA, 1590 bp, Zea Mays
atgtccatccgtctcctctccctgccgctgcgcaaaaaagatctgtccggaccctgagacgccgccgtcgtcccgtggagcggagccacacgttgtccttccttcgccccgcccttctcggtcgcggctggttgcctgttccctctccgcgccatacggccatacccagagcaagtaggtcgtcaagtaagtccgacgacgagagaaacagccgccgctcggcctcatcatatggcggccgccgccccggttgcgtccgggagcggccgcctcagccgcccgcgcccgccccgtgtggggctgcgcggcgcgcgggtcgccgccgcggcgcaggggccgtcctgcctctacgtggggccaatcgagaccgccagccaggagaagctcgaggcgctctaccaccaggccagggattcttactacagtggtcagccattgatcatcgatgacatgttcgacaaagtcgagcttaagctccggctttatggctccaaatccgtcgtcaaatacccccgttgtagcctcataaggcattcaacctacgccgacgccgagggcaggaggaccaatcgatgttcatggcgttatcaagcatctggatgctgctcctcctgtttggtacctctgcagttcttgttcctactctgtacactctgagcatcgcgttcggggatgtgtttggggcaaggcaccttctgtacggtgaaaagtccctcgatgcggtaacaagagttaacgacttggctttggttggattggggtatctggttggttatcccatcgcatctgcgtccgttggcgcgctgcaaggcttattgtcaaacaatttggttgccctaaaagggtcctgcccaaattgtggcgagcaggtatttgcatttgtcaagattgaaaaaaccgtgagagcacctcatcgagcagaatgccatgtctgtcagtgccctttggagtaccgcacgaaaattgagaaatcttcgtcagggcctagaagaagttgggtctacggccgggtttatctagtgaagcaagggcatcctgaaacggaaatggataaatgaaaaattctaattgattgagactgctgagggaagtttagataatcccatgagatggcactcttctggtcgactgaaacatttttcagatgccacttattttgatcagaagggcttactgtgtacgaatcatttgaaagatttgatccagccaagtgctttgtaatacagatacatttctgagatgtccagacgctgcagatgaaccccatgctgcattgtattcttttctgttttctctttagatgaatccatgatacagtttggatgaagaactactgaagaggctacgaaggtgccattgctatcaggagggagggtcactgaaaggctcacaggagggagggtcactgaaaggctcacactctgcaccaaacatgtttaatcatttgatcaaagatgcccacactcagcatgtatacagacttgctcaaatgtgatgtgttatacaagtgtgtgtgtgtgtatatatgaagttttcagctttattgtatgtatgttttcagattaatttgcctgaatctggaacccgtct

SEQ ID NO: 150461 - DNA, 1343 bp, Zea Mays
gataaggagacggtactagtaaactgactaactgctgcccactcgccggagaaccatggccacggcggcggcgtgtgtgcgggtggcgtctccgttcacgggcccacctatctggcatcccagacacgtcatctcaacgaggcggggacccaggagggccgggctggccgtcacggcggcggctgccgccggtggatcgccgcgcactgtgctcgtcaccggcgcgggcggccgaacaggccaaattgtgtacaagaagttgaaggagagggaaggacagtttgtgggacgtggcctagtcaggacgggagagagcaaaggcaaaattggaggcggtgacgacgtgtttgtcggcgacatcagagaccccgagagcattgctcctgcgatcgagggcattgacgcgctcatcatcctcaccagcgcggtcccaaagatgaaaccggggtttgatcctagcaaaggggggcgccctgagttttactttgaagaagggagttatcctgagcaggtggattggattggccaaaagaatcaaattgatgctgctaagagcatcggtgcaaagcacatagttttggtgggatccatgggaggaacagacatcaatcacccgctaaacaagttaggaaatgcaaatatactggtgtggaagcgcaaggcagaacagtacctagcagactccggtcttccatatacaattataagagctggcggtttacaagataaagatggtggcttgcgagagttgattgttgggaaggatgatgagatcctgaaaacagaaacaagaactatagccagggccgatgttgcagaagtttgcatacaggcattgctattcgaagagtcaaagtttaaggcatttgatctggcatcaaaaccagaaggtgaagggacgccaactacagactttagggcactttttgcacaagttaatagtcgcttctaaagacataagattgttcttgccaagaagttgagggcattctttcgtaaagcgatatgaaatgtgtgtttagtaagaacatcggcgctgcatcgactcggtacatttggaaggagatgaacgctctccgttttcaaccatgaagaagcttcagcagcaacacaggttgttcgtccatctgactgctcttggctgcagcagcacttagggcctatttggaaggaaagtgtttttttatatttttccagttaataccatggaatactagaatattttatgttacgaagtgtttggttgcaatcctaaaaactatgttttcaaaagcatggtattttagataacatggtatgtttggaatatttaaaactccgtttcaatccaaagtttttatgac

SEQ ID NO: 150462 - DNA, 1054 bp, Zea Mays
actgactaactgctgcccactcgccggagaaccatggccacggcggcggcgtgtgtgcgggtggcgtctccgttcacgggcccacctatctggcatcccagacacgtcatctcaacgaggcggggacccaggagggccgggctggccgtcacggcggcggctgccgccggtggatcgccgcgcactgtgctcgtcaccggcgcgggcggccgaacaggccaaattgtgtacaagaagttgaaggagagggaaggacagtttgtgggacgtggcctagtcaggacgggagagagcaaaggcaaaattggaggcggtgacgacgtgtttgtcggcgacatcagagaccccgagagcattgctcctgcgatcgagggcattgacgcgctcatcatcctcaccagcgcggtcccaaagatgaaaccggggtttgatcctagcaaaggggggcgccctgagttttactttgaagaagggagttatcctgagcaggtggattggattggccaaaagaatcaaattgatgctgctaagagcatcggtgcaaagcacatagttttggtgggatccatgggaggaacagacatcaatcacccgctaaacaagttaggaaatgcaaatatactggtgtggaagcgcaaggcagaacagtacctagcagactccggtcttccatatacaattataagagctggcggtttacaagataaagatggtggcttgcgagagttgattgttgggaaggatgatgagatcctgaaaacagaaacaagaactatagccagggccgatgttgcagaagtttgcatacaggcattgctattcgaagagtcaaagtttaaggcatttgatctggcatcaaaaccagaaggtgaagggacgccaactacagactttagggcactttttgcacaagttaatagtcgcttctaaagacataagattgttcttgccaagaagttgagggcattctttcgtaaagcgatatgaaatgtgtgtttagtaaggacactgatggttctttgctagaacatcggcgctgcatcgactcggtaca

SEQ ID NO: 150463 - DNA, 1623 bp, Zea Mays
agttgatttggaagaaatgtagggacttttttttaaaaaaaatgacgcgggacgaccgttgaaactggtgctttaagtatagtagagattttgattagacgttgtagttagttgtagaaaagtttattcatctcttctaatatgtcattttgacaccacaaatatccattcatactactctctccttcataaggactgttctagtcttcgatccctactactttaaaaccttattttttttcaaccaccatttttcaaaatcttcctagcaacaaacacaatcacaaccaaattttgggccatttccagcaacggaacacattcccgtctgatcctgacaaaacgagcacaactctaagtgggtatggcccatgacacatgcggctatccttcgcgaccagcgggcacgaaagtgataaggagacggtactagtaaactgactaactgctgcccactcgccggagaaccatggccacggcggcggcgtgtgtgcgggtggcgtctccgttcacgggcccacctatctggcatcccagacacgtcatctcaacgaggcggggacccaggagggccgggctggccgtcacggcggcggctgccgccggtggatcgccgcgcactgtgctcgtcaccggcgcgggcggccgaacaggccaaattgtgtacaagaagttgaaggagagggaaggacagtttgtgggacgtggcctagtcaggacgggagagagcaaaggcaaaattggaggcggtgacgacgtgtttgtcggcgacatcagagaccccgagagcattgctcctgcgatcgagggcattgacgcgctcatcatcctcaccagcgcggtcccaaagatgaaaccggggtttgatcctagcaaaggggggcgccctgagttttactttgaagaagggagttatcctgagcaggtggattggattggccaaaagaatcaaattgatgctgctaagagcatcggtgcaaagcacatagttttggtgggatccatgggaggaacagacatcaatcacccgctaaacaagttaggaaatgcaaatatactggtgtggaagcgcaaggcagaacagtacctagcagactccggtcttccatatacaattataagagctggcggtttacaagataaagatggtggcttgcgagagttgattgttgggaaggatgatgagatcctgaaaacagaaacaagaactatagccagggccgatgttgcagaagtttgcatacaggcattgctattcgaagagtcaaagtttaaggcatttgatctggcatcaaaaccagaaggtgaagggacgccaactacagactttagggcactttttgcacaagttaatagtcgcttctaaagacataagattgttcttgccaagaagttgagggcattctttcgtaaagcgatatgaaatgtgtgtttagtaaggttagtttcctgtttactaagttcctaatatattacagttgttccatgtagcatccttttttatctcttgctctctagctacttttggctttatttcctgtctagacagcggattctgcataatgctaatgaactttcatatcaaataagattgctcagttatccataatgttcaaaagataa

SEQ ID NO: 150464 - DNA, 988 bp, Zea Mays
gcatgggtcgaccagtcaggcggcagcgacgtgcctccccactcccctccctcgcttatccgcgacccacttttgtgaggtcgcaattcatcctggtcgccaccagtaccacctctccatccttaatccttcactagcttagctagccagccacctccgttcactccatctcttgccggccagtgctccgtcgatcgacccgtagccaaccaccgacaactagctagcaacaatggctgccgtcgtcaacgcgcgagccgcaactgctcgttgctcggccgccggcgggccaccacgcggtgctgcgtcttcgtttccgccgtcgacgataaggacgaggaagaggacgacggcggcggcgggcggccgcggccggcttgtcgcggtctcggcggtgggcgacgtcgcggcggagggcaacacgtacctcatcgccggcgcggtggccgtcgccctcgtcggcacggccttccccatactcttctcgcgcaaggacacgtgcccggagtgcgacggcgccgggttcatccgaaaggcgggcgcgacgctgcgggcgaacgccgcgaggaaggacgaggcccagatcgtctgccccaactgcaacggcctcggcaagctcggacagatcgacaagtagctaaataatcccatccaccatgcatgctacgtactaagctcatatacatgtgctgatgtgcatgcatggaccaaccaaactgctcctttgtataagctcttaattaaatctcctctccgacaatgtctgaatgtatatgctgagtgagtgttaatttggtctgtaatataacctgttgctttgtcagaaacgatgttgtgcaataacattgttgtcggtggtgttgttgtatgtgctagtgatgtctctcaatatatgtatgtctatcagatcaaactgttgtgcaatcaagcttttcgtgcaaccgaactatctaaagttctgaaaaaatatccaaatattaatagaaat

SEQ ID NO: 150465 - DNA, 186 bp, Zea Mays
atgtcggttctcattccacactttttaactgtgaacattagttctttcttactactacaacgcacggacatatcatggtttgtaaagcttgtacaccacttcgtccacggccccactgtctgccttcttcaaagccccgatcgaaatcaacacggattggacgatcgtcaagcattgttccactaa

SEQ ID NO: 150466 - DNA, 461 bp, Zea Mays
aagctcaactgcgatgcttcgcaatatgcgttcattacaacataacactctgaacatatgcaaaccatcagttttcaccgtttcaccatcctaatgtggtcttttattgacccgagtgtactgtactaaggtgcatcaacgtgcgacaaaaccgcagaactacattcactgcctcaactgaagctagggcagataggtcccttggacaaaccaaggcgaacctccattccgtggtgcatgtcaggttgacggaaaccttcagaatcttgaggcactgcaagccgatagaaaaaaaagaaaatcagaacaagtcaaaaatgattgtgccaataaggaaaaaaagtccaatgctatcacaaagcatatacatatatatatatatatatatatatatatatatatatatatatataaaaaatgttaggcggtaactcagttaagcaccaatgaccactgacaac

SEQ ID NO: 150467 - DNA, 120 bp, Zea Mays
tattcctatggattttgtttgcatatttaaaaattcctatggattgctttcctcgtacaagttagagaaaaataacaaaaggattgtaattcacagctaactctaattcgagtacgaaag

SEQ ID NO: 150468 - DNA, 1650 bp, Zea Mays
atggttcctactcatcccgccggcccacaccggcagcagcttcgagctgtttttacgacgacgggggcgggggttggggcctcccgccccgcttcccggagagcaagtcggaagtgccttcattgggcccccgcttccgagcggctgctggagcagctgggaccagatggaggcccgcggcggttttggcggcgcgcgcccccggacgccccgccggcgtccaaggccgccgtggactccatgcccgcgcttcgcgtcggcgccgcccacgtcgcgggcagacgcgcattgcgcccgtctgcaaggaggccttcgagctggggcgccgaggccagggagatgccctgcgcccacatctaccatgccgactgcatcctgccctggctcgcgctccgcaactcctgccccgtctgccgccacgagatgcccgccgacaacgccgccccgcgcgctgccgccgccgccgccgcggacgaggacgccagggtcggcctcaccatctggaggctccccggcggcgggttcgcggtcgggaggttcgccggcgggccgaggcccgacgagagggagctccccgtggtgtacacggagatggaaagcgggttcaacttcaacagcggccacgcgcccaggcggatctcgtggggcgccaggcaggccgcggccacggacaggggcaccgtccgccgcttcctccgcagcgtcttcgcctgctttggacgcggccacgccccgtcggcggcggccgcgcgcgccatgcctgagctcaacgacgacgacgtggcgtctgaccacagcgccgccttcagccgtgggtccaggagccggagcaccagctggaggctcgaggacgggcgtgccgacgccatggtgcagagatgaccgccgtatactgtgtggaactgcttgtagtacagttacagtaacgctgccgaaaaagattgctgctttgtttcattcatgttgtatttaccgtactactgctagcctcctgcctactacttaggaagatttgaggttgtagaacagggcaaattggtgttagtacatattgtagtagtgaggaagggaaagagagcagcatctcgacctctctttgttagagagtttgcattgcagctgcaggtggggggtcaactgcgaactcaaacacttgttcttggcttggttggtggtaatattaggagcgaggtgatggatcaactgttcttttattatctttctttctgttcagttcattgtggcaggaaccatcctttgcatttgtttctaaacaactcaatggttggagaccacatcagcatcgctggctatttttgctggatccaacacaactctttcttctgcctgttattatctgatctgctctgctgcattcgtttgtgcacctaccactaccagatggatacctcatagtttgaccagctcgctccttcctgactaccttgggtgttgtttatcactatgaccagcagctatttttctttgggccacaagtcaacgcctctacattcattcatggagtccagcccatcgctactggcttctacaatgtttctgtatctacatattacagctgcagcagtccaaggacttgcttgcttgtttttttgatcctacatatacataccagtacataaccgtgaagcc

SEQ ID NO: 150469 - DNA, 497 bp, Zea Mays
cagcaccaccaccaccaccggggcaatcaatcatccatccccgcatttctccactcaacccacaccccaaagagaggggaatcagtctctcccatcccatcaccaaccctcctcctccttgcctaggtactcgcagcagcgtcggcaagcaaggttctcttctcgcgccgcccagatctgagcgctcccatggccatgccgtcctcccgctccccggcgccgccgccaacggcctcctcctcctactggtgctacatgtgcgaccgcttcgttcgcgccgccgcttcctcctcctcctcacccacttcgccgtcctcctcctcccccgcctgcccgtcctgcggcggggggcttcctcgaggagatgggcgcgccgccgccccgcgcccgccggccccgccgcgccgcccgccgcggcgccgactcccgcgcctcgcccttcaccccgtcatcgttctccgccgctccccgcccgccgacgccgacgccgatggctc

SEQ ID NO: 150470 - DNA, 1642 bp, Zea Mays
atacgaatgtaatatccgtcagaatctaatattccaatgcagttcatgaagcacaacaacttgtagaattcaataacaccaataaatggaaatttgatatccagatcggcgatacacgcaaattgccaactttcagatgtttgtttgtgttttataagaaccaaagtaggagctatatatacaccatcaatcgatatatacagatttcttgtaaattatatgctgcaaggtttgaaataatggtttcttgacacaaggctctataataagcactaacacacgttgatttagtcgacacgatgactgctacaacgttggtatgatatatggtttgcgtgcgtatgtttatgcatgtgcgtctactgtgtaattagtaggggggaaatcatatagaactcctgcccttcgatttttaataaaatcttactgcaacctcctaatagtaaccccactttggtaacctcactttccggtggataaaaaaaaaacttgcagatgatctataccctaattcctctcccctgtgatatatttcattctagagattttaggacatattaagagaaaacacaaaggacgcatgttttctcactttattttctaatcagatcctatcttcagtacggggcatgtttggactaaactttactgcatacttcggttgccaactctaagatctaaacataaattaacaagaacaaatagaagctaattgatgagtagaactcattagaatttcttaattagtcaacgttaggctaaactttcgtccggtgacgatccaaataggcccataattaattgtaccgaatttaacctcatactttttttttgctgtcaacacaatatattcactgtgcaagaaggggcgacatttgaatacgtttatttatgcattacttaattagtgagaattcacacatccattattcggcatgcccgcgttatttcatcgtatatatatttatttcaagttctggggcaaggaaaggaaatagcggctagcttatatattatcagccgatgtggggcgtctgggcgacgatgtcgacgaagatgcggacacggttagggcgataatccgcggtcaccacggagccgacgggcagcaccacgatgtcggcgtccggcttgtccttgaggatcaccttcttggcgtcctccacgctcagcccgaccacctcaggccacgacgtcttggcgccgccgccgccgccgccgcactccgtggagctcatggtgtcgcgaactgccggaccagttgacgatatgatcgatctggcatgtgaattatatatattgaaaggagagatttattacagactactatcactgcaaaaacataataataaaataagacattatattattgaaaggcacactcacgggcaggtaaatcttgcttgttgcactgctggttgttggatatatattaagcgagtgcaccggtgatgaggtatttatagagctgcgttgcgtgcaggcaggacgtgtgtgtatatacgcacgcgaggcacacgaggataaacagccactacgaaacaaagaacagatagcaacactgcaggaaaaaaaatccatggttatcccatgcttgcagccaaaatagtcagcattttccagcgcgcgtagctggcgctga

SEQ ID NO: 150471 - DNA, 737 bp, Zea Mays
actttctctaataaccagtacttttaaccttttctccataataaggaacctgaccagctctatgttttgctgtggaataggtgtatgatgtgacgaagtttttggtagaccacccaggaggtgatgatgttctgttgtcctcaactggcaaggatgcgactgatgatttcgaggatgtcggtcacagcaacactgcccgcgcgatgatggatgagtacttggtgggtgaaatcgacgcgtcgacgatcccttccaggacgaagtatgtccccccgaaacaaccgcactacaaccaggacaagactcccgagtttgtcatcaagatcctccagtttttggttcccctggcaatcctgggcttggctgttgccgttaggatgtacaccaagtcggagtctgcttagctttgttgcccacttgcccttgcccccctcgcgattgtacgagtcgaacttgtcgaataagctagcaagagttttgtgaggttttattacatgtgtaacttgtcacgaaattcatcgaatgttctgagctgctgtgggttctgtggtttaaagtgtgatcggaatgcatcttactggactaattgtcatctcagttgagcaaggaagtctgattgtttgaaaccagcagctaacagcagttcctcctagttttgttacaagccaatattctaccgtcagttctgattgtctggcttcatttatctgacaataatatgactagcgtcagttacc

SEQ ID NO: 150472 - DNA, 914 bp, Zea Mays
cgacggagagggtttggtgtgttgtgggggtaggtggcaagagccggagcagacgaaatttggcagtcgatcggatttgtggctcgcggagctggaccagccgccgcggttttaaaaggagggaccgcaaccaaccacctcgccatcgacctcctcgatccagacagcaggcagcagccatgtccaaggtcttcaccctcgacgcggtcgccaagcacaactccaaggaggattgctggctcatcatcggcggcaaggtgtatgatgtgacgaagtttttggtagaccacccaggaggtgatgatgttctgttgtcctcaactggcaaggatgcgactgatgatttcgaggatgtcggtcacagcaacactgcccgcgcgatgatggatgagtacttggtgggtgaaatcgacgcgtcgacgatcccttccaggacgaagtatgtccccccgaaacaaccgcactacaaccaggacaagactcccgagtttgtcatcaagatcctccagtttttggttcccctggcaatcctgggcttggctgttgccgttaggatgtacaccaagtcggagtctgcttagctttgttgcccacttgcccttgcccccctcgcgattgtacgagtcgaacttgtcgaataagctagcaagagttttgtgaggttttattacatgtgtaacttgtcacgaaattcatcgaatgttctgagctgctgtgggttctgtggtttaaagtgtgatcggaatgcatcttactggactaattgtcatctcagttgagcaaggaagtctgattgtttgaaaccagcagctaacagcagttcctcctagttttgttacaagccaatattctaccgtcagttctgattgtctggcttcatttatctgacaataatatgactagcgtcagttacc

SEQ ID NO: 150473 - DNA, 669 bp, Zea Mays
aattctttcagtgctattgttactttctctaataaccagtacttttaaccttttctccataataaggaacctgaccagctctatgttttgctgtggaataggtgtatgatgtgacgaagtttttggtagaccacccaggaggtgatgatgttctgttgtcctcaactggtatgccttcttgtctttgcgtaccactaaaccagtgcctggctaaggttgcgaaaggtatgctgtaacatacaatccatttgaaccttatacaggcaaggatgcgactgatgatttcgaggatgtcggtcacagcaacactgcccgcgcgatgatggatgagtacttggtgggtgaaatcgacgcgtcgacgatcccttccaggacgaagtatgtccccccgaaacaaccgcactacaaccaggacaagactcccgagtttgtcatcaagatcctccagtttttggttcccctggcaatcctgggcttggctgttgccgttaggatgtacaccaagtcggagtctgcttagctttgttgcccacttgcccttgcccccctcgcgattgtacgagtcgaacttgtcgaataagctagcaagagttttgtgaggttttattacatgtgtaacttgtcacgaaattcatcgaatgttctgagctgctgtgggttctgtggttt

SEQ ID NO: 150474 - DNA, 968 bp, Zea Mays
cgacggagagggtttggtgtgttgtgggggtaggtggcaagagccggagcagacgaaatttggcagtcgatcggatttgtggctcgcggagctggaccagccgccgcggttttaaaaggagggaccgcaaccaaccacctcgccatcgacctcctcgatccagacagcaggcagcagccatgtccaaggtcttcaccctcgacgcggtcgccaagcacaactccaaggaggattgctggctcatcatcggcggcaaggtatacatctccgtctcctcttccacttcccctcccccattcccttacggtggatggatggtcgatgcctcctgttctcttcctccccagccagccatggctcccttgccaaagatcagattttgcgtctcctagccacgccgacgggccctgctcgattttggtgctaggtagccttgttctgtccaagatggattctccttgattctgcgtgtgctggcgacgagcccgcagatccggtggagaccatcgtgattgatctgtccggtgcttgtttcccgcgtagactcttgcactagcgactggtctctgttctcggggcggccgattcagagtcagatagcctctcgttgtttcagctgacgactcgcggctgctccggtggatgtttacagtccagtgcctgcgcacccacaaaccaaatcgaatctgcgtgtgtttcgttcgtatctgcaagcagaccccctacttcggcaattgcctgcacctttgtgcttgtgatgtcatcttttatcctgatgtctccttgtaatgactaatgaggaaattccctttctgcaaagtgccatagcgcggtcagatgtttggctatgtcctgtgtcacccatgcgacaagccatcaaaacatcagcaacaattccttgatagaaatgcatgttaaacctttcaacatgttctgcaccccaacaatgcagcagccagtaatgttgt

SEQ ID NO: 150475 - DNA, 97 bp, Zea Mays
cgcgatgagcagcggccgcgacagaaaagggagaccgaggagcagggcaggggtactcggctgagagcaggagatggacaccgcgatgggattttta

SEQ ID NO: 150476 - DNA, 507 bp, Zea Mays
atgaccaagcagaggaccgagcaggggatagcggctgtcggaccggcgtgtctagcccgaggaagacgacggaaccaccccgagcgagagactagagccgacggcgttgggcatatgagccagggagagcgcgcaccacgcgtggctagaggaggaccaactgacagtcggcgcgagctcaatggcgcggacagagaggaactcggcgtactggagctggaggccaagcccgacgagatggggcgcgcgtttcagggcgggacttcgggtggcggtgcgttgggagatggcctaagcgagcttgagcaggctgggagtttgaaggcgagctccaccaccaggggtaaagaaaggggcggccatcaggggcgcgagcacaggaagcaagagcgagctccatggctggaagctgagagcgagcccgagcagccagggaaggagctgcgcacgaccaacagtgaggaaggatgcccggccaccaggacgtggcggtggtcgaccggatga

SEQ ID NO: 150477 - DNA, 1323 bp, Zea Mays
catatagctaggttatttgcagctagctagctacgcacacgtacgtccgatcgatccgttgttcgttgggaatccaatcaaatcattaattgcagactaaactaaactaaactagaaccatggcggcgggcgcgttggaggcgaagaaaccctacctgatcgccctcgccgtgcagatcatcggcaccggcatgttcgtcatctccaaggcagccttcgacgacggcatgagcaccttcgtcttcatcttctacaggatggccctcgcctcgctcatcctcgtgcccacagccattgtgcagcagaggaagaatctgcggcccatcatgtctgatcccaggctgcttctcaagctcttcttccttgccttgatcgggaacactttcagcttgaacacgtacaacctgaccctgaagctgacgtctgcgacggtggggtccgcgctggccaactccgtgcccgtcttcaccttctgcctggtgctgctgctgcggatggaggcggcgaacctgaggacggtcgccggcgtggccaaggccgccggagtcgcgctctgcgtcgccggagtgctcgtcctcgccctgtacgccgggccggcgatgagccccgtcaaccaccaccgcgccttcgccgccgccgccccgccgcgtgcctccaccagcagcagcaggatgacgtggatcacagggacgctgctcatggtgctcgccaacgtcacgtgggcgctctggatcgtcctgcagtcggcattgctcaaggagtaccccaacaggatgcttgtgacggcgacccagtgcgtgttcagcatgctgcagtcgttcgtcgtggccgtggtggcagagaggggtgacttgtccaagtggaggctccgctgtgacattaccctcgtagccgtcctttacgtgggtttcgtggtgacgggactgtcccattatctccaagcgtggtgcatggagctgaaaggcccggtgttcctggcgatgacgaacccgctctgcttcgtcttcaccatattcagctcctccttctttctgggagagatcgtgcaccttggcagcgttctgggtggagctctgcttgttgccggcctttacagcgtgcactggggaaagctcaaggaagaagacatggcatctgatcaggaaaagaccaacaagcaggaagaagaagcagcagcagcaggggcatcctcagcgctccaacaaccgtgacaagctagggcattgcatcattcaactgatgcatgctcaactcacctcggcgatccaacactctactactctgttgtatccgaacgaataaatatatatgtcaacttatatt

SEQ ID NO: 150478 - DNA, 4718 bp, Zea Mays
ccattgcttcgcgttcgcggcatctactgctgctcctctgctcggccccgcgtcgccgtcgggagatctctccggccgccgagatcgattccacgcgccgctctcgcctgcctccgctcactgtccccgctgccgcaggattcgcccgccctgccggtgcgccggtggttctctacggcgtcttccggttcgggtgccgccatgctccgtggcgacgggggagggacgccgtgattccttgcctggccgccggtcgccgcacgtgaggctgagatctcggggagctcgccgtctcgcggcgccgccaccaccatgccgtctctgcagctgctgcagctgacggaccgcggccgggggcttctcgcttccaggaggaggacgctcgcctttgtctccggcgcggtgcttgccggtggagctctggcgtacgcccgctcgagccagagccgccggcggaggaggcgcccggaggcgagtcgcagcggcggagccggtgcattggccgccaatggggatggtttcagccagaacggtgccggcggtggattggctgcagcggaccagaggaggagtggcctcaaatctctgcatttcctcgcttctatcctactcaagaagatggggcccagtggcacgcgctaccttctatgcttggtattaacatcggtgctgcgtacagccgtagggcatagattagcaagagttcaagggtttttgtttaaagcagcatttcttcggcgcatcccaacatttacacgcttgatcatagaaaatcttacgctatgtttcctccaatcaacattatatcagacctcaaaatacttaacaggctctttaagtttgcgtttcaagaaaattctaacagatatcgcccatgctgattactttgagaatatggtttactacaagatctcacatgtggatcatcggatatcaaatccggagcaaaggattgctagtgatatcccaaagttctcttctgaactaggtgaacttgtacaagatgatctggctgcagttgcagaagggttaatatacacgtggcgtctctgttcttatgccagtccaaaatacgtgttctggattatggcatatgttctagttgctggtggggtaataaagaacttttctcctgcttttgggaagctgaaatctacagaacagcaactagaaggagactatcgtcaacttcactcgcggttaagaacacatgctgagagtgtggcattttatggcggtgagaacagagaagcatctcatattatgcagcggtttgaggctcttgttgagcacctgaatcttgtgcgtcatgaaaactggtggttcggcatgattcaagatttctttctgaagtattttggtgctactgtggcagttgtccttattatagaacctttcttctctggcaaccttagacctgattcatctacacttggaagggctgaaatgttgagcaatcttcgatatcacacaagcgtgatcatatcactgtttcagtctcttggaatcctttctatcagcacaagacgtttaaatattctaagtggctatgcagaccggattcgtgagttattggatgtttcacgtgagctgtctggggttcgtgatagatcactggatcacagttctcctggaaattatgtcagtgaagcaaaccatatagaattttcagatgttaaggtagtcacacctgcaggtaatgttttggttgacgatttgactcttcgggtagaaactggttctaatcttttgatcactggtcccaatggtagcggaaaaagctccctttttcgggtccttgggggtctatggccactggtatctggccacattgttaaacctggtgttggttcagatctaaataaggagatcttctatgtcccgcaaagaccatacacagctgttggaacactacgtgaacagctaatctatcctcttacggcagatcaggggattgaaccacttacatatgatggaatggtggaccttctaaagaatgttgacctggaatatttgcttgaacgctatcctcttgataaggaagttaactggggtgatgagctgtccctcggtgaacagcaaagattgggaatggccaggttattctaccataagccaaagtttgccatccttgatgagtgcactagtgctgtgacaaccgacatggaagaacgtttttgcaaaaaagttcgagctatgggtacatcctgcataacaatatctcatcgaccagctttagttgcatttcatgatattgttttatccttggacggtgaaggaggttggaatgttcagcatagaagggatgattcgtccttttccaccgaagaatctgatttttcatcatcagaaactgatcgtaaatctgacgcactgactgttcaaagggcttttatgagcagggcaaagagcaatgcttcattggggtccaaggatcatccatattgtacagaggttatagcaacttcccctgaggtggaaatagaacatccagcacggacacctcgaattccacatttacgatgtcacccaagacctttgcctctcagagtagctgcaatgctaaaaatactggttcctagactatttgataaacaaggcgggcagttgcttgctgtcgctgtacttgttttctctcggacatggatctctgatcgtattgcttcgttgaatgggacaactgtgaagtttgtcttggaacaggacaaagatgcctttattcgcttgattggtgtcagtattctacaaagtggtgcaaattcttttgtggcaccatctctcaggacccttactgcgaaacttgcccttggatggcgaattcgcatgaccaatcatatgcttcgatattatttgaaaaggaatgcattctacaaggtattcaacatgtcaggtaaaagcattgatgcagaccaaagattaacacttgatgtagacaagttgaccactgaccttgctggcctagttactggaatggtaaaaccgctagttgacattctttggtttacatggagaatgaagcttttatctggacgaagaggagttgctatactgtatgcttacatgctactgggtttgggctttcttagagctatatcccctgacttcggtcatctctcaggccaagaacaagaacttgaaggaacattcaggttcatgcactcgagactgcggacacatgctgaatcaattgctttctttggtggtggttcaagagaaaaagcgatggttgaggctaaattcgtcaagttaattaaccactcaaagattcttttgaggaaacagtggctttatggtattgttgatgattttgtaacaaagcaacttccacacaatgtaacgtggggtctgagtctgttgtatgctttggagcacaagggagatagagctttaacctcaactcaaggagagttggcacatgctctgcggttcttggcttcagtggtgtcacagagcttcatagccttcggcgacattcttgagttacataagaagttccttgaactttctggtggcattaaccggatctttgagcttgaggagtttacacgcttcgctcaaagaaatactgtggtgtctcccaatgccatcagtgcagcctcaaaagaaacgatttcgtttcatgaagtggacattgtaacaccatcacagaagctattggctagaaaactctcgtgcgatgtggtacaagggaaaagccttcttctgaccggtcccaatggtagtggaaagagttctatttttagagtgctcagggatctctggcccaccttctctgggagagttaccaagccctcagaagggatgtttcacgttcctcagcgcccatataccagcctaggtactctgcgggatcagatcatataccctctctcaagggaggaagcgaagataaaagttctttcgctacatagatctggtaacaattctagtgcctccatgctgctggatgatcacctgaagacaattctagagaatgttcggctggtgtatcttctagaaagggaagggtgggattctacaccaaactgggaagatgttctgtcgttaggggaacaacagaggcttggaatggctcgtttgtttttccatcatcctaagtttggtatcctggacgagtgcaccaatgctacgagtgttgatgtcgaagagcatctgtacagacttgcaactagcatgggcataactgtgatcacttcctctcaaaggcctgctttgatacccttccatgccttggagctgaagctcattgacggcgaagggaactgggagctatgtgcgatccagcagtgagtgatggtgcccattaggagttgatgccattaaatgcaccatcagctgcatgtacaaaagcaagcagctagcacattgccattgtttgtgtatggacaacgtagacagtggcagcgttgctatgttggaagatgctatattcttgtcatagtctgcctcaggttgagcagcaaagcattgtgatgatgtatgattgtgagccatgcatggtagctgaatcctgatattagcttttagatagtggacatgattgtgagccatgcatggtagctgaatagcagagcagaagggttgtgtgttagaagctgtacctattgattcattacattatattgattctgcgtagcagatgtatattacaggcaagcaaaatataaataaatacgatgtggaattgtggatgctgctgccatgcagacatcagaaaa

SEQ ID NO: 150479 - DNA, 1430 bp, Zea Mays
agaaaaccaatttgtttgtgtggctacaacgcaagcaaagcctccccagccgctttctttctttctttctcccttccttccttcgttgcactggtgcttcttctccatcatcatcatcagaggaggagctacctacctaccttttgatgcaggttgccatggccaccaccaccagcagcagcttggtcaccggcttgaggtgcaggacaggtgcagcagtggcattgatcagacccactagtgccgctggggatcgccggggctggaggacgacggcgtccggccgtggagcccgcaggggcaaggtcacggtcgctgcggcctgcaagacatgcaaaggaaagggggcagtagaatgcccagggtgcaagggcaccggcaagaacaagaagaacggcaacatcttcgagagatggaagtgctttgactgccaggggttcgggctcaagagctgccctacctgtggcaaaggaggtctcacacccgagcagcgaggggagagatgaatcaaccatatacaacgaaaactgcattcactgtataccaggcactgctgatatacctgcacctccagaaacaccaccactatattttttctttctcatgcatgtctgtgcattcgcgtggccttgcccagaaatcaaacactgagtaccatcagacaggcagattggactggtgaaatgctatagttggacatctactacactactcttcattttagtcatttcgtcaattacactgcggtattagcatcgacaacacaacaagcaagatcgatcgaaaactgttacacaggcgctacaccaagtaggtaaaaacaagtttgcggctgcctgccgccataccatgccatactcttggccggtatagctgcagcagattgtatacaaggggaaaaaagaagatacacatacagtacgaagaaggcaaatgaaatgccgttcgggcggtagcctaggcgtgtacagctgacgcagacagaccccgcctcgcggtagcctaggcgtgtacagctgacgcgcagacagaccccgcctcgccgcacttaaaagcttccttccttgacctcgagggtacacaggcctattgtccgagcaatttggaatcacatgccacaatcttcaccttgcccacctgctccgtggcctcctcgttcttgaagcttgcgtctgtcaagatgaaggtccacacattgtcacagaacctgtaggtgtgcaggtgaccctgcaaaaaagcacaagagaccaggaatcagtagctagggatgtaaatggtacggatattatcagtccgtattcaaattcgatccgtctaagagggctgagatctgatccttatccaagtccgggtatttagtatccgatccgtatctgatctatatccgtatatgtatactcaaagctggatatttaagatgccgatatcta

SEQ ID NO: 150480 - DNA, 745 bp, Zea Mays
atgaagatgactaggcctatctggtcttctgctatgaaagaatgtgttctacgccaggttgagggcaagatcatcaaggcgcagatctgggacacggcaggccaggagcggtaccgggcgatcaccagcgcctactatcgcggggcgctgggcgcggtcctggtctatgacgtgagcaagcccaccaccttcgagaacatcagccggtggctcaaggagctacgcgaccacgccgactccaacaccaggatcatgctcgtcggcaacaagaccgacctgaggcacctccgggccgtcgccaccgacgacgctcggagcttcgctgaggcagaaggcctgtcctacatcgagacgtccgcgctggaggccaccaacgtggaggaggcgttccagctcatcctgggcgacatttaccgggccgtcagcaagaagcctgtggcgtccgacgaggttggcgccggccagggaggcgtcaaggaaggtaagaccatcgatgtggcgactggtgctgatgccgccgctcacaagaagcagtgctgctcggcttagaagttagaagaacccatgctggtggtctctcgttcagtggcgtatgtgttgttgtgatggttgtcgttgttgttttttttctcttcttccagtccaaaagtttgttgattcgttttgccagatagtacctttgttggagggataatcatgctcacatatatattctctaaagcaagcagttatatatgattatacc

SEQ ID NO: 150481 - DNA, 2782 bp, Zea Mays
cactggatttgtacttggttagaagcacatcaaacacacaacggtttcactataagtgattgggtgcacacccgtttttttggcaaaaatccaatccaagttagcagtgggcatgggaaaattctacatgtgcaccacgtaaataaactttaattattagatcggatccaaatacaaacaggagtgtgttacgcaacccattacgctctatgagagagcgtgatctcgcctgccccaccaccggccagcggctccattgagccagccgagccgcccaccataccacctccgccctcctctaatcccaatcgaagagcaagctccacgccttcgcctgcccagctcaatcaaatgtccagcgacgcccgatcggcggtgccccgccgtctcgctcgctgacagtcgaaccaccaccaccgctgggcccccttccccttctaaggccaccgggtatggagtcccccgggaatccaagccccaagcccctaatcccgaaaccctaaccggtgagctcgtctccggcgacgacggtagagtaggaaggtacgggccacgaggtctcgtccgaatgcggcggcgcgcgtttcgcgatccgtcgctcaatagagtttgcgatgcgaatagcttaggctagggtttgggtgctcggtttcgcacagcaggaacggggggagtacagcagaggatgggcgtacctggcgggtgctcgtcgccgaagaagacttcccacgacttcctggcacctggcggcggcggtcggcgcgcgcgagagaagggcggacgccggaggatggatacgaggaaaagggaaagaatagaggaggcacaggttgaccacggcaggggcacagggctccgataaagaggcccggcccggcccggcccggcctgagtccactcttcttctgccttcccgactctacctgacttcgcccgctctgagaaattcactctcaccaccaccgcgccgcctccactccccccacccccggtctgaaacccaagcttccgcttctctcatggccgacgccaccgccgccctctcagctcggagcaaggtgcaggctttcctggaggctgcgcgcgccggcgacctccaatccctcaagaacctcgtcgcggcgctcgacgaggacggcacgggcgccgcctccgtcgccgccgccgtgcgcgacgccaacaagcgcaccgccctccacttcgcggcgatcggatgtcgcaccgacgtctgtgaattcctcatcggcgagctcggcctccctgtcgacccaaaggacgatgatggcgaaactccgctcatccatgcgacacgccagggccatctggacactgtcaagtatcttctcgaccatggagctgatccttcggtggccaccagcctaggagccacagcgctacaccatgctgcaggcatagggaacacggaactcatgaagcttctcctctccaagggagttgacgtcgagtcagaaagtgatgctggcactccccttgtgtgggctgctggtcatggcaaccaggatgctgtcaaacttctgcttcaacacaatgctaagccaaatactgaaaacgatgatggtgtcacagcattgttatctgctgttgctgcaggttccctcccatgcttggaggtcctaattgaggctggtgcaaacccaaatgtcaaggctggtggagcaaccccattgcatattgctgcagatagtggaaatatagaagtcatcaaatgtttgcttaaagctggagctgacccaaatacctgtgatgatgatgaattgaagccagttcaggttgctgcttggagaaataaccgtgaagctgttgaacttcttttaccgttaacatccccaattccaggtgtttcaaactggaacgtagatgggattatagaacacatgctccctaaagagtatgaggaaaagtctcaactgaaggaagcggcatctctgaaatcaggcctaacacaaactattgaggtgtcatctgaagcaaaaaagaggtccttggaagccaaatcaagaggtgatgatgccttcagaagaaaggactaccttgtagcggtggatgcttatacgcaggctacagagttggacccaactgatgcaacagtgctctcaaacagaagcctgtgctggctgcgggcagggcaagctgagcgtgctctggaggacgccaaagcatgccgtgcattgagaccagattgggcgaaagcctgctacagggaaggtgcggcgcatcgtctgttacagaggtttgaggaagccgcaaacgccttctatgagggggtgcagcttgagccggagaacacggagctcgtcaacgcattcagggaggccatcgaagccgggaggaagttccatggcgtcaacacgccaaactcaacacaatgagactttgctgtttggttggataggtagatgatgaagcggatggacatgaacgttgtcttagttggaagttggtgagatgatgaatgagatgataatgaaatttgaaagagcgaatttgcagatttattttgtgttttgtgattgttttcttaaacttgttttcttgcgtcgtcccggactcccggtccatgtgtgctctttcttgaattgcattttaatcagtgttagggtctgggtgatttagctgggaaagggagaagatatgctagggctatggaaaacagatcgtgcatatggtgatgatgcaaaacgatgtttacagtgtgaagtttaaaataggagatgtgaataagtaagctattggagacaatattatagagactatttgagac

SEQ ID NO: 150482 - DNA, 947 bp, Zea Mays
gggcttttcctttttatctagtataatccgtccgcaaccgttctctgccttctccatcctaaaccctcctagtcctctccatccccatcccctccaatggcggcgactgccacgtccttcgccactctcgccgtcgcgcgctcggcagggcagcggttcctccttgcctccaaggccgccccctcgccgctcctctccctccgcggcgcccgcctcccctcgcagggcgtctccttatctgggggcctcgcggcgtcgccctctcatagccgcgcgcgcttcgccacatcagccagcgccgaacccaaggaagcagaacttcagtctaaaatcacaaacaaggtgtactttgacataagcattgggaaccctgtgggcaagaatgttgggaggatcgtcatcggcttgtacggggatgatgttccacagacaacagagaacttccgtgctctttgcactggagagaaagggtttggatacaagggatccagtttccatcgtgtcatcagcgactttatgattcagggtggagattttgacaagggcaatggtaccggtgggaagagcatatatggacgcaccttcaaagatgagaacttcaaattggttcacactggacctggagtggtcagcatggctaatgctgggccgaacaccaatggcagccagttctttatttgcactgtcaagacaccttggttggacggaaggcatgtcgtgtttggccaggtcctggaagggatggatgtcgtaagtctgatcgagtcgcaggagaccgacagaggtgaccgcccgaagaagaaagtagtcatcagcgagtgtggggagcttccagtggtctaagtgttactcatctgttgtcggtcttacctaacctcggatggatggcgatatttcccccacctgaacttgtcgtgctaccctccccctccccacccccctaccct

SEQ ID NO: 150483 - DNA, 762 bp, Zea Mays
cagacactgtacttagagatggcaatgggtacccgctacccgaaacccggtgggtttttgctctattagggtatgggtttgggtcaatttctctacccatgggtttgttaatgggttcaaatggaaacccaatgggtacgtgggcatgggtttgttcttccactacccatacccgcaaacccgtgggtttttaaaacccgccttaaaatcaacattccttataaatatgtctcataatattattaattgaatatgttctaattaaaataaacttcatgtaacaaattttaggctaaaattagttatcacttgttccttttatgctagcttattaatgtattgattgtcatttacatgatgaattattttttatgttgatgttagtggatatgggaaacccgttgggtacccgaaacccgcatgggtatgggtttgggcaaaatttttatacccgtcatgggtatgagttttttagcgggcgtattttttcttcacgggtatgggtttgggcaagtaatacccagcgggtttttacccattgccatctctagctgcctgtacttcgccgaccgggagaagacggaggcggcggtctgcgagctgctcgtcggcctgaactacatctgccggtacgagcggcagcaaaacgctttgctcgactgctctagcagtctcggcttggatgattgtgtggagtggcaagtccagtagagccgaaagccaaggtcaggcactcaggcctctgctctggtccgtagtgta

SEQ ID NO: 150484 - DNA, 2550 bp, Zea Mays
atggggggaaactggtctgggaaggagagtggtggccgtgcctgccctccccccgcccggccagcggcaaacccaaaatttgaacccgccgcttcgactgactactaccccaccatccaaaaccccactccggcctccgccgtcatttcctctccccgccaatccgccaccatttccagttccgaccgacctcgaaaccctagcccccagaccatcccactcgcaaccgccatgccggacctcccctgcgacggcgatggcgtctgtatggtctgccgcgtcgcatccccgccggaggtcgacctcctcacctgctccacctgcaccacgccctggcactctccgtgcctctccaagccccccgccctcgccgacgccgccagctggagctgccccgactgctcccccgactccgctgccgtcgccgctccctcgggccccgccaacaccctggtcgccgccatccgcgccatcgaggctgaccacacactctccgaccaggagaaggcgcgccgccgccaggccctcctcaccggcgacgcccccgacggcgcggacgacgatgacgacgaagcgtccgacgatgcccttgagatcgtcggcaagaacttcagctgcgttttctgcatgaagctccctgaacgacccgtcacgacaccctgtggccataacttctgcttgaaatgcttccagaagtggattcaaaatcagaagaggacgtgtgggaaatgtcgggcgcagatcccggccaaaatggctgagcagccaagaatcaactccgcactagtcgaagttatcaggatggctaagatttcaaagaatcctaactctgctggctcagcagttccatatcactatctacgaaatgatgataggcctgataaggcctttacaactgacagggctaagagggctggaaaagcaaacgcatcaagtggccagatctttgtgactattgcacctgatcattttggccccattcttgcagaaaatgacccccgcaggaatatgggtgttcgagtcggggaaacatgggaagaccgacttgagtgcaggcaatggggtgctcactttcctcatgtggctggcattgctggccagtctacgcatggtgctcaatcagtagccctctcaggagggtatgaagatgatgaagaccatggagagtggtttctttacaccggaagcggtgggagggatctaagtggtaacaagcggacaaacaaggaacagtcatctgatcagaaatttgagaagctgaatgctgctttacgcattagttgcttaaagggctaccctgttagggttgtacggtcgcacaaagagaagcggtcctcatatgctcctgaatctggtgtgaggtacgacggggtttacaggattgagaagtgctggaggaagattggtattcagggtaagttcaaggtctgcaggtatctctttgtacgctgtgacaatgaaccagctccttggaccagtgacgatcacggtgaccgtccaagaccattgccaaagataaaggagctgcaaggtgcaactgatataacagagaggaaagggcgcccttcatgggattatgatgataaagatggctggaaatgggtggtgcctccgccagtcagcaggaagcctgttctatctggggatcctgagaccgacaagcaaatccgtagagcaacaaagcgtgttcatttgtctgttgctgaaaggctgcttaaagaatttgcttgttcgatatgccgggcggtgattaaagaaccacttacgactccatgtgcccacaacttttgcaagacttgtttgcttggggcatatgatagccagtcttctataagggaaagaagccgtggtggtcggactctaagggcacagaagattgtgaagacgtgcccttcttgcccaactgacatctgtgattttttagagaatccccagatcaaccgagaaatgatggagctgattgagactttgcaacgcaaggctgttgaagaagccaagatgacttcagatgatgctgaggaatgtggtgatggtgattcggaggaaaatgatggtgatttggtgaagggagaggatgttagtggtttgaatgagggagagcaagacagtgcagacgctgatgctaatgttgaaggttctgtgaagattgtggttgaaatcaaggaggaaggaaaagatgataaaaggtcaaagatgggcgcgactgaagtggtggatgtgttagttgatgaagatgctgtgaagcagacgaaaaagcgcaaggttgatgctgaggctggcaccaacggtggcaagaggatgaagagcagtagtaccgtggaagaggttgctgtgtgcgtcactcctgtgaaacggagcaggaagagtggtgatatggatgatgagcgcaacggcagtcctgctgtgagcagcggccgctggtgactcgcacagtgtggatgacactggatctgctgatattccggcgaggaggactagaagcccgtgtcagagctgatgctggtcgctgaaggggtagaaggaaacggggaagcggaaaaccagccgagc

SEQ ID NO: 150485 - DNA, 1185 bp, Zea Mays
atcgcatcgatcgggcaggcattaattgtacagctttattagctcctgcttctgcttctgcttctgcttcttcttagctggagactagagaaagaagaagacacagtgatcatcggcatagatagtaagtagaagaagagctagcaggaagaagcagcagctagctagctgacccaacgaaatgacgatgagagatgagatcgtcttcttcgacgtggagacgacggctccgtcggcggccgggcccggtcggtggtggctgctggagttcggcgccatcctggtgtgccccaggaagctggtggaggtaggcagctacgacaccctcatccgcccgggcgacctctccgccgtctccaggcgattcacggacgacgtggaggcggccataatggcgtcggcgccgcccttcaaggacgtggccgacaagatattcgacatcctggacggccgcgtttgggctgggcacaacatccagcgtttcgactgcccccgcatccgcgaggccttcgccgacatcgggcgccccgccccggagcccgtcggcgtcatcgactccctcaacgtcctggccgcacacttcggccgccgcgccggagacctcaagatggccaccctcgcgacctacttcggcatcgggaagcagaagcacaggggcctggacgacgcgcgcatgaacctcgaggtgctcaagcactgcgccaccgtcctgctgctggagtccagcctgccggacgtcctctgcgcgcagcagtctcgccgagccgcggtcaccaggaggacgtcgcaggcgcagaccatcaagccgccacctaaacatgctgtgcaccaccacctgcggcccggcggcgtcgtcatgtcgcagacaaagctaccatttaccgctgtaacagctacacctgcacctgcggccgccaccccctgcggcaagaggaatagcctgggcaaggtggtggcgagggccgtgacggcggcgaccactgccccattgagtagcagtagcagcacaagcacaaacactaggcgccccgtgacggcgaccacgcccttccacatgatcctcaggcactccagggccatcctcagatgatgatccatgtttcattcattcattctttctttggatgatccatgatcggatttcgttccattcaattcaattgtacagttccatcgatttgaatc

SEQ ID NO: 150486 - DNA, 186 bp, Zea Mays
atggccgacagcgtcaccttgcgtccaccatggccagtgagcggaggcctcggtgagccagggccttggcaaagcaggcacgcgacgacaagatgcaggggcggctccgagcaggcgaacacggcgaggctcggcggggctcctccacatgacgatgagcgctgcgcagctgcctgcacacggtga

SEQ ID NO: 150487 - DNA, 240 bp, Zea Mays
atgccaaacacgagcaccgccgtgctggggcctggccgcgcagggctggccaccatggccgacagcgacaccttacgtccaccatggccagtgagcggaggcctcggtgagccagggccttggcaaagcaggcacgcgacgacaagatgcaggggcggctccgagcaggcgaacatggcgaggctcggcggggctcctccacatgacgatgagcgctgcgcagctgcctgcacacggtga

SEQ ID NO: 150488 - DNA, 733 bp, Zea Mays
aagccagaaaaccacgcattattctgatcaccaaatctcgatatcatcagagtttatgacccaacaagcatcgcacctacaaggatgcgaacaagttacaagctcaaggcatcgattaatcgtacagaggtggcggcgcgccactgcctcctacttcttgccacctgccttgttcttgttgttgtccgtggaggtaccggtgccgccggccgctgcctgctgcgccttcttggccgccttctcctccagagctttcttgtccctgccaacaacaaccggatcgggacagggtcagcgccaagcaacggagatctggacatgtcggagaagaataagcgcacctctcgcggcgctgctccggggtgagcccgtcctgggagttcttggcgttgggcttccgcgccgccgcgcgctcacggtcgcggtcacgctggttgccgcgtgcgcgcaagttaaggaaggaggaacagggaatcgaaacaacgaaacagatcgagatcgtatacaagcaaaagatggattagagcaagagtttccctatgcgcagatccataatcggggtttgggaaggatatgagtcatgtcgccggtcgcgctcacgctggttgtccggtcgcgccgccctcggccggagaaaactcggcgacgacgccccaagtcacgcagagaatcggccctggcgtcctctcgattttttctttctttgtttcgatttgtagggagggatagatag

SEQ ID NO: 150489 - DNA, 1750 bp, Zea Mays
ctcttgctgctcgattggattccaatttttagaccgaccaaactagaattaggtaggttcagcagttagattggatgccctagcagcgccggcggcagatgctgacccgggagccgtcggcgacaagctcgtcttcgaagcgccgcctcagcccgtgagggaggactacgtccagaacgccgtcaagtttctctcccaccccaaggtcaggggctcccccgtcgtctacaggcgatccttcctcgagaagaagggccttagcaccgaggagatcgacgaggccttccgaagggttcctgatcctcaacccagcactacggctaccacttctccgcagcagcaggtcaacagccagaatcaatccgtcggggtgcaagcttatgcgccagcacaacctgtgcacccagcaaacgctggccctgtcgtccttccaacgcagcccaggtttagctggtaccaagcattcctggctgcagggctcttgcttggttttggtgctagcgctgctgtctttatcaagaaactgttccttcctaggctcaagtcttggatccgcaatgttgtagcagaaggtaatggcactgaaggcaaccagcttaagcctaggattgatgatgaaacggctgatgctgtaaaggcttctgcttcggctgtttctgctattgccaaaacaaaccaacaactgcttgcttcaaaggatgaagaaaagaagatactagtgacgttgacacaagctctagattcccaagccaaggagttaaaatccttgaccgattcaatcggtcataccagggaacccataaatattaccagggatgataggttttctcagtaccgcccactggaagaccatgcccctactgttataaggaatggggcaattaacagttcatggagagcctctcagcaaactaacatgtatggtgtgtcaaatggcgactttggttccgtgaggtcttcatttgcgccagcacctgctgaacctacagctggatcattttcaagatcctatggcgagcagccgatgtccactgcacaacgaagcgataggtcttctggcagtaagccatgggagatgcattcgtattcacaacagaggcctggttatggatccaactcccagttgagtgatgatggatcatactctgatgcccaggacagctatgctccttcctatcaccagaatggaaaggcccctgattttcaagcggatgaacctaggcctttgacttacaacactggggttgaggaaagaccgccaccgcagcgccgctgggtgccccctcagcctccaggtgttgcgatgccagaagcagcagctgccatacgtcaaccaaaggcccttccaaagcagccctccagcgatgcctctgaggcagctggtgagatgcaggtgaatggttcaagtgcatcggatgctgtgactgaggttcctgttaatggtgctactgcaagcgatgctggacgcagtgagatccaagaacaatcagtggcggcctaagtgaaaccaagaccagctaagaactgggaagcaatctaagagagattcaggatctctagtacatctggggggtttgtcatacatctctgaataacgtctgtatcagaacagcggggcaaccacgccgatgggtacccgtaataatgcaataagtagcagatagtttctgcatttagattaatgctacttgtacacaggagaacatatcaataatatttttttggctgttcgattgagggtgcttaaaaa

SEQ ID NO: 150490 - DNA, 1815 bp, Zea Mays
atttcagtttggaactgaactgggaatgacgtggccgaggacaaaagcaaattgacaccttctccgttcccgacgactcccgtgagcgtggagaggcgactaggcgaggccatggcctccggcatcggctccggccagcagcaacccccagcgccggcggcagatgctgacccgggagccgtcggcgacaagctcgtcttcgaagcgccgcctcagcccgtgagggaggactacgtccagaacgccgtcaagtttctctcccaccccaaggtcaggggctcccccgtcgtctacaggcgatccttcctcgagaagaagggccttagcaccgaggagatcgacgaggccttccgaagggttcctgatcctcaacccagcactacggctaccacttctccgcagcagcaggtcaacagccagaatcaatccgtcggggtgcaagcttatgcgccagcacaacctgtgcacccagcaaacgctggccctgtcgtccttccaacgcagcccaggtttagctggtaccaagcattcctggctgcagggctcttgcttggttttggtgctagcgctgctgtctttatcaagaaactgttccttcctaggctcaagtcttggatccgcaatgttgtagcagaaggtaatggcactgaaggcaaccagcttaagcctaggattgatgatgaaacggctgatgctgtaaaggcttctgcttcggctgtttctgctattgccaaaacaaaccaacaactgcttgcttcaaaggatgaagaaaagaagatactagtgacgttgacacaagctctagattcccaagccaaggagttaaaatccttgaccgattcaatcggtcataccagggaacccataaatattaccagggatgataggttttctcagtaccgcccactggaagaccatgcccctactgttataaggaatggggcaattaacagttcatggagagcctctcagcaaactaacatgtatggtgtgtcaaatggcgactttggttccgcagtgaggtcttcatttgcgccagcacctgctgaacctacagctggatcattttcaagatcctatggcgagccgatgtccactgcacaacgaagcgataggtcttctggcagtaagccatgggagatgcattcgtattcacaacagaggcctggttatggatccaactcccagttgagtgatgatggatcatactctgatgcccaggacagctatgctccttcctatcaccagaatggaaaggcccctgattttcaagcggatgaacctaggcctttgacttacaacactggggttgaggaaagaccgccaccgcagcgccgctgggtgccccctcagcctccaggtgttgcgatgccagaagcagcagctgccatacgtcaaccaaaggcccttccaaagcagccctccagcgatgcctctgaggcagctggtgagatgcaggtgaatggttcaagtgcatcggatgctgtgactgaggttcctgttaatggtgctactgcaagcgatgctggacgcagtgagatccaagaacaatcagtggcggcctaagtgaaaccaagaccagctaagaactgggaagcaatctaagagagattcaggatctctagtacatctggggggtttgtcatacatctctgaataacgtctgtatcagaacagcggggcaaccacgccgatgggtacccgtaataatgcaataagtagcagatagtttctgcatttagattaatgctacttgtacacaggagaacatatcaataatatttttttggctgttcgattgagggtgcttaaaaa

SEQ ID NO: 150491 - DNA, 1815 bp, Zea Mays
atttcagtttggaactgaactgggaatgacgtggccgaggacaaaagcaaattgacaccttctccgttcccgacgactcccgtgagcgtggagaggcgactaggcgaggccatggcctccggcatcggctccggccagcagcaacccccagcgccggcggcagatgctgacccgggagccgtcggcgacaagctcgtcttcgaagcgccgcctcagcccgtgagggaggactacgtccagaacgccgtcaagtttctctcccaccccaaggtcaggggctcccccgtcgtctacaggcgatccttcctcgagaagaagggccttagcaccgaggagatcgacgaggccttccgaagggttcctgatcctcaacccagcactacggctaccacttctccgcagcagcaggtcaacagccagaatcaatccgtcggggtgcaagcttatgcgccagcacaacctgtgcacccagcaaacgctggccctgtcgtccttccaacgcagcccaggtttagctggtaccaagcattcctggctgcagggctcttgcttggttttggtgctagcgctgctgtctttatcaagaaactgttccttcctaggctcaagtcttggatccgcaatgttgtagcagaaggtaatggcactgaaggcaaccagcttaagcctaggattgatgatgaaacggctgatgctgtaaaggcttctgcttcggctgtttctgctattgccaaaacaaaccaacaactgcttgcttcaaaggatgaagaaaagaagatactagtgacgttgacacaagctctagattcccaagccaaggagttaaaatccttgaccgattcaatcggtcataccagggaacccataaatattaccagggatgataggttttctcagtaccgcccactggaagaccatgcccctactgttataaggaatggggcaattaacagttcatggagagcctctcagcaaactaacatgtatggtgtgtcaaatggcgactttggttccgtgaggtcttcatttgcgccagcacctgctgaacctacagctggatcattttcaagatcctatggcgagcagccgatgtccactgcacaacgaagcgataggtcttctggcagtaagccatgggagatgcattcgtattcacaacagaggcctggttatggatccaactcccagttgagtgatgatggatcatactctgatgcccaggacagctatgctccttcctatcaccagaatggaaaggcccctgattttcaagcggatgaacctaggcctttgacttacaacactggggttgaggaaagaccgccaccgcagcgccgctgggtgccccctcagcctccaggtgttgcgatgccagaagcagcagctgccatacgtcaaccaaaggcccttccaaagcagccctccagcgatgcctctgaggcagctggtgagatgcaggtgaatggttcaagtgcatcggatgctgtgactgaggttcctgttaatggtgctactgcaagcgatgctggacgcagtgagatccaagaacaatcagtggcggcctaagtgaaaccaagaccagctaagaactgggaagcaatctaagagagattcaggatctctagtacatctggggggtttgtcatacatctctgaataacgtctgtatcagaacagcggggcaaccacgccgatgggtacccgtaataatgcaataagtagcagatagtttctgcatttagattaatgctacttgtacacaggagaacatatcaataatatttttttggctgttcgattgagggtgcttaaaaa

SEQ ID NO: 150492 - DNA, 1815 bp, Zea Mays
atttcagtttggaactgaactgggaatgacgtggccgaggacaaaagcaaattgacaccttctccgttcccgacgactcccgtgagcgtggagaggcgactaggcgaggccatggcctccggcatcggctccggccagcagcaacccccagcgccggcggcagatgctgacccgggagccgtcggcgacaagctcgtcttcgaagcgccgcctcagcccgtgagggaggactacgtccagaacgccgtcaagtttctctcccaccccaaggtcaggggctcccccgtcgtctacaggcgatccttcctcgagaagaagggccttagcaccgaggagatcgacgaggccttccgaagggttcctgatcctcaacccagcactacggctaccacttctccgcagcagcaggtcaacagccagaatcaatccgtcggggtgcaagcttatgcgccagcacaacctgtgcacccagcaaacgctggccctgtcgtccttccaacgcagcccaggtttagctggtaccaagcattcctggctgcagggctcttgcttggttttggtgctagcgctgctgtctttatcaagaaactgttccttcctaggctcaagtcttggatccgcaatgttgtagcagaaggtaatggcactgaaggcaaccagcttaagcctaggattgatgatgaaacggctgatgctgtaaaggcttctgcttcggctgtttctgctattgccaaaacaaaccaacaactgcttgcttcaaaggatgaagcagaaaagaagatactagtgacgttgacacaagctctagattcccaagccaaggagttaaaatccttgaccgattcaatcggtcataccagggaacccataaatattaccagggatgataggttttctcagtaccgcccactggaagaccatgcccctactgttataaggaatggggcaattaacagttcatggagagcctctcagcaaactaacatgtatggtgtgtcaaatggcgactttggttccgtgaggtcttcatttgcgccagcacctgctgaacctacagctggatcattttcaagatcctatggcgagccgatgtccactgcacaacgaagcgataggtcttctggcagtaagccatgggagatgcattcgtattcacaacagaggcctggttatggatccaactcccagttgagtgatgatggatcatactctgatgcccaggacagctatgctccttcctatcaccagaatggaaaggcccctgattttcaagcggatgaacctaggcctttgacttacaacactggggttgaggaaagaccgccaccgcagcgccgctgggtgccccctcagcctccaggtgttgcgatgccagaagcagcagctgccatacgtcaaccaaaggcccttccaaagcagccctccagcgatgcctctgaggcagctggtgagatgcaggtgaatggttcaagtgcatcggatgctgtgactgaggttcctgttaatggtgctactgcaagcgatgctggacgcagtgagatccaagaacaatcagtggcggcctaagtgaaaccaagaccagctaagaactgggaagcaatctaagagagattcaggatctctagtacatctggggggtttgtcatacatctctgaataacgtctgtatcagaacagcggggcaaccacgccgatgggtacccgtaataatgcaataagtagcagatagtttctgcatttagattaatgctacttgtacacaggagaacatatcaataatatttttttggctgttcgattgagggtgcttaaaaa

SEQ ID NO: 150493 - DNA, 1833 bp, Zea Mays
atttcagtttggaactgaactgggaatgacgtggccgaggacaaaagcaaattgacaccttctccgttcccgacgactcccgtgagcgtggagaggcgactaggcgaggccatggcctccggcatcggctccggccagcagcaacccccagttagattggatgccctagcagcgccggcggcagatgctgacccgggagccgtcggcgacaagctcgtcttcgaagcgccgcctcagcccgtgagggaggactacgtccagaacgccgtcaagtttctctcccaccccaaggtcaggggctcccccgtcgtctacaggcgatccttcctcgagaagaagggccttagcaccgaggagatcgacgaggccttccgaagggttcctgatcctcaacccagcactacggctaccacttctccgcagcagcaggtcaacagccagaatcaatccgtcggggtgcaagcttatgcgccagcacaacctgtgcacccagcaaacgctggccctgtcgtccttccaacgcagcccaggtttagctggtaccaagcattcctggctgcagggctcttgcttggttttggtgctagcgctgctgtctttatcaagaaactgttccttcctaggctcaagtcttggatccgcaatgttgtagcagaaggtaatggcactgaaggcaaccagcttaagcctaggattgatgatgaaacggctgatgctgtaaaggcttctgcttcggctgtttctgctattgccaaaacaaaccaacaactgcttgcttcaaaggatgaagaaaagaagatactagtgacgttgacacaagctctagattcccaagccaaggagttaaaatccttgaccgattcaatcggtcataccagggaacccataaatattaccagggatgataggttttctcagtaccgcccactggaagaccatgcccctactgttataaggaatggggcaattaacagttcatggagagcctctcagcaaactaacatgtatggtgtgtcaaatggcgactttggttccgtgaggtcttcatttgcgccagcacctgctgaacctacagctggatcattttcaagatcctatggcgagccgatgtccactgcacaacgaagcgataggtcttctggcagtaagccatgggagatgcattcgtattcacaacagaggcctggttatggatccaactcccagttgagtgatgatggatcatactctgatgcccaggacagctatgctccttcctatcaccagaatggaaaggcccctgattttcaagcggatgaacctaggcctttgacttacaacactggggttgaggaaagaccgccaccgcagcgccgctgggtgccccctcagcctccaggtgttgcgatgccagaagcagcagctgccatacgtcaaccaaaggcccttccaaagcagccctccagcgatgcctctgaggcagctggtgagatgcaggtgaatggttcaagtgcatcggatgctgtgactgaggttcctgttaatggtgctactgcaagcgatgctggacgcagtgagatccaagaacaatcagtggcggcctaagtgaaaccaagaccagctaagaactgggaagcaatctaagagagattcaggatctctagtacatctggggggtttgtcatacatctctgaataacgtctgtatcagaacagcggggcaaccacgccgatgggtacccgtaataatgcaataagtagcagatagtttctgcatttagattaatgctacttgtacacaggagaacatatcaataatatttttttggctgttcgattgagggtgcttaaaaa

SEQ ID NO: 150494 - DNA, 1839 bp, Zea Mays
atttcagtttggaactgaactgggaatgacgtggccgaggacaaaagcaaattgacaccttctccgttcccgacgactcccgtgagcgtggagaggcgactaggcgaggccatggcctccggcatcggctccggccagcagcaacccccagcagttagattggatgccctagcagcgccggcggcagatgctgacccgggagccgtcggcgacaagctcgtcttcgaagcgccgcctcagcccgtgagggaggactacgtccagaacgccgtcaagtttctctcccaccccaaggtcaggggctcccccgtcgtctacaggcgatccttcctcgagaagaagggccttagcaccgaggagatcgacgaggccttccgaagggttcctgatcctcaacccagcactacggctaccacttctccgcagcagcaggtcaacagccagaatcaatccgtcggggtgcaagcttatgcgccagcacaacctgtgcacccagcaaacgctggccctgtcgtccttccaacgcagcccaggtttagctggtaccaagcattcctggctgcagggctcttgcttggttttggtgctagcgctgctgtctttatcaagaaactgttccttcctaggctcaagtcttggatccgcaatgttgtagcagaaggtaatggcactgaaggcaaccagcttaagcctaggattgatgatgaaacggctgatgctgtaaaggcttctgcttcggctgtttctgctattgccaaaacaaaccaacaactgcttgcttcaaaggatgaagcagaaaagaagatactagtgacgttgacacaagctctagattcccaagccaaggagttaaaatccttgaccgattcaatcggtcataccagggaacccataaatattaccagggatgataggttttctcagtaccgcccactggaagaccatgcccctactgttataaggaatggggcaattaacagttcatggagagcctctcagcaaactaacatgtatggtgtgtcaaatggcgactttggttccgtgaggtcttcatttgcgccagcacctgctgaacctacagctggatcattttcaagatcctatggcgagccgatgtccactgcacaacgaagcgataggtcttctggcagtaagccatgggagatgcattcgtattcacaacagaggcctggttatggatccaactcccagttgagtgatgatggatcatactctgatgcccaggacagctatgctccttcctatcaccagaatggaaaggcccctgattttcaagcggatgaacctaggcctttgacttacaacactggggttgaggaaagaccgccaccgcagcgccgctgggtgccccctcagcctccaggtgttgcgatgccagaagcagcagctgccatacgtcaaccaaaggcccttccaaagcagccctccagcgatgcctctgaggcagctggtgagatgcaggtgaatggttcaagtgcatcggatgctgtgactgaggttcctgttaatggtgctactgcaagcgatgctggacgcagtgagatccaagaacaatcagtggcggcctaagtgaaaccaagaccagctaagaactgggaagcaatctaagagagattcaggatctctagtacatctggggggtttgtcatacatctctgaataacgtctgtatcagaacagcggggcaaccacgccgatgggtacccgtaataatgcaataagtagcagatagtttctgcatttagattaatgctacttgtacacaggagaacatatcaataatatttttttggctgttcgattgagggtgcttaaaaa

SEQ ID NO: 150495 - DNA, 429 bp, Zea Mays
gccattttcatagggaaacgaacggtaatggagatataagaaaaagttaaaaagaacaggtcatgctagtagtgttctcttatgagcctaacggtactacacttcatagaatatacaggtcatttgcaagcccaaggcagcgactgcaatgcgaatacacagaacccaatctgtcaagcagttgctgaaaggttccattccaacatcttccttacaaaccaggtgcactacattagatgtgcctaaactgctgtccagggactgaacatagaagataagtaaaagttcaattcgtcaccagataacccaccagcataatcatcggaaaaacaacaagtttttactgaccagaaaaggctttcgattgctggggcattccttctatcatggttaactgccttctcagcttggctatgtgaacctgaacct

SEQ ID NO: 150496 - DNA, 887 bp, Zea Mays
aaacccaagccatcatcatctatctagactagagcaagctaagctcggctagcattccagaagctgcatctattatcagctacctctcgattcatcgcttgcgatcgaatggagaagatgaacgtggttgcgagcaggaagcagcccggcgactggagctgccggtcgtgccagtacgtgaacttctgcaagcgcgacgcgtgccagcgctgcggcgagggcaagctgggcgtggagcgcacggactacgcggcgctgggcggcgactgggacgtgaagcccggcgactggtactgctaccgctgcggcgtgaacaactacgcctcccgcgccagctgcttcaagtgcgccgccgccaagaacgagtccacggccgccgtcgcgcagggctgggggtacaccgtcgccggccaggccggaatgatgcccggggactggatctgcccaagactgggttgcaacgtgcagaactacgccaaccgaaccgagtgcttccggtgcagtatgcccaaatcatactacggttgatggggcgcggcggccggccgggcaactacgtaaactgatgagcaaaacaaacaaaaaaaagacataataagccgtacgatgagcttgaagagagagctagatactgatgatggttggtcaacacgccacgaggacatttaaccattttcctttctttttttgtcaccctttcgaatgatgcatgtaactatattcaccctttcgagcagcaactgaagctaaataggagaggaggaatgtgaaacaaaacccaaaaaaaaaacgtgactgatcgattatgccaacactatgtcagtctgttgtttgtcccgtacgtcccttttttcccaataaaaagccgaggttgaagaaaggaaaaa

SEQ ID NO: 150497 - DNA, 585 bp, Zea Mays
acgcgacgctacagaacacgtcgtccgaaaccgacggctgctgctcaaatttgtcaaagcctcaaaggtcgtctgctgcagatgaccgtgtctgcataacgatatggccaggcttatcagccaattggaaaggcaaacaccaagcaacatgtttttttacagaaaattcaactactacgtattatacatctaaaaagatttcagaatgaaacatgagatgtttgcagcaccacggcactccaggttccatagcccataatccatctagaacgagcgaccgacagcaaccactagattcctggcccaatgaccacattgaactcctcactgtcacagctaaagtacgatgcgccttatcttcgcccaaaactgggttgaagggtatatcctgcgcttttcctacttcctattgtctatctacttgtttcatgaaaggcttggaatgactgggtatataacccttcacaggtcctactaatgacatggcttcttgtagagcctccagtagatgatcaggatgatcctcgatgtgcacacggccaaactgttctggtattttgcgcaaaacccgtccaacgatctgcg

SEQ ID NO: 150498 - DNA, 723 bp, Zea Mays
ataaaaaagaggaagagcgtggcggtgaggcggcgacgacggggagggaggaggaggcgctgtcggaggcctcgtcgatcggcgcggcgtcgtccgacagctcctccatcggcgagaactccgcgtccgacaaggagggcagcgacgggaggaggaggtggtggaaggcaaggcgcaaggcctcggcatgatgccctgctccagtccttggacgatgccctgcccatcaacatggaacctggcagctggaaccggaccgatccccaccgagaagaaggccacgtcgttgcacaccgtcaggatggcgacgccaacgccggcgccacgggacaccgacccgcgcgcctgcaggaagagagcggcggacagcgccgccaggcagccggtcctgccgaccatgctgacgtacagcagcggcttccggccgacgcggtcgatcagcacgatggccagcgcaatgaacgacgtcttgaagaacccgacggccaccatggcggcgaggagctggcgctcggtggcgatcccagtgtcccgtgatatcctggaacctggcagctggaaccggaccgatccatgagcgacgacgattatggccaggggcacaagcgtccagtcagtttagtaaaacaagtttatgtttgaaataaccccctaaatgacataactgtctacgaactatcgtctcataccctagtatcagactaaaagctgtccttttcctat

SEQ ID NO: 150499 - DNA, 634 bp, Zea Mays
gaaaaattccccaaccaattccataaaaccaacaagcgccccctcgaaggttccacaaaccaactcaatgaccttgagcatcaagcagaaccaaactaattgctccacaaacaatgcctgccaacattcattgtgcagcacctcactgctgcttgcactctgcaggtcgttcgccctgctgcccttcccctccggcagttcccttggtcttctgttccaaagaaaaaaggaaaataaaatggcaaaacatactcagaactcagaagctggaaagggtgaagtgatattccccattaggccttgtttggttattccaattacacatggattggatgggattggaaaaaattaaaaagaagtttgacttgcttgggatttaaacacacccaatcccactcaatccacatggattaagagctaaccgaacaagcccttagagagacaaaaaaaggttcccatacctttgaatcgtaatcatcatcatcatcatcatcctcgtcatcttcgtcttcatcatcattgtcttcatcatcgtcatcctcaccatccataacttcaaactcctcatcttgagcagcctctccagtgaaccacgagacagcatgtgggataatcttgtctctgatggtagatc

SEQ ID NO: 150500 - DNA, 2136 bp, Zea Mays
tgcgcaccggcaccggcaccggcagctcaccgatccccggagccgctactataagtacaaagcttccccggcggcggtccacccggccatggcggcagtcggagcgcgcccagtgctgtaccaccaccacccccacccggcgccggcgggcggcgcccccgcccccatgtcctcttcctacttctcccgcggcggaggcagctccagccccgcgtccagcctctccgccgcgcacttggacatatccgagttcctcttcgacgacgcctccgtcgtcgtgccgccggacgccagtggtggcggtgcgatcagcgcaggcggcgctgggagcgcggcggcgccggagcggccgcgcacggaccggatcgcgttccggacgaggtcggaggtcgaggtcctggacgacggctacaagtggaggaagtacggcaagaagtccgtcaagaacagccccaacccaaggaactactaccggtgctcgacggaagggtgcaacgtgaagaagcgggtggagcgggacagggacgaccccggctacgtggtcaccacgtacgaggggacgcacaaccacgccagccccagcacggtgtactacgccagccaggacgccgcctccggccgcttcttcgtcgccggcacgcagccgccggggccggggctgtaataagatgtacagactctgtcccaatggatgttggacccgattcttagttacatcttgtatgcagtgcaggtgtggctgaacgctccccaggcaggaggcatcagtcgcagcccttggctacgccggccgtgccaccaggccctagccatgtttgcagactccgcatgggtaggcactgaagcaaactagtagacctttttggctcttgtacacaaactgaactatatgaaactttggtactacttttttttccctgtcaaatataccccctccggccttccattcatcaggtatgtttgtatgagattgcaagcccagtgtgtgtgtgtgtgtgtgtgggagttacaatatacacgctgacacaccaacaccaaactacacactggaccctggagtacaaaactgtcatctgatacagcgatgggtagagaggccttgaatcatgaaggttacagcgcgttaattttagtgatcgtctcagccgcttggctctttacaagctcgactatcatacagcattaggggcatactaagtgccagggggggctcacggtagagatgccgattggagagatttttagccaacagaaacaagagcggggttgagcgccataaccctccacggaaaacgcatctaccatatatacatgtacaattcttgacgcccaacggacccaaaaaaaaaactgtgggccggtcaagtctcgtgcggacgaccagctagcacctagcagcagttctttggccatgccatggtcagctcagctctactgtgatggacccagaacgcccgatgctacgagttgctcctgagcttttctttcgaggtttcaggtcaaccacgatgacggtgacgttgtcctcggtacccttcttcagcgcgaccctcacgagataatccgctgcggcttgggcagcggggtcggtggtggatccatcaccctcgtcgcacaacgaccacgatgcgccagcggcaccgttgttcttgtgccacacttggatttgccggcgcgcagctttgcatgcctcttcgttcgtcaccacatcccacagcccatcgcttgcgaggatgagacagtcgtcatctttcgccctgggaacgaccgtgacctctggttttggaatcacgaacggcttcagataccggtcccctgcagcgagtgtttccaacttcgagttagcaaaaaaaaaaggtgacggagaattggacaaatgctacccaattccaacccacagagaagtcagctgaactgctggttcaactaaattttctagtgaaattgggggaaacaatattgtccgggagttttaacatgatggcgtatgtgtatctgatctgaagatggcgatgaatgtgagcatttccagacaagatacattgatggttaggcatggtccaagctgcaagtgccacttgcaggaaccatgccatgaggtacctttgccgtgtcgattaaagttgtcttttctac

SEQ ID NO: 150501 - DNA, 114 bp, Zea Mays
gaactgctgatttcgttatcagaaatcggaatgtacgaaacaaacgctaatcctacgttaaaagcaatttccgcggtcgcggacgggccagtgtgttaattagcttctcgtggc

SEQ ID NO: 150502 - DNA, 711 bp, Zea Mays
cgttgcttgtcgggcctgtgattcggcagagatgataccgaaccgaacagacagaacatgcagctggctgtgatttggcagagaagatacggaacaggcagaaacatgcagctgggattttccatggttaacctttgccggtcaggtggaacgtgcgtgcgaaagggaaactagcagctggaaatttgaaaattttcattacacaaaattaaggcaactattgcagagaaggcatgttgccaaacccactccagccatccagcccctcgccgtcatagcacgcggcgatgtctctatggaacccagcaacccgcgcgtggccgccgccgccgccgccgcctgacgagaagaggtcgcacatgtccggaggcgcctctccctggaaaaagttgtggtactcgtaggcgtctcctggccctggatgaccactaccagcagcagcagccgcctccccgtccccggcgccctcctcggcgtcggagttcttctcgaccagctgccggaacatggacgacttgagcaggaggctgagcgcggtggaggagcctcgcctcctcatgccgccgggagacaccgtggacatggaggcctcctggccgccgccgctactggtcatgtggtccagcaggaacgggttgcctcgcgggagcatctgggccgtctctgccgggtggtggtggagctgcagctgctcggccggcgctgcctgcg

SEQ ID NO: 150503 - DNA, 902 bp, Zea Mays
aaagcaacttcagaatcaaaagtgacaactacaatcacagttcacgagctagccacaccaggcctgaaggcatttttatgcattcctttcccgtacaagaaatctgcaaaggctgaactccagtacttgcaccaccatgctggtgttgctgcaagtgttggcctaaatgcaaaccctgtcgttaagctttctggtgtattcggaactaaaactgttgctgttggtgctgatgttgcatttgatacttcatccgggaacttaaccaaatacaatgctggactgagctactccacgtctgacttcgttgctgcagctactttgaacaacaaaggagacaagatcgccgcttcctactaccactcggtaagtccaaccacagctgttggaggagagctgagccacagcttctcgaccaacgggaacaccatcaccttcgggacgcagcatgccctggaccgtctgaccactgtgaaggcacgattcaacaactgcggcatggcaagcgcactgatccaacacaagtggaggcccaagtctttggtcaccatctccatggaggtggacaccaaggccatcgagaagagctccaagattgggctctccctcgtcctgaagccctgaggtcaccgccagcttcttgttttgggatatactaggtctattttttttaatctgcagctgaagtctccagcaaacaagattggactaaacctgtcaactttggtgccgatcccacaaactcaagttcacggtctctttggtggaaaactatgcggttttgtataccactgggtgatgatgtttggagaaagttcagtatggctcaccagtcaccactgtctctcagattttaactgtttgatttgtcgattctttattcatacagatcgcaatttttctca

SEQ ID NO: 150504 - DNA, 998 bp, Zea Mays
atgaggccacaatggcctcctccgcgtgtgcctagtccgccaccttggttttgcgtcgacctgtcgtgtccattgaccttaaccatgatcgtcgcttccaccgccttcgcatcgaaggtgacaactacaatcacagttcacgagctagccacaccaggcctgaaggcatttttatgcattcctttcccgtacaagaaatctgcaaaggctgaactccagtacttgcaccaccatgctggtgttgctgcaagtgttggcctaaatgcaaaccctgtcgttaagctttctggtgtattcggaactaaaactgttgctgttggtgctgatgttgcatttgatacttcatccgggaacttaaccaaatacaatgctggactgagctactccacgtctgacttcgttgctgcagctactttgaacaacaaaggagacaagatcgccgcttcctactaccactcggtaagtccaaccacagctgttggaggagagctgagccacagcttctcgaccaacgggaacaccatcaccttcgggacgcagcatgccctggaccgtctgaccactgtgaaggcacgattcaacaactgcggcatggcaagcgcactgatccaacacaagtggaggcccaagtctttggtcaccatctccatggaggtggacaccaaggccatcgagaagagctccaagattgggctctccctcgtcctgaagccctgaggtcaccgccagcttcttgttttgggatatactaggtctattttttttaatctgcagctgaagtctccagcaaacaagattggactaaacctgtcaactttggtgccgatcccacaaactcaagttcacggtctctttggtggaaaactatgcggttttgtataccactgggtgatgatgtttggagaaagttcagtatggctcaccagtcaccactgtctctcagattttaactgtttgatttgtcgattctttattcatacagatcgcaatttttctca

SEQ ID NO: 150505 - DNA, 1366 bp, Zea Mays
ccgactcgacccttctcctctccgtcgcatttcccgtccggtctttccgttacccggcggctttaaaccctagttcccattccatcttcgtttccgctccgccgccgtcgatggagttctggggtctcgaggtcaaacctggatccactgtcaagtgtgagcctggacatggctttatcctgcacgtttcccaggctgcccttggggaatcaaagaaaagtgacagtgccttaatgtatgtcaaagttgatgacaagaagcttgccattggaacgctctctatcgacaaatacccacagatacaattcgatttggttttcaataaagagtttgagctgtcacacacatcgaaaactaccagtgtatttttctctggttacaaggttgagcagccaattgagggagatgaaatggatcttgattctgaggatgaagaggaggagctaaacattccagtaatcaaggaaaatggcaaagctgatgggaaggaggagcagaaaaatcaagagaaggcagtagctgctacagcttcaaaatcaagtcttggccttgaaaagaaaagcaaggatgactctgatgattctgatgaggatgagtctgatgattctgatgaggatgattctgatgattctgatgaaggcgagggattatctcctgacgaaggcgatgatgattcaagtgatgaggatgataccagtgatgatgacgaggaagaaaccccaactcctaaaaagccagaggcaggcaagaagagaggtgctgaaaatgctctgaaaacgcctctttctgataagaaagcaaaggttgccacaccgccagcccagaaaacaggtggcaagaagggtgccacccatgtggcaactccacacccagcaaaaggcaagacccctgcaaacaatgacaaatcaacggagaagtctccaaaatctggtgggtcagtcccttgcaaatcatgcagcaagacattcaatagtgagatggctctgcaggctcactccaaggcgaagcatggggccaaatgagttgcaggtccaactgagtccatgaaggagaagcatggtggccaagtgagtcgaaggtccattcgagtccatgaaggtgaagcatgggagatccaagcgagtctggaaagattgtcgatgttagtaggctgtccttattttgtttagagacttgtggctatgtgattgatgtagcgaaacaaggctgtgatgtgttaactctgccttataatattttggttgaacgtgctcgattgttgtgctttgaattggtgctttttttttgctatatggtgaggtctcgtatggattcttatgcggtagtggcactgtagtttgtcgcactggttttgtttgaacctgtg

SEQ ID NO: 150506 - DNA, 796 bp, Zea Mays
ctggaggggttgtttgaattatgaacatatctaattgtttcaaggcaaagctgatgggaaggaggagcagaaaaatcaagagaaggcagtagctgctacagcttcaaaatcaagtcttggccttgaaaagaaaagcaaggatgactctgatgattctgatgaggatgagtctgatgattctgatgaggatgattctgatgattctgatgaaggcgagggattatctcctgacgaaggcgatgatgattcaagtgatgaggatgataccagtgatgatgacgaggaagaaaccccaactcctaaaaagccagaggcaggcaagaagagaggtgctgaaaatgctctgaaaacgcctctttctgataagaaagcaaaggttgccacaccgccagcccagaaaacaggtggcaagaagggtgccacccatgtggcaactccacacccagcaaaaggcaagacccctgcaaacaatgacaaatcaacggagaagtctccaaaatctggtgggtcagtcccttgcaaatcatgcagcaagtaagtaggcactgatttatttggtgagcctatttggttatctggtgaaaaatcgatcaatgtattgatccttggtctctgtttgctgtctgtccaggacattcaatagtgagatggctctgcaggctcactccaaggcgaagcatggggccaaatgagttgcaggtccaactgagtccatgaaggagaagcatggtggccaagtgagtcgaaggtccattcgagtccatgaaggtgaagcatgggagatccaagcgagtct

SEQ ID NO: 150507 - DNA, 855 bp, Zea Mays
atggacggtgcccgagtcctgatcgccgccggtgccaccgccgtctgctgcttcgtctgcgccttctgggtcttccgttcctcttcgtcctcctcccccgcatccccaaagaagcaccaatccccttccaccaactgctgtggctgcgcctcctgcggctgccgcgacgccaagcccgccaacggcgagatggccgtgggtggggagaacaagaagaaggcgccggagccggatccgccggaggcgccctccatgatggagcagctcgtgcccgagatcaccacccacgcgctcagctacctcgactacaccagcctctgccgtctctccatgaccaactccgccatgcgccgcgcagccaacgacgacggcgcctggaaggcactctaccacaaggattttacggtggaacagggtactataaatcctcctaatggatggaaggcatactatgcagctacaaaagccatcattaatcttaacgcggagttctacaatatcatcagggaagggtccttgccagcaatgagtcgtttttggcttaatgcagactatgtcaagtgtattcatgcgactggggagttctgccctggatacaactcagtgatggagagctggggcctgctattcaactggggccaagatggagggcagggcattgggttccagataagggatgtccgtgtccgtgtgctcggtgagatggcatgggtgaacatgaaggcgaatgttgatgttgaccctttggtgttccatgtgacgaacgtgtacgagctctgtaatgggaggtggtatatggtccatcaccacagctcgctcatggctcaccctgctccgcacaatatgtttggttga

SEQ ID NO: 150508 - DNA, 174 bp, Zea Mays
atgccgcagtgcgccatggaacctcgcctccatcgtcgttcggaatgcgagtgcgggcctaagcgcttcattacgttcactgggtggtggtcgtggccgcacccagattcgagcttggctccaccggcaagagcgtcgtcacgggcaggaggcgccggcggcactgttcgttga

SEQ ID NO: 150509 - DNA, 2562 bp, Zea Mays
gctccctaccgcttgtccgtttcttcctctcccgaagtagcaacgtggtgagtgagaccgccgctactctgctgctgcggaggcccaagccgaccgctactcataccctttcgctttatccatcttctagcttcttcattcacctgttccagaatcgggccaggcttgcggatgccggggtgcggagtagcggggagagggggcgtgggggtgtcgtcggccgcacgccccactccgcgccgcccctgcctctggatgcctatcgctcgcggctacgggaggcaacctgagctgaaatattgcacatcatcacaaagcaagtctgtgttactaggagcaggatttggtcgacatgttactaggagcaatccttatctgctccaaaattccagtagcactacaatggcaagactgcaaaagtctgggcagtttcagcaacttgtcttggacccttcaagaaactatttgactaagacattctacaatgcaaacatgaagaggagagttctgtcgagggttgagtgttttgtgtcttcagatccaataaacaatggttggttgaaaccaaggaggtctgagaatttcactagcttggagagcgcatgtgtccagcgagaatacaaactaccagtcagaacacgtgctgactgtaaagcagagcagtatgaaataacaggatcacctttgagcccttctgatgctgatgctgttatgattggagacacaaatgagatttctccctggtggcaggagttcccaaagcgctggatgattgttctcttgtgcttctttgcgttccttctttgcaatatggaccgtgtcaatatgagcattgcaatccttccaatgtcgtcagagttcagctggagcccagcaaccgtcggtctaatccaatcatctttcttttggggttaccttcttacacagatacttggaggtatttgggctgataggtttggtggtaagctagtactagggtttggggttatatggtggtcaattgcgacagttcttacgccccttgcagccaagattggacttccatgcttactcaccatgcgtgccttcatggggataggcgagggcgttgccatgcctgctatgaacaacatcctttccaaatggatcccagtttcagagagaagcagatctcttgccttggtgtacagtggaatgtaccttgggtcagtcaccggcctggctttgtcacctctgttgattagcagatttggctggccttctgtcttttatgcatttggatcccttggaagcgtttggtttgcactgtggcaaagcaaagcacacagctctccagatgatgatccagagctaagtaaagctgaaaagaggcatatactgggtggcagccccttaaaagagcctgtcacttccataccatggaggttgattctatcaaaggctccagtgtgggctctcataatatcacatttttgccataactggggaacatttattctgttaacatggatgcccacatactacaatcaggttctgaagttcaatctaaccgagtccgggcttctctgtgtcttgccatggctgacaatggctgtcttcgcgaatattggtggatggattgctgatactcttgttcaaagagggatctcagttacaaacgttcgtaagatcatgcaatcaattggtttccttggaccagccttgttcttaacactgctgagcaaagttcgtactccagccatggctgtattatgtatggcatgcagtcagggtagcgatgctttttcacagtctggcctgtattcaaatcaccaagacattggaccacgttatgcgggggtacttctcggattgtcaaacactgctggcgtgcttgcaggagtttttggtactgcagccactggctacattcttcagaaaggttcttgggatagtgtgtttaaggtgtctgttgtgctgtacatagtaggaacggtggtgtggaatgtctttgcaactggagagaaagttctcgaataagctgtggacattcctatatgccaatatacgaaaattgtatgattttggtatacaaaggtaaatttaagaagagatacagctggaagaaaactccattttgtgcaagagatataccttcatctaatgtttgggctatcggaagaatgaaatcaaattagagtatcgtgtgaggtcaagaaggtactcatggaactggagaaacttcttgtacagaaagcaactgcaccaatggcacgtcagattttgcagctgtttcttgagaagtacaggcttctaccaagatcatcaatccacatatttttgttttgtttttaaaatacatggtagttaaatcgtgtttcaacttgcccttgattaaggcgctacagctactgccaactaaatgtagtattatgtgagctctttttcatcgagaattcctaattgtacctgcttcagataccttaaacgtctctgttccttgcgtcgttgctattatcgttttgtgtatgctgcataatgatattgcatggtgatggtgtcatttttttggcatcccggtgcctgaagaagagtagatttaat

SEQ ID NO: 150510 - DNA, 1928 bp, Zea Mays
gtttatacgttcagggctactattgaagcagactccacccggcgcgtcctcgtctcgtctcgtctcgcacgcacccctcactttccttgtcaatcgactcgcgatcgaatccgccccgaggttccaaaccctagctttctctcatcctccacgaaccctagatccaaaatctaacacacgtcatcctcttattatcgccgtgcttgacgcttctctctgcagtcgattccgccgcggaccgaccggttcacttcccttttctcccgagatctcgactctcgagcaagtatgggtgaggcgaaggacaacgaggtgtacgaggaggacctagtcgactatgaggaggaggtggagaatgtcattgatggcgcccccaccaacggctcctcagatgtcgtcaagaaggggtacgtagggatccacagctcggggttcagagacttcctgctcaagccagagcttcttcgcgccattcaggattgcgggtttgagcatccttctgaagtgcaacatgagtgcatccctcaagctattcttggaatggatgtcatctgtcaagcaaaatctggaatgggtaagactgcagtttttgtcctgtcaactcttcagcagattgatcctgttgctggccaagtagctgcacttgtgttgtgccacacaagagaattagcttaccagatttgccatgaatttgagaggtttagcaaatacctgcctgaattaagagtagctgttttctatggtggtgttcacataaaaaaccacaaggatctgctgaagaatgaatgcccccatattgtggttggcacgcctggaaggatactagctctagctagagataaggaccttcccttgaagaatgtgcggcatttcattcttgatgaatgtgacaagatgctcgaatcacttgacatgcgcagagatgtccaggagatcttcaaaatgactccgcatgataagcaagtgatgatgttttcagcaacactcagcaaggagattcgacctgtttgcaagaggttcatgcaagatcctatggaaatttatgttgatgatgaggctaaactgacccttcatggtctagttcagcactatatcaaattaagtgaggcagagaagaaccgaaagttgaacgatcttttagatgcactcgacttcaaccaagttgtgatatttgttaaaagtgttagtagagctgcagaactcaacaaattgctctgcgagtgcaatttcccctcaatctgtatacattctggaatgacacaggaagagaggttgacacggtacaagaacttcaaggaaggacacaagaggattcttgtggctactgatttggttggtaggggaatcgacattgaacgtgtcaacattgtcgtaaactatgatatgcctgattccgctgatacatacctgcatagggttggtcgggctggacgttttggtaccaagggacttgcaataacatttgtttcttcatctgattctgatgttctcaatcaagtgcaggagaggtttgaggttgacataaaggagctgcctgagcagattgacacgtcgacatacatgccatcttgatgatcgaggtgaaccagtgtttagtttgagctggaaaggagagcttgtttgaaatatacaccttagatcgctgttggacaaccttagcaccttgtttgaaagatgttccatttgtacttaaccagcagtctagtggattaagcagtaggcgtcgcaacagctgttacatgctacctaggattttatttgcaactctgtaatgttttctatgctccgactgctaattgttctgtttgagactgccctctgggtgcatgttttactagtaaattactcgcaccatgcccgagtcttcggagcatgtgtttacatatttaaaagagttgctacaaataggagaaaaatatattgaacat

SEQ ID NO: 150511 - DNA, 1826 bp, Zea Mays
gtttatacgttcagggctactattgaagcagactccacccggcgcgtcctcgtctcgtctcgtctcgcacgcacccctcactttccttgtcaatcgactcgcgatcgaatccgccccgagtcgattccgccgcggaccgaccggttcacttcccttttctcccgagatctcgactctcgagcaagtatgggtgaggcgaaggacaacgaggtgtacgaggaggacctagtcgactatgaggaggaggtggagaatgtcattgatggcgcccccaccaacggctcctcagatgtcgtcaagaaggggtacgtagggatccacagctcggggttcagagacttcctgctcaagccagagcttcttcgcgccattcaggattgcgggtttgagcatccttctgaagtgcaacatgagtgcatccctcaagctattcttggaatggatgtcatctgtcaagcaaaatctggaatgggtaagactgcagtttttgtcctgtcaactcttcagcagattgatcctgttgctggccaagtagctgcacttgtgttgtgccacacaagagaattagcttaccagatttgccatgaatttgagaggtttagcaaatacctgcctgaattaagagtagctgttttctatggtggtgttcacataaaaaaccacaaggatctgctgaagaatgaatgcccccatattgtggttggcacgcctggaaggatactagctctagctagagataaggaccttcccttgaagaatgtgcggcatttcattcttgatgaatgtgacaagatgctcgaatcacttgacatgcgcagagatgtccaggagatcttcaaaatgactccgcatgataagcaagtgatgatgttttcagcaacactcagcaaggagattcgacctgtttgcaagaggttcatgcaagatcctatggaaatttatgttgatgatgaggctaaactgacccttcatggtctagttcagcactatatcaaattaagtgaggcagagaagaaccgaaagttgaacgatcttttagatgcactcgacttcaaccaagttgtgatatttgttaaaagtgttagtagagctgcagaactcaacaaattgctctgcgagtgcaatttcccctcaatctgtatacattctggaatgacacaggaagagaggttgacacggtacaagaacttcaaggaaggacacaagaggattcttgtggctactgatttggttggtaggggaatcgacattgaacgtgtcaacattgtcgtaaactatgatatgcctgattccgctgatacatacctgcatagggttggtcgggctggacgttttggtaccaagggacttgcaataacatttgtttcttcatctgattctgatgttctcaatcaagtgcaggagaggtttgaggttgacataaaggagctgcctgagcagattgacacgtcgacatacatgccatcttgatgatcgaggtgaaccagtgtttagtttgagctggaaaggagagcttgtttgaaatatacaccttagatcgctgttggacaaccttagcaccttgtttgaaagatgttccatttgtacttaaccagcagtctagtggattaagcagtaggcgtcgcaacagctgttacatgctacctaggattttatttgcaactctgtaatgttttctatgctccgactgctaattgttctgtttgagactgccctctgggtgcatgttttactagtaaattactcgcaccatgcccgagtcttcggagcatgtgtttacatatttaaaagagttgctacaaataggagaaaaatatattgaacat

SEQ ID NO: 150512 - DNA, 692 bp, Zea Mays
ctgctggaggagaatatggtatagctttccattaatgggacaagaacgttgatttttttcttactggggtgctgctccaactttatttggttccacatcagtgcaacatgagtgcatccctcaagctattcttggaatggatgtcatctgtcaagcaaaatctggaatgggtaagactgcagtttttgtcctgtcaactcttcagcagattgatcctgttgctggccaagtagctgcacttgtgttgtgccacacaagagaattagcttaccagatttgccatgaatttgagaggtttagcaaatacctgcctgaattaagagtagctgttttctatggtggtgttcacataaaaaaccacaaggatctgctgaagaatgaatgcccccatattgtggttggcacgcctggaaggatactagctctagctagagataaggaccttcccttgaagaatgtgcggcatttcattcttgatgaatgtgacaagatgctcgaatcacttgacatgcgcagagatgtccaggagatcttcaaaatgactccgcatgataagcaagtgatgatgttttcagcaacactcagcaaggagattcgacctgtttgcaagaggttcatgcaagatgtaatgtcctatggtctaacttatttcaattgcccatcctcctatctacgtctcccctttcctcgag

SEQ ID NO: 150513 - DNA, 675 bp, Zea Mays
gttggacaaagagaagaaaatcctctccattcgggataggggtattggtatgaccaaggaagatcttattaagaaccttggaacgattgctaaatctggcacttcaggtacttcaggtactgccttttcatctttccagctgattactgcactcataatatttgtttatgagtgcaggaacaggagctgctcgagtctcttgtcgaagctgatacggcaggaaagagctaaaaagatggaagaaaagaaagtgtatctgcaactatacgaagcaatggaggcgttggtcaagatcaatctggagaccaacaagatcatggacttcatcaagtttgacgtcggcaacgtggtcatggtgactggcgggaggaacaccggacgtgtaggagtcatcaagaacagggagaagcacaagggcagctttgagaccatccacgtgctgcttggagctttttgctatgtctagttttctcctatttgttgtacatgaaaacatagaatagaattcaaatttggtggtcgcaaaagtgtggagactttaattcatacaaagttaggcttaacattagtgcaaacagttgtattttagtttagatttagagtacacttatgtatgcattgtttgacaatgtttatttatgatatattgaatggtacttaattatattatattaa

SEQ ID NO: 150514 - DNA, 406 bp, Zea Mays
gtgtaggctgggcttgtgccgagcttgaatcctcttgtgaaggagtttctcaatgctgctgatgacaagcggaaggaagtcctctctaaaatagaagaggatgttgctaagctcagcggttctgcagccaactaagaagctacaagtgaatgccgaggagagcagcgatgacttggctaacccaccgaaggtagaggagaagcttggtgctgtccctcatggcctgtccaccgactctgaggttgcccagagggaagccgagtctatctctaggaagactctcaggagctcagccgagaagtttgagttccaagctgaggtttccagactcatggacatcatcatcaactcactctacagcaacaaggatatcttcctgagggagctcatatctaatgcctctgat

SEQ ID NO: 150515 - DNA, 2690 bp, Zea Mays
tgccgctcacctgggctcatcttccagccgccctctccgcccagcagcagagcacaccatcctctcaactcggatccccaagccctcgcctccagctcttgccacggcatccatcccctgctcggacctccacccggccgcgtcctcgccggtggccagcgccgctgcatcgcccttcctagcgtcggccttggcaccgcttccccgagtgccccagtcgagctcgcccatcctctgctctagccctttctccacgccgtcgctgagctcgcccctcccctcagccatggacacgacgacctgcagcccttcttggtggccaagcccatcttcctgctcgcgccccctctttttccacctctgcgcgtatcagctcgtccaacccccatggtgtttcctccctctcggctcccttgctccctccccatggcgttccccctggatgttggtgatctgttccccacggtgcaggcaaatgttctttccctccctgcagcagcaccttggtggttgtcaagcagcacgtcgcgcttgcgcagcctcggtcacgacgttgttcaccccgctaaccattggtgtcatacctcatgtgtcatgtgttcgccgaaatgcctaaacatgtagtctgtcgtcgtcgtatccacagtcaattttagtcatggtgagccgatttacttttgttattagttggttagttggtgaattgaatatgtattagtcacgatggttttcttgttcatagcgtcagtgtgttgtgtgacgattactagatctgtagccgtagttttgtgctaatttcatatgtgtgtactgtgtagtatgggagagatattccaggtgtttaataacttggggggcatagtcctagcgtgacgctcctcatgtgttcggtgatacacgtaaaccagacagcatcgttgatttcatcatctcaagtcaaatttagttttggtgtgccatgaagtaatctcctgatctataaaggtttcctgtgtactgatcctccacaacctttagggaagtatgggtcgaaagtgactaaattggttctatatgttataagtggtctatcggtgatgtgtaggttgggtttaatgtcttaagcaactcaccgataagctctattactattgattacattaaatgtattgattttatgaagctgaagttctgtcttagtcctcattatcttctaatgtttggtttagttctggattgcttatgactttattttagtctagccgagtatgactactctttcgtttattacacaagttccttagttaattgctaggcaagtgtgatgatatgttgtatgaaatatgcttggtgaacgcatatgcattgatatgattgtgttaataaaccatgaagggtagagttttgtttatggataaattacttatacaaagaacatgttaacacttgctgtttggactgcaggtatcattttagttacgtaggtaattgagtgaagtaaaccatgttttatgtaaacgtgttatatagaaaagttatagataactactttatcttgctggtgctaaaatttcatgaccataggtctagtagtttaaaagatatgattttcttaagtccagtttcagaatctgtctaaattctgtacatgtttcaaaaattggattgtttggctaagttaaattgagaatcagtcattagtaattataggagaattgtagtactttccttaacctttccaacaaattttggatcaccctttttggtgatctataaattaagttacaactgtttgagttaggatctctgaatctgtcccaatttggacagcagagcctttctcatgttttctgactttgatatatattaaattaacctaggatgttcataaatgaattgtagataattctattatctttctaaaaagtctaggatcacctgatttggatgtctgaaactccagttatgattttttgaagtaagtagtcgaattctgtccaaatctggacagaatttacgtttagcattgtttgaccattctaagtgtcaagtctcactatgatgataatacaaaagttgtagaggactttataagctttccaaaaagtcttagtttactatttttggatgaagattgtgtaagttatgaataaaacaactagctactgttctgctgtccaaaatcagcaatgattaaaatgattacttggagtttcttttgtaaggatacctatatttggttagttcttgattggttgattggtagtcttgtggttttaagtgttacgtaagttccttgtaattttgtaataaagtttaggttataaatacctgtgtttcataaaagttgagtatgattaactccaagtgtgtgattgttatggggtcaaagttagctagtgtttgctcatataaatatgactactctttcgttttttacacaagttccttagttaattgctacacaagttccttagtgaattttcaaagaagttctgaactgttcagagttccttgtttgttcactaaccatcctctttgtcaatcttctttgaaaatttgctttcctcataggcttccatttgttagtaaatctgcacttttaggagactcggagttcgtcctagatgcaaaagtaccttgctggttatggagaggtcagctgaaggttggaggtttgactatgttcgttgtttttgatatgttatatg

SEQ ID NO: 150516 - DNA, 662 bp, Zea Mays
tgccgctcacctgggctcatcttccagccgccctctccgcccagcagcagagcacaccatcctctcaactcggatccccaagccctcgcctccagctcttgccacggcatccatcccctgctcggacctccacccggccgcgtcctcgccggtggccagcgccgctgcatcgcccttcctagcgtcggccttggcaccgcttccccgagtgccccagtcgagctcgcccatcctctgctctagccctttctccacgccgtcgctgagctcgcccctcccctcagccatggacacgacgacctgcagcccttcttggtggccaagcccatcttcctgctcgcgccccctctttttccacctctgcgcgtatcagctcgtccaacccccatggtgtttcctccctctcggctcccttgctccctccccatggcgttccccctggatgttggtgatctgttccccacggtgcaggcaaatgttctttccctccctgcagcagcaccttggtggttgtcaagcagcacgtcgcgcttgcgcagcctcggtcacgacgttgttcaccccgctaaccattggtgtcatacctcatgtgtcatgtgttcgccgaaatgcctaaacatgtagtctgtcgtcgtcgtatccacagtcaattttagtcatgg

SEQ ID NO: 150517 - DNA, 2783 bp, Zea Mays
gcatcgtcctcgtcgccgccacagagcccctcgtctcggccgcccttcgccgcctccgcggagcaggcatcgcaggagaccaaagatccggccagctctgatgtcaggagctagtggctcaaccgggcgcgcggccccgcggtacgccccggatgacctgacgttgctcaagccgtggcgcggcctcgtcgacggcaccaccggctacctgtactactggaacccggagacgaacgtcacgcagtacgagcggcctatgccccctgagaatcagctgcccccgcccccgcccccgttgcctcccccgcctccccggagccgcgaccggcgcgacaggtccagatcccgatcccgcacccctcccaggcgcgaccgccgcgaccgcgaccgtgacgacgagcatgcgtcctccaagacggcgtcttcccaccaccatccggctccgatagccgtcgccgactatccgtccaccgaggcataccgacgccgccatgagatcaccgtcacgggggataacgtgccggctccaataacttcatttgaggctggtggcttcccatcagaaattctgaaggagatacaacgtgctggatttgcaagcccaacacctatccaagcgcagtcatggccaattgctatgcaaaatcaagatgtagtagctattgcgaagactggatcaggcaaaactcttggttatctacttcctggatttatgcatatcaagcgcctgcagaacagcactaggaatggtccaacagtgctagttttggccccaacaagggaacttgcaacgcagattctggatgaagctatgaaatttggaagatcatctagaatttcttgcacgtgcctatacggtggtgctcctaaaggtcctcagttgagagatttagatagaggggttgatgttgttgttgcaacacctggaaggttaaatgacattttggagatgcgaagggtaagtcttaagcaagtgtcatatcttgttctggatgaggctgatcgcatgctggacatgggctttgagccacaaatacggaagatagtgaaagagatacctcaccgtcggcaaacccttatgtacaccgctacttggcccaaggaagtccggaggattgcagatgatcttcttgtccatcctttacaggtgacaattggaaatgttgatgaacttgttgctaatagtgctattactcagcatatagaagtcataacaccctcagaaaaacaacggcgcctggagcagatattacgatcccaggtttcaggttcaaagatattaatattttgtaccaccaagaggatgtgtgaccaacttgcaaggacactcaccaggcagtttggagcttcagccattcatggtgacaagtcccaaagtgaaagggagaaggtcctgaatcattttagatctgggcgctctcctattttagtggcaactgatgttgctgcgcgaggtttggacatcaaagatatcagggtagtgatcaactatgacttccccactggtgttgaagactatgttcacaggattggcaggacaggaagggctggtgccactggtgttgcatatacatttttctgtgatcaggactcaaaatatgctgctgacctaatcaaaattcttgaaggggcaaaccaacaggtgccccgtgatttagaggatatggcttctcgtggtggtgggcgaggtaagaagaggaaccgttgggcatcccgctctgaaaggggtggtccacgatctgaactggattcaaggtacagcggcagagatggattagcatcttccgggagatcagagagtggtcgtggcagtcatggaagggatgattatggtagccgtggcaggtatgactctggtgaaactgatgggcgatctcgtaggtctgctagaggtcgcagtagaagtcgtagcccaagccccaagaggtcacaccatcatgaagctaggcgtagccgaagcaggagcaggagccgaagctgtagaaactttcgtgctagccgcagcaagagtcacagccctgttgctagcagtaggcatgaaaaggctgctgttatttcaggatctactcaacctaacttggggtatgcagagcacaaaagccctccaagatctcactctggggatgaccatgtgaaccaccctgatcaaaaggatgaccacatgggagatgggaagatggaaagggttgatcttgatcgctcgcccagcccacaatatgataagtctgctccatatagtcctgcgtacaatggcaaagccagtgactcgatgagccctaatgttcagccaaaggcagatgccaaatatgtcaaaccttctgggaaacctgagcctgcatctccattgcgccacagcaaaggcagagatgatgatgaaggtatcatagacgacgatggagagattgctgagggtgagatgatgatgaaggtatcatagacgaggatggagagattgctgagcgtgatttgcgtgcaagtgcagctgtgtagagaatggtaataactgacggagaatggcctgcatcttctgtgacaacaagactgttatgcaaactgcagtcgttcccatctgcaagagtccagaatgtagaaatgcatttgtgccattaaatgtctcgtaggacctatgataatacatctgccatatatgaacaaaaactgttgatgtatgtcctgttgtttgttaaacttcaatgacttgtgttctggtgtcttactgctagttctgttaagtgatttatgataaaacatattgtcaggtctggaagtgataaatttatgat

SEQ ID NO: 150518 - DNA, 1259 bp, Zea Mays
cgagccatcctagttccttcctctcgtgactaacacctcacctcctccggcgacgcacgcagcccccggcgtgcgctcgcctatctccaatcatccaccgcgccgccgcagaggcctcgtcctcaccttccccgtaggaagccgaagtacagccagcagcgtcgccatcagcaccgatcatggccgactacgagcaggagcaggatatggaggtggaggcactgcaggccatcctcatggacgacatcaaggagatcgacccgagtgagagtgggatcgccaccaccgcccggtgcttccagatcctactctctcctcaggatgatgattttgatgagtcagcttatgtcccagttcaactggccctgatttttgcgcacactgagaagtaccccgatgaacctccactactaaatgtgaaaagtgtacgagggattaaaccacatgatcttgcatccctgaaggaaaagcttgagcaagaggcaaaagagaatcttggcatggctatggtctacactcttgtttcatcagccaaagagtggctaagtgagatatatggtcagaatggtggtgacgaggaacctgaagaaactgaagcagaagaggaggttattataccacatggtgaagctgttactgtagagagctttttggcgtggagagaccgatttgaagctgagttggccttacagcgtgctaaacttatgccagattcagctcttacatcctcaaaggaaaagaaactcacaggacggcagtattttgaaagtggaaggcatgcagtgaaaggagcaagcacagttgctgatgaagatgaagaagaggaggaggatattgaattcgatgatgattttgaagacgatgaagaggacatgcttgagcattatctagctcaacaatcagagaactcagcagcttaaccttctaggccaaacaaagtaccttttcgggcgcagctttaccttaggaagccaaatgttgttatatgttgcaactgtagctctagcgcgcactatttttttatgtttctcatcatttggttgtatttgtggatgctttctagttttatcaagggggctgtgggttctcattaatatatacgctggagagatagaagatcaagctgcctaatacttcgctgtataatttactgtatttttgatcggctactacgtgtattttggcttgtggagcatgttgcgtgtttgggacaagtaatttatggaaagatattcaatactcctatctctaaaaacata

SEQ ID NO: 150519 - DNA, 1133 bp, Zea Mays
cgagccatcctagttccttcctctcgtgactaacacctcacctcctccggcgacgcacgcagcccccggcgtgcgctcgcctatctccaatcatccaccgcgccgccgcagaggcctcgtcctcaccttccccgtaggaagccgaagtacagccagcagcgtcgccatcagcaccgatcatggccgactacgagcaggagcaggatatggaggtggaggcactgcaggccatcctcatggacgacatcaaggagatcgacccgagtgagagtgggatcgccaccaccgcccggtgcttccagatcctactctctcctcaggatgatgattttgatgagtcagcttatgtcccagttcaactggccctgatttttgcgcacactgagaagtaccccgatgaacctccactactaaatgtgaaaagtgtacgagggattaaaccacatgatcttgcatccctgaaggaaaagcttgagcaagaggttattataccacatggtgaagctgttactgtagagagctttttggcgtggagagaccgatttgaagctgagttggccttacagcgtgctaaacttatgccagattcagctcttacatcctcaaaggaaaagaaactcacaggacggcagtattttgaaagtggaaggcatgcagtgaaaggagcaagcacagttgctgatgaagatgaagaagaggaggaggatattgaattcgatgatgattttgaagacgatgaagaggacatgcttgagcattatctagctcaacaatcagagaactcagcagcttaaccttctaggccaaacaaagtaccttttcgggcgcagctttaccttaggaagccaaatgttgttatatgttgcaactgtagctctagcgcgcactatttttttatgtttctcatcatttggttgtatttgtggatgctttctagttttatcaagggggctgtgggttctcattaatatatacgctggagagatagaagatcaagctgcctaatacttcgctgtataatttactgtatttttgatcggctactacgtgtattttggcttgtggagcatgttgcgtgtttgggacaagtaatttatggaaagatattcaatactcctatctctaaaaacata

SEQ ID NO: 150520 - DNA, 1636 bp, Zea Mays
tacaaaattaatatatatgttttgtatgtgtctagatttatcataatctatttgaatatagatataaaactaaaagctaaaacgaatactaattctaagagtatttagaagttaaggtataaaattaaaactttgaatatttttgtatttttatatataaaaataaaaaagttatcaacaaagactgccaattcttgggcctgggcccattagtggattggcccatccacattgagcgagccatcctagttccttcctctcgtgactaacacctcacctcctccggcgacgcacgcagcccccggcgtgcgctcgcctatctccaatcatccaccgcgccgccgcagaggcctcgtcctcaccttccccgtaggaagccgaagtacagccagcagcgtcgccatcagcaccgatcatggccgactacgagcaggagcaggatatggaggtggaggcactgcaggccatcctcatggacgacatcaaggagatcgacccgagtgagagtgggatcgccaccaccgcccggtgcttccagatcctactctctcctcaggatgatgattttgatgagtcagcttatgtcccagttcaactggccctgatttttgcgcacactgagaagtaccccgatgaacctccactactaaatgtgaaaagtgtacgagggattaaaccacatgatcttgcatccctgaaggaaaagcttgagcaagaggcaaaagagaatcttggcatggctatggtctacactcttgtttcatcagccaaagagtggctaagtgagatatatggtcagaatggtggtgacgaggaacctgaagaaactgaagcagaagaggaggttattataccacatggtgaagctgttactgtagagagctttttggcgtggagagaccgatttgaagctgagttggccttacagcgtgctaaacttatgccagattcagctcttacatcctcaaaggaaaagaaactcacaggacggcagtattttgaaagtggaaggcatgcagtggttcgttatcccagataataaaacctttccttaaggcttgtttggatgcactcgtatttagttatttacatcaattcatgtctgtgttggagctacgtatgtgtcttttacgttttactttacatgaaaccatcttttcagaaaggagcaagcacagttgctgatgaagatgaagaagaggaggaggatattgaattcgatgatgattttgaagacgatgaagaggacatgcttgagcattatctagctcaacaatcagagaactcagcagcttaaccttctaggccaaacaaagtaccttttcgggcgcagctttaccttaggaagccaaatgttgttatatgttgcaactgtagctctagcgcgcactatttttttatgtttctcatcatttggttgtatttgtggatgctttctagttttatcaagggggctgtgggttctcattaatatatacgctggagagatagaagatcaagctgcctaatacttcgctgtataatttactgtatttttgatcggctactacgtgtattttggcttgtggagcatgttgcgtgtttgggacaagtaatttatggaaagatattcaatactcctatctctaaaaacata

SEQ ID NO: 150521 - DNA, 1349 bp, Zea Mays
tacaaaattaatatatatgttttgtatgtgtctagatttatcataatctatttgaatatagatataaaactaaaagctaaaacgaatactaattctaagagtatttagaagttaaggtataaaattaaaactttgaatatttttgtatttttatatataaaaataaaaaagttatcaacaaagactgccaattcttgggcctgggcccattagtggattggcccatccacattgagcgagccatcctagttccttcctctcgtgactaacacctcacctcctccggcgacgcacgcagcccccggcgtgcgctcgcctatctccaatcatccaccgcgccgccgcagaggcctcgtcctcaccttccccgtaggaagccgaagtacagccagcagcgtcgccatcagcaccgatcatggccgactacgagcaggagcaggatatggaggtggaggcactgcaggccatcctcatggacgacatcaaggagatcgacccgagtgagagtgggatcgccaccaccgcccggtgcttccagatcctactctctcctcaggatgatgattttgatgagtcagcttatgtcccagttcaactggccctgatttttgcgcacactgagaagtaccccgatgaacctccactactaaatgtgaaaagtgtacgagggattaaaccacatgatcttgcatccctgaaggaaaagcttgagcaagaggcaaaagagaatcttggcatggctatggtctacactcttgtttcatcagccaaagagtggctaagtgagatatatggtcagaatggtggtgacgaggaacctgaagaaactgaagcagaagaggaggttattataccacatggtgaagctgttactgtagagagctttttggcgtggagagaccgatttgaagctgagttggccttacagcgtgctaaacttatgccagattcagctcttacatcctcaaaggaaaagaaactcacaggacggcagtattttgaaagtggaaggcatgcagtgaaaggagcaagcacagttgctgatgaagatgaagaagaggaggaggatattgaattcgatgatgattttgaagacgatgaagaggacatgcttgagcattatctagctcaacaatcagagaactcagcagcttaaccttctaggccaaacaaattttatcaagggggctgtgggttctcattaatatatacgctggagagatagaagatcaagctgcctaatacttcgctgtataatttactgtatttttgatcggctactacgtgtattttggcttgtggagcatgttgcgtgtttgggacaagtaatttatggaaagatattcaat

SEQ ID NO: 150522 - DNA, 477 bp, Zea Mays
gcgagggtttgtacggacatgctgccgtctgggcggccgaggagcttgataggtgtgccggcagagcgcggcgggatgacgatgttctcgggaagctcgcccatgccgaggatccggccaggccaccaggatccgttacggcggcgcacccagacgagcgctccgacctcggcgtccggccccgtcacgccgccgggccactcctctcccgcgcagctccccatcaccctgtatgtatgcaacccctatctcaccaccaccaccaccaccaccaccaccatcgcctctcctctcgctcctcccccaactaaagtcaataaacctcctttttcttgtccaagagatcaggaagagccttaggaaccgagaaacggcttgtaggagatggctctgcgagcccgggtagcggcgacggctgcctcctggaggcggtggttctcagtgtgcaggtggggagaagaggtggaaggagcggag

SEQ ID NO: 150523 - DNA, 2210 bp, Zea Mays
atattttctgtctgtagcactgaacatcatcagtctatcttacttgctgtgttggactttgccacagtgactggtataatcttgagaaatctaaacgtgtgaagtcatttcgttgtggagaatatgatgaatgtatagaaaaagccaaggctctagttcgccggcaaaagaagacacatactgaagggagatatgttcgcagagaggatgccattatgcatgcccttgaaatcgaaaggtctcattttccaaataactgtgatgatcttgaagaggacgcggacaatgatatatgtgcatcccagaatatatgttctgcaaagtctataaatataaatgggctcagcaaaaaatctcgtggtgcaaggagtttgtatgatatagaaataaattcagctcaagagttgtctcaaacattgacactgtataaacagccacaaaatttatcctcttcaagcactaggtatgcatcgtcaaaaaggaagaagtggaagggacataaagatcatgaggatgattcagttcatggattccagcgtatgagagatcttagggagattggaacaaaaaatgttttcaagcagaagtctggttcaggaattgtttcagatgtacctcttcttgaaagtggatcaagctttggctatgatttgtccagtgccgatgggataaaattgggtgagcagtcccagtcatccataaaaaagaaacggtccaatattgggcaatcctatgatagtttgagtaagaaagataagcatcaccctctatcactgttatgtgaagattcagaagtgtctggaacttattatcattgggacccttcaggccagtcttgtagtcaatacccaggaggccagatacccaatttggttgaatcaagtaggagggcaaaaactatttttccaactgatgtaaataactgttcctacagctcaggcacttcaagtttggatacattattagatacatcacacatcaatcataaacgttctctaaatgctgttactcccaagaatgctgacccatgcacagctagatttctcaatgatgactgccctgattgtgatggatttcttgatgctgttactttggaggaggatgttctagaggaaggccatttggatacttatggatcttgtgcatccataaaggatcaaatttcaaaactgggtaatcaaagtactggctgtggcataggtggcacatcttcaactcggcataatcgaaattctaagaaaaacataacggctgtcaattttttgatacctaaaggaagccacaagagggatacaaattcgctgctgcaacatgaagggattataaaatcggaaggtactgtctttaggcctgctgaacttgaggataatgcacatgtgactcctgagcatgacgagtcctctgaaactataagcaatctttcaaactatgagaagaacacaacatcattccccaattatgttccacttcaattactaccaccgcctggacagcggcctgatcctaaacctccaggatgccctgtaacgaatccaaccaggagagcacgtgcagattatagactatatgatgttgaggtgactgtccaaagaagctacaagggtcatcatgcgccccttatttccctcatgagtaaatggacaggtaaaccaattgtggggtaccctgtcaccctggaggttttgaaggatagccgtcacacaacaagtagagatgagcaccgcccggtgatgggcagtctggactccttactaaagagcagagtttcagagccacggcaagcaagatcttcacatgcatcacgatcaaaatttaaatccagtggacgtaaaaaggccacagagcatgatttggacaggtcttggtggccccataccaagaaaccagcatcttcgccgaggaaaatgcggaggctatcatctttcgccggcagccggagagagagtgcagaccaaaagcccgtagttgcaaaaactggcggaccagcagtcgcgtgcgtcccgcttcgtctcgttttcagtaggatcaatgaagcactaagctttcccttgagacaagaaaagaccacctgaggttgttgtggcatttttgctatgcagagatagaatgtgggcaggcatatacatttgctaggttttctttgtatattagttttgtattatctaaaaacttattgtgtggtatatttatatccggtacataactatgca

SEQ ID NO: 150524 - DNA, 1415 bp, Zea Mays
atgggagcgaccaaggatgtcctgtccctctacgccgtgaaccatctgtgcgccgtggcccaacttttctccacgtccgctggagcggaggcccaggcaagcgacaaactgtccaaccctaaacaactgggcccgtttgtagcggagacaaagcaaccaccacctccggagacgcgggtggcgtggccttcgtggttcgtggcgttgctgtcctggccggctggaccgggctggcaggcaaaggtaggatggccgacggcgcacgcagacgctacggagacgtgccccactcgacaacccagtcttcccctattcctcctttcctctcttttcatttcccatctctctctgcgccgtcccgtgctccctccgctagttctcccaattccttccccacctcctcggtcgtcgcttcccccagagagcaggagccgcctcgtccctgccggtcccgaccccgacccccatcccgtccgcgtccaacgccatgaatcccgagtacgactacctcttcaagctgctcctcatcggggactccggtgttgggaagtcttgcctgctgctgaggtttgcggatgattcatatctggagagctatatcagtactattggagttgattttaaaatccgcaccgttgagcaagatgggaagacaataaagctacagatttgggatactgctggccaagaacgctttaggaccatcacaagcagctactaccgtggagctcatggcattattgttgtgtatgatgtaactgaccaggagagctttaacaatgtcaagcagtggctgaatgaaattgataggtatgccagtgaaaatgtgaacaagcttttggtggggaacaagtgtgacctggctgagaacagagtagtttcttacgaggctggcaaggcccttgctgatgacatcggaataccattccttgagactagtgccaaggatgcaacaaatgtggagaaggcattcatgaccatggcaggggagataaagaacaggatggcaagtcaaccagctgcaagtggtgctagtaggcctgcaactgtgcaaatgcggggtcagcctgtttctcagcaaagcagctgctgctcttgatcgtctgtctagatcacagtagtgtgattgtgcagcaagcgaaacttaaattggttgctccgtgtacattaagcctattactgtcccaaagaactcgatgttatctatcggatactggaagtctgtctatcgactgcaacgcttaagcagatatggcctgttttatctgcctgttcttattccagtgctaatgtgatgttggatcaaatcgtttgtcagttcagcagtacgctaatgatgcgtgtgcgctggagtcaggaggatattattttgatgatgagcactcgttaaactgtctatgttgtctcaacgtagc

SEQ ID NO: 150525 - DNA, 797 bp, Zea Mays
taataagtgcttgttatgatcatctgttttattgtgagcatctttcttatcatttactttacaggatgattcatatctggagagctatatcagtactattggagttgattttaaaatccgcaccgttgagcaagatgggaagacaataaagctacagatttgggatactgctggccaagaacgctttaggaccatcacaagcagctactaccgtggagctcatggcattattgttgtgtatgatgtaactgaccaggagagctttaacaatgtcaagcagtggctgaatgaaattgataggtatgccagtgaaaatgtgaacaagcttttggtggggaacaagtgtgacctggctgagaacagagtagtttcttacgaggctggcaaggcccttgctgatgacatcggaataccattccttgagactagtgccaaggatgcaacaaatgtggagaaggcattcatgaccatggcaggggagataaagaacaggatggcaagtcaaccagctgcaagtggtgctagtaggcctgcaactgtgcaaatgcggggtcagcctgtttctcagcaaagcagctgctgctcttgatcgtctgtctagatcacagtagtgtgattgtgcagcaagcgaaacttaaattggttgctccgtgtacattaagcctattactgtcccaaagaactcgatgttatctatcggatactggaagtctgtctatcgactgcaacgcttaagcagatatggcctgttttatctgcctgttcttattccagtgctaatgtgatgttggatcaaa

SEQ ID NO: 150526 - DNA, 999 bp, Zea Mays
atgggagcgaccaaggatgtcctgtccctctacgccgtgaaccatctgtgcgccgtggcccaacttttctccacgtccgctggagcggaggcccaggcaagcgacaaactgtccaaccctaaacaactgggcccgtttgtagcggagacaaagcaaccaccacctccggagacgcgggtggcgtggccttcgtggttcgtggcgttgctgtcctggccggctggaccgggctggcaggcaaaggtaggatggccgacggcgcacgcagacgctacggagacgtgccccactcgacaacccagtcttcccctattcctcctttcctctcttttcatttcccatctctctctgcgccgtcccgtgctccctccgctagttctcccaattccttccccacctcctcggtcgtcgcttcccccagagagcaggagccgcctcgtccctgccggtcccgaccccgacccccatcccgtccgcgtccaacgccatgaatcccgagtacgactacctcttcaagctgctcctcatcggggactccggtgttgggaagtcttgcctgctgctgaggtttgcggtgaggatcccgaccttccctttcaccacatatgagaagacacggtcttctttaactttgaatgcattctccattaccacaccgggaggaaaatgtccatatacctaagaagtgtttttttttttgtttagttttgatgcatctcctactagggtagatggaatgctgttcttcaaggcatggtgttagagtggtgtatgactcacacttatgtcaaatggcttttgacatgatatagacattgttaccataacttattgtgaatgaccccttggcatgcattttgcagtcccgttcctggctgaatagtttacttatatagacaaaatgttgctttggtccagtatcaaatattgacctgtcaagtgtagatttctgatcaactttggaaaaatagtcaagtttcaaattcttatctcaattac

SEQ ID NO: 150527 - DNA, 381 bp, Zea Mays
atggctaaagcgataggaggacaaaaaatgaaccctctggcttccacacttgttttaatatggcaccgaatacgagaaaatgagaagcacaaaacctataaggcatggaacctgaatgagttctatgttggggaagatggcggcgaagcgctcggcgacctcccggctgaggggcgcgccgccgatgccgatgaagaggagggaggagaggtcgcagtggcgcgcatcctcgggggcgtcacgggcagcagcgtgacgcggtaccgctcgatggcgcgcagcgctgcgatgaagtcgaatcggtccatgaggatggcagtctcccccatggccaccgacctcagcccctggattaagcatgtcctagttaagaaagtgtag

SEQ ID NO: 150528 - DNA, 1374 bp, Zea Mays
gacggcgaggtgcagagctcctacgggctccgccatcaacactatggatacactccaagaggccccttcagctccattggaggctacagctgccctctacactatacagtttacagtatatttcttcttctcggaggaggatgaacagatttccagcaccctgttttcaacaccgaggaggatgaacattctacgaaatcaaaaggaccccttaagttctacaactcggagatccacacgacatcattctgtttgtcctcttttgcaaagagggtaattgagtcaaaggcagtgtaccgaggcacctcccattggaatggcgagtgctgatctgaatgggagatatttctattactgagattcagactccaatacaatataggtgggtgtaccaatttacttagaaggaacaaaagctatggaagaggcaaaaatcaagaatattgaaagctgactgtaccagaaggttctttttgcaacctcaatttgagatttaaggtcggattaccaccagaggcagtatacaatatcataatcgaggcgggcaacaagggcttgtggatgctggacatcctcaagaagttgctgatggcccccaacatcgccaccaaggtcgtgcgcaccctcgtggcaagcgggcttctcaaagaggtcagcgacgtgcgccaccgcagcaggaagatcttcatggccaccgacttccagtccttcgccgagatcaccgggggcacctggtaccacgacggtcgcctagacaccgacgccgtaagcaccgcgcgccgctgctgccaggcgcaggtcgagaggctcggcgccgcgaccgcgcagatgatccaccacgacattctcaaggaagaccccagggccgggtacactatcgacaaggtcaaggatatcatcaagaccatggtgctcgaagaggtcaagagcaccggcacgcgggattttagcgccgttatggccggcacaatgtgctatcggctggtgactggggctccgcagggagggatgatggagggaatccattgtgggatttgccccaggactcatgagtgctcgccggaggggatcatctcacccagcacctgcgtttactacaagaagtggttgcagatggacttctaggcggtgacgatgagccctcttctgtccatcgcgatggggtgttggattgtgatactcatattaataatcatctctatagttatttctacttagtccttttagcttggtataatcattcatatgtatttattccaccaagtttagatgtctttactgagtaccatatcaacttcctaaatatttaggtaatcggcaaacctttcagctcttctatctactgaagtcatgtattgagcatgtgaacccaaa

SEQ ID NO: 150529 - DNA, 1272 bp, Zea Mays
ctcactgcgcgttcgcattcgccaattccgccgcctcctcctcctcctcccctgtgtccgagatctcgcatccgctccatctatggaaggccaccacacgccgtgcccagccatcctcggattccgccaccccatcctcggattccaagcgtcgtccaccccacgtgcccctgcccgacgaccccgttcctcgcggcgcttggcttcagcgccgcgaccgccgcgccatccccacccagcacccatccgcaaacccactcccatgactgcccccgcctgaagaccccgttccccgcgacttcggtgccgcgaccatcgcgccatccccacccatccgcaaccccgctcccccgccgcgccatccccacccattcacaaccccatcccctgccgcccctcacgtgatcacccattcgcgacctgccccctcccctcccccgatgggacagggagcagcaaggtcaccaccggagacgacctcgatgggtggcggcgccgaggacggaggtggtgtcacagtctatgggaggaaggagatcatgatgggggagcagtgccagtcgatggacttctctggggtcatctactacgacgctgaaggccaccacgtcgcacaaccgccgccgcggcgctagcctgatgcccgcctccgtgacctcgccgccaatgcccacaccgcgctcgtcttcagtgggctggacagtgataccccgcgacggtggtgtagtgggagtgggacggcgaggaggttaagggcggcgacggcgaggtgcagagctcctacgggctccgccatcaacactatggatacactccaagaggccccttcagctccattggaggctacagctgccctctacactatacagtttacagtatatttcttcttctcggaggaggatgaacagatttccagcaccctgttttcaacaccgaggaggatgaacattctacgaaatcaaaaggaccccttaagttctacaactcggagatccacacgacatcattctgtttgtcctcttttgcaaagagggtaattgagtcaaaggcagtgtaccgaggcacctcccattggaatggcgagtgctgatctgaatgggagatatttctattactgagattcagactccaatacaatataggtgggtgtaccaatttacttagaaggaacaaaagctatggaagaggcaaaaatcaagaatattgaaaggtgggtgtaccagtttacttaagacagcctccaagcattgtttctgcaccgatttatgaata

SEQ ID NO: 150530 - DNA, 1560 bp, Zea Mays
tcgcaacatatccgaacgtctcccgtctccgtgagaatccaccccacttccacagcgcacctgttactgctgcacttgctgctttgcacacgcactactgcactgcactagccgcgcctcgcaggtcgcgtcaagcaagcgcaggtgcagtcctcatcgcgaaggggccagatatgctgctctctgcgtttctcggcgattgcttgttcagctacccgccgccgcctcttctacccgcaacaacggctgccccgagaccgagcacgcgtctcccggttccctttcctgctcgcctcaggcccgcgtccctcgtcgcccgacggctgacggcggaggcgggggaggcgctgagcgcgttatccgccgcggagggcgacgacgaatacgaagcggagctccaggaggaagggtttccgagctgggcgggcggcggcgaggaggaggactacgaccacgaccccgaaatcggagacattatgggggactacttcgacgaccccaagaagggccaaacccgcatggaggataggataagaaagaaacgccacaagatcgtgcaaaccaagaccggctctccaaaccccatgaaggtcgtcttcaacaaatttgacttctccaattcctatatatggttcgagttctacaatgttttgttgccaaaagatgttacgttgatttctgattctctgcgatcatggcatatagttggccgtcttggtggctgcaattctatgaatatgcagttatcgcaattgcctttagattgtaaaaggctgacttatgatgctcttgaaggagctaacgtcactccgacgtccttttacaacattggtgatcttgagattcaagataatctagcacgagtatgggtagacattggtattcatgagccattgcttctggacatcctgcttaatgccttaacaacaataagttcagatcatgttggtattaagcaagtacagtttggagggtcagagtttttgaactggagtgaggacttgaagacagaagaagttggatatagtgtgtgcaaaatctaaatagcacaatcccgagatttgcagaagcagctacctttttagctaaacgcaaatgcaacatctggttcgaagttagggttttaaccaccttggtcctgcaaacgagaagaagaaaatggtgacaacacgatgaaaaattgacgtccaaacatattaacttctgcttgaaaagaggttgccgtccttacaggactctgctagctacacatcaacacatcattggtaatccttctgcatacatgtaataatataatataactagattgtctgatgtccaacgtgtattgactctacttagggctgaacataatacttatggctacttatggctcgttagttcgcttggctcgacttagtttattttaattttgttacgagccgagttagtattttagctcggtttgttaacgagccatctcgttagctcgaacgagctatcatttatcaacaaaataaagccttcacttatgttggatgaactaataagtgattagttatattaatttggtgttgaatt

SEQ ID NO: 150531 - DNA, 1555 bp, Zea Mays
tcgcaacatatccgaacgtctcccgtctccgtgagaatccaccccacttccacagcgcacctgttactgctgcacttgctgctttgcacacgcactactgcactgcactagccgcgcctcgcaggtcgcgtcaagcaagcgcaggtgcagtcctcatcgcgaaggggccagatatgctgctctctgcgtttctcggcgattgcttgttcagctacccgccgccgcctcttctacccgcaacaacggctgccccgagaccgagcacgcgtctcccggttccctttcctgctcgcctcaggcccgcgtccctcgtcgcccgacggctgacggcggaggcgggggaggcgctgagcgcgttatccgccgcggagggcgacgacgaatacgaagcggagctccaggaggaagggtttccgagctgggcgggcggcggcgaggaggaggactacgaccacgaccccgaaatcggagacattatgggggactacttcgacgaccccaagaagggccaaacccgcatggaggataggataagaaagaaacgccacaagatcgtgcaaaccaagaccggctctccaaaccccatgaaggtcgtcttcaacaaatttgacttctccaattcctatatatggttcgagttctacaatgttttgttgccaaaagatgttacgttgatttctgattctctgcgatcatggcatatagttggccgtcttggtggctgcaattctatgaatatgcagttatcgcaattgcctttagattgtaaaaggctgacttatgatgctcttgaaggagctaacgtcactccgacgtccttttacaacattggtgatcttgagattcaagataatctagcacgaggtagacattggtattcatgagccattgcttctggacatcctgcttaatgccttaacaacaataagttcagatcatgttggtattaagcaagtacagtttggagggtcagagtttttgaactggagtgaggacttgaagacagaagaagttggatatagtgtgtgcaaaatctaaatagcacaatcccgagatttgcagaagcagctacctttttagctaaacgcaaatgcaacatctggttcgaagttagggttttaaccaccttggtcctgcaaacgagaagaagaaaatggtgacaacacgatgaaaaattgacgtccaaacatattaacttctgcttgaaaagaggttgccgtccttacaggactctgctagctacacatcaacacatcattggtaatccttctgcatacatgtaataatataatataactagattgtctgatgtccaacgtgtattgactctacttagggctgaacataatacttatggctacttatggctcgttagttcgcttggctcgacttagtttattttaattttgttacgagccgagttagtattttagctcggtttgttaacgagccatctcgttagctcgaacgagctatcatttatcaacaaaataaagccttcacttatgttggatgaactaataagtgattagttatattaatttggtgttgaatt

SEQ ID NO: 150532 - DNA, 1778 bp, Zea Mays
tcgcaacatatccgaacgtctcccgtctccgtgagaatccaccccacttccacagcgcacctgttactgctgcacttgctgctttgcacacgcactactgcactgcactagccgcgcctcgcaggtcgcgtcaagcaagcgcaggtgcagtcctcatcgcgaaggggccagatatgctgctctctgcgtttctcggcgattgcttgttcagctacccgccgccgcctcttctacccgcaacaacggctgccccgagaccgagcacgcgtctcccggttccctttcctgctcgcctcaggcccgcgtccctcgtcgcccgacggctgacggcggaggcgggggaggcgctgagcgcgttatccgccgcggagggcgacgacgaatacgaagcggagctccaggaggaagggtttccgagctgggcgggcggcggcgaggaggaggactacgaccacgaccccgaaatcggagacattatgggggactacttcgacgaccccaagaagggccaaacccgcatggaggataggataagaaagaaacgccacaagatcgtgcaaaccaagaccggctctccaaaccccatgaaggtcgtcttcaacaaatttgacttctccaattcctatatatggttcgagttctacaatgttttgttgccaaaagatgttacgttgatttctgattctctgcgatcatggcatatagttggccgtcttggtggctgcaattctatgaatatgcaggtataatggtcagaccacatttacacttcttgaatgtcatttttgacatttttgtattttattttcatatccttagtggatgagacgatactagtcagggtaagatataatccttctggcctccatccttttcatcaaaatgttggtaacatgaaggattccatcaaacttctatgttttgcactaaaggacttcaaaagtacttgtttattttgcagttatcgcaattgcctttagattgtaaaaggctgacttatgatgctcttgaaggagctaacgtcactccgacgtccttttacaacattggtgatcttgagattcaagataatctagcacgagtatgggtagacattggtattcatgagccattgcttctggacatcctgcttaatgccttaacaacaataagttcagatcatgttggtattaagcaagtacagtttggagggtcagagtttttgaactggagtgaggacttgaagacagaagaagttggatatagtgtgtgcaaaatctaaatagcacaatcccgagatttgcagaagcagctacctttttagctaaacgcaaatgcaacatctggttcgaagttagggttttaaccaccttggtcctgcaaacgagaagaagaaaatggtgacaacacgatgaaaaattgacgtccaaacatattaacttctgcttgaaaagaggttgccgtccttacaggactctgctagctacacatcaacacatcattggtaatccttctgcatacatgtaataatataatataactagattgtctgatgtccaacgtgtattgactctacttagggctgaacataatacttatggctacttatggctcgttagttcgcttggctcgacttagtttattttaattttgttacgagccgagttagtattttagctcggtttgttaacgagccatctcgttagctcgaacgagctatcatttatcaacaaaataaagccttcacttatgttggatgaactaataagtgattagttatattaatttggtgttgaatt

SEQ ID NO: 150533 - DNA, 1657 bp, Zea Mays
tcgcaacatatccgaacgtctcccgtctccgtgagaatccaccccacttccacagcgcacctgttactgctgcacttgctgctttgcacacgcactactgcactgcactagccgcgcctcgcaggtcgcgtcaagcaagcgcaggtgcagtcctcatcgcgaaggggccagatatgctgctctctgcgtttctcggcgattgcttgttcagctacccgccgccgcctcttctacccgcaacaacggctgccccgagaccgagcacgcgtctcccggttccctttcctgctcgcctcaggcccgcgtccctcgtcgcccgacggctgacggcggaggcgggggaggcgctgagcgcgttatccgccgcggagggcgacgacgaatacgaagcggagctccaggaggaagggtttccgagctgggcgggcggcggcgaggaggaggactacgaccacgaccccgaaatcggagacattatgggggactacttcgacgaccccaagaagggccaaacccgcgtgggaatgaatggctttcctcgtctccgttctgacgaatgaatggctttcctcgtcttattcccttgcttcactcacgccctctgcgctcgtgcagatggaggataggataagaaagaaacgccacaagatcgtgcaaaccaagaccggctctccaaaccccatgaaggtcgtcttcaacaaatttgacttctccaattcctatatatggttcgagttctacaatgttttgttgccaaaagatgttacgttgatttctgattctctgcgatcatggcatatagttggccgtcttggtggctgcaattctatgaatatgcagttatcgcaattgcctttagattgtaaaaggctgacttatgatgctcttgaaggagctaacgtcactccgacgtccttttacaacattggtgatcttgagattcaagataatctagcacgagtatgggtagacattggtattcatgagccattgcttctggacatcctgcttaatgccttaacaacaataagttcagatcatgttggtattaagcaagtacagtttggagggtcagagtttttgaactggagtgaggacttgaagacagaagaagttggatatagtgtgtgcaaaatctaaatagcacaatcccgagatttgcagaagcagctacctttttagctaaacgcaaatgcaacatctggttcgaagttagggttttaaccaccttggtcctgcaaacgagaagaagaaaatggtgacaacacgatgaaaaattgacgtccaaacatattaacttctgcttgaaaagaggttgccgtccttacaggactctgctagctacacatcaacacatcattggtaatccttctgcatacatgtaataatataatataactagattgtctgatgtccaacgtgtattgactctacttagggctgaacataatacttatggctacttatggctcgttagttcgcttggctcgacttagtttattttaattttgttacgagccgagttagtattttagctcggtttgttaacgagccatctcgttagctcgaacgagctatcatttatcaacaaaataaagccttcacttatgttggatgaactaataagtgattagttatattaatttggtgttgaatt

SEQ ID NO: 150534 - DNA, 84 bp, Zea Mays
ctaggctgtgtgcatcttattgttgcagaggccgggagacgatttgtatcaaacttttagatgcaatgaaaaatcttccttatc

SEQ ID NO: 150535 - DNA, 666 bp, Zea Mays
gcctcagatgctagctagctcttctccacgtttagcttccaatccgtccatctctctgcagactgcaggtgagcgccatatctatctcaatcaatctgaagctagtaatttgttttatacaaatctacaagtaatcgatcatcagttaacatatgatgtcgatctgtgttgtatttgggtgaacaggggtatttcttgtagttcagctcatgagtttcacaagacttcatcacacggttaaactacaaattgtgcgagacaaattaggtatgtatgtttaccactgttttaatcgatctaacttagaaaacgtgtgttcaacgtacgagtgactgtcaagccgatggttggctttgattgtgtgtgttcgaaacctaatcatgcatggcatgccgaacaaattttggttggatgcatatatatatgctaggacatctgaggatcatatgtgccaaatagtttagccaattaatttctcacaagcacgcagattcagcagttggatcaaacttgagaaacaccattttgtttgattcgttctcatatctgcggagttgctagctagttgttcttggcattggtagtttgagaacgaatgtccttagaacatcccgagtaatttatagtgtgcaaagtttgagatccgctgggtttaatctgagttag

SEQ ID NO: 150536 - DNA, 1244 bp, Zea Mays
ataaaggataactcggggtcagtttttgaggcaagaatcccactatggatagtccattcatccattgcccaacaagaatcaggtaaagttccgcatgaacatcatgcattcttcatttattacgggattacaaacaaacacatctgctaacaaactatagggaatatatacaccaacgaccaatacaattgccgaataaatttccgactatatatgtacaccggaaactggccataggtacgcaatgtggcagggtatacataagtctgcttcacctatggtcgttcaagaactaagacctccctgagagctgcagcgtcatggagttcgcctcacctatggttcttaagcgctaaaacccttgtggatagagctccaggggttggacggaatgctgctgcaggcctgagcggccaccttcgacactgcttcaggaaggatgccagcgttgcacatgttcgcgaaggatcgcatgtgcttcatcccatactgcgccaaggacccgcatcgcgcctcaaaaaggcttactatggacttgaggcagctccaatcatcaaccagaggttcaccaggtgcacggacggctttcagaacccttggaccgtcctcggagccaaagagaaggcttccaatgagctcaacgctgctgtcaacatgagacctgtgggccatcacttcaagcagttccttccgagcctcatttttcgcatgcgagctatcagccaatttgcggtactagcgataaagaagccaatcagttggttttgttcatcgaaatgaacgcataaattgtcgaacagaaagtaacgaggcaaagagatcttccgagaataatcaagccttctcatgatctacaaaccttctgccagaagtagacaaggtcagcgtcgcgctgattaacggcttttgagaacgatggcagtgagttatcttctataaaagtgttgccatcgttagcagggtctgtgccaatgtacgaaaacaaacgctgaacattcagctccaatgcgccatattgcatcacatgggaaccatagctgaacgtgtcatgaaccgctgtcctatccttgacctgatcaaccgataagttgcattgattaggcatagtgaagtgtggtttcaaggtagcgtgtacttaatagattcaagttcgaaacgctcaccaacttgtactgctgcttgagggattcagttcgcagattgtggaaatcactgtcaacattgagaaatttcaaacatgagca

SEQ ID NO: 150537 - DNA, 2506 bp, Zea Mays
ctaaattaaaaaagacggacagcccagcccatctcgtcttgtctcggcgataccggctaccgccggcgaccttccgtctatccaactcgcagcgtcccacgccggtgaccccgctgggcggcagaaggagacgtcgggtgccgcggagcgccgcggagcgccgccgccgtccaagctgcctccctcggctggtggactgtatcactgctcctcagacacccgctgttctgtccggcaacgtgcctccgccgcaaacccgctcgatcagcctgaggcatcgcacgatttctgactcatactttatcgccaattggctggggtggagcacatctctacccggacttgatagattccaatccttcccaactcaacgttgggcagatggcgcagatccccaatcttgacaacgcgccgctcaaccttgcggccctcagggagcagtcgcagaaggacttgttcggcatcctaaaaaatataaggggaaagaagtgcttggttatagatcccaagctcgctgggactctctcattggtcgtgcagacatcgctgctaaaggagtatggcgcggaagtgcggattctctctcccgaacccctgcagacggaatgccccaaaattgtatatcttgtgcgctctcagctgaggttcatgaagttcatcgcaagtcaaatcaagaacgatgaacctaaagggctccagagggaatacttcctttactttgtacctcgccgcactgttgcttgtgagaagatcctggaggaagagaaagttcatcagaaactgacattcggagaatatcccttatatctagttccattggatgatgatgtcttgtctcttgaacttgaccattctttgcaggaatgccttattgaaggagatacaagttctatctggcatgttgctaaagcgatccataaattagagtttgcctttggagttatcccgaatgttagggccaagggtgtggcgtcaaccaaagctgcagagttgttgaatagtatgcaactagaggatccagtcaacatggatgatatggggattccagagataaacactgttattctgttagacagagaggtggacatggtaacaccaatgtgctctcagttgacgtatgaaggcttgttggatgagatgctacaaattaataatggttcagtggaagttgatgcaagcatcattggagctcaacaagatgggaaaaaggttaaggttccactgaattcaagcgataagttgtacaaggagattcgagacctcaattttgaagttgtagttcaggttttacgtcaaaaagcaacatctattcagcaagattatgcagaagtgaaatccaccaacactcagtctgtttcggagctcaaggattttgtgaggaggttgcactcgctaccggagatagctaggcatgttcatttggcacaacacttgcaatcgttcacggggaaaccctcctttcatgcccgactagacatagaacaaacaatactggaggttcagaactttgaaatatgctttgagtacattgaggagatgatacataagcaggaagttattgaaaacgtccttcgccttttggtgttactttctcttacaaatgccgggcttccaaagaagaattttgattacatgaggcgggagatacttcatagttatggctttgagcacatgcacttattatacaatctggagaaggctggccttcttaagaggcaggaatcaagaagcaattgggttggtattacaagagcactgcagcttatagttgacgtaaatgatacagcaaaccctactgatatatcctacatcttttctggatacgcacctcttagtattcgccttgttcagcatgcagtgagatctggatggcggtctattgaagaactgttgaaactattgccaggcccacatctggatttgaaaagaggtggtttgacaattaattcatcaccggaggtacatccaggtttaggggctcaacagagtattgacagggttggtcatcgctctctggttttggttgtattcattggtggtgtcacatttgctgagattgctgcccttcgcttccttagtgcacaggaaggaatgggctacgactttcttgttgcaacaacaaaggttgtcaatggaaacacaatactcagacccattatagcaaatagcaaagaggggatgatgtaattttattccttttctgtgcatgtgttttttgtaattgcaattgcagacaaacccaagcttgtgggttttcttgtttggctgtgagttcgtgtttggtcagcaactggacgataaggctaaccacgcttgttgatagatggaatccaacagtcccattttttgttctgttctgttctgtagtacatccgctaaactgtaaatcctgggtttcatgtgttcgtctgtctttttattcaataattgcttccttgaaggccgtttatgttgtttgtggaccaatattgtgaaaaaagaaagaatgtatggaacctgttgcaaa

SEQ ID NO: 150538 - DNA, 109 bp, Zea Mays
ttgttttgttttacctgtgacagttggaggagccacttgctgcctgactgcaccaaacttcagatcatatttattaaacattgtagacaactcactttccacacaagta

SEQ ID NO: 150539 - DNA, 1302 bp, Zea Mays
gagcgctgcggagtattttgcccagctggaggagcgatctaaataatcaaaaacccgaaggttcggactgaatgaagcgaaagccgaaatcccattccccttccccctcttcgtctccgtcggcggcgtcggaccgaacccgagcccggagccctaactaaccctaggaggcaggcggcggcggggatggtgtactacgcgctgttggtgggcgcggagctggatggcctcaccaacctgcagccccgccacggctgcgacgaccccaacttcccctactacctcaagctcaagtgcgagaactgcggggaggtcaccgccaagtccacctacgtcaccctcagcgagcaagtcgacctgcccaaaggacacggcgccgctcacctcgtccagaagtgcaagctttgtgggagagatggaacaattgtgatgattcctggtcaggggacaccacttactattgagcagagccagaaagaggagaagacttgtttgatggtgtttgactgcagaggctatgaacctgttgagttttcctttggcactggctggaaggctgaatctgtgcatgggactccttttgaaattgactgctctgaaggtgaattttctgagtatgatgagaagggagaatgccccgttgagctaggcaagctgcagtcaacattcaaagtggtgaagaagcatgagaggggtgggaagactagatttgtctagatcgagtgacttggaatctgacagatattggagttggcggtgtataaatggtagatttgggctgaaggtcatgcgtgatccgacctcctttttcttctatctgttgattctgtggatgccgtgaaccatgcgaagctttcggtgatagtgtccacaggagcattaccctgtaccgaaactcatctttataacttaccaccaatgctcgaacatgttgctggttgctggtatttttagcactgttctctctggctaatgggtctgaagacatctcaaggggatatgtggtgcaatctgagttctttaaagggcatcgtcacttgtggatgttgattgtggggcaaccttggcttgctataatttttagataccgtttagttgactagcattagcacgctcaaatgcacgcttgtgtgtgtacccggtgctatcgccgtgacaaaggctctcgtcaactttgtgctttgttttagcgcacgcatggagatccaagaatatcttggccaaagctgcatgtttcttttcatttgttccgcaaaattctcttccgtacttatgatcaatgctggctgtcagttgtcacaa

SEQ ID NO: 150540 - DNA, 1028 bp, Zea Mays
gagcgctgcggagtattttgcccagctggaggagcgatctaaataatcaaaaacccgaaggttcggactgaatgaagcgaaagccgaaatcccattccccttccccctcttcgtctccgtcggcggcgtcggaccgaacccgagcccggagccctaactaaccctaggaggcaggcggcggcggggatggtgtactacgcgctgttggtgggcgcggagctggatggcctcaccaacctgcagccccgccacggctgcgacgaccccaacttcccctactacctcaagctcaagtgcgagaactgcggggaggtcaccgccaagtccacctacgtcaccctcagcgagcaagtcgacctgcccaaaggacacggcgccgctcacctcgtccagaagtgcaagctttgtgggagagatggaacaattgtgatgattcctggtcaggggacaccacttactattgagcagagccagaaagaggagaagacttgtttgatggtgtttgactgcagaggctatgaacctgttgagttttcctttggcactggctggaaggctgaatctgtgcatgggactccttttgaaattgactgctctgaaggtgaattttctgagtatgatgagaagggagaatgccccgttgagctaggcaagctgcagtcaacattcaaagtggtaagcaggcaattgcttcctgcactaccatatttatcatcatttctatccctccatatacttttgacattattgtgattgacaacaggtgaagaagcatgagaggggtgggaagactagatttgtctagatcgagtgacttggaatctgacagatattggagttggcggtgtataaatggtagatttgggctgaaggtcatgcgtgatccgacctcctttttcttctatctgttgattctgtggatgccgtgaaccatgcgaagctttcggtgatagtgtccacaggagcattaccctgtaccgaaactcatctttataacttaccaccaatgctcgaacatgttgctggtt

SEQ ID NO: 150541 - DNA, 1614 bp, Zea Mays
ccagccaagatatttgttgccctcgtctcgtcttgtgcccttcttaatataaaccttgtgcccctctgctgcagcaagaaggaaagaagctagcgcttatagcttgtcagccatggccaccgccgccgcgtctagcctcctcaagtcctccttcgcgggctcccggctcccggccgccacgcggaccacaccggcgtccctcgtggtggccaccggcccgcgcggcgccggcgcggggcccatctgcgcgtccatgtccatgtcctcctccaacccgccctacgacctgacgtccttccggttcagccccatcaaggagtccatcgtgtcccgcgagatgacccgtcgctacatgacggacatgatcacctacgccgacaccgacgtcgtcatcgtgggcgccggctccgcggggctgtcctgcgcgtacgagctctccaaggaccccgccgtgagcatcgccatcgtggagcagtcggtgtcgccgggcggcggcgcgtggctgggcgggcagctgttctcggccatggtggtgcgcaagccggcgcacctgttcctggacgagctgggcgtggcgtacgacgaggccgaggactacgtggtcatcaagcacgccgcgctcttcacgtccacggtcatgagcctgctcctggcgcgccccaacgtgaagctgttcaacgccgtggccgtggaggacctcatcgtcaggggagggcgcgtcggcggcgtcgtcaccaactgggcgctcgtgtccatgaaccacgacacgcagtcctgcatggaccccaacgtcatggaggccaaggtcgtggtcagctcctgcggccacgacgggcccttcggcgccaccggcgtcaagaggctccaggacatcggcatgatcagcgccgtgccggggatgaaggcgctcgacatgaacaccgccgaggacgagatcgtgcgcctcacgcgcgaggtcgttcccggcatgatcgtcaccggaatggaggtcgccgagattgacggcgcccccaggatgggcccgacgtttggcgccatgatgatctccggccagaaggcggcgcacctggcgctcaaggccctgggcaggcccaacgccgtggacgggaccatgtcgccgccgttgcgcgaggagttgatgattgcgtacaaggacgacgaggtcgtggacgcctgagtgcggcaagcagagaggaggatcgacgccagcagcgtcttatcttaattgccttgttgttcaatgatgaatcgatcgaattcccttgggttagctttattattgttgttgttattattaatttgactcgctatagtgtgtcgtgttcatagcaccaccaccgcgccatcgacatgccacacctgtgctctgtctgtcacgtcacgtgcgagtcctactacgggaaaaaatgcatggtaatcgtggagttgcttctctgttctcttttgttctgcactgtcactgtaacgctgggactcgtccactaggggataaaatggtacgaatatcggtacgagtatcggttgaaaacagctatataccgaatgtataattggtactcggtaaccgagattaaaatcattaaactttagttccaagcaaaaatatactaaaaa

SEQ ID NO: 150542 - DNA, 1655 bp, Zea Mays
cagagtgcccgtgaccaaccacgccccatctgctaaacacgtagccatgcatggcgccacggccacgccagccaagatatttgttgccctcgtctcgtcttgtgcccttcttaatataaaccttgtgcccctctgctgcagcaagaaggaaagaagctagcgcttatagcttgtcagccatggccaccgccgccgcgtctagcctcctcaagtcctccttcgcgggctcccggctcccggccgccacgcggaccacaccggcgtccctcgtggtggccaccggcccgcgcggcgccggcgcggggcccatctgcgcgtccatgtccatgtcctcctccaacccgccctacgacctgacgtccttccggttcagccccatcaaggagtccatcgtgtcccgcgagatgacccgtcgctacatgacggacatgatcacctacgccgacaccgacgtcgtcatcgtgggcgccggctccgcggggctgtcctgcgcgtacgagctctccaaggaccccgccgtgagcatcgccatcgtggagcagtcggtgtcgccgggcggcggcgcgtggctgggcgggcagctgttctcggccatggtggtgcgcaagccggcgcacctgttcctggacgagctgggcgtggcgtacgacgaggccgaggactacgtggtcatcaagcacgccgcgctcttcacgtccacggtcatgagcctgctcctggcgcgccccaacgtgaagctgttcaacgccgtggccgtggaggacctcatcgtcaggggagggcgcgtcggcggcgtcgtcaccaactgggcgctcgtgtccatgaaccacgacacgcagtcctgcatggaccccaacgtcatggaggccaaggtcgtggtcagctcctgcggccacgacgggcccttcggcgccaccggcgtcaagaggctccaggacatcggcatgatcagcgccgtgccggggatgaaggcgctcgacatgaacaccgccgaggacgagatcgtgcgcctcacgcgcgaggtcgttcccggcatgatcgtcaccggaatggaggtcgccgagattgacggcgcccccaggatggtcagtagtgaggaagacaatactcatgtcattgcgatactcactgaatcaatgaggaatatgtctaaaattgtctgttggttgttgcagggcccgacgtttggcgccatgatgatctccggccagaaggcggcgcacctggcgctcaaggccctgggcaggcccaacgccgtggacgggaccatgtcgccgccgttgcgcgaggagttgatgattgcgtacaaggacgacgaggtcgtggacgcctgagtgcggcaagcagagaggaggatcgacgccagcagcgtcttatcttaattgccttgttgttcaatgatgaatcgatcgaattcccttgggttagctttattattgttgttgttattattaatttgactcgctatagtgtgtcgtgttcatagcaccaccaccgcgccatcgacatgccacacctgtgctctgtctgtcacgtcacgtgcgagtcctactacgggaaaaaatgcatggtaatcgtggagttgcttctctgttctcttttgttctgcactgtcactgtaacgctgggactcgtccactaggggataaaatggt

SEQ ID NO: 150543 - DNA, 324 bp, Zea Mays
actgttgcatctacggagtggagtttttcaaaattgaagttgttaaggtcatacttgcgcagtaccatgacacaggaaaggctcaatggattagcgacaatagcacttgaaagtggtggtttggagaaggtcaagggcccgttcgtttctgctggaacagaccaggattaattccaaatctccaaaacttatagtaattattgaaagaatccaagccagatttattccaccccttcattccatgcgaaacgaacaggccctaagtaggaagatataattgatgattttatttttaagaatactaggcgattgatgctttttagt

SEQ ID NO: 150544 - DNA, 1942 bp, Zea Mays
tgcacacaagagagagagacgattaaattgctcccacagcaaatccaaaagttgagccctgagtagctcgccgcagcgggcagggcatcttgtcccgttgctctttccttgatcgtccatccatgcatccatggaccacggtgcttttgcagctgcagcaaggctctcccctccggctactatagcggttactagtgcgtgaatgctccttctgcacctcgcttgccatataccttgcatcagcagcagctacccagcagctcgatcgcgctcccgcgagtacactagaagatgaacagtgcagtggaagtgtagtggagttgcagccattatcgatcgccaccacactgctcctactcatcacctgcagcacctagatcaagaggtctgattcttccaagatggatcataacttcagcgatatgatctcgagcgagagcgcatggagcggcggcgtgggtgccggcgacggcgcgggaagcggcatgacggtgctggagaggctggtgctcgacgaggcgctggcagcggcgatcctggagctgcagggcatccagcaggcgcccgcctgcgcgggcaaggaggtagtaatggtagcggagccgacggccggtggtggcgtggttggggaggccgctgttgccttcccctcgatggggatggcgacgccaacgcccgcctacgcggacgttgacgcggatgtcctgcagcgacagcagcatcaccatcgccatcacggcgcgatggggatgcctcccgactacgacctcacaccagcaacacccgctgtcacggtaactgctgtgccgcccgcgttcacatccgccgcagcatacagcggaggcaacttcgtcgtcggacaatcgccggcggtcttctccaccagcaacgagacgacagcaacggcggcggccgtgacctcgacgacgagcctgaattgtgaacaaggcggcggaggcggtggtggccgaaggcaacgccgggccaacaggaagaggaaggccgccgccgagcggtcaccggtggcggcggcacaggagagcaccctgtgcagcctcctggcgtccaccaccaccgcgggcgaaggcggcatccagatcgcattcagcaacgccgccgccgccgccaagagatcagccaagccgtcgtcgctgagtagcagcggctcgtcgagcatcagcttcgacgggcggaaccccgagacgaactgcggcggcgtcgacgaccccatgtacgagccggacacggaggcgctggcgcaggtgaaggagatgatctaccgcgcggccgcgatgcgccccgtctccctcggctccgaggaggacgcaggcgagcgcccgcgccggcgcaacgtgcgcatctcgtccgacccgcagacggtggcggcgcggcagcggcgggagcgcatcagcgagcgcctccgcgtgctgcagaagctcgtcccgggcggcgccaagatggacaccgcctccatgctggacgaggccgccagctacctccgcttcctccagtcccaggtccgggagctgcaaaccctagaccgccggaactacggtctaacgactgcggataataatgccagcagagccaccgccaccatggctgcttctgggccactgatgagctacaacaatggccacggtgccttgccggccttcacgttcccggcagcagctggcgaaaccctatactagcaggaggaggaggaggcgttttgatcgaccagctgaactaatcatctaatttagttggatggtgatagatttgtaacacgcgcgcatgccatgttgttgttaactttcttttaacgtttttttgtccaatatgtgcatgcatgagagaccatccatcttatgaaatggagtatttcatcatcattagcagctcaaggactaggtagacgatgatgatggaaccaatcaaatgaaaggatgatgcaaaa

SEQ ID NO: 150545 - DNA, 100 bp, Zea Mays
tttgtttattttctcttgtttagaactcctagtttttctctctaggcagttacctcttatgccaggagatccgcaacgattttgtctatcgactgtgcct

SEQ ID NO: 150546 - DNA, 121 bp, Zea Mays
tttagctacatccaatgttgtttaagactttaaatcacttgtcatttgacacttgtcatttgaaaagagccggtggttacaatggccaattgtgctataatttgtcacctaaatacacgag

SEQ ID NO: 150547 - DNA, 1338 bp, Zea Mays
gctagcggtaaccgtcgcctcacttccgcagcaccggcgcggcgactattagctatagccgagtaggcgcagccgcgcacggcgcacccctcgtgttcccttttcgtccttgttcctcaacgtcgccggtgcgcccgcctcctgcctctctccccctgcgagcgatcgtgaggggatcgggatggcctcccaccattccgagcccctcgaccccgccgacgctgacgacccctcagataacaacccagaattaccatgcccctcctatcatatcgttaccaaacctggtcaactcccagtcgagtttcttgaaccctcagctgcccagaagttggtaattggatttgactgtgaaggtgttgatctctgccgcaatggtgctctctgtattatgcagcttgcattccctgatgctgtttacctagttgatgctattgagggtggaaaagaacttattcaagcttgctttgtattttcagtttggcataaaactgcataatgtgatggatacacagattgcttattctctgatagaagagcaggagcaggaaggaaaaaagatgacatctgatgattacaattacatatcttttgtcagccttcttgctgataaacgatactgtggcatactatatcctgaaaaggaagaagtccgtacccttctaaggcaggaccctaacttttggacaattaggcccttgtctgatatgatggttcgagctgccacagatgatgtccgcttccttctcagtatatatgcgaaaatgatggaaaagttaagcaaagtatctttatggcgtctggcagttcgcagtgagctgtactgtaggtgcttttgcttaagcgacaaccagtttgcagattggtcacctcttcctcctgtccctgatgacattgaggctgatgtttatgttcctgaagccgatatcctgtcagtcttagatgtgcctcctgggaaaatgggacgagttattggcagaaaggggtcaacgataatggctgtgaaagaatgttgcaaggttgaaatacatattggtggtgctaaggggcctccagacagggtgttcatcattggaccagagaaggaggtcaggaaagctgaggccatctttcgaggccgaatgctggagttctagagatgttaccctttgcgatacaggtttcaactgctttatattttgaacgtaaaaaggggaatatccaaaaggtgtatgcgggaccgtggatcccttgaccgtctgtgaatcatgaaaacaaaataaaggatttcaacttggcacttcgcgtttctggcctgttttcctcaacgcgtcaggatgcagaagcatgtttagattt

SEQ ID NO: 150548 - DNA, 1402 bp, Zea Mays
gctagcggtaaccgtcgcctcacttccgcagcaccggcgcggcgactattagctatagccgagtaggcgcagccgcgcacggcgcacccctcgtgttcccttttcgtccttgttcctcaacgtcgccggtgcgcccgcctcctgcctctctccccctgcgagcgatcgtgaggggatcgggatggcctcccaccattccgagcccctcgaccccgccgacgctgacgacccctcagataacaacccagaattaccatgcccctcctatcatatcgttaccaaacctggtcaactcccagtcgagtttcttgaaccctcagctgcccagaagttggtaattggatttgactgtgaaggtgttgatctctgccgcaatggtgctctctgtattatgcagcttgcattccctgatgctgtttacctagttgatgctattgagggtggaaaagaacttattcaagcttgtaagcccgcacttgagtctgatcatatcaccaaagttattcatgattgtaaaagggacagtgaggctttgtattttcagtttggcataaaactgcataatgtgatggatacacagattgcttattctctgatagaagagcaggagcaggaaggaaaaaagatgacatctgatgattacaattacatatcttttgtcagccttcttgctgataaacgatactgtggcatactatatcctgaaaaggaagaagtccgtacccttctaaggcaggaccctaacttttggacaattaggcccttgtctgatatgatggttcgagctgccacagatgatgtccgcttccttctcagtatatatgcgaaaatgatggaaaagttaagcaaagtatctttatggcgtctggcagttcgcagtgagctgtactgtaggtgcttttgcttaagcgacaaccagtttgcagattggtcacctcttcctcctgtccctgatgacattgaggctgatgtttatgttcctgaagccgatatcctgtcagtcttagatgtgcctcctgggaaaatgggacgagttattggcagaaaggggtcaacgataatggctgtgaaagaatgttgcaaggttgaaatacatattggtggtgctaaggggcctccagacagggtgttcatcattggaccagagaaggaggtcaggaaagctgaggccatctttcgaggccgaatgctggagttctagagatgttaccctttgcgatacaggtttcaactgctttatattttgaacgtaaaaaggggaatatccaaaaggtgtatgcgggaccgtggatcccttgaccgtctgtgaatcatgaaaacaaaataaaggatttcaacttggcacttcgcgtttctggcctgttttcctcaacgcgtcaggatgcagaagcatgtttagatt

SEQ ID NO: 150549 - DNA, 731 bp, Zea Mays
cctccatttctactctgcttcgtcgtcccaacaacccagccgtcatcagggcctctcttcccctcctctgcctcgaccgcccatagcctgctgcctggtagccatggaccgatccaagtcgtacgcgggcgggcgcatgcagatcgagccgtactacgacggaggcggcgcgcggccggacttccggtcctactcctacagcgccggcggcagcgggatggggacgtcgtcctacgcgtaccagtacgagtacggcggggcgggggcgggggcgggggaagagatgaagcggagcaagtcgaagcggcggtggctggcgctggcggacccggacatggagcgcaagcgccgggtggcggcgtacaaggcgtacggcgtggagggcaagatgaagggctccttccgcaagagcttcaagtggatcaaggaccgctacctaaacctcgtctacgggtggtcctgatcctcaaagtatatatactccatggttttggctctgcatgtttgcttgatatatcatatcatcatcctggattcatggtgagtacatgcatacagtatatatatcagagagagtgtgtgtgtttccatttttcttcttggttggctttgctagatgttgttgttggtgatctgatagcaccaatcagtcatgtgtattgatgagatgtaacccaaggggttgtttcagaccaaaatggtaaaggcaaatccatcgttcaagtgataaa

SEQ ID NO: 150550 - DNA, 783 bp, Zea Mays
atggcaagaatggtgcctacctctacgtccaagcacaggccgatcatcatcagggcctcctcctccccggcgatcctccacgccgcgtggatcacggccgtcgtcgccatctgcctcgcgctatgcacaatgcactcccggaagccctcatcgccatcgtcgcgccggcgcggcggctcgcgttcagcgtcgtccaaccacctctgcagtgtgccttccagggagaccaacggcgccggcagcgttggcacggtcgcaaccgcaaccacaccagccaaagtgtccccgacgccgagcgacaccgccatggcccgcggggctgacgtcggcccagtcacggtgatcgacgtcgggacgcacgggcccatccctcccgcgttcctgccgccggacccgttcccgccgcgccggagcctgtcgtcggtgaagcacacccggtttgccgagcgggttggcaggatacggtcgatgcgccgcggcggaccgggggagggcgccgccgccgcggaggacgacgtcttcgtggggtgccaccgcggtggcgaggtcggagaggaaggcacactgtggaccaagacgatcatcctcggggagcggtgccgcgtcccgagcggcagcgacgaggacgacgacggcgtcgatggcgcgacggtcaagaagtggaagggctatcggcccaggcaaccgcggtcggtgccggttaccaggagcaactccttcgccggcgttggaagccccggcgcatgcagacctaccaatccttgcatgcgtctagctagctag

SEQ ID NO: 150551 - DNA, 1668 bp, Zea Mays
gaatattggatgggttcagattaaaaaggcagttaagctcgatggatgcgtgtgatgattatataaaggacattataaatcaacgggagcaaaggaaaggaaagggagaaaatttcatatagcaattgtttcgcgtataggagggagaacaaaggtcgcgtctcgaaagttcttgccttgttgggaagggatggcgtcggaggtggaggacgacgcggcggtgccgggcgcgccgctggtcgccaatggtgcagccgacgtccgccggaggagggatcaggctaaggcgattttgtccaagcaggccgtcaagatcgccaccaaggccgagcagcacgagcgcttcatctttaaggtcacacacttgctgggtgttcttggatttgggggattttgctatctcttgggtgccagaccacaggatgtgccatatgtgtactgcctgttctatgtcatattcgttccgctccgctggatttactaccgctacaagaaatggcattactatctcctggacttctgctactatgccaacacctttctccttgtaatgattctcttctatccgaaagatgaaaaacttttcatggtttgcttctcgtttgcagagggtccacttgcttgggcattaattgtgtggcgttgcagcttagtttttggttcatttgacaaacttgttagtgtcctgatacatctcttacctgggattgttctattcactatccggtggtgggatccacaaacatttgctgccatgcacccggaaggaagagatgccagagtcacatggccatatgtggaggacaaatcatatatgtggacatggcttttttttgttccactagctgcttacaccctgtggcaacttatgtatttcctcatagttaatgtcctgcgccggcagaggttgttaagggatcctgaagtcatgacatcctacagagagctctcaaagaaagcacagaaagcaaacaacatctggtggaggctgagcggactgctgggtgaccggaaccggcaggtcatgtacatactgctccaggcgctgttcacagtggcaacaatggccctgacggtccctatattcctgtcctaccggatgcacgtggtgttcctgatactcaaggtgtgcgcctcgacatggaacggtggcagcttcatcttggaggtgatgcctcgacaagtagaacggaagcagcagaagaaactgggcatgaagcccatcgaacaggggagctggacacaaggggcgccggctgatggtacgtacattgggtaaccaccaccaagcacacatctgaggagaaaatccaggagtgaggaaatcgaagctggatgtaacaatagattttactgtttgcaaatgcaacctttgttttttttttctgggtgttcttcgtgttggaggtttttttagctctgccctagttgtgagttgtgacatctttagttttaggctgaagtctgaacgatatggggtgagagatcatgcgtgcccatggttgtcttgggattggacatgcataagttgagatgttctccttttctgtaggagttttcttttcgatgtgaccgttgtgaattgcgtgaagcttttttttcattgttcgtttaattttttttagagagaggccccggggcctattcaagcccgcgacattatattaa

SEQ ID NO: 150552 - DNA, 1265 bp, Zea Mays
caatgcttacgctgctcccaagcaacaagggtagtgttgaggccttctctgagttgcttgctgggctcccaaccaacaaggaaaaaaaatataggtgccgtttggttcacgaaatgtaacgtaaattgtaatggtaatgattcacactcgaataccggcgataacaggtttaaataagccggtatccatttctactgtggtatcgattacgattggacttaaacaaacataatttaacgttatgggttacccattacgttaccaatatatgaaccaaacggcaccatagttccttgcagtaatgactgtctcatttacattaatgtactttggatggttgagttagactctgaatttgtatacaaaaactcttgtcatgctgtgtgccttctgtttttcaatttgcccacttgcatttcctgggttcatgagtccttgtttcctactggttcgagtaactgttggtattccggaatcccgaatatccttgatcgcaacatagaaccaaatgttccgatgaaaaaacataaaactcaatgtttatcttatgaactgtttgtcagagagctctcaaagaaagcacagaaagcaaacaacatctggtggaggctgagcggactgctgggtgaccggaaccggcaggtcatgtacatactgctccaggcgctgttcacagtggcaacaatggccctgacggtccctatattcctgtcctaccggatgcacgtggtgttcctgatactcaaggtgtgcgcctcgacatggaacggtggcagcttcatcttggaggtgatgcctcgacaagtagaacggaagcagcagaagaaactgggcatgaagcccatcgaacaggggagctggacacaaggggcgccggctgatggtacgtacattgggtaaccaccaccaagcacacatctgaggagaaaatccaggagtgaggaaatcgaagctggatgtaacaatagattttactgtttgcaaatgcaacctttgttttttttttctgggtgttcttcgtgttggaggtttttttagctctgccctagttgtgagttgtgacatctttagttttaggctgaagtctgaacgatatggggtgagagatcatgcgtgcccatggttgtcttgggattggacatgcataagttgagatgttctccttttctgtaggagttttcttttcgatgtgaccgttgtgaattgcgtgaagcttttttttcattgttcgtttaattttttttagagagaggccccggggccta

SEQ ID NO: 150553 - DNA, 98 bp, Zea Mays
gcagacgtacgacaacttctactatatcgttatggtcttcttccgctgcactatatgtttagactttagagataacgatctataatactctgttcaca

SEQ ID NO: 150554 - DNA, 2554 bp, Zea Mays
atggacgcccaggtgacgaatccttctgccgccacggaccatgcagcgccgaccaccagcgttagcgcgcccgcgcactacgcctacgccaacgacaatgcgtgccccggcgggccgaaggtctgggtcctcgtgctcctcttcgcgctgctcctgctgcccttcctgccctccgcgatgcggcgcggcggcggcatgcactgggcaggaggagaaggagggtaccgccgcggcgggatcaccttcaagagcggctgggacgtcgtcaacctctgcctcgtgctcttcgccatcctctgcggtctccttggccgcagaggcggcggcggcagcggcgacggggagtcctcttccgccgcgacttccacgccggccaaggacggtcatcgagaggtggcctcggcgcccgccacggcggcggcgactacgacctcggcggatttggaggaggaggaggaggagggctacgactccatgtccgccatctacgccaccctgccccgcaccaaccaccacgcccacgcctcgggggggatccgccggatgaagagcagcagctcgctgcgcctcggcagcgacggcgtctgggcccccgaggccacctgccgcttctacgacgacgccgagctgtaccgggcccgtcgcccggagcggacctgggacgtcgaccttcacgggaggacggcgacgacggaggtcaagaccatccccgtcgacaccttcgtcgagcgcggccgggcctcgcagcctcgggagccgcggaggcggaggaggagcgtccagaggctcgacgaggtggacgaggagaggccgccgcggggggaggcgctggcgccggcgaggctcaggaggtggaactcagaggtggttgatgtgatgccggaacacggggcgccgccggcgacgagcaggatgtgggactcgaaggtggtggacgtcatgccggagcaggatgcagcgaggctcaggaggtggaattcagaatcgttggatatggtattggagcaggaggcgcaggtggctccggcgaggaacaggaggtggacctcggaggcggtggacgtgataacggagcggcaggcagcggtggcgcctgcaaggatcatcaggtggaactcagtggatgtaataccggagcaggaagcgccggtggctccgtcgaggagcaggaggtggagctcggtggcggtggacatggtccccgagcataaagtgccggtggtgatggtgcctgctgctccaccacctccatctccgcctccaccgccggcgcttcctcgacgacgacggcacagcgtcgagaaactgccgagaccacaggaactggagcaagagatagtagtagtggaagaggtgaggaatctattgccgccgccatcgccgtccatgttcgcgcctggaacgccaccccctccgcctcctcttccgcttccgcctcgttcgacggtgtcgcgcagcaagaagaagcgcagcggcagcgtgggtggcgccaaagatctagcatccgccatcgctacgttctaccagaagaagcgcaagagcattaccatgaaggccaagaggaggccccatcagcaccaccattccgatggccactactcgtcgccgtcgtcagatgcgtcagcgagcccggactccactgttcgcaccaccaacgccccgcctccgcctccgccacctccccggccaccgccgtcctcaatcttctccaacctcttcaagaacaagaagggcggcaataagagccgccgcatccactccgtcgcgccaccgcagccgccacccccgcctccacccactcgccgaactaagaaaccaccaccgcctgcgtctcgtcttgcgcctccagcaccagcagtcaggacacggcagccgcgcgcccccgtgcacgcgcccacacatcagccgccattgtactacacatactacccgctcccgccgctacctccgcctccgccgcctccgctggtgtcagagggcgaggatgactcaccttcaatcacagcgtcgccggcgcctgcgtactgcgcgagccccgacgtgaacacgaaagcggacaggttcatcgagagcttccgcgaggggctgaagctggagaagctcaactcgtaccgggagaagtggcagaggcagatccaagagaacgccgccgccgtcgatatcgaggaggagggggagttcatggtgatcgggtcgctctttggcgacgacgacatctcgttgccgcagacgccggcgaccgctgttgccgtcggcttctaaagtataactaacatcgaagcaaaaaaaaaaaaaaagagttggattttttttgtgtggaaaaatggcctggagaaaatggatagaaagaccagaagatacaacaaaagagtatttcttgtagctggtaatcctggttagtcagtactacttgtgaatgattccctttttcagtaattttggatttgggtagctacgaattgagagtgaagtttgtgcatgaaagcttggggggccttttgtgcttattttaaaatggcaaaaaaaaagctctcttcgggtgttgtgtgttgtg

SEQ ID NO: 150555 - DNA, 1542 bp, Zea Mays
agttttggcttcccctccgccactctcgagagggccacacacaaaaaccccaatgcgagcgcccctggcttgtcggcgtcgcctccttcagccaaaaccctagcttgcatacgcgcccgaacaaagcttcgtctgcgaggggcgtcctcctgccgccagaagctttcaggagcatcagcgatggtgtggttccaatgcgaggactgtggcgagaacctcaagaagcccaaacttgccggccacttccgctcctgctccgcgtacaagctgtcatgcatcgattgcggcgagttattcagccacgacaccgtgcaggggcacacccagtgcatctccgaggccgagaagtacggtcctaagggacagaccaaaccatccaatggtgcacagggtaaggcagataagccaaagccaaatgcagatgtcgatatcaatgttgggctgtcgacacggcctccttggttctgtagcctatgcaagaccactaccacaagtaagcaaactctcttactacatgctgatgggaagaagcatagggcaaaggcgaaagccttccatgtgtctcagaaacaaaaagatggtgcagaacaaactccagatgtgaaggaagctggagttgtacccacaaaagaatctgctcaagtaaatggtggcgtgagtggtgatcatgaaagaaatgaagataaagatgctgggaaaaggaaacgaatggatgacatgaccatagagccaggtaacacaaaaagacagttgacacagtctggagatgagaagtcagaaaacaaagcgaagagtaaggccgatgaactagcaagtggtaccgactgcaaaagtgttcaaaagcaaaagatcaaatggaagaagattattactaaaacattgaaggcggtgagcctaaaaagtttgatcttctccattatttatggcgtccattaaactatacgttgttcataattgtgctggtttatttcagaacgcagatggagttatgaagctaaagaagctacaaaagctagtctccaaggagcttcaggaatgtggtgtctccaaagacaaggaggagctccgtgctaccttgatggataaaatagcttcaagttccagattttatgttgatggcaagaatgttagactggtggccaagaatgaagaagaatcttagaaagaggttgtcagtcatttttttggcattgttgctggtttcattctttggtgtcaactttcagatggcttatagccaagtgttggttaaattgagtccatgaaccatcaattatatccatgacgtgtagacggtatgggaatttagcatctgaattttctcgacaaccgttcaaaagtgaaatgtttactctttatgctgtcaagcaatggcaatgatggttgatagtggcggcgtagtcgcaggggagagatgagagatgatacaaataatgttcattggatttgagtaagggagaagatgttatgtagtgctctgaaccatcgattttgatggtgtgataattctgggtgcaattcgtttggtggatttagtagata

SEQ ID NO: 150556 - DNA, 1419 bp, Zea Mays
agttttggcttcccctccgccactctcgagagggccacacacaaaaaccccaatgcgagcgcccctggcttgtcggcgtcgcctccttcagccaaaaccctagcttgcatacgcgcccgaacaaagcttcgtctgcgaggggcgtcctcctgccgccagaagctttcaggagcatcagcgatggtgtggttccaatgcgaggactgtggcgagaacctcaagaagcccaaacttgccggccacttccgctcctgctccgcgtacaagctgtcatgcatcgattgcggcgagttattcagccacgacaccgtgcaggggcacacccagtgcatctccgaggccgagaagtacggtcctaagggacagaccaaaccatccaatggtgcacagggtaaggcagataagccaaagccaaatgcagatgtcgatatcaatgttgggctgtcgacacggcctccttggttctgtagcctatgcaagaccactaccacaagtaagcaaactctcttactacatgctgatgggaagaagcatagggcaaaggcgaaagccttccatgtgtctcagaaacaaaaagatggtgcagaacaaactccagatgtgaaggaagctggagttgtacccacaaaagaatctgctcaagtaaatggtggcgtgagtggtgatcatgaaagaaatgaagataaagatgctgggaaaaggaaacgaatggatgacatgaccatagagccaggtaacacaaaaagacagttgacacagtctggagatgagaagtcagaaaacaaagcgaagagtaaggccgatgaactagcaagtggtaccgactgcaaaagtgttcaaaagcaaaagatcaaatggaagaagattattactaaaacattgaaggcgaacgcagatggagttatgaagctaaagaagctacaaaagctagtctccaaggagcttcaggaatgtggtgtctccaaagacaaggaggagctccgtgctaccttgatggataaaatagcttcaagttccagattttatgttgatggcaagaatgttagactggtggccaagaatgaagaagaatcttagaaagaggttgtcagtcatttttttggcattgttgctggtttcattctttggtgtcaactttcagatggcttatagccaagtgttggttaaattgagtccatgaaccatcaattatatccatgacgtgtagacggtatgggaatttagcatctgaattttctcgacaaccgttcaaaagtgaaatgtttactctttatgctgtcaagcaatggcaatgatggttgatagtggcggcgtagtcgcaggggagagatgagagatgatacaaataatgttcattggatttgagtaagggagaagatgttatgtagtgctctgaaccatcgattttgatggtgtgat

SEQ ID NO: 150557 - DNA, 938 bp, Zea Mays
aggcgttagaccaccgcccggacgcctaggcgacgccttaagaacagtggtacttattgtgaatttgcatgacagcctatgcaagaccactaccacaagtaagcaaactctcttactacatgctgatgggaagaagcatagggcaaaggcgaaagccttccatgtgtctcagaaacaaaaagatggtgcagaacaaactccagatgtgaaggaagctggagttgtacccacaaaagaatctgctcaagtaaatggtggcgtgagtggtgatcatgaaagaaatgaagataaagatgctgggaaaaggaaacgaatggatgacatgaccatagagccaggtaacacaaaaagacagttgacacagtctggagatgagaagtcagaaaacaaagcgaagagtaaggccgatgaactagcaagtggtaccgactgcaaaagtgttcaaaagcaaaagatcaaatggaagaagattattactaaaacattgaaggcgaacgcagatggagttatgaagctaaagaagctacaaaagctagtctccaaggagcttcaggaatgtggtgtctccaaagacaaggaggagctccgtgctaccttgatggataaaatagcttcaagttccagattttatgttgatggcaagaatgttagactggtggccaagaatgaagaagaatcttagaaagaggttgtcagtcatttttttggcattgttgctggtttcattctttggtgtcaactttcagatggcttatagccaagtgttggttaaattgagtccatgaaccatcaattatatccatgacgtgtagacggtatgggaatttagcatctgaattttctcgacaaccgttcaaaagtgaaatgtttactctttatgctgtcaagcaatggcaatgatggttgatagtggcggcgtagtcgcaggggagagatga

SEQ ID NO: 150558 - DNA, 1064 bp, Zea Mays
agttttggcttcccctccgccactctcgagagggccacacacaaaaaccccaatgcgagcgcccctggcttgtcggcgtcgcctccttcagccaaaaccctagcttgcatacgcgcccgaacaaagcttcgtctgcgaggggcgtcctcctgccgccagaagctttcaggagcatcagcgatggtgtggttccaatgcgaggactgtggcgagaacctcaagaagcccaaacttgccggccacttccgctcctgctccgcgtacaagctgtcatgcatcgattgcggcgagttattcagccacgacaccgtgcaggggcacacccagtgcatctccgaggccgagaagtacggtcctaagggacagaccaaaccatccaatggtgcacagggtaaggcagataagccaaagccaaatgcagatgtcgatatcaatgttgggctgtcgacacggcctccttggttctgtagcctatgcaagaccactaccacaagtaagcaaactctcttactacatgctgatgggaagaagcatagggcaaaggcgaaagccttccatgtgtctcagaaacaaaaagatggtgcagaacaaactccagatgtgaaggaagctggagttgtacccacaaaagaatctgctcaagtaaatggtggcgtgagtggtgatcatgaaagaaatgaagataaagatgctgggaaaaggaaacgaatggatgacatgaccatagagccaggtaacacaaaaagacagttgacacagtctggagatgagaagtcagaaaacaaagcgaagagtaaggccgatgaactagcaagtggtaccgactgcaaaagtgttcaaaagcaaaagatcaaatggaagaagattattactaaaacattgaaggcgaacgcagatggagttatgaagctaaagaagctacaaaagctagtctccaaggagcttcaggaatgtggtgtctccaaagacaaggaggagctccgtgctaccttgatggataaagtaatcaatcaccgcttaacgaatctagctactttgcctgctgtttctctcatttttttcaa

SEQ ID NO: 150559 - DNA, 969 bp, Zea Mays
cgccactctcgagagggccacacacaaaaaccccaatgcgagcgcccctggcttgtcggcgtcgcctccttcagccaaaaccctagcttgcatacgcgcccgaacaaagcttcgtctgcgaggggcgtcctcctgccgccagaagctttcaggagcatcagcgatggtgtggttccaatgcgaggactgtggcgagaacctcaagaagcccaaacttgccggccacttccgctcctgctccgcgtacaagctgtcatgcatcgattgcggcgagttattcagccacgacaccgtgcaggggcacacccagtgcatctccgaggccgagaagtacggtcctaagggacagaccaaaccatccaatggtgcacagggtaaggcagataagccaaagccaaatgcagatgtcgatatcaatgttgggctgtcgacacggcctccttggttctgtaggtgtgccagtttgatcccttacccttagtatatacacaataatctttgcaggtggttatgcagtaatagtgccgatgccatagttctaaaccatatttacttataaccaagtaaccatagcggtattggttgtgatcaatgtttatttatttctacgcttctcaaaatttccgttgatataaatcatgcttgggactgttttgtttttttgggttaatactcacatggaatgccagtacatatatatacatgactagacatggtaatataatttatgaggttgcagttatctttgtagttgcgaatgtctgtgagtaagttcaattgtttagctttccttttccatttagaaaagcttgcttggaactattaaaattatttgtattatatcttttctatgaatgatgggtctggaatgttggtagagtctatctacttgtggcctggaggtcctaggttcaacccagtctctttgcaaaattaagcaagggtaaggctgtcaagaaattccattcc

SEQ ID NO: 150560 - DNA, 380 bp, Zea Mays
aagcttgctcttcagaaggggagcaaagacaacatcactgtcgttgtagttgacctgaaagcacagcgtaagttcaagagcaaaacctaaccatgatgacttaatggacaattatagcgacaagttgctaggaacctatagatttggagaatccaaatttggtcagtttagtcgctgccttagtacattacttagcctagttctttttaagcaatttgggctgccaaaggtttgtattcctgtatatggtacaaattgtaaaatccgtgccagggtttatgtttcctgaccgtggcgacggtcctgttttcactcttctttcttcattgccctgtattctttttgtctgcattcttttttgtcaagcttggcgtccaagt

SEQ ID NO: 150561 - DNA, 447 bp, Zea Mays
tttcttttgttctctcggaaaatgacaagatttatcaggtcaaacaatggacttcagaacacagaacaacaaaagatatccaagtatatcaacacacatgttacagaggctttccctatgagaaaagcaggaaagtttggtaacgaaaattgcaagaactttaggggtcatggcgactctgctaagttggacacttttgttccatccatggaggctgcaaaaccaggtttcaaggaagttgagaaatggagtgaaaatgctttgtggagtgtatctgagcttcatgttggcgatgagaagcagactggttctaacaaatctgatatggaaagagtactaaaagggtttggagcttgtgatgcttttgtggcttctaggctcaacgcccctaatggacaagttggtggtattacgtttaagtcttcagacattgcccttctaatatga

SEQ ID NO: 150562 - DNA, 2107 bp, Zea Mays
ccgttgtcgagtccccgctgatctgggcaccactctctccacttccaccgttggccctggcggcgctcatgcgtgcctcgtacgcgtggccgaggttccttaaccggttgagctccggcagtatgactgtggcgaggtccggccggtccctccgccgcatctccgtgcacttgagcgcgagcttggcgtagccgagcgcctcctcgacgggccagtccttgacggtgatgtcgagcatctgctcaaaggtgcccgcgtcgatggccttctcgacgtgatgcgtgagccccatgggtggccgcgcggtgaccacctgcagcaggagcacgccgagggagtagatgtccgacttgacgcccagcttgcccgtctgctggtactccgggtcgatgtagcagaaggtgcccgccgtcgccgtcagccggtactgcgtcacgttgtccgccaccgacggcggcaccaggcgtgccagcccgacgtcgctgatcttgctcacgtagttgcggtccagcaggatgttggccggcttcaggtcccggtgcaccagcggctccggcttcgtttggtgcaggaacagcagcgccgtcgcgatctccgccgcgatccggaaccgctgggcccacgcgagcggcggcgtgccgccccgacggaacagccggtcctcgaggctgccgtggtccatgtactcgtacacgagacagccgtactccgggcatgcgccgaggaggagcaccatgttggggtggcggatgcagctgagcacctccacctcctgcaggaactgcttcctcccctggtgcgcgtcgggccggagcaccttgatggcgacgggggtgtggtcgagggaggcgcggtagacggggccgtagccgccctcgccgattttgagctcgtcggagaagcgctccgtggccatctcgatctcgtcgatgtggtacttgcggtaccggaagtcgtggttggaaatggcatccagagcgcgcaccttctcgtcggcctcccggcgcgcgcgcacctcggcgttgcggcgccgctgcgcctccaggtcagccagcctctgcgccgcctcggcggcctccatggccgcgcggcacttggccttctccatctcggccactgccagagcagcctcctcggcgttcctggcctcctccagccgacgcgcttcctccagcttcatcatatgcatctccttggcccgctgcttggcgttgatggcctccttgcacgccgcgttgtacatgtccatggtctgcttgagctccaaccggagccgccgcatctcggcctcggtatcccgctgcgcctgcatccgcgccacatgtcgtaggtcagccgtcagcagcaagggacaagggtggatagcaagaaatcaaacaagtacgaattgaacgtatgactcacgccggtggccggtgacatgggttccagagcggggagagtggtggacatatcgaggttctcgcccaagtctatgtaggagaagcgcgtgctcgggccgaagtcgaggtcgccgcctaacgagtcgtgtctcgccgagcgggaggacgtctcgaagttgtcctttcctggcaggacgacaaagttcttggtggtggccgatgacgagagcaagcgctcgcggaacagtggccgcgtggatagctccggcggtgtgcgcccgtcaatggagcgccaggcgtcaggcgtcacccgcggcaggtgccccctggagccgcgtcgcatgtagagcaccgattcccggagggagtcggtgtccgaagcgatgtcggcgccagtgtgcatcggcgggacgccgcacttggcgagcctgacattgacggacttgcccttggccacgacgtagatgttgcagtagtctggagcgcacttcatcagggtcgacggcacgtccgcgttcttgaatttcctgcccgaggcgagagctgagacggtgcaatctggacgaaaaagaaatgatggggaaaaaaaaagaatacttggtgaacgcatttctgttggctccgccgagcgcaatgctctggatcttgtttgcagtgatgtaacctagaatggctttggacacgtctgcctcttccaatactacctcggatacttccacctgcta

SEQ ID NO: 150563 - DNA, 261 bp, Zea Mays
gtacccagaatttctaatcgcccttcctgcggacgccgtgaggataaatcgagggagaattgccggcgaggtcgcgctcgtgctgtcgtggagccttggttggtgaaacggtgcggccgctgggtcgcttgcactcgtgtggatgcgtggctgcgcgcggggtgctcggtgagcaaggaatcgttcacccgaatacggcattaccgcggctccacgccacgaaggggacagactccatcacgacgctgctgtgggtaagga

SEQ ID NO: 150564 - DNA, 2235 bp, Zea Mays
atgggtgatgcgtgtttctcaacacagctaattgatggagatgggatcttcaacgtctccggattggagaacttcatgaaggatgtcagattgggtgaatgcgggctgtcctatgctgttgtatcaataatgggcccgcaaagtagtggtcacagactaccaaaggatgatacagcatttgagaagcaaagtgcattgtttgctttggccgtttcggacattgtgttgattaatatgtggtgtcatgacattggcagagaacaggctgcaaacaagcctcttttgaagactgttttccaggcaacatttgaggtcatgatgaggttgttcagtcctcgcaaaacaacattgttgtttgttatacgtgacaaatcaaggacacccctagaaaatcttgagccaattctaagggaagacattcagaagatatgggatgctgttccgaaaccccatgcccataaagaaactccaattagtgaatttttcgatgttcaagttgtcgcactgtcgagttatgaagaaaaagaagagttattcaaacagcaggtttctgatttaagagataggtttcagcattcaattgcccctggtggacttgctggggatcgtcgtggtgttgtcccagcttcaggtttctcatttagttcccagcaattttggaaagtcatcaaggagaacaaagatcttgatttgcctgctcataaagttatggtggctactgtacgttgtgaggaaattggtaatgagaaagttaccagctttatagctgatgaggaatggcaacaatttgaggaggctgtccaacatgactttgttactgggtttgggaagaagctcagcagccttctggatagatgtttatcagagtatgacatggaggctatttattttgatgaaggtgtcagaagctcgaaaagacaacaacttgagtctaaactgttacagcttgtcaatcctgcctatcaatctcttctaggtcacttacacactagaactttagaagcatttaaggagtactttggcaaggccctagaaaaggagggatttgctgttgcagcttgcaattgtactgaaactttcttggagaagtttgatagaggatctgaagatgctgctattcaacaagtgaattgggacacctcaaaagtgagggataagcttagacgtgacattgaggctcatgtagcttcagttcgggctgctaaattgtctgaactttgtgcgaaatatgaggcacaacttaccaaagctctggtggaaccagttgaatctcttctagattcagccagtgaagacacgtggccagctattagaaagcttcttcaacgcgagacaaaaactgctgttttaggtcttgaatctgctgtgtcagcttttgaactcgatgaagcaactgagaaagaactgcttgcgaagctggagaagcatggaaggagtgttgttgagtcaaaggcaaaagaagaagctggaagggttttgattcgcatgaaggacaggttctcaacattgttcagccgagatgctgactctatgcccaggtctgtgaagttgctttctacaatggctgcaattcggttggaggaggatggtgataacattgagaacactctttcccttgctcttgttgacacttcaagacatgggactacagataggagtatccaattgtccgatccactagcctccagctcatgggaaagggttgctgaggagaagactttaattacccctgtgcagtgcaaaaatttgtggaggcaattcaaagctgaaactgaatatacagtcactcaagccatagctgctcaggaagcaaataagaggaacaacaactggctcccacctccatgggcacttgctgcaatggctatccttggattcaacgagtttatgacattactgaggaatccgctttacctgtttgccatatttgtgatttatcttgttggaaaagccctttgggtgcaatcagaaattggcagggaattccaacatggatttcttcctgccatcctttcactgtcgacgaaatttgttcccactgtaatgaacatcctgaagagattagctgacgcgggtcaagaacctgcagcagcccccgagaggcaaagagagatggagctccaaccaaaatccaccaggaacggttccttatacagcaatgtgacatcggcagggtcatctagcgtaaccacttcggagattggacctgaatattcaagcccggttgtgcaatga

SEQ ID NO: 150565 - DNA, 837 bp, Zea Mays
cgcgccgcggtgcaggaagagggtgaagcggctggtgaggttgaagctgcccgtgagccacctcccggggggcacgtcaagcctggcccctcccccaccggcggccctcgcgcccagctccgcgacggcgcgccggaacgccgcggtgttgggcatggcgccgtcgcccacggccccgaactcctcgacggacgcccatacctcgcgcgcttgccccgcgcccgcgtagaaccccgtgcagctgtctccgggatcgagggggcgagagcgaggggcaatcgggagggctacagatcatctagaacaccgactcgtccttcacctctccgagatccggcgctaggaaatgctccagatctacaccgtcttggtacgacacgacggaggaggacaagagctcgctggggatggtggggatctggacgtacgcgacctctgcggggctggggcgagcgccgatgcgtgattgccgtggcgctcgcgtccacctctgccaccgcgccccggccatggcgctcgctgtccacctccgccaccgcgcccgctgctgtgctcaagaccccgttcctcggcgccaggcgcgcgctcgccaatgccgccgcgcccaagcccgcgccgcgcgctcctcgccgtcgccgcggccgccgccaagaagttgtggatccgccgagttcatcaacccgccctggctcgacggatcgctccctggcgacttcgggttcgatccgctggggctgggcaaggacccggcgttcctcaagtggtaccgggaggcggagctgatccacgggcggtcggcgatggccgccgtgctgggcatcttcatgggccagccgc

SEQ ID NO: 150566 - DNA, 1410 bp, Zea Mays
ctctccttcacttttcctgtacgccctcgaagcttcgactgcttgcccatgacctaagccgctgccgcctacaccctcacatcccgcgccctcctctatcgcgccgccaccgaccacccccaaatcctgcttccccaccgctcgcttccgttgggatcgtccgtcctcccagaccgcgtgggcgcttcttcttcggaatctccgtgggccgagtggcgctgggctagggattcgggcccatggcgtggcggcgcgtcctcacccagattgcaaggcatcgaccaacaaaagcaatctacaatgaactagttgcttcctcccctttgggcgcttttcaaagtgacatcactgcaggtgccagaattaaaaatttgcaagagaggaaccagtcaagttacatcggtagccttgcacgccgggtgcgagacctagaatcaccaagccaaacctctcttcttaaagagatttacagaagtgacccggagcgtgtcatacaaatatttgaaagccatccttcattacattctaatcccgcatgggaggccgcgtggcagaagagcttatatttggggatactgaggtgacctccggtgcgtcgtcagacttccagcaagcaactgcaatggcaagagcgatggttaccaagtatggcatgagcaagcatgttggccttgtctcttataactacgaggacgatggaaagagcgtgagctcagaaaccaggcttgtgattgagcaggaggtgaagaatttcctagagaacgcgtataataatgcgaagaccatccttacgaaacacaataaagagctacatgctctggccaacgcacttcttgagcacgagaccctcacaggagcccagataacgaacatattggcccaggtacgtaacaaacagcaacaagaacatactgtcgaagcaccacagagggccccagcttccccggcatcaccagctgcggcggcagcagctgcagccgccgcggcagcacagcaggcggcagccaaagctaagggagtggctggtatgggatcttagcacatggagcgccccaccggatgtatatttaaccaaacaagcaaagctgttccagcgattgacagttgatgaaggtcatcggatgtattgtatgctaaactgctgcagcaatagaacacactgattgcgtggaagttactcttccatgtgcctcgagtgcaaagcagagacaaaaaaactgtacgtgttgtagacttgtagctggtgcttgaatcagttttgtacccacatcgaaaacaattcctgttgtttacaccccgaaaaattgttagatttcgatctggctgccttgtgtaccctaacagagcgtaaattgtaacacatcctgaataaggccctgttccaatctcgtgagataaactttagcagct

SEQ ID NO: 150567 - DNA, 2731 bp, Zea Mays
gtcttcctctccttcacttttcctgtacgccctcgaagcttcgactgcttgcccatgacctaagccgctgccgcctacaccctcacatcccgcgccctcctctatcgcgccgccaccgaccacccccaaatcctgcttccccaccgctcgcttccgttgggatcgtccgtcctcccagaccgcgtgggcgcttcttcttcggaatctccgtgggccgagtggcgctgggctagggattcgggcccatggcgtggcggcgcgtcctcacccagattgcaaggcatcgaccaacaaaagcaatctacaatgaactagttgcttcctcccctttgggcgcttttcaaagtgacatcactgcaggtgccagaattaaaaatttgcaagagaggaaccagtcaagttacatcggtagccttgcacgccgggtgcgagacctagaatcaccaagccaaacctctcttcttaaagagatttacagaagtgacccggagcgtgtcatacaaatatttgaaagccatccttcattacattctaatcccgcagcactttcggagtatgtaaaagctcttgtaagggttgataggctggacgagagtgccttgcttaaaacactgcagagaggtgttgtttccttgacaaggggggaagaaagctttagtagcattccagctttaattggtgctggtcaactgacaaaggatggagctcttggcactgcaaatgcacctattcacatggtcacagcagagacaggtcaatttaaggatcagctttggcgtaccttccgaagcattgcactaactttccttcttatttcgggcatcggtgctctcatcgaggatagaggaatcagcaaaggtcttggtctgaatgaagaggttcaaccaagcatagagtctactacaaaattcagtgatgtaaagggtgttgatgaagcaaaatctgaacttgaagaaatagttcattatcttcgagatcccaagcgcttcacacgtcttggtggaaaacttccgaaaggagtcttgcttgttggtcctcctggcactgggaaaaccatgctagctagggctattgctggtgaagctggtgttcctttcttctcttgcagtggaagcgagtttgaggaaatgtttgtgggtgttggagctcggagagtgcgagacctttttgctgcagcaaaaaaacgatctccttgcataatatttattgatgaaatagatgcaattggtgggagccggaatcctaaggatcaacagtatatgaagatgaccttgaaccagctgcttgtcgagttggatggttttaagcagaaccaggggataattgtcattgctgcaaccaactttcctgagtcactagataaagccctaatcagacctgggcgttttgaccgccatattgttgttcccaacccagatgttgaaggtcgacgtcaaatcctagaatcccatatgtcaaagatcttgaaaggtgatgatgtggacttaatgatcattgccagaggaacacccggattctccggtgcagaccttgctaacttggtaaatgttgctgcacttaaggctgccatggatggcgcaaaatctgtcacaatgaatgatcttgagtatgcaaaggaccgaatcatgatgggtagtgagcggaagtcggcagttatctctgatgaatgcaggaagctgacagcataccatgagggtgggcatgcccttgttgccatccacacagaaggagctcaccctgtccacaaggctaccatcgtacccaggggggtggccctaggaatggtggcccaactccctgacaaagaccagactagtgtgtcaaggaaacagatgctagcgaaactggatgtctgcatgggaggccgcgtggcagaagagcttatatttggggatactgaggtgacctccggtgcgtcgtcagacttccagcaagcaactgcaatggcaagagcgatggttaccaagtatggcatgagcaagcatgttggccttgtctcttataactacgaggacgatggaaagagcgtgagctcagaaaccaggcttgtgattgagcaggaggtgaagaatttcctagagaacgcgtataataatgcgaagaccatccttacgaaacacaataaagagctacatgctctggccaacgcacttcttgagcacgagaccctcacaggagcccagataacgaacatattggcccaggtacgtaacaaacagcaacaagaacatactgtcgaagcaccacagagggccccagcttccccggcatcaccagctgcggcggcagcagctgcagccgccgcggcagcacagcaggcggcagccaaagctaagggagtggctggtatgggatcttagcacatggagcgccccaccggatgtatatttaaccaaacaagcaaagctgttccagcgattgacagttgatgaaggtcatcggatgtattgtatgctaaactgctgcagcaatagaacacactgattgcgtggaagttactcttccatgtgcctcgagtgcaaagcagagacaaaaaaactgtacgtgttgtagacttgtagctggtgcttgaatcagttttgtacccacatcgaaaacaattcctgttgtttacaccccgaaaaattgttagatttcgatctggctgccttgtgtaccctaacagagcgtaaattgtaacacatcctgaataaggccctgttccaatctcgtgagataaactttagcagct

SEQ ID NO: 150568 - DNA, 772 bp, Zea Mays
gtcttcctctccttcacttttcctgtacgccctcgaagcttcgactgcttgcccatgacctaagccgctgccgcctacaccctcacatcccgcgccctcctctatcgcgccgccaccgaccacccccaaatcctgcttccccaccgctcgcttccgttgggatcgtccgtcctcccagaccgcgtgggcgcttcttcttcggaatctccgtgggccgagtggcgctgggctagggattcgggcccatggcgtggcggcgcgtcctcacccagattgcaaggcatcgaccaacaaaagcaatctacaatgaactagttgcttcctcccctttgggcgcttttcaaagtgacatcactgcaggtgccagaattaaaaatttgcaagagaggaaccagtcaagttacatcggtagccttgcacgccgggtgcgagacctagaatcaccaagccaaacctctcttcttaaagagatttacagaagtgacccggagcgtgtcatacaaatatttgaaagccatccttcattacattctaatcccgcagcactttcggagtatgtaaaagctcttgtaagggttgataggctggacgagagtgccttgcttaaaacactgcagagaggtaccaaagtcctaagacatttcctttatttcatagctgagaaaattttgcattctgttacattatatgtgcaatgcagctactgtttatttttccaattgtagcatcacttgaaaaacacctgtatagtggcggtgttcttatattatgg

SEQ ID NO: 150569 - DNA, 652 bp, Zea Mays
actattttaacctagacgagcaaaactgaagctaaagtgttctactcgtttagtgcttttatctaacctattttactgatcgttctggtttcttatggttatagcaaagtttcgtttcctgtagcattccttccaatttgtccaaatgttaggcatggaagaacatggagataggaggtggcaatggtgaatggcaatggagtttattttgttcgtataatacttttcaatcatgttctcatttacattaattaccttcctcaaaccttttaatttatctatgatctatctatggtcatcattttgtgttcaaaaaacagatgcaaattattatggcagcaatcatgttactattgttctacaagaggccagttttttgtagaccgattggcttgctaagttttggtgctactatatctgtggtgatcttttaactggaggaacatatttaaaggcctcaacaaaggagaaccaggccaagctgtcggtcgtgcgttcacaaatatatttaaatcttctgccatgaaattatttaaatcttacagttcaggcaccagctaagcctaagatgctaagtttccatatgtgataatgttggactgtcttgttcatatcggtgtggcgtatcattatgcttgaggtggtggtatgt

SEQ ID NO: 150570 - DNA, 991 bp, Zea Mays
agtccatgacaaggggctcggttagtccacagccctagaggctgcagctgcacacttctcttctctgttttcgccggttaaactttccccacttgttgctggccttcgaatctgtggtttgtttgagcttagcagggaagcgaagaacagggaagcaaggacatggatgctttcagtgcagtgatggacaaggtaaagagccacccagaaatgatggagaaggtaagtgcagtgatggacaaggtgaagaagagccacccagaagcggtggaaaaggtcaaggacgaggtgaagagccttgctgacgctctccacctgcggagacatggatccaaagataaagaacctgagtctgaagagaaggccgtagaaggcgaggcagcgcagagcgtcgaggaggaggagggtacctctgctgacaagactgcagaacctaatgtgttggagcaggccgtacaggagattcaggctgtcgccgcagctttgcagcagacagcacctgaaactgaaactgaaattccagttgagactgctgctgctgctgctcctgaaactttggctgaaggagacaagcctgaagaaacaaacagggatgtggagaaagacgacccaaagaagcggctcgatttcgccgggttcttcgccatgctgtttgagaggttctgctccccggccaacaagaagaaagactgagtgattgcaggtcagctgtggatttctcgttttgtgatcttggacgtggaaattacattttactgggtggtgtacagtctgcacttgtgttctattaagataaatctgctcttgcttttttactttcttctggtgcaatgactacagtttacttgatgtatttattgtcgcccttgtggaattgatttagtttatgtgaacgattgatttattttgggttaagataatgcagtgagtgtgtgatgccttgtatggacatgtgagaaccgattttgctcattgtgaacaaaattttagc

SEQ ID NO: 150571 - DNA, 2178 bp, Zea Mays
ctccacgaaccacatcaaaactgatcaactctctccctctgcttcccgctagagcaaacgccacgagagtcgcgattcttccaccacttccacgggaccggtcggatccaatctgctgccgcccagccaccgccaccgccgccaccgccggctcctctataggggtcttccctcctcttcgcccttcgcaacccgcaagttccgagcgattgatgagtatttttctccccgtcccttggagcgactcggtggatgcgagggacctgtccgcgctcgacccgccttcgcccctatctcgccgcccggcgggcaggctcctgctctcgccttccgttcccggagctagccgcaggcccatgggctagtgggtcgtcgttcgccctcctgcgatcgcgagcggagaggcggcctgcgggatccgcccgtctccaatccaaataactcctctccttggacgatttcggagttactggcctgcctgaaaatcgattcctgctaacgccagtattgtgcttttcagtaacaagagtgtacagttgttgcttcttgggatgtgaatcctgtcttgggtggggatccagctcacgctagatttccccccttttgcctttcactttttcactcgggagggaaaggttgggttcctgggtaattaacatccaatcgctctgcttgattctaccttatcttctaatcactatttccgtgctcttaatgcaagtggtgggaaggcaaagtaaatattgtattgccggttttggggacatattcttggggatattccggtctgtgcaaacatatctcttgcccttagtttagtttgatgctcatatcagtattcagtactggtggggagtgcacatatcacaaatcctgattatcctcggccgttggggagatgagttcctcacaagaatccaccttcacctcggcctcagcggctgcacaagttaatgcttccgctttggacttgctcccggtctatgccaaggagcttatcgccggcggcgctgctggtgcatttgcaaagactgcggtagcaccactggagagggtcaagatcttattgcagacaagaactgaaggtttccagtccctcgggatcctccagtccttgaggaagctgtggcaatacgagggaattcgaggcttctacaaagggaacggtgcaagcgtgcttcggattgttccatatgcagcattgcattacatgacatatgagcagtataggtgctggatattgaataattctgcttcatcaataggtacagggcctgtcgttgatcttttagctggctctgctgctggtggtactgcagttttgtgtacatacccattagacttggctaggaccaagctggcataccaggtttcaaatgttggccaaactggtaatgctttgggaaattctggtcaacaacaaacgtataatggcataaaagatgttttcaagactgtttacaaggaaggaggtgcacgatctttgtatcgtggagtaggcccaactcttattggtattcttccatatgctggcttgaagttttacatatatgaagatctgaaatctcaagttccagacgattacaaggattctgttatactgaagctctcttgtggagctttagctggtctatttggacaaaccctcacttatccactggatgttgtccggagacaaatgcaggttcagagcaagcagtctcaaaattcgagcgatggcttccgtataagaggaacttttcagggtctcttgctcatcattcggtgccaagggtggagacaactctttgctggcttgagccttaactatgtcaaggttgtcccttcagtagctatcggtttcacaacatacgacatgatgaaggcattgcttggagttcctccccgagagagagtccatgcgtcaggtggtaacaagtgaagcaatgttggccatccttgtgttatgactgatgaactaaagaaattctaggttgtgagttgtgacattgttattcttgttatgaatcccattgcatagggtggagagtgttgtatattggtcaaatagctatattcatgtaacattaagttgagatgcttgtatcatccattatgctgcttgtaatgtaaccatgaatacaatgacgcccctaaagatcactttaaattaactataaaagattagtattaccctta

SEQ ID NO: 150572 - DNA, 303 bp, Zea Mays
atgtcgcaggccgacgggatctggtatgctggctgctggaagtcacagatcaccgcggccgccgggatgtcgcaggccgacgggatctgtgggcaaacggatatatccgcggatatccgttacccgcgggtaacggatgtggatactgtttgttatccatggcggatatgggaggagttgtgcatggaggagataattggatttagtgagacgaaaggttactccatgatgcagcgagatcatgggggtggaggtggagggctaggaatttggcgtggcagcaatggagtgatgggggagtag

SEQ ID NO: 150573 - DNA, 108 bp, Zea Mays
gctaaacaaggtgatatcaggcatgcatagtcagctttctcacttacaaatcattaaatccccaatggcacacgagctctttttttcgtaccaaagctactaaaaaac

SEQ ID NO: 150574 - DNA, 401 bp, Zea Mays
atggcatcaaagaaagggggcagcttcacctccacaaggctccgctactgggccagcaaggggcctagaagccaaaggcgcatgcatgcataccaggtcgcaatagaacttggagcgacagtccagagttggtgctgccaaagaagccgcagctgttggtgcacaggtggtggccctcctgccactccgctaatgctcttctggcatagccgccagaccaaatcaggggagcgcaagtatcaaagtatggctgggtttgggagtctgagaagcagagggcagaagggattaaaaaggcacagcgtaaagtgttgaaccgctcaaagcttaggaaagaagcatacatagagaggataagggaggtggatcagataggagtgaattactgtaatttcaattga

SEQ ID NO: 150575 - DNA, 923 bp, Zea Mays
accaatcagcgcccgtctcttcaaacaccgcgaagccgcccccgctcccaaacccgaccgagcaaagcgcaaagccccccaaccgcggatcaatccgcagcatcgatggcgcccaaggcggagaaaaagccggcggcgaagaagcccgcggaggaggagcccgcgaccgagaaggcggagaaggctccggcagggaagaagccgaaggcggagaaacgcctccccgcgggcaagtccggcgccggcgagggcaagaagggcaagaagaaagccaagaagagcgtggagacctacaagatctacatcttcaaggtgctcaagcaggtgcaccccgacatcggcatctcgtccaaggccatgtccatcatgaattccttcatcaacgacatcttcgagaagctcgccgcggaggccgccaagctcgcccgctacaacaagaagcccaccatcacctcccgcgagatccagacctccgtccgcctcgtcctacccggcgagctcgccaagcacgccgtctctgaaggcacaaaggcggtcaccaagttcacttcgtcttagattggttgccttccctctcgtttgtactggtgtctggtagtagatctcatctagttgggggtgctgttgctagtcggtcgtgggtccctttggtatgattggccctgttcaatgggtttgcaagtgattagtttgtacatggttgtagtagatatcgtttcagctgtgattctttattactgctatgctatagttgtagtgttctcgttcccatttcttgatgcagtcctatcaactatatggttgtttagttacatgttctttttttaacctacatccatcaccatcagtacggttctaccattgacacagactgaattctgagtgcatccggaatgctaattgtctgtttgacacttttgagc

SEQ ID NO: 150576 - DNA, 522 bp, Zea Mays
agggcacatttccctttcacctactgccgtgcttcttctcgtagcccaactagcattccatcatcgatggcgcccaaggcggagaaaaagccggcggcgaagaagcccgcggaggaggagcccgcgaccgagaaggcggagaaggctccggcagggaagaagccgaaggcggagaaacgcctccccgcgggcaagtccggcgccggcgagggcaagaagggcaagaagaaagccaagaagagcgtggagacctacaagatctacatcttcaaggtgctcaagcaggtgcaccccgacatcggcatctcgtccaaggccatgtccatcatgaattccttcatcaacgacatcttcgagaagctcgccgcggaggccgccaagctcgcccgctacaacaagaagcccaccatcacctcccgcgagatccagacctccgtccgcctcgtcctacccggcgagctcgccaagcacgccgtctctgaaggcacaaaggcggtcaccaagttcacttcgtcttagatt

SEQ ID NO: 150577 - DNA, 426 bp, Zea Mays
cggcattgtgaatagaggttcatctttgtgattaggttgccaccgccgctgctttctactcattcgacgaatgttttgcaaagaagaaatctggtttttcttaccctcgattccttcctatgatacaactaacaaaatgaaatggtacattcagcatcttctacactgcatctaagctttgaagagttacagtctcatataaaataggatggcttggactcttattatcctaggagcctggacggtttgaaagcatagaaacagagtggtgttcggtagagtttctcccaacctcactcttattctggagtctgctaatgaggaaagcgagaaatggcaagctgcaggagccaagggttatcttttctggatgctccaagccatataatttagggtggttggatccttcatggatatttttatgta

SEQ ID NO: 150578 - DNA, 3531 bp, Zea Mays
gcaattgatcgctccaccaccccacgccgaccgatcataaggaaccgtattcccttggccgtcgccttctcgcattctttttttttcacaccgtcccctgcttccgctgctccgcccatggcggccggcggcggtggaggcccaccgccacctgggccgccgccgatggtgcggaggctggccgtagaggtggtagacgcccgcgacctcgtaccaaaggacggcctcggcacgtccagcgccttcgcggtcgtggatttcgacggccagcggaagcgcacgcgcaccgtgccgcgagacctgagcccgcagtggcacgagcgcctcgagttcgccgtgcatgacccggcgaacatgcacgccgaggcgctcgacgtctcgctctaccacgaccgccgcttcaacccctccggcggcggcgggggcagcggcaagaaccacttcctcggccgcgtccgcatctacggctcccagttctcgcgccgcggggaggagggcatcgtctactttccgctcgagaagcgcagcctgctcagctggatccgcggcgaggtcggcctcaagatttactactacgatgagcctgcaatgatgccgccgcctccggaagacaagccgcctgagcagcaggccgacaacgcgccaccgccggaggtgccgccggaagcgccgagagagctcccagagatgcccgcaccgaccgaggccgccgtcgaagtgcagcagccggcggcgcaacctccgatcatcatcgtggaggaagcgcccatgcacccaccgatgatgatgccgccgatgcacgggccacacggcccccacggtccgatgatgccgccgatgcacggccctcacggccccatgatgccgccaccgatgcacgggccacacgggccaatgatgccgccaccaccagaggcgccgcagccagagccagagcccaaaccggagccggagttcggcgaccagtaccctcccgaggtgcgcaagacgcggatggcgtcgagcacggagcgcgtccgcgtcgtgcgccacccgagcggcgggttgggcccggattactatgcgccgtctccccgcgtcatcccggggaggtttgtgtccaccggcgagtccgtggagccggtgcaatcgtcgtcgtacgacctggtggagccgatgcgctacctcttcgtgcgcgtcgtgcgggtgcgcggcatacgcgcctgcgagggcccctacgtcaaggtccaggctggcccgcactcgctccgttcgcggccaggccgggacgtctccggcaccggcaatcccgaatggaaccaggtgttcgccatcagcaacgccaagccggagcccacgctcgagatctccgtgtgggacggaggcgcgccctctcctgccgaagccttcctcggcggcgtgtgcttcgacctctccgacgtgccggtccgcgaccagcccgatggcccgctggcgccgcagtggtacaggctcgagggcggcgagccgggcatggtgacgggggacatcatggtggcggtgtggataggcacgcaggctgacgaagcgttcccggaggcgtggaacaccgacgcgccgtacgccgcgtacacgcgctccaaggtgtaccagtcgcccaagctctggtaccttcgggcgtcgatcatcgaggcacaggaccttcgcgtcccggcgccgccgccggggctgccgttcgacgtgcgcgtcaagatacagctcggcttccagtcggcgcggacgcgccggtcggtggccagcagcagcggctccgcgttcgcgtggtccgaagacctcatgttcgtcgcgtccgagccgctcgacgacaacctcatcgtgctagtggaggatcggtccatgatcaaggaacccgcgctcctcggccacgcgactatccctgtgacctccgtcgagcagcgcctcgacgaacggcagatcgtcgcgccgagatggttcaacctcgaaggcgggacgtcaggcatcggcatgccccacggctacgacggcggcccaccggctttctactccgggcggctgcaccttcggctctgcctggaaggcgggtaccacgtgctcgacgaggcggcgcacgtgtgcagcgactaccggcccacggcgaagcagctgtggaagccgcccgtgggcgtgctggagctcggcatcatcggagcgtgcggcttgctgccgatgaagacgaagggaggcgccaaggggtcgaccgacgcctactgcgtggccaagtacggcaagaagtgggtgcgcacgcgcaccatcaccgacagcctgaacccacggtggaatgagcagtacacgtggcaggtgtacgacccgtgcactgtgctgacggtcgccgtgttcgacaactggcgcatgttcgccggcgccggcgacgagcggcaggactaccgcatcgggaaggtgcgagtgcgcgtctccacgctggagagcaaccgggcgtacacggcgtcgtacccgctgctggtgctgctgcggtcggggctgaagaagatgggcgaggtgcagctcgccgtgcggttctcgtctccggcgcagctaccggacacgtgggccacgtacacgacgccgctgctgccgcgcatgcactacctgcgcccgatcggcgtcgcgcagcaggaggcgctccggggcgcggccgtgcgcaccgtggccacgtggctggcgcggtcggagccgccgctggggccggaggtggtgaagtacatgctcgacgcgaacgcgcacacgtggagcgtgcggcgcgccaaggccaactggttccgcatcatgggggtgctcgcctgggccgtgggtctggcgcggtggctggacggcgtgcagcggtggcgcaacccgtcgacgaccgtgctggtccacgcgctctacctcgtcctggtgtggtacccggagctggtggtgcccacggcgtcgctgtacgtgttcatgatcggcgtgtggtactaccggttccggccccgggcccctgtcggcatggacgcgcggctgtctcaggccgacacggtggacggcgacgagctggaggaggagttcgacccggtgccgccgcccgaggtcctccggctgcggtacgagcggctgcgcacgctggccgggcgggtgcagcgcgtcatgggcgacgtggcggcgcagggcgagcggctgcaggcgctggtgagctggcgggacccgcgcgccagccggatcttcgtgggcgtctgcctcgccgtggccgtcgcgctgtacgccatgccgcccaagatggtggccgtggccagcgggttctactacctgcgccatccgatgttccgggaccctatgcccccgccggcggtcaacttcttccgccgcctgcccagcctgtccgacaggttgctctgagaaactggggcctttttaatttctcgctctcccacaccctgattattctccatttcgctgtaacaataacgagctgtgcgagcagtgtatcggaggatagaaacaacaaaactgagattggtgtattcataagcaaatatatagatagtgatacattcc

SEQ ID NO: 150579 - DNA, 1098 bp, Zea Mays
tcacggccagggaccaagctactcgtaaacaccatcagagtgtacacaagaacacgtacgcggcgcacggcgtcgttagtcaccaagcgggccatcggcaatggcgagcacgcaagctccagcggcggccgacaacgtggaccccgtctacgagtggctcgacgatggcgccagctaccttctccgcctcgacctcccagggttcaagaaggaggactttcgggtgcacgtggacggcgagggccggctcaccgtcatcggcaatcgcaaacccacgcccggcggcggcggcaaggcgctgcggctccacaagacgttccagctgcccaatacggccaaccttgataccatcacgggccgcttcgacggcaacgtgctcacgctcaccgtgcccaaactgctcgccggtgctgatgcccccacaacgccaccaccgcagtccaaggaggaggcgcgagtcgccggcgataagccagatcaggcggacaagctgcccgccagggttggccgtggccgtgaggagacgacggaggagcggaggaccaccgagaccgagaggactagcttggctgcgacaagcaaagaggaagacgaggagaaggccaagcccatggtggcgctgccgccgcagtcgagcgagaaggcgagcggagaccatcaacgagatgaccagcaggatggcaaggcgcaggccgaccacaggcacagggagatggtcgctcgcgaggccgcgcgcaggatcgaggcggcgcgggcgagggtggcggaggccaaggccaaggcggagcgggagaggaagtgcgagcactggaaggagcgcgccgtggaggagggcctcaggttggcggaggcggtcaataacaagaaggaggtgatcgccacggccgtcgccgccttcacacttggcgtcttcgtctccagtaggctcttctccaggacttaatcaacccatgcgtaatcatggagcagacaatttcacgtatgtgtgagcatgagaacatgagcagcatcgccaggttatattgattcgtagacttgtacatgcatgatccagcactaatattcatatgtattaattattgctccctattgagcact

SEQ ID NO: 150580 - DNA, 1398 bp, Zea Mays
cgtggtcgcggaaactacttttctggtccacacacgtgccactcgacggcgagcgtccacgagtgacgtgggatgtggggtcccgaacagcctggctcagctgcccgccaccgtcgaagcatcgcacgtcccgcgaagcacgaggagacacgatgtgatattcctgaaaaccaaaaggtaaaagaagcaagatctgccgcggctccattttctggtcgcctcctccgccactgccatctccctcctctgtcctccgtaccactcgtcttcgtctagccgccgaccgccaccaccatggcacccggcctctacaccgacatcggcaagaagaccagagatctgctgtacaaggactacaacacgcaccagaagttctccctcaccacctgctcccccaatggcgtcgcaatcacagccgcaggaacaaggaaaaatgagtccatctttggtgagcttcacacccagattaagaacaagaaattgacagttgatgtcaaagcaaactcagaatcagatcttttgacaacaatcactgtcgatgagtttggtactccagggctaaaatcaattatcaatttggttgttccagaccagaggtcagggaagcttgaattccagtacctacatgaatatgctggtgtgaatgcaagcgtcgggcttaattccaaccctatggttaacctttctggtgcctttggaagcaaagcactatcagtcggcgttgatgtctcatttgatacggcgactagcgatttcaccaagtacaacgctgccctgagcctcaccagtccagatcttattgcttcccttcatctgaataaccacggtgataccctggttgcgtcctactaccacttggtaaagaaccattcaggcactgctgttggagctgagttgtctcacagcatgtcgagaaatgagagcacgctaatcttcgggtcccagcactcgctggatccccacacgactatcaagacacgtttcaacaactacggcatggccagtgcccttgtccagcatgaatggcgtcccaagtccttcgtcaccatctctggtgacgttgacactaaggcgattgagaagagcacgaaagttggcctatccttggtgctcaagcactgaagtgccgagtgtttttgggctctaggaatttattttcggttcagttggattggaataaacatggtctggagtcatctttgcggcaccattttgatcttgaactatatatttttttcactctctgcatgatcaatttcataggaaaatattaggattaattgactttatgtttcaattctcagcgccctgttaataattctgttgattgagaccaattgttaaacttgtgaaatatataatggtgattactttgggtttacatctatgttcattcat

SEQ ID NO: 150581 - DNA, 468 bp, Zea Mays
tgaagagaaacacatatataagcaaaccctacagccgaaaatgatcatcgacaccaacatatactggtagtagtttcggtttcatggaaaaaacacaaatgacatgaagagcttctcaaggacttaagatgtcagagcatccaacacggtatcctacattagacgaacaatagattacatggtcatatatatatatatatgctacaatttccacattgtctttttggaacggctggccaacctagactgcgatgtcatgctggatgtgccggagtaagacaggggttacgatgtctggagagctaagctggggaagatggccttcagacggcatcacctccacgatggagtcgccaccaaggtgcctgtgcaggtactcagacaccacaactggcaccgcgagatccttggtgctctgaacaatgtggcatgggacactaacgtgccggaggaggctgcgcacatcgc

SEQ ID NO: 150582 - DNA, 1407 bp, Zea Mays
cgaggcggcagcagcagcagcaaccgaagaagcctttgttgcaatcccagtcgtcggaacactcgaaatttccctgtgtacagttgcctaccctccctcccgctcggctacacccacgcgcccacctacccaaaagaaccgcgcggcctccttccccggtgccaccacctcgtcggactcgcatcgatcggcagctaaacaagcacccgccgcgcgcgatggcaatggacgcggctgtggccgagaagaccggcggaggcggagcggccggggtcgcggcgggcgcgcaggtggggctgaacggcggcggcgtcggcggcggcgagaggcgttcccggttccatcgcatctgcgtgtactgcggcagcgccaagggccggaagcccagctaccaggacgccgccgtcgagctcggcaaggagttggtggagaggggcatcgacctggtctacgggggaggttccatcggcctcatggggctggtctctcatgcagttcatgatggaggtcgccatgtgattggggtcataccgaggtccttgatgcccagagaggtaactggcgaacctgttggagaagtgagggcggtctctggcatgcacgagaggaaggcggagatggcccgttttgctgacgccttcatagcgctacctggcggctacggaactctggaagaggtgcttgaggtcatcacctgggcgcaactaggaatccataggaagccggttgggcttgtgaacgtggatgggttctacgacccgttgctgtccttcatcgacatggccgtgaacgaagggttcatcaaggaggacgctcggcgcatcgtcgtctcagctcccacggcgaaggagcttgttctcaagcttgaggagtatgttccggaatacgaggtcggtttggtgtgggaggatcagatgccggcggcggagctggagagcccgggatcgcctcctcctcgtctctggacgtcggctgcccttctctgaccagttgctgaccgacagcggccggatctcaaagtagtaggcatctatgctgatatatatatactaatctaattaaccaacaagaacgggacgtcgtcgtctacctctagctctagactcagcctgttgatttgttcttttgggatgggtgacagtgtttaccttagcatcgttagccgcagtgcagtgcgtctctctgtcatcgctgatcttttgggcttttgctcctataggagcaggaaggaaggcatggtatgtatgtatattccgggtacgtggcgacggacctgatcggctgttcttgttcgctcgcagcctcgcactcgcactgtgtgatggaatgggatgatgatgtactgtgtccggaacaaacaaacaaaaaaagactaattatgcaatgtaatcgattcgtttctaatct

SEQ ID NO: 150583 - DNA, 1042 bp, Zea Mays
cgaggcggcagcagcagcagcaaccgaagaagcctttgttgcaatcccagtcgtcggaacactcgaaatttccctgtgtacagttgcctaccctccctcccgctcggctacacccacgcgcccacctacccaaaagaaccgcgcggcctccttccccggtgccaccacctcgtcggactcgcatcgatcggcagctaaacaagcacccgccgcgcgcgatggcaatggacgcggctgtggccgagaagaccggcggaggcggagcggccggggtcgcggcgggcgcgcaggtggggctgaacggcggcggcgtcggcggcggcgagaggcgttcccggttccatcgcatctgcgtgtactgcggcagcgccaagggccggaagcccagctaccaggacgccgccgtcgagctcggcaaggagttggtggagaggggcatcgacctggtctacgggggaggttccatcggcctcatggggctggtctctcatgcagttcatgatggaggtcgccatgtgattggggtcataccgaggtccttgatgcccagagaggtaactggcgaacctgttggagaagtgagggcggtctctggcatgcacgagaggaaggcggagatggcccgttttgctgacgccttcatagcgctacctggcggctacggaactctggaagaggtgcttgaggtcatcacctgggcgcaactaggaatccataggaagccggtaacaactgatcctgatatataccttgttggatccaaacaaaaaaaaatgctcccaatagttgagcatcatgtgcggcgctgaattctttttgttgtacttgcaatcctgtggtttatcacaaagtcgttagattagagatactgcgatctttttgtttttttggctgacatcttgccttggccatggcttcgtggcgcacggtgtgcccatgtgataagcttgggtttttgatgattagtctagtttagcacccacagttgttttaatcggaacataatgggggagcatgcgatctgcactctcccttgtttata

SEQ ID NO: 150584 - DNA, 888 bp, Zea Mays
cgaggcggcagcagcagcagcaaccgaagaagcctttgttgcaatcccagtcgtcggaacactcgaaatttccctgtgtacagttgcctaccctccctcccgctcggctacacccacgcgcccacctacccaaaagaaccgcgcggcctccttccccggtgccaccacctcgtcggactcgcatcgatcggcagctaaacaagcacccgccgcgcgcgatggcaatggacgcggctgtggccgagaagaccggcggaggcggagcggccggggtcgcggcgggcgcgcaggtggggctgaacggcggcggcgtcggcggcggcgagaggcgttcccggttccatcgcatctgcgtgtactgcggcagcgccaagggccggaagcccagctaccaggacgccgccgtcgagctcggcaaggagttggtacgccacgggacccttctccctcacggcctcacctaaaaaatcccgccttcacggtccaacaaacaaacaaaaaaatccaatcttttcgggggtgaatcgccgccgcgcggtctggtctcccagctcccaggcaggcagcaccacatcaaaatcccgcgcgcctctgttgctgccatcttgcttgcctcgctccacccgactgcgcctttgcggccgtggcgcacgccgcgcgtccttgggtgatcatgcacccgctctgcgcggcgaacctcagctcggctgctcgccgtcggggggagccgaaaggcgccgcgagtctttgccgttttggagggcggtggtgtcgtagttggatggtcatctcccatactataatggaatggatggtgctgccgcgccgtcaccgtgagccggtgacctcatttgcctccgcggatgaacaatctttgcttccttgctt

SEQ ID NO: 150585 - DNA, 118 bp, Zea Mays
aacaggtctgcaagaccttctgccatcaattatcaaccaactgggccctgataacctggacaaccttaagaagctggctgagcattccagaggcaggtgcctggtggtgctgaagctg

SEQ ID NO: 150586 - DNA, 999 bp, Zea Mays
tcagggccaagaaagaagctcaactcggcatgcttcctgtttgaagcaagggcaacaaacttaccccaccagatctctgtcgccaaagcagggctagtgaataagctgtgtttcctcccggattgtcactgcttttatatttgtgcatttattttgagggaaacattttgcccaaaaaaggcctgcagtgcacgttttaaacaagtcatttgaaccaactcttatgctgaaaactgtatgtgatactgcagaaggcaacacactagcttgataggaaagttggttggcaagcataggtggactctggtgccttcatatatctatatatatattttaagttgacgatcttcgtgatgctgaaactgatgaagacctccgatgaaaaaagagacatgctgcacatgcacgagggtacttgcagatcgatgtcggctctatggacgaacactcgaccaagtcagatgaggagtatgagggcctagccatgcgcgacgtgatggctactggtccgacgatgagcagcaagctgtgagttaaagatgaactcacctgccctggagagtaacatccataggagtgaggcaaaatggctggtaccaccacaacatggacccgttcctgaagatgtccaaggaggtggtagccgacaccataatgtcttgtgtcattgtgtcaccggtcggcaacacactgcgctggtaccggcgggtgttgtgtttcttaggcgtctgcttctgtgctttgagttgtgctatagagtggttgtgccaactactgattttaaaagaaaaaggtgagctgagaatcattgttgaaaacaaacatgtaattgttcgttctcatcagttgtgccaactaccaagcatttcattgatcagaatttatcgttgctcatgagaaccaaaagtaagacacttctcaataacattggatgcaaatttctgctagcttatcttcactatcttttctcgtatcaatataacacacatttatacataa

SEQ ID NO: 150587 - DNA, 969 bp, Zea Mays
tcagggccaagaaagaagctcaactcggcatgcttcctgtttgaagcaagggcaacaaacttaccccaccagatctctgtcgccaaagcagggctagtgaataagctgtgtttcctcccggattgtcactgcttttatatttgtgcatttattttgagggaaacattttgcccaaaaaaggcctgcagtgcacgttttaaacaagtcatttgaaccaactcttatgctgaaaactgtatgtgatactgcagaaggcaacacactagcttgataggaaagttggttggcaagcatagtctggttctcatggcaggtggactctggtgccttcatatatctatatatatattttaagttgacgatcttcgtgatgctgaaactgatgaagacctccgatgaaaaaagagacatgctgcacatgcacgagggtacttgcagatcgatgtcggctctatggacgaacactcgaccaagtcagatgaggagtatgagggcctagccatgcgcgacgtgatggctactggtccgacgatgagcagcaagctgtgagttaaagatgaactcacctgccctggagagtaacatccataggagtgaggcaaaatggctggtaccaccacaacatggacccgttcctgaagatgtccaaggaggtggtagccgacaccataatgtcttgtgtcattgtgtcaccggtcggcaacacactgcgctggtaccggcgggtgttgtgtttcttaggcgtctgcttctgtgctttgagttgtgctatagagtggttgtgccaactactgattttaaaagaaaaaggtgagctgagaatcattgttgaaaacaaacatgtaattgttcgttctcatcagttgtgccaactaccaagcatttcattgatcagaatttatcgttgctcatgagaaccaaaagtaagacacttctcaataacattggatgcaaatttctgctagctta

SEQ ID NO: 150588 - DNA, 1078 bp, Zea Mays
tctcctcctcccactcgacgaggatcgcgaggatgctggaggacgtcgtcgctgtcacgcttgacgttagggcctccgatgcttgacgttagggcctctcgcttgaagaggaacacaaacagagctcatgttttttattttgctctgcattatctactgcttctctgtgggggcgttatttacagtatgtggcctgtttgttgtgttgttcctgcggaagggcgggcgggccgaaggtgtttaagaaaatgttgttgtcaacatcaacctcctggaagggccagaacgcaggcagcgcctcaactcgtcaccccatcagcacgatgctacttcatgtggagctggtatgtaggatgattatcacgagtacttcaagcgctcattttaggaagacatcgctgcgcaagtgcctcaaggagtggaatgtaccggtttttggttgatggtgtctggaggtgtgatgagacaaaaccctttgtacgtgatgaatatggactgatcagcaatgaagtgcttgtggaaaacaatgtactacccgttgtgcagccagagccttctatcagaggaactaatatggataaggatgcccctggagccatcatctcagaacccaagcatgcaaatagcagttatccgccatgtggtctctggaatattattacacaataccatatatgacgttgttcccctttctagcaagttaacagttttggacactcagcttcctgttaaacaagcatttaaaataatgcatgatgtgggtcttgctctggttcctttttgggatgaccgtcagggaaccataacaggcatgctcactgcatcagattttgttttaatcttgagaaagttgcagagaaacattcaagttattggcaacgaagagcccatttctgcttggaaagaagcaaagctacagttctatggtgggcctgatggtgctgtcatgcagagaacgccattaatccatgtacttctccatatatttgctgattctttcatttgattcaatgtgtaagcagttgcaagatcagcactttcataatataaatatattacttgtatgaaattctagata

SEQ ID NO: 150589 - DNA, 1006 bp, Zea Mays
tctcctcctcccactcgacgaggatcgcgaggatgctggaggacgtcgtcgctgtcacgcttgacgttagggcctccgatgcttgacgttagggcctctcgcttgaagaggaacacaaacagagctcatgttttttattttgctctgcattatctactgcttctctgtgggggcgttatttacagtatgtggcctgtttgttgtgttgttcctgcggaagggcgggcgggccgaaggtgtttaagaaaatgttgttgtcaacatcaacctcctggaagggccagaacgcaggcagcgcctcaactcgtcaccccatcagcacggatgattatcacgagtacttcaagcgctcattttaggaagacatcgctgcgcaagtgcctcaaggagtggaatgtaccggtttttggttgatggtgtctggaggtgtgatgagacaaaaccctttgtacgtgatgaatatggactgatcagcaatgaagtgcttgtggaaaacaatgtactacccgttgtgcagccagagccttctatcagaggaactaatatggataagggtaccattttgaaaacaatgcccctggagccatcatctcagaacccaagcatgcaaatagcagttatccgccatgtggtctctggaatattattacacaataccatatatgacgttgttcccctttctagcaagggtcttgctctggttcctttttgggatgaccgtcagggaaccataacaggcatgctcactgcatcagattttgttttaatcttgagaaagttgcagagaaacattcaagttattggcaacgaagagcccatttctgcttggaaagaagcaaagctacagttctatggtgggcctgatggtgctgtcatgcagagaacgccattaatccatgtacttctccatatatttgctgattctttcatttgattcaatgtgtaagcagttgcaagatcagcactttcataatataaatatattacttgtatgaaattctagata

SEQ ID NO: 150590 - DNA, 1317 bp, Zea Mays
gctgtcaatcgcctccccactgcggcagatccgcaatccgctcctccaccaccgcgctcctcacccacgccagggacaagactgtctacctccacgcccgcctcaccaactccgcggccaccgccaccgccacgcccctcccccatggtcgtcgagtccgagtggtggaaccagcgacgcatgcgcgtcgagggcgacgtgaaataggtgctccaccgcgggcacaacgggcacagtggaggtggaacgagcaccatcgagttctggttccaccgaatccaccgctcgcacaccggatccatcgctcccacatgcccgcacaccggatccaccgctccctcccccgcgatggcctggttccaccgagacaactgcggggctagggtttggattcgtgggtggagcccaaggctagatccagcagggggagggaggtagaggaggggagggaactgctggtggtcggcagtgggcgaaggcgcgacaatccaggatatggattcctgagcgtcacccacccgcccatccacgtcgcgcggtgtagtcatcccctatccgcagccgcctcgctccctctcccacaacaaatccattctcctcctcccactcgacgaggatcgcgaggatgctggaggacgtcgtcgctgtcacgcttgacgttagggcctccgatgcttgacgttagggcctctcgcttgaagaggaacacaaacagagctcatgttttttattttgctctgcattatctactgcttctctgtgggggcgttatttacagtatgtggcctgtttgttgtgttgttcctgcggaagggcgggcgggccgaaggtgtttaagaaaatgttgttgtcaacatcaacctcctggaagggccagaacgcaggcagcgcctcaactcgtcaccccatcagcacggtgagccccttatctggattgttatcatggtacgcggtgcgctgcaagcctgcaagtgacatcaaattggattggtagtcagcgggtgtcatagtgtcagttcgatggaatggttctgcagtgcatgtgcttctgtaatttccgcaagaagcagtcaacttctccctgatatggcactaggacattgtagtgattcccgcacgtttgtggaactcgacaacctaccagagcgccagatgtttcattgagaagagaactcctccagtctggctttccactggtctagtctctcctttaaaccaaatttgataccactcattgaagtcaatagctgggatgtagacatgtgaaaccacacctgtggaactttcagcgtgtgatgactgggtcactggtggaat

SEQ ID NO: 150591 - DNA, 882 bp, Zea Mays
acttccagaattgtggtgttgactaatgtgggatctgttgcgacattcaggtacacctgcatgcaggcactgatgaaccgctgaatatcacatttatgagagcaccttcttctgcacttctcaaaatagatgttcctctgatgttcattggagaggatgcctcgcctggtctcaggaaaggagcttacttcaacaccataaaacgaacagccaagtatctgtgccctgctgacatagtaccaccatacattgaagtggatctaagtgagttggatgtaggacagaaattgctgatgcgtgatctgaaagttcatcctgcgttgaagctgcttcattcgccagatcagcccatctgtaactttaccggatcaaggtctccagaatagaagaagggaaaataacttgcttctttgtatgagctgttttgagcacaataaggttttgtttcgtacttgagtgattcaggtgctacttgtcctactgttaggatgaattgtagccagagacacctatttttacctcaggaagggatcttttgagcaggtagatgctactacagctagacgcacttgcaaattggacagaaatatggtcttctagtgttaacagaaacttatggtgcggcgagcaatattgaaaattgtttgcaatctaatttagcattacgtatttacaatatgatttatatagataacataagtttctgaggatgatcaagaaaaaacaagcttttatcttttgccatcgtgacggcttaagatcctgtatctgtaatcaacctgtaagctcaatatatcctcagtagcccatcttcgatactgggctggtcttatcacaaaagatgttaactatgctatatgtctagctctatgttactgatct

SEQ ID NO: 150592 - DNA, 1414 bp, Zea Mays
atgggtctcactgagcccaacgccaaagcccacagtcaaaacccccacatctctccactccccaagaacaggccgagtcacccagacctagccactccccagcaggcaagcaacctcgccaaaaccctacgccgctcaactatgctcatccggcgaccgctccaaaccctcaccctccccctcctccgccgccacttctccgccgccaccgtcgaggcctttgtgtcccccgaccaagccaccgacccgctctccccgccgtacgactacctcccgggccacccgcggccagacgctaagcacaatgaggtgatcctcgccgtcccgcgcgcctcttcggggcgccacgtagccgccaaggagcgcaaggccgggcgggtccccgccatcgtgttcgagcaggagaacggacaggagggcggcaacaagcgcctcatctccgttcgggccaatcagatccgcaagctcgtcgaccacctcggccggtccttcttcctctccaggctgttcagtctccaggtctggtcagaacatgccgggcagggcgaactcatcgaaagcgtccgcgtcctacccagaaaggtacacctgcatgcaggcactgatgaaccgctgaatatcacatttatgagagcaccttcttctgcacttctcaaaatagatgttcctctgatgttcattggagaggatgcctcgcctggtctcaggaaaggagcttacttcaacaccataaaacgaacagccaagtatctgtgccctgctgacatagtaccaccatacattgaagtggatctaagtgagttggatgtaggacagaaattgctgatgcgtgatctgaaagttcatcctgcgttgaagctgcttcattcgccagatcagcccatctgtaactttaccggatcaaggtctccagaatagaagaagggaaaataacttgcttctttgtatgagctgttttgagcacaataaggttttgtttcgtacttgagtgattcaggtgctacttgtcctactgttaggatgaattgtagccagagacacctatttttacctcaggaagggatcttttgagcaggtagatgctactacagctagacgcacttgcaaattggacagaaatatggtcttctagtgttaacagaaacttatggtgcggcgagcaatattgaaaattgtttgcaatctaatttagcattacgtatttacaatatgatttatatagataacataagtttctgaggatgatcaagaaaaaacaagcttttatcttttgccatcgtgacggcttaagatcctgtatctgtaatcaacctgtaagctcaatatatcctcagtagcccatcttcgatactgggctggtcttatcacaaaagatgttaactatgctatatgtctagctctatgttactgatct

SEQ ID NO: 150593 - DNA, 1488 bp, Zea Mays
atgggtctcactgagcccaacgccaaagcccacagtcaaaacccccacatctctccactccccaagaacaggccgagtcacccagacctagccactccccagcaggcaagcaacctcgccaaaaccctacgccgctcaactatgctcatccggcgaccgctccaaaccctcaccctccccctcctccgccgccacttctccgccgccaccgtcgaggcctttgtgtcccccgaccaagccaccgacccgctctccccgccgtacgactacctcccgggccacccgcggccagacgctaagcacaatgaggtgatcctcgccgtcccgcgcgcctcttcggggcgccacgtagccgccaaggagcgcaaggccgggcgggtccccgccatcgtgttcgagcaggagaacggacaggagggcggcaacaagcgcctcatctccgttcgggccaatcagatccgcaagctcgtcgaccacctcggccggtccttcttcctctccaggctgttcagtctccaggtctggtcagaacatgccgggcagggcgaactcatcgaaagcgtccgcgtcctacccagaaaggtacacctgcatgcaggcactgatgaaccgctgaatatcacatttatgagagcaccttcttctgcacttctcaaaatagatgttcctctgatgttcattggagaggatgcctcgcctggtctcaggaaaggtatgtaacatgctatgatgattcgtcaatttgcagagattgaacatgaaatgggaggtctttgatcttagaagctcacattttctatctatatattttttatttaaatagaacagaatgattaaaagaaggacctgggttatttgtaaatatttctcttgaccgtgcaatgagaagtaaagagctcatttctgccgaaaaatatttagctattcttttattgtcttgtggtttgttgctatatgatatgttcattcacttttgtctgaatcactgatccattatgcacctaacatctcatttaaaaaatgttgaccacaattctcaagctttacctgcattatggctgaaacttccatatgtgcctcctttgctgtgttaacatctggactaatgtgtataattggaactccaggagcttacttcaacaccataaaacgaacagccaagtatctgtgccctgctgacatagtaccaccatacattgaagtggatctaagtgagttggatgtaggacagaaattgctgatgcgtgatctgaaagttcatcctgcgttgaagctgcttcattcgccagatcagcccatctgtaactttaccggatcaaggtctccagaatagaagaagggaaaataacttgcttctttgtatgagctgttttgagcacaataaggttttgtttcgtacttgagtgattcaggtgctacttgtcctactgttaggatgaattgtagccagagacacctatttttacctcaggaagggatcttttgagc

SEQ ID NO: 150594 - DNA, 1170 bp, Zea Mays
atgggtctcactgagcccaacgccaaagcccacagtcaaaacccccacatctctccactccccaagaacaggccgagtcacccagacctagccactccccagcaggcaagcaacctcgccaaaaccctacgccgctcaactatgctcatccggcgaccgctccaaaccctcaccctccccctcctccgccgccacttctccgccgccaccgtcgaggcctttgtgtcccccgaccaagccaccgacccgctctccccgccgtacgactacctcccgggccacccgcggccagacgctaagcacaatgaggtgatcctcgccgtcccgcgcgcctcttcggggcgccacgtagccgccaaggagcgcaaggccgggcgggtccccgccatcgtgttcgagcaggagaacggacaggagggcggcaacaagcgcctcatctccgttcgggccaatcagatccgcaagctcgtcgaccacctcggccggtccttcttcctctccaggctgttcagtctccaggtctggtcagaacatgccgggcagggcgaactcatcgaaagcgtccgcgtcctacccagaaaggtgtgtgacttttctgttggatttaattgttttttccacaacagatttatagtaattgctaatgtctatttgtctgcgatgatggcataggggttactgcaattttttaaagcttgcacaactcaactgagggacgcacaggcattattgtgtaagagtgtggttagtggagataggtgttttggatggaaaaaatatttctgttacggttgtatagttgctccatttcttggtgaaagttatgaagacggtgtttgcttgttgagaaatatggaaatcaagaagatttagtggtggctttacagcagtaaacaaataaaattcgaatggcaaagcggtctaggactatatgtttggttccataggactaaactttagtcccttatagtctattttagtccctaaatatggggactaaaaggaaatcaatctgatttcctctcctctttttagtcctatctttggtaattttgagactaaaaaagagggactaaagtttagtctcatggaaccaaacatgccctaagtagttcgctgaccatcagttgttatgctggttcagaggtatctgagcaaaagttctgttac

SEQ ID NO: 150595 - DNA, 696 bp, Zea Mays
cacacggctggctcgctgcccgccggcctttaagagctcgctaggacagtaggacgcgaacgagtctgcggccagccagcaagcagtgcgagtacaggcatgggggctgccggcggacgcgcggttgcggtggcagccatggtggcggtggcggcggcgctgcctctgctcgcgtgtggcggttacgcggagtgctacgactactgcttcaaggactgcatctccaaggacaagtccatgagagactactgcagctacgcctgcgacaagacctgcgcgcccgacgcccggcggcggcgccccgcggtcgtccccatgaactgccagctcgcctgcgtcagggagtcctgccaccgtcgccgcgcggctgatggcgacgacgacaccaagacgaaagcctgctacgggcagtgcttacgacgaccgcggctgcgagaccagtgccgccctgccgaggcctctgcgcgcaggcagcggtgctggcgttgtcgggcggccagggccagcggactcaccggaccacccattccacgagaggcaggacgctcacggaccggcggcggcgtcgcccgaccatcccttccacgtgaaccacaaccgggacgctctcggcccggctgtctgcggcatcccctggccatcccgttccaccacgatgcacagcgcgtttacgccggctggagctcctggatttag

SEQ ID NO: 150596 - DNA, 269 bp, Zea Mays
ctctatcatgcactggatgagtcttgatgtcgtgtctagtgtgtgcaccagtcacatgacaaatgttaacaagtagtttgtagccgttgaaaatatagttcttggaaaggtatagacatgcctagtgtaggaaccaacgatgctttggacatgtctagtgcctctgattttagcccaacaaaagtgtaatactcaaaattgtgtacaagaaatacatagaggatttcctcattttaggtgccatatttgcatcataaaaagagcacacg

SEQ ID NO: 150597 - DNA, 369 bp, Zea Mays
atggcggcgaggctggcacagctgcgcgctcaggcggtgcaggcggcggagttcgcctcgaagcacggcggctcctactacaaggagctcatggagaagaacaagcagtacgtcgtgcagccccccaccatcgagaaatgccaggagctctccaagcagctcttctacacccgcctcgcaagcctaccaggtcggtatgagtcattctggaaggagcttgatggtgtcaagcaggtatggaagaacaggaaggacctcaaggttgaggaccttgggattgcgactttatttggagttgagctttatgcatggttctgcgtaggcgagattgttggcagaggtttcaccttaaccggctataaggtctag

SEQ ID NO: 150598 - DNA, 207 bp, Zea Mays
gcgctgaagcagctgtcgcgggagcaggtgcaggtggccaccaagttcgagatacagcgtgacgagagcggcacgcggaccgtgtgcggccggccggagtacgttcgcgcctgctgcgaggccagcctgcgccgcctcggcatcgactgcatcgacctctactaccagcaccacattgacaccacaattcccatcgaggagacggtc

SEQ ID NO: 150599 - DNA, 417 bp, Zea Mays
cgacgactcagcctcgccgtattcacgcggaggacgccctggatggtggatccgaggcgttccatggcctgccctatggcgtcaaggtgacatgctgcgccgaggtggaggccgcgttgaatgccgtgtaccggcggtgccgaagccttgaccgctccatgggactgctagagatacgcatggtgtccctcgacgccgcgattacaacatcaccatgttcggcgcctgcgcgcaagaggagttgtccatgtggcatcatctctggctccgccactctgattttataaattattccttaatttgctgaaagaaagatgatgataagcctttgttatatagaccagaattggtcagtcctttgctgatagtagttcatctgttgattcaggtgtatttttcgtatttgtatatattatg

SEQ ID NO: 150600 - DNA, 338 bp, Zea Mays
ttccctttcacaaaggagaactaccccctttggaatctcatccgcaacaacaagcagcttctcaaggctgaggtccatccatggaatagcggtgaggaactggagaagacactacttcagttggtcagcaaaacgatcacaccacctgcacaagcttcccctgtttgaactacagcaaaagcgaggtgggcaatccagcatccgctgaagtgggaccaccatcaggccctcctccgtgtgcacactgattactgatcaactctgtcgcaatacagcataactgcctgataattttcatagagccccccattcaacatgatatgtcctcaatctgtgtt

SEQ ID NO: 150601 - DNA, 1318 bp, Zea Mays
ttcatcacaacaccgacttaattgccagagcaaatcatgtacagtatgcattattaaagacgtatgtataatttacagcatatttcattgataatgtccacaaggaccaaagcatgcatgcaaatacgtacactactggtacaatctctgagcccatgctcccttcttcacaaatactggtacatctcctgcagtacatatacgaatacgtatgtctacggtacacgcatacaagtatgtatatgccctcgctcacttgccggggacgaagttggtagcgtaggcccaggcgttgttgttgacagggtcagcgaggtggtcggcgaggttctcaacgggacccttgccggtgacgatggcctgcacgaagaagccgaacatggagaacatggcgaggcggccgttcttgatctccttgaccttgagctccgcgaacgcctccgggtcgtcggcgagcccgagcgggtcgaagctgccgccggggtacagcgggtcgaccacctccccgagcgggccaccggcgatgcggtacccctcgacggcgcccatgagcaccacctggcacgcccagatggccaggatgctctgcgcgtggatcaggctcgggttgccgaggtagtcaagcccgccctcgctgaagatctgggacccggccttgaaccacacggcctcgccgaacttgacgccgttgcgggcgagcagctccgggaacacgcacccgagcgcgcccagcatggcccagcggcagtggatcacctccagctcgcggttcttggcgaaagtctccgggtcggcggacagccccgcggtgtcccagccgtagtcgccggggaactcgccggtcaggtagcttgggggctggccggacagcgggcccaggtacaggacgcggtcggccccgtaccaggggctgccggacgccgctggcttgggcttgccagcagtcttgcgcatggtgatgcgcccctcgccgaagacgtccctggtgctggtcgccggcttgccgacgagcgcgcgggaggtgagagccatggtggcggcggccatgtcgatcagatcacagcttttttcggatgcttacctcactctgtgctgtgtatgcgtgcgtgtgatggctgtgccattaacagaacacagcagctgcttttatacagttggaactggatagcagaccatctgttgctgggctgggattggttctgccgggatggcttggcgtctgatgtggcacctggtgggtgggacccagtggcctatcacacaagaatcctggtgtgtgccacgtaggaatggccagagcgaatcaggagctgccact

SEQ ID NO: 150602 - DNA, 113 bp, Zea Mays
atcattgtaaggctatcttcagcagtttatccatctccacactcacattcaaacttcaccatgtgaacaatatagtctacactgcaaaacagtacaaaacagtgttttatgat

SEQ ID NO: 150603 - DNA, 1476 bp, Zea Mays
cgccgattcactccctctctcgcgctggggcggaaacttctcccttgcgtcttcccatcgcgaaggtcttgtccatgccgacagctagttcccgacggactttctcggaggcggtcagcaccgacgacgaggaggctgcgcggggaggcaaggtcggacgaccctcgccgcctcgctgctcgtcgcgcaggtcgcgcagcaaagtagcaaactcctgcgaccctacccaccgcacctaccattctggagaggagaggaacagagccaagaaacaagcccggaagatggcaggcggcggagtggtgaagcacatcctgctggcaagcttcaaggaggaggtgacgcaggagcgcctggacgagctcatccgaggatacgccgcgctcgtcggcgtggtcccctccatgaaggcgttccactggggaactgatgtgagcatagaaaacatgcatcaagggttcacgcacgtcttcgagtccacgtttgaaagcacggaaggaatcaaggagtacattgagcaccctgcacacgtcgaattcgcaagtgtgttcttgcctgtgctggagaaggtcctcataatcgactacaaaccgacgtcggccaattagcggtagaacatgctctgtactggttcctcggaggatccagtttgattctactctttattttgctaaataaactcggtctgctttgtcccttgttaagaatgagctttgagttttctgtagtgcaattgttgtagcttcgcatgttttcatatgggaattacgttcctaaagaccgtatttgccacttggaagcagcaaactgcttgaacttcttggagattggacgctggtttgtttcttggttcggaaagaggaagtaggtggatggcgtgagactgctctagttattttttttgtcggattatttactcgttaatatagctcccatcctaaaatataattcgttttagattagacatatatttattaattagtatatgattgtagtttgtatgtatatctatattcactattattcgttcgaatgtggagtgaaaaaatgctagaaaaaactatatttcaagggttagtttggaaactcattttttccaagtgatttctgttttcctaagaaaaaataaactatttctccttaaaaatggaaataccttaagaaaacaaggttttcaaactagccctaagaaaaacagagttcccaaacttcccaaactatggaggaagtgtaaccgtggtttttttgggtttacttgtaaatactgtcgttcttcgttattgtattatgtggggaaaatatcctatgcaatcacttatcctggtgcaagcatgcaatcaagcgatctggtgcatccgatctagatctaatgatgactgttattttatatttaaccccttccacctaaaacatagtacctattttacttttaaccccttccatatgaaaccgttggatctagattggatgctctgg

SEQ ID NO: 150604 - DNA, 919 bp, Zea Mays
acttccagcaaggttctccaatccgtccgctaaattttacgggcgtcgccagagccgctaattgtggcggatcttcggacgtccgctacacgccgattcactccctctctcgcgctggggcggaaacttctcccttgcgtcttcccatcgcgaaggtcttgtccatgccgacagctagttcccgacggactttctcggaggcggtcagcaccgacgacgaggaggctgcgcggggaggcaaggtcggacgaccctcgccgcctcgctgctcgtcgcgcaggggaactgatgtgagcatagaaaacatgcatcaagggttcacgcacgtcttcgagtccacgtttgaaagcacggaaggaatcaaggagtacattgagcaccctgcacacgtcgaattcgcaagtgtgttcttgcctgtgctggagaaggtcctcataatcgactacaaaccgacgtcggccaattagcggtagaacatgctctgtactggttcctcggaggatccagtttgattctactctttattttgctaaataaactcggtctgctttgtcccttgttaagaatgagctttgagttttctgtagtgcaattgttgtagcttcgcatgttttcatatgggaattacgttcctaaagaccgtatttgccacttggaagcagcaaactgcttgaacttcttggagattggacgctggtttgtttcttggttcggaaagaggaagtaggtggatggcgtgagactgctctagttattttttttgtcggattatttactcgttaatatagctcccatcctaaaatataattcgttttagattagacatatatttattaattagtatatgattgtagtttgtatgtatatctatattcactattattcgttcgaatgtggagtgaaaaaatgctagaaaaaa

SEQ ID NO: 150605 - DNA, 409 bp, Zea Mays
aacatccatacgttgcaggtcaatatacttgtaatcctattaacatttctatatacaccaggacaacaatgtatcagcaaaagctttccagcctacaaattgctagggctaggaagtgagcataaaatgatcccaaaaagaaagaaatgcgagagggaggtaggggcgagggaataatacaggatttgagcgatctcttgcattatgcgacagcactaatatctgttggagatactctgcttgtcccggtccgctgtaggagcgtttcccctcgcctgcccttcgcgattcttgttgagccgggctactctgtactcctggcaataatgctgttgctcactcagcaacctccagcttctgctcccagtttcctactgccgttaacagaaccagactccacgaccatgtc

SEQ ID NO: 150606 - DNA, 450 bp, Zea Mays
atggcggcgcatctgcgctcggcggcggtgcgtctcggcgctctctggccgaagatgaggggcggtgcgtctcggcgctcacccaactggcggcgcgcggcagctccctacaggcccatgccagccgccatgtaccggagactcctcgtcgtcgcgccactctctccgcccgcggcccctccaggcccatgccaggcgcccgcggcaaggtcgccggagccaccgaggcgggcgttccactgttctacggcccccctggggttcaggtccaccccggcgtcgtgggccggtccctgtccgggcgagggcgagggcgagggcgtggatacgggggctgagaaggggctggagatcgcgaggctggggacctcgccgcggatcgtggagaagcttgccgcgcggggcatcaccaggctcttccccatccaggtgctgcctccctcgtggtaa

SEQ ID NO: 150607 - DNA, 1416 bp, Zea Mays
atggcggagaggaaaagggaggagacgaggagcagtcgcgccgcctcggtggacgcaagagcaaggccagagctacacttggacatacgcgaggaagctgccaagaagaacagggaaccaccgaccgcgtccaacatacgccggcattcatcgtcactgcaggtctgccactggctgctgccatccaccgcgggctcggtcgccacgtcgacgccatccctgtcctcgagcgcgccgtcacagtcgtggcgccggcacaagaatcgtctgccgacagcgagcctgaggccggtgcagccggcggcgacgactaccagcagctgcagcctgtcgagcccgactagaggggtgagtggtgctgctcctgatgagatcgctggaggcttaatggagattcctatcatctatgatgcacttggcgatctcgatgaggcccaaaagcttcttcatatggcactcaggttgctcgagggctcatcgagggagtggagcattattgccggtgttgtggcacaaatgggcgttctgtactacatggtggggaggtatgcaaattcggggaactcgttcaagagtgcagatgcaaattctagggccattgatgaggttgcacagttgtttgaggaggcaagggcggttctggagcaggagtgtggcgcttctcatcctaatactcttggtgtgtacaacaaccttgctgcaatctataatgccatgggaagggctcatattacaaagcttgaaaacaagaagactcatctccaatctaaacttacagaggaggagaaagaaaatacagtcctccaggcaaatttagaaaaacgaaaagaagcattacacaagcgccgtgtagcacttgaaaaagaagtggaaaatttacgagaccagctactgaaggagagaagtttgagggcttctctggagtctgggctaatgaatatgcgaagaggacaagtgtccttcccctcaacaatagacaccaagactaaggctgatcttgaggaagttgctgtcgctgaagctgatattatgaacttgaagcaaaaggtttctgatcttcggggacaactcaacaaccaagttcagttgagttccacctcgttatgtgaatcatgcaacaacaagcgatccataaatgcagacaagcttgtcgaaggtgaacaaaacgctgccctttctccacagattgcctcagtcgaagcaccaccaattgtagggtcttattctgtacctgacatgttctgggctacaaaccaaatggttcagaagatgttgtatttaaagggtgagattgcgaaggatggccaagacggatcacttacatcaagatggaactttgcacagagaccacactcaaatagtccagtcgtgagcagggttcaaggttccgatgcctattcaagtactaaaaccgag

SEQ ID NO: 150608 - DNA, 1445 bp, Zea Mays
tgctgcctcaagaatttgtacatcgcacagatgtgcagcgtaaacatttccagttccaatattcaattcatatggcattctggatctgccccatgatattgtccaaccgtatgagtttgaccccagctttcccaacatgtggatccagttcgcttctcagctcttttcagattgctgtatcctccgccttttcggaggtggtgtcatgaaaagcttcctaacagaggtaagaggcacctctacctcatcgagaaggctggtctgaatatccacttgcaagtccccatcagatctcttgtccccagcaagtaatgccgagagagtaagcctccatccaggcaagggttcgccgtaatcaggggaagtccaagggcagaacgtccggtgctgcttgataggatcaaactcattcattctgtcatacagcccttgtttttctgtctgtacacacctttttccctgttaactaatgattctgtgattgtgctgacctcagttgacctggaattgtttgcatgcatctctgtcagggtcactccaccagaaggttcttcattcgtaccctggactgagcaaaatctaggttccaatccatgttgatcagcatctgcatatgtgcttgttatactttttcttaatggagaacctgtttctggttgtgtttcattggaagcttcatccaattcagtatccttagctgcattggaatgtgaaccatcttgtttctgttcagtgctcactactaagtttgatatgctcttttcagaattttctcctggctggtcatgatttgcccctatggtggatgtatcaacatcatcggcatcaccttccaacaaatgaggctcatctgtgcttcttttacgtttcatggaacctgaagcatgcgaagcaacaggaaccatgtagcaatcacttctggaggaaagcaaattcacacgggagttcaaatcagctttcaaatgtcgactaacgacaggaaatgaaacttttggtcggaaactttgtctagttggtggaggacccccagcaatagtgaagttaaaactaatgttggcatcctttgaatgtcctactccactcactatgttggcatgtccattatcctggtcatcttgtctattagaatctgaaatcagcttaaagagttgaagaggtcgttgcacaagagaaaaaggccacaaggcaacacatgcaccacaaaactggcaatctaaaacaactgatagtggatcataatgctgatcttcttgattaacatcaacagatggtcgagcaccatcaggcgagtaaagtattacccgatcctccattgtcttacttgattgctctggttgagccaatttagaggtagagtttgcatcggagtgaaactcagttccacagtcaacagcataaggaagtagtctgggttcccatccacacaaacttattatcttaagtgc

SEQ ID NO: 150609 - DNA, 1327 bp, Zea Mays
gatctaggtctcgtctagacgaaaagactcatcttctctggtactctggttgcggcagaacggtcggatctcccccaccgatggccgcctcccagtcagccacgctcctccttctcgccgtcgtcctcgccgccgtcgcaccaggcccctccagcgcgcgccacgtcatcaatttcgccccttcccgcgccgtcaaccccgcgtccctcgcttgggaccctacggcgcagcacttcgtcgtcgcaggcggcggtgatgccgtcctttgcgtctccgacgctggggtcaccgagtcgatcgtctcctctggcgcctcctccgtcgccgtcgacgaccgccgacgccgcctgctcgtcgcttccccgggatccgtctccgccttcgacctccggtccccgcgcccgcaccgcctcatcctctccacgccggtcccggaccccgcccctccgggcggcatcgctgttgacccgcacacagggaacgcgttcctcaccgtgggcgcccgaatctacaagctgtccgtagagggcgacctcgccacgctcgccaccgcgccggcgctcggctcggagcccctagcctcgctcaccgcgcacgtgagccgaggcttcctgctcgtgggccagcccggcacgggcagcatcctccgcgtcgacatggaggacggcgccacgaggaccgtgtcctgcgccctcacgcccccgacgccgatggccgtggcggtccggaccgatggggcggtggcggtgggcggggccgcggggctgcgcctcgtcgtgagcaacgacgggtgggcgtcgtgcggggtgcgggacgaggctgcgcccgcgcccgacggtctcgtggccgcggtggcggtgcgggagcggcgacgggtgtacgcgctggtggaggcggaggcggtgaacggggttaacaagtggcagatcgaggaggcctcgtggaaatcggagtcggagggggagatggtggtggtgctcgtctttgtcggcgtcgcccttgccatcttcatgttctggaggttccagatgcggcagctggccggcaacatgaacaagaagatcagatagtagtaacaacgcaatgtctccttccttctttatgcaagtgcgtttgtcatgctgccgtagttggtgtagctagatacttgtggattaggcacgttacttgtatctatatatttatgagatcttagttggatagttcttgataagtgaaggcaaaaatcaggagaaccattgctcctcgttagccactgtacctgcaaatttacacaaatatcgtaccttacaggtttgttcttacggcgaattgcacttgattcagt

SEQ ID NO: 150610 - DNA, 330 bp, Zea Mays
atggctgaggagaggggcgagatcagctacggcgtggagaaagggctagagcagaggatgggcgagctcgactggggcgctcggggaagcggtgccaaggccgacgctaggaatggcgatgcagcggcgctggccaccggcgaggacgcggccgggtggaggtccgagcaggggacggatgtcgtggcaaagctggaggcgagggcttggggatccgagtggagaggatggtgtgctctgctgctgggcggagagggcggctggaagatgagcacaggtgagcggcgtcgtagggataaggagacggctggcttgaagatggatacgtga

SEQ ID NO: 150611 - DNA, 426 bp, Zea Mays
atggtgacctgtacctgcgcttatttcgccgccactgccgacctgatcgactgccatggcctccccgagtgtgcccgtcccttcgagctcatgctgttagtgggtgaaagtagcaacgagggccatggctgtcacaactgcaacaacgaatatattggtctcctaggattgcttggaggtatgttattagctcatgtagagtgtcagattgccacgaacgagaatccacttgctaagttggtctcttacaaggctccaatagtgacaaatgatgatgatggagagctattctatgggcgtaaggatgtcatgtgggatgaggagacacatcatggcttgttgcagcagcatgctgaagcaatggataaccagatagtgggcaagcaggaggtgtctattgaaatactttgtgagatcgtgttatag

SEQ ID NO: 150612 - DNA, 1992 bp, Zea Mays
attcttcagcagaagtcgtttatacataatcaacagcaattgcagcagcaaatccagatgctgactccacagcagcagcagcagcttatgctgcatgctcagcaaaatatgtcttcaccaacatctagtgatgtcgacaacagaagattgaggatgatgctaaatagaaatgctgttcttggccgggatgggcagacaaacagtggtagtgatattattccaaatattggctctcctagtcaaagtggtggcgatatagatatgcttataaagaagaaacttgctcagcagcagcaactattacaacagcaaagcaatagccaacagctcccacagcaacatcagcttcagcaacctgctgtctctagccagcaatctcaaagttcaaatcaacatcttcaacaagaaaagccaggaattggaagtatgcctgctgatgggggcataccaaattcatttgggggagctgaacagacagcaaagaagagaaagaagccaggctcatcctctggtagagctaatagttcaggcacagccaatactgctggtccctctccaagttctgcaccatcgacaccttccactcatacaccaggagacgtgatgtctgtgccacagctgcagcagaatggcggttcagctaaacccatggtaatgtttggctctgacggaactgggagcttgacatctccagcaaacccattggatgatgttgaccgcttgctagaagatggctcattggatgataatgttgaatcttttctatcacaggatgacatggatcctagggacaacttggggcgatgcatggatgctagtaaagggtttggtttttctgaggttgccaaagcacgcgcaagcacagccaaagttgtctgttgccacttctcagctgatggtaaactgcttgctactggtggtcatgataaaaaggtcactttgtggtgtacagattctctgaaccctaaatcttatctggaagagcactcgtttcttatcactgatgttagatttagcccaagcatgtcacgccttgctacatcctcctttgacaaaactgtgcgggtttgggatgcagataatactgactattcactacgaactttcacgggccattcagcaactgttatgtcacttgattttcatccaaataaagaggatatgatatgctcctgtgatagtgatggggaagtgcgcagctggagcataaataatggtagctgtttgacatgtgttaaggtgtttaagggaggtgctactcagatgagatttcaacctcgtaagggaaagtatctagcagcggcctcagataaagctatctacatacttgatggggagacacaacatgcttgtagaagtcccttgcaggggcacaataagaatattcaatcgctttgttgggattctgctggcgaatatctcgcttctgtcagtgaagactcggtcagaatatggtcattcagttctggacgtgaaggtgaatttgtgcatgaattgaatcgcagcggaaatcaattccactcgtgtgttttccacccaacttatcagtcattgctagtgattggttgttacgagtctttggaactttgggacataagggagaagaacaccatgaccttcaacaatgcgcatgacggtttggttgcagccctggcatcatccagtgctacagggaaggttgcctcagtaagccatgatagaactctcaagctctggaaatgactttataatagcgatcggtgtgaagacgattttctaccaaaaatgaccacatgacgcacatgacgaaaaggtagctgacaagatactctggagccgcgtgggctcaagaactaacggtggtttgtgttgtggttcttgtatgctgttcaatatgctattgaagtttgtaactcctaatagaaacgttcagtcaagactccaagattgtacctcggacaagtagcaaatatttattccccaaaaaaatctgcattttgttttttaccgtgt

SEQ ID NO: 150613 - DNA, 1758 bp, Zea Mays
gcccttttctgctgccatgttcttatacatattttctgtgtagtagaagaaacttgctcagcagcagcaactattacaacagcaaagcaatagccaacagctcccacagcaacatcagcttcagcaacctgctgtctctagccagcaatctcaaagttcaaatcaacatcttcaacaagaaaagccaggaattggaagtatgcctgctgatgggggcataccaaattcatttgggggagctgaacagacagcaaagaagagaaagaagccaggctcatcctctggtagagctaatagttcaggcacagccaatactgctggtccctctccaagttctgcaccatcgacaccttccactcatacaccaggagacgtgatgtctgtgccacagctgcagcagaatggcggttcagctaaacccatggtaatgtttggctctgacggaactgggagcttgacatctccagcaaacccattggatgatgttgaccgcttgctagaagatggctcattggatgataatgttgaatcttttctatcacaggatgacatggatcctagggacaacttggggcgatgcatggatgctagtaaagggtttggtttttctgaggttgccaaagcacgcgcaagcacagccaaagttgtctgttgccacttctcagctgatggtaaactgcttgctactggtggtcatgataaaaaggtcactttgtggtgtacagattctctgaaccctaaatcttatctggaagagcactcgtttcttatcactgatgttagatttagcccaagcatgtcacgccttgctacatcctcctttgacaaaactgtgcgggtttgggatgcagataatactgactattcactacgaactttcacgggccattcagcaactgttatgtcacttgattttcatccaaataaagaggatatgatatgctcctgtgatagtgatggggaagtgcgcagctggagcataaataatggtagctgtttgacatgtgttaaggtgtttaagggaggtgctactcagatgagatttcaacctcgtaagggaaagtatctagcagcggcctcagataaagctatctacatacttgatggggagacacaacatgcttgtagaagtcccttgcaggggcacaataagaatattcaatcgctttgttgggattctgctggcgaatatctcgcttctgtcagtgaagactcggtcagaatatggtcattcagttctggacgtgaaggtgaatttgtgcatgaattgaatcgcagcggaaatcaattccactcgtgtgttttccacccaacttatcagtcattgctagtgattggttgttacgagtctttggaactttgggacataagggagaagaacaccatgaccttcaacaatgcgcatgacggtttggttgcagccctggcatcatccagtgctacagggaaggttgcctcagtaagccatgatagaactctcaagctctggaaatgactttataatagcgatcggtgtgaagacgattttctaccaaaaatgaccacatgacgcacatgacgaaaaggtagctgacaagatactctggagccgcgtgggctcaagaactaacggtggtttgtgttgtggttcttgtatgctgttcaatatgctattgaagtttgtaactcctaatagaaacgttcagtcaagactccaagattgtacctcggacaagtagcaaatatttattccccaaaaaaatctgcattttgtttttt

SEQ ID NO: 150614 - DNA, 416 bp, Zea Mays
ctcccgccgcctccgccgcgattccactctcccttccgcctccgccgcgattccactctcccttccgcctccgccgcgattcttgtctcccttccgcctccgccgcttaccgccgcggccacgccgcaagcgtttcgtctcgggatccccacttcgtctcgctcgagcggtagagccacgctcccaccgcccaggcgtccgccgcggaggcgtcggtggcctatctgagcaggctctcctcgtcgggcttttttgctttagagggagagacttcctggtcggcgcgccgcgagaagagcaccagccatgtcgcaaactaactgggaggcggacaagatgctggatgtatacatatatgattattttatgaagagaaatttgcaggcaactgcaaaggccttccaagcagagggaaa

SEQ ID NO: 150615 - DNA, 1296 bp, Zea Mays
atggggaacgtgcacggcgtcgatgcggatggcggcggcgtggaggcgaccaccatcatggtctcggcggcgggcggtccggaggatgcggcgtcggtatggggaggccgaggaggaggagggaggaggagtgcgcggccgttgccggccgggacgccgcgcgggggcaggaccagggcgactccggtgcggtcgtcggcggcgggcagcccctggacgaggagcccactcggcctccccgacgatatcgcgccgtcgcccgcgacctcggcgtccacgccgcgccggttcttccgccgccccttcccgccgccttccccggccaagcacatcaaggcgtccctcgcgcgccggctcggccatcgctcgccggtctccgtgtcgcaggtgcccaggccgcccgtcgaggtcccgatcctggagcaaggggccggcggcgctggggaggtggagcgggagcttgacaggagctacggcggcgctgggaaggaggtgggccgcggccatttcagccacacctgcctcacacgcgcccgcaagggagacatgagaggccagatgacaacggcaatatctattgaggatgtgcgcacagaggtgaaaattttgaaggcattatctggacattccaatcttgttaagttttatgatgcttgtgaggacgcccttaatgtctacataatgatggagctttgtgaaggtggagaactattggatagaatcttgtccagatattacattttcttaagaaatcattttgcgaacaccactacaagaggtggaagatacaatgaaggggatgcaaaaattattgttgaacagatattaaaagtagttgccttttgccatcttcagggtgttgttcaccgtgatctgaagccagaggtatgtgatcttcagggtgttgctgcacctgctgctgtctcagttccagaggggaaatctgcaaagaaggggaagagaaatgcagaagatgagattgagaaggccgtgagtgcaaagaagcaaaagactgtacctgaaaaagctgtgccggttaagaagcagccccctccaaagaaagttgagagcaacaactctgaggaggattcttcagattctgaagtggagctatgttgcccgggccatctattccagtgttgtcacagtggagccagtaatggtccgattctctttgaagtcaaattcttttggccagcagtaatgatgatttcagctgcatttcaagctactgcttccattatcaaggagtttgttttcattaatggtgcaaaacgccttgaggtaagacaatag

SEQ ID NO: 150616 - DNA, 270 bp, Zea Mays
atggagatctttaagtatgttcggcaaatggattcgtatccaaatatttcaatcgcttaccggatattatttaatgtgcttgtaacggttgcatcagctgagagaagcttttcaaagttgaaattgttgaagaactatttaaggtcaacaatgtctcaagaatggctcaacggattggccactttatgtattgagaaaaaattattggacaaggttgatagcaacactattatcaacgacttcgcatcaagaaatgttagaagaaatttt

SEQ ID NO: 150617 - DNA, 2720 bp, Zea Mays
cccacctcttcctccccaaatttctcacccccgagaagcaaaaagccaccgcctgcagacaacaaagaaaagcggcagcgccagccagtgagaagaaaagctccagctccagctccccccctcggccctccccccaatgcctcacccgtaagccgcgtcgcagctccaccgcgcgtcgcaatggccggccccggcgcatccgtagcggcgctggcggtcctgctcgctgctgccgcggccttcacacgctgcgccgtcgcggagccgccgccgagggagcggtcggcgctgctggcgttcctgaccgcgaccccgcacgagcgccgcctcgggtggaacgcctccaccccggcgtgcggctgggtcggggtcacgtgcgacaacgccaacgccaccgtcgtcgaggtgcggctcccgggcgtcggcctcgtcggcgccatcccgccgggcacgctcggccggctcaccaacctccgcgcgctctcgctccgctccaaccgcgtcctcgggaccatccccgacgacgtgctccagctgccggtcctcaaggcgctgttcctgcagcacaacctgctgtcaggccccatcccgccgggaatccagaggctcggcggcctcgagcgcctggtcctctcccgcaacaacctgtcgggccccatccccttcgcgctcaacagcctcaccgcgctgcgcgtgctcaggctcgacggcaaccgcctctccgggagcattcccagcatcagcatcgcgggcctcggctccttcgacgtctccgacaacaacctcaacggctccattcccaaatcgctctcgcgcttcccgcgggaatccttcgccgggaacctccagctctgcggggacccgctgccgccctgcagcagcccgttctttcccccagcgccgtcgcccggcgggcccagcccgccctccggcggcggcggcggcggcggccccgcgccgggctcatccaagaagcgaaagctctccggggccgcaatcgcgggcatcgtcgtgggcgccgtggtggtggggctcctcatcctcatcgccaccgtgctctgcgtggtgtccagacgtcgtggcgccggcgcccgcgacgggcccaaggccgcgacatccgcggcggccagggggcagcccccgccggcgtccggcggcttgacgtcctcgtccaaggaggacctcggaggcggcgcgtccgggtcggccgcggccgtcgcggcggcggccgccgccgccgcgggggagcagagccggctggtgttcgtggggaagggcgccgggtacagcttcgaccttgaggacctgctgcgcgcgtcggcggaggtgctgggcaaaggcagcgtggggacgtcgtacaaggcggtgctggaggaaggcacgacggtggtggtgaagcggctcaaggacgtggcggtgcagcggcgcgagttcgacgcgcacatggaggcgctcggcagggtggagcaccggaacgtgctccccgtccgcgcctactacttctccaaggacgagaagctcctcgtctacgactacctccccaacggcagcctctctgccatgctccacgggagccggggctcggggcggacgccactggactgggagacgcggatgcggttcgcgctgtcggccgcgcgcgggctggcgcacctgcacacggcgcacaaccttgtgcacggcaacgtgaaggcctcgaacgtcctgctccgcgcggacgccgacgccgcggcgctctccgacttgagcctccaccggctgttcgcgccgtcgacgacgcgggccggagggtaccgcgccccggaggtggtggacgcgcgccggctgacgttcaagtcggacgtgtactcgctgggcgtgctcctgctggagctcctgacggggaggtccccctcgcacgcgtcgctggagggcgacggcacgctggacctgcccccggtgggtgcagtccgtggtgcgggaggagtggaccgccgaggtgttcgacgtcgagctggtgcgcctgggcgccagcgccgaggaggagatggtggcgctgctgcaggtggccatggcgtgcgtggccaccgtcccggacgcgcggctggacgcccccgacgtggtccggatgatcgaggagatcggcggcggccggacgacgacggcgaccgcgacggaggaggagagcgagggcgtaaggggcacgtcggaagaggagccgtcgcggtccggaggcacgccgccagccgccccgacgccgtgacgcggctagcagcagggtaaagttgtttggcctgattaaattgcataggttcgtgatgatgcctgtatgccggcattggacagctagcgtggtagtatgtttcttctttgtttttctttttgctttttcttttttgtcttgccaggtcattgttttgttggatcaatttttcttttttcccccgtctccctctctctctttcaggcttcattaatccaagtaaaaaagtgtaatttttcttcagttttcttttataccctttgtgatggttgctggagccttcacccatgtgcctttgatcgtcctgaagctgaaccatgttgaggtgacctgggagtaaagcaactgactccaaactagaagcaagcgcggcaggcctcgttgacatgctagttgctaggtagccccaccagcatcttgttgtcgctcgcttgtctgtcactcaaactcaatcatatgatgaataaaccttgccctt

SEQ ID NO: 150618 - DNA, 4335 bp, Zea Mays
atggacgcggcgggggacattcagaaggtggcgagtatgcggcgaggggacagcggctccatgtggcggcgaggcgacgacgtgttctcacgctcgtcaagggaggaggacgacgaggaggcgctccgctgggccgcgctagagaaactgcccacctacgaccgcatccgccgcgcaatcgtcccgctcggcctcggcgacgaggcgcccggcagcaaggggctcgtggacgtcgacgtgctcagcctcggcccgcgcgagaggcgggcgctgctggagcgcctggtccgcgtcgccgacgaggacaacgagcgattcctactcaagctcaaggaccgcatcgacagggtcggtatcgacatgcccacgatcgaggtgcggttccagaaccttgaggcggaggcggaggtgcgcgtcggcagcagcggcctccctaccgtcctcaactccgtcgtcaacacggtcgaggaagcggcgaacgcgttgcacatactgcccagtaggaagcagatcatgcctattctccacgacgtcagcgggattatcaagcctcgcaggttaacacttttgttgggtccgcctggatctgggaagaccactttgttgctcgctttggccggaaggcttgacaaagatctcaagttttcaggcaaagtgacctataatggtcacgagatgacagagtttgttcctgagaggacggccgcatacatcagtcagcatgacctccacataggagagatgactgtgagggagacgcttgcattctctgcacgctgccagggtgttggctcccgtttggatatgctgactgagctgtcgaggcgagagaaggctgccaatatcaagcctgatgctgatattgatgcattcatgaaggcggctgcactgggtgggcaagatgctaatgtggtcactgactatattctgaagatattaggactagatatatgtgcagacacaatggtaggggatgagatgctcaggggcatatctggtggacaacggaagcgtgttacaactggtgagatgctggttgggccagccagggcgcttttcatggacgagatctcaactgggcttgatagttcgactacatttcaaattgtgaactcgctgaggcagtccattcacatcctcggtggcacagctgttatctccctactgcagccggcacctgagacttataacttgttcgatgacatcatactcctctcagatggtcaggttgtctatcagggtcccagagaagaagtggttgagtttttcgagtctgtaggtttcagatgccctgagaggaagggtgtcgctgatttcctgcaagaagtgacttcgaaaaaagatcagaaacagtactgggcgcgacctgatgagccctacaggtttgtgtctgtgaaggaacttgcgactgcattcaagtcatcccacacagggagagctttagcaaatgagcttgccgttccgttcgataagagcaaaagccacccagccgcactaaccaccacaaggtatggtgtgagtggcaaggagctgctcaaagcaaacatagaccgggagatccttctcatgaagaggaactcttttgtctacatgttcagaaccttccagctgatggtgatgtcaatcattgcaatgactctcttcttccgtacgaagatgaagcatgacacagtgaatgacgggggtatctatatgggcgcactcttctttggtgtgcttatgatcatgttcaatggcttatctgagctggcgctaactgtcttcaagctgcctgtattcttcaagcagagggatctccttttctttccggcatggtcctacactatacctgcatggatcctcaaggtacccatcacatttatcgaggttggcggttatgtattcttgacatactatgtcattgggttcgacccaaatgtcggcaggttcttcaagcagtatctgcttctgctagcagtcaatcagatgacagcagcactcttccggtttgttggtggggtatcgaggaacatgattgttgctaatgtcttcgcatcgttcatgttgctggttgtcatggtgttgggaggatttattctacaaagagataaagtgaaaaaatggtggatctggggctactggatctccccaatgatgtatgcacaaaatgcaatttcagtgaatgagatgttgggtcacagctgggacaaaatattgaatagcactgcatccaacgagaccctaggtgtgcaagtccttaagtcccgtggagtattcccagaagcaaagtggtactggattggctttggtgctatggttgggttcaccatactcttcaacgctcttttcactcttgcccttacataccttaagccatatggcaactcccggccatctgtatccaaagaagagctgaaggagaagcatgcaaacatcaaaggggaggttgtggatggcaatcacttggtatcagtcaaccctgtaactgattcagcaatcatggaagatgattctgcctcgactaaaaagggaatgatcctcccatttgtcccgctctcggtcacctttgacaacatcaaatactctgtcgacatgccacaggaaatgaaaggacaaggtgtacaagaagatcgtttggagctcctgaaaagtatcagtggatcttttaggcctggtgtgctgactgcactgatgggcgtcagtggtgcaggaaaaactactttgatggatgtgttagctgggagaaagacaggtggctacattgaaggagacatccgcatttcaggatacccgaagaaacaagagacctttgcacgtgtatcaggatactgtgagcaaaatgatatccactcgccacaggtgacagtctatgagtccctgcttttctcagcatggctccggcttcccaaggacgtcgattcaaacaaaagaaagatcttcattgaggaggtgatggagctcgtggagctcaaaccactgagaaatgctttggttggacttcctggagtgaatggtctgtcaactgagcagaggaaaaggcttaccattgctgtggaacttgttgcgaatccatcaatcatctttatggatgagccaacctcagggcttgatgcccgagcagctgcaattgtgatgcggacggtgaggaacactgttgatactggtagaactgtggtctgcacgatacatcagcctagcattgacatatttgaagcatttgatgagcttttcctaatgaagcgtggtggggaagagatctatgctggtccacttggacataattcttcagaactaatcaagtattttgaggagattcaaggggtcagcaaaattaaagatggctacaatccagcaacatggatgctggaagtgaccacaatttctcaggaacagattctaggtgttgatttcagtgacatatacaagaaatctgaactctaccagaggaacaaggccttgataaaggaattgagccaaccagcaccaggttcaactgacctgcatttctctagcaagtacgcgcagtctttcaatacacaatgcgtggcttgcctgtggaagcagaacctgtcatactggaggaaccctccttataataccgtgaggttctttttcactggcataattgctctcctccttggcaccatcttttgggacctaggcagcaaagtgtatacatcacaagatttgttaaatgccatgggatcaatgtactctgcggtgctgttcatcggggtcatgaattgtacctcagttcagccagtggtggccgtggagcggacagtcttttaccgtgaaagagctgccggcatgtactcagctttcccatatgcatttggccaggttgtcattgagctcccatacgcactggctcaggatatcttatacgctgtcatagtgtactccatgatcgggtttgagtggacagttgctaagttcttctggtacctcttctttgggtacttcacgctgctctacttcacattctatggaatgatgaccgtcgggctgacgcctaactaccacatcgctgcgatcgtctccgcggcattctacgccatctggaacctcttctccggattcgtcatcccccgaccgaaagtgccgatctggtggaggtggtactgctggatatgccccgtggcgtggacgctgtacgggcttgtggtgtcacagtacggtgacatcatgacggagatggacgacaaaaggaccgtgaaggtgttcgttgaggattacttcgacttcaagcacagctggctggggtgggtggccgccgtggtggtggcattcggggtgctctttgctaccctgtttgcctttgccatcatgaagcttaacttccagaagagataa

SEQ ID NO: 150619 - DNA, 121 bp, Zea Mays
ctcaaaccaaacaccctcttatgagcttgttcggtttgaagtgcattgagagggattggagggaattaaattccctcatatacaaatttgtatataagaggaggtttaatctactttaacc

SEQ ID NO: 150620 - DNA, 237 bp, Zea Mays
gggaacaaaggtgtctgaactcagagctatggcatgcatgcgcagggccccttgtgtccctgcctgtggttgggagccggtcgtctactttccttagggccatagtgagcaggtccatctctgcatatggcattggttttctactgttatctgggcactgcattgctattgctttagtggacaaattgaagctaaatttaccatgcatgagtgatcatgatgtacaacagcacaatg

SEQ ID NO: 150621 - DNA, 268 bp, Zea Mays
tggacccctagaaccagggtgtgacactcttccacaaaaaaggcaattcaagaaattgttcaggcacgaatccatgctctgaagcaagatgagtttcaatgtaaatgatgtctcagtgttgtagcaaatgctactcgggtgtctacatcgttcgtgctcaaggaaaatgatgcacagcaaaaactacgactggatcccaactatctccatcataactcaggcgacagtggtctccccaaacgtgggtcgcgacatcgttgtaaccatc

SEQ ID NO: 150622 - DNA, 1518 bp, Zea Mays
gtcaggtgggcacaattggtacaacccaacccaacgagcagcagaagccggcgccagatcccgcataaaccacccgctctacctctccacgcggccagcctgactcctccagaccagtcctcacccctgctcgccgcgaacgaagcacagctccttgcctccgtcaccgctctccgtggccggcgaacatgatgtccggcggtgggtactccgccctcgacgaccccaaggcctccggatccgtcccggcggccaccgggacagatccgcaggccatcaggtttgccgactccaacctccagaccttcccgccgtccgaggccaggggcaagatcgctggcgcctaccgcccgcccaccgacgccgacgataccttctcgtccaagggcggaggagccggaagcggtggcagaggcggcagcgcagggtcggatgatgccgcgcagggcggctggttccgcatgttctccgtggcggcgtacaagccctacttcgacgtcgacacgtctgacgttgtcgagaggatctgggagtccgtcttccccttccgcggcacatttaccgagaagacctccgagaaccccgacctgtatgggccattttggacatgcaccaccctgattttcgttgctgcatctattgctacttttgtcacctacctatcccacaaatggcacaagaaggaatggaactatgatatcaacttggttacctggtctgctgggttattctatggctacgtgacatttgttcctcttcttttatatgttattctcaagtacttgtcagcacctgctggtttggtgcaattgtggtgcctatatggatattctctgttcatattcattccagcatcgcttctgtctattgtgccaatagaaatattcagatgggtgattgctggtgttgctggtttcatgtctgctactttcgttgctgtaaatctccgcgcacacattgtaaattccggcgagcgatggttcctgatcgttgcagggatattcttgttgcagttggggcttgctgttttgctgaaactatatttcttcacgataactgtatagggttatttacatctaatgatcgtactagtcaagaatacacacaattttccatgtggaatcacttccatgttcattgaacattgatgtaatttttccatgtatacatctttcttacacgtagaattgagaagcccctgaaattgaattacagcagccaaacaagtacacatgtgattgatatgggtgaagagtctgatctgtagtctattctgtgttccactgcttgaggtgaattttgaatgagaaatcgctgtgttctccactcgtcttagcagagatggcaacagtcacgaacctgctgggtattgttaacccaacttcatatctgcgaacataaaatctgttgactaaaaaaatccatgacctgtcgtgtgttttgtttttaggactatgggttgtttggttctgcttttagaacctgtttttcttaaaaaaagtagaaatctgaatcaaa

SEQ ID NO: 150623 - DNA, 1340 bp, Zea Mays
aaccgcacttttttttttgccagtctccctcttgtcgcggagaacacagactcactatctctctcttgccacaccacgcaggcggccaccgggacagatccgcaggccatcaggtttgccgactccaacctccagaccttcccgccgtccgaggccaggggcaagatcgctggcgcctaccgcccgcccaccgacgccgacgataccttctcgtccaagggcggaggagccggaagcggtggcagaggcggcagcgcagggtcggatgatgccgcgcagggcggctggttccgcatgttctccgtggcggcgtacaagccctacttcgacgtcgacacgtctgacgttgtcgagaggatctgggagtccgtcttccccttccgcggcacatttaccgagaagacctccgagaaccccgacctgtatgggccattttggacatgcaccaccctgattttcgttgctgcatctattgctacttttgtcacctacctatcccacaaatggcacaagaaggaatggaactatgatatcaacttggttacctggtctgctgggttattctatggctacgtgacatttgttcctcttcttttatatgttattctcaagtacttgtcagcacctgctggtttggtgcaattgtggtgcctatatggatattctctgttcatattcattccagcatcgcttctgtctattgtgccaatagaaatattcagatgggtgattgctggtgttgctggtttcatgtctgctactttcgttgctgtaaatctccgcgcacacattgtaaattccggcgagcgatggttcctgatcgttgcagggatattcttgttgcagttggggcttgctgttttgctgaaactatatttcttcacgataactgtatagggttatttacatctaatgatcgtactagtcaagaatacacacaattttccatgtggaatcacttccatgttcattgaacattgatgtaatttttccatgtatacatctttcttacacgtagaattgagaagcccctgaaattgaattacagcagccaaacaagtacacatgtgattgatatgggtgaagagtctgatctgtagtctattctgtgttccactgcttgaggtgaattttgaatgagaaatcgctgtgttctccactcgtcttagcagagatggcaacagtcacgaacctgctgggtattgttaacccaacttcatatctgcgaacataaaatctgttgactaaaaaaatccatgacctgtcgtgtgttttgtttttaggactatgggttgtttggttctgcttttagaacctgtttttcttaaaaaaagtagaaa

SEQ ID NO: 150624 - DNA, 998 bp, Zea Mays
cgccagatcccgcataaaccacccgctctacctctccacgcggccagcctgactcctccagaccagtcctcacccctgctcgccgcgaacgaagcacagctccttgcctccgtcaccgctctccgtggccggcgaacatgatgtccggcggtgggtactccgccctcgacgaccccaaggcctccggatccgtcccggcggccaccgggacagatccgcaggccatcaggtttgccgactccaacctccagaccttcccgccgtccgaggccaggggcaagatcgctggcgcctaccgcccgcccaccgacgccgacgataccttctcgtccaagggcggaggagccggaagcggtggcagaggcggcagcgcagggtcggatgatgccgcgcagggcggctggttccgcatgttctccgtggcggcgtacaagccctacttcgacgtcgacacgtctgacgttgtcgagaggatctgggagtccgtcttccccttccgcggcacatttaccgagaagacctccgagaaccccgacctgtatgggccattttggacatgcaccaccctgattttcgttgctgcatctattgctacttttgtcacctacctatcccacaaatggcacaagaaggaatggaactatgatatcaacttggttacctggtctgctgggttattctatggctacgtgacatttgttcctcttcttttatatgttattctcaagtacttgtcagcacctgctggtttggtgcaattgtggtgcctatatggatattctctgttcatattcattccagcatcggtaaggttcttactaaaatgcatgcacatatacttgggactttcagctctattagtctacaattttgtgccactggtctacagctaaagttgtttaaaatttggccttttctgtgggaaatgttcactcgattctaacacctgtaaagcagcagcaaggttgagtttaaagaatttgcactgattttgtatg

SEQ ID NO: 150625 - DNA, 1209 bp, Zea Mays
atgaggatccgtagaggggaccaggtggaggtgtggacgcagcgggcgggatcgccggtgggcgcgtggcgcggcggggaggtcacgtggggcaacggccactcgtacaccctgcggtggaacgactgcggcgaggtgtccgggcgcatctgcaggaagtcggtccgcccgcgcccgccgcccgcgccagtgccgcacgatctggacgccggggacgtggtggaagtgtttgatgactgtgattgcctctggaagtgcgccgaggtccagggttcagccgccgccgacgttcgccacttcgacgtcaagatcgtcggcgcggccaagatcctgacggtcccgctgcagaggctccgcggccggcaggtgctcaggcacgacgacgtctgggtcccgatccacaagcaggataaccatatcgccgtcccgagcgcgacgccgcatcgtgccatcgtcgccgccatggacatcggctccaagcccatggagccaggcttcacgccgcacgtgcagaagaggagcttcggaatgttaccttctgacacaagcacccgtgccaagagatttcaggacgacgccaagaggcttaagcaagagccaggacgtggggtacaagtgcgagtcccaaacgtgtgcctgagcaacaagcaggacgagacgagcaaagattgtgacaacgacgttagagtaggctttaatcccgatgatgatagtgaccattggcagcagcagcacgaacacgatgaggaagaggaagaaaacggagacgacgatgaccacagtgattccgactcgtcttcagatgactgcagcagtggcagtgagagcagaaccaggagcatcgaaaccggcaaggattggtctgcagctccagctcccaccagcaggccttgtaaagacgatgatcagcaggaacccgtcaagaaagaagcaccacccgtcaagaaagaaccacattgtgacggcgagcccccgaaggatgagatgggggcgacggcgcgggaacaaatccaccgtctggagctggaggcctacgctgctctcatgaaggcgttccatgcgagtggcaacccgctgagctgggagaaggaggggttgctcagtgaccttcgcgtgcatctccatatctctaacgacgagcacctcaaggcgatcaacgtgatcttgaaccgcaaggggagaactcgctgattttggatcagcacacct

SEQ ID NO: 150626 - DNA, 1171 bp, Zea Mays
ggagacagagtagcagcagcagcatagtagaagaatctgatggaacgaacgaaccgactgagagaattcagaagaatttggtgccggctcgtccgctgtggagcaggttgtgcgcgatgtcgtccctagccttggtggcgccgtccgaccgcacggggttctccggcaccgtctcgtcgtcgtcgatgtcgcatcggagcgcggggtccatgccctccccgcgcgactcgcagatgttgtgcagcacgcagcaggcgcccagcaccaccgggaggtcctgcagcttcacctccgtgcgcttctgcaggcacgcccaccggcccttgaggcgttcgaaggcgtccacggcgacgcgccagacctccgccaccttctcgttgaaggcgtgctgcgcccacgtcagtgttttgcacagccattttagtcctagtggcaagacaacctttgtgaagaggcatctgaccggagagttcgagaagaagtatgaacccaccattggtgttgaggttcatcccttggatttccacaccaactgtgggaagatccgcttctactgctgggacactgcaggccaggagaagtttggtgggctcagggatggatattacatccatggccagtgtggaatcattatgtttgatgttacttcacgactgacatacaagaatgttccaacttggcaccgtgatctatgcagggtctgtgaaaacatcccaattgtgctttgtgggaacaaggttgacgtgaagaatatgcaggtgaaagcaaaacaggtgacattctacaggaaaaaaagcctgcagtactatgaggtctcagctaagagcaactacaactttgagaagcctttcttgtaccttgccaggaagcttgctggtgattccaatcttcactttgttgaaacccctgctctcgctcctcctgatgtcacaattgacatggctgcccagcagcagcatgaagccgagctggcagctgctgcagcgcaaccgttgctagatgatgatgacggcatgatagagtagatgctgcattatgcacttgtctcaattatggaacttggagagattggaggctttgattgtgtcttggaatggattgctagctcttgtattgaatgttgaaggttggaatgcttggatgccattgaatatggggtggttgggggtat

SEQ ID NO: 150627 - DNA, 233 bp, Zea Mays
ctgccgcccataaaaccctccatccaatcttttctcccttcattcaatatacacggaattcgaaaccgacctaggttcgtctccgcattccacgcaaggaagccgctgcgaatggtgatcttacgctccacctctcgattgttgcgatttccgatctcctcactcatattatacgctgttgtattttttcaggctctccccaatcaggagaaatttgtcattatgaaacacca

SEQ ID NO: 150628 - DNA, 1636 bp, Zea Mays
ctccgattcgtcccgtcatccatctaatctaacggcggctagggttcggcgccttccccttttgcttgcagaggtactcgctgatggcgtcgggcgtgcgggcggaggtggtggaagccttcgacatcaacgacgtcgccaatgacgtctatgagcacaacttcggccaccgcccctgccaggggaacattcaaacgctcactgctagtgacttagacaaatacaaggcacatgcatggcttctttctcctccatgccagccatacacacgacaaggacttcagaagcattcagctgatgctcgtgcattttcgttcatcaagattcttaacctcatgcaagacatgagctatcctccacaaatgttatttgtggaaaacgtagttggatttgaggtgtctgatacacatgaccagttgctggaggtcctttcaagtctcaattttaacacgcaagaattcatcctaagccccttacagtttggtgtcccatattctagacctcgctacttctgtttggcgaaacgtgaacctgtgcggtttcgacatgcattcgtcaacaataagttgctccagacacctatgtgcctgagcctgacactgagcagtacatcacagggtagcgaccaccagactgaagaagagctagagccagtttgtaagccaataaaagatttccttgtcaaggaggctgatggaggcactccagatgagacagttttgcaggattatatggtcccagtaaacttgattgagcggtggggcaatgctatggatattgtataccctgaatttaagcggtgctgctgtttcactaaaagctactatcgttatgtgaaggggacaggctctttgttggctacatctaaaaacctcaatgttcctgaagagaagctccaaatttcttccctgaaggagttgggcctacgatttttcacccctcgtgaggttgccaatttccattccttcccttcaaatttctgcttcccggatcacataagccttaggcaacagtatgctatgctgggtaacagtctgagtatagcagttgtgggtcctttgctgcattatctctttgctgaggcctgagtcatagagaagtccagtcagccctggtgacattagcatggcacaaacactgtggctgcgatctgccaaaatttcttcatacgtgatttaagcaaggttggtatttaagtatggttttggggactacagtttggccatttgatgagcacaccgtgtaggcacaacctcacaatgtatcaacaaaagtgtaccatacagtagagaagctgtttctgcgcatacttcctccccctcatgcctatgctgtcatggtgaatgaattttggaattgtgatccgttgatgtgtgcatggatgaggctgtcgtaacgattgttgatctgagctttaagtaacttggaacctacttactccgagcaattccaattctattcttagctaacccatttaaagtttgacaatatttatgatgtaaaatatgtatagcaagtataaaatatactcaatgaagaatctatatcataaatattgacactttttttatataaacatcgtgaaactcaagattctttgacttggtattatgtttgaattgtattttgttttcgg

SEQ ID NO: 150629 - DNA, 1444 bp, Zea Mays
ctccgattcgtcccgtcatccatctaatctaacggcggctagggttcggcgccttccccttttgcttgcagaggtactcgctgatggcgtcgggcgtgcgggcggaggtggtggaagccttcgacatcaacgacgtcgccaatgacgtctatgagcacaacttcggccaccgcccctgccaggggaacattcaaacgctcactgctagtgacttagacaaatacaaggcacatgcatggcttctttctcctccatgccagccatacacacgacaaggacttcagaagcattcagctgatgctcgtgcattttcgttcatcaagattcttaacctcatgcaagacatgagctatcctccacaaatgttatttgtggaaaacgtagttggatttgaggtgtctgatacacatgaccagttgctggaggtcctttcaagtctcaattttaacacgcaagaattcatcctaagccccttacagtttggtgtcccatattctagacctcgctacttctgtttggcgaaacgtgaacctgtgcggtttcgacatgcattcgtcaacaataagttgctccagacacctatgtgcctgagcctgacactgagcagtacatcacagggtagcgaccaccagactgaagaagagctagagccagtttgtaagccaataaaagatttccttgtcaaggaggctgatggaggcactccagatgagacagttttgcaggattatatggtcccagtaaacttgattgagcggtggggcaatgctatggatattgtataccctgaatttaagcggtgctgctgtttcactaaaagctactatcgttatgtgaaggggacaggctctttgttggctacatctaaaaacctcaatgttcctgaagagaagctccaaatttcttccctgaaggagttgggcctacgatttttcacccctcgtgaggttgccaatttccattccttcccttcaaatttctgcttcccggatcacataagccttaggcaacagtatgctatgctgggtaacagtctgagtatagcagttgtgggtcctttgctgcattatctctttgctgaggcctgagtcatagagaagtccagtcagccctggtgacattagcatggcacaaacactgtggctgcgatctgccaaaatttcttcatacgtgatttaagcaaggttttggggactacagtttggccatttgatgagcacaccgtgtaggcacaacctcacaatgtatcaacaaaagtgtaccatacagtagagaagctgtttctgcgcatacttcctccccctcatgcctatgctgtcatggtgaatgaattttggaattgtgatccgttgatgtgtgcatggatgaggctgtcgtaacgattgttgatctgagctttaagtaacttggaacctacttactccgagcaattccaattctattc

SEQ ID NO: 150630 - DNA, 1533 bp, Zea Mays
gaactctccgactcacagagtcacagtcacaggctcagccaacataagggaaccggggttccaaacagttgctgcagcctagcacgggccgcgcgactgccggaggcgatggaggcgccggcaccttggagagtgctcgagttctacagcggcatcggaggcctgaggtactcgctgatggcgtcgggcgtgcgggcggaggtggtggaagccttcgacatcaacgacgtcgccaatgacgtctatgagcacaacttcggccaccgcccctgccaggggaacattcaaacgctcactgctagtgacttagacaaatacaaggcacatgcatggcttctttctcctccatgccagccatacacacgacaaggacttcagaagcattcagctgatgctcgtgcattttcgttcatcaagattcttaacctcatgcaagacatgagctatcctccacaaatgttatttgtggaaaacgtagttggatttgaggtgtctgatacacatgaccagttgctggaggtcctttcaagtctcaattttaacacgcaagaattcatcctaagccccttacagtttggtgtcccatattctagacctcgctacttctgtttggcgaaacgtgaacctgtgcggtttcgacatgcattcgtcaacaataagttgctccagacacctatgtgcctgagcctgacactgagcagtacatcacagggtagcgaccaccagactgaagaagagctagagccagtttgtaagccaataaaagatttccttgtcaaggaggctgatggaggcactccagatgagacagttttgcaggattatatggtcccagtaaacttgattgagcggtggggcaatgctatggatattgtataccctgaatttaagcggtgctgctgtttcactaaaagctactatcgttatgtgaaggggacaggctctttgttggctacatctaaaaacctcaatgttcctgaagagaagctccaaatttcttccctgaaggagttgggcctacgatttttcacccctcgtgaggttgccaatttccattccttcccttcaaatttctgcttcccggatcacataagccttaggcaacagtatgctatgctgggtaacagtctgagtatagcagttgtgggtcctttgctgcattatctctttgctgaggcctgagtcatagagaagtccagtcagccctggtgacattagcatggcacaaacactgtggctgcgatctgccaaaatttcttcatacgtgatttaagcaaggttttggggactacagtttggccatttgatgagcacaccgtgtaggcacaacctcacaatgtatcaacaaaagtgtaccatacagtagagaagctgtttctgcgcatacttcctccccctcatgcctatgctgtcatggtgaatgaattttggaattgtgatccgttgatgtgtgcatggatgaggctgtcgtaacgattgttgatctgagctttaagtaacttggaacctacttactccgagcaattccaattc

SEQ ID NO: 150631 - DNA, 1516 bp, Zea Mays
agtcacagtcacaggctcagccaacataagggaaccggggttccaaacagttgctgcagcctagcacgggccgcgcgactgccggaggcgatggaggcgccggcaccttggagagtgctcgagttctacagcggcatcggaggcctgaggtactcgctgatggcgtcgggcgtgcgggcggaggtggtggaagccttcgacatcaacgacgtcgccaatgacgtctatgagcacaacttcggccaccgcccctgccaggggaacattcaaacgctcactgctagtgacttagacaaatacaaggcacatgcatggcttctttctcctccatgccagccatacacacgacaaggacttcagaagcattcagctgatgctcgtgcattttcgttcatcaagattcttaacctcatgcaagacatgagctatcctccacaaatgttatttgtggaaaacgtagttggatttgaggtgtctgatacacatgaccagttgctggaggtcctttcaagtctcaattttaacacgcaagaattcatcctaagccccttacagtttggtgtcccatattctagacctcgctacttctgtttggcgaaacgtgaacctgtgcggtttcgacatgcattcgtcaacaataagttgctccagacacctatgtgcctgagcctgacactgagcagtacatcacagggtagcgaccaccagactgaagaagagctagagccagtttgtaagccaataaaagatttccttgtcaaggaggctgatggaggcactccagatgagacagttttgcaggattatatggtcccagtaaacttgattgagcggtggggcaatgctatggatattgtataccctgaatttaagcggtgctgctgtttcactaaaagctactatcgttatgtgaaggggacaggctctttgttggctacatctaaaaacctcaatgttcctgaagagaagctccaaatttcttccctgaaggagttgggcctacgatttttcacccctcgtgaggttgccaatttccattccttcccttcaaatttctgcttcccggatcacataagccttaggcaacagtatgctatgctgggtaacagtctgagtatagcagttgtgggtcctttgctgcattatctctttgctgaggcctgagtcatagagaagtccagtcagccctggtgacattagcatggcacaaacactgtggctgcgatctgccaaaatttcttcatacgtgatttaagcaaggttggtatttaagtatggttttggggactacagtttggccatttgatgagcacaccgtgtaggcacaacctcacaatgtatcaacaaaagtgtaccatacagtagagaagctgtttctgcgcatacttcctccccctcatgcctatgctgtcatggtgaatgaattttggaattgtgatccgttgatgtgtgcatggatgaggctgtcgtaacgattgttgatctgagctttaagtaacttggaacctacttactc

SEQ ID NO: 150632 - DNA, 1588 bp, Zea Mays
ctccgattcgtcccgtcatccatctaatctaacggcggctagggttcggcgccttccccttttgcttgcagaggtactcgctgatggcgtcgggcgtgcgggcggaggtggtggaagccttcgacatcaacgacgtcgccaatgacgtctatgagcacaacttcggccaccgcccctgccaggggaacattcaaacgctcactgctagtgacttagacaaatacaaggcacatgcatggcttctttctcctccatgccagccatacacacgacaaggacttcagaagcattcagctgatgctcgtgcattttcgttcatcaagattcttaacctcatgcaagacatgagctatcctccacaaatgttatttgtggaaaacgtagttggatttgaggtgtctgatacacatgaccagttgctggaggtcctttcaagtctcaattttaacacgcaagaattcatcctaagccccttacagtttggtgtcccatattctagacctcgctacttctgtttggcgaaacgtgaacctgtgcggtttcgacatgcattcgtcaacaataagttgctccagacacctatgtgcctgagcctgacactgagcagtacatcacagggtagcgaccaccagactgaagaagagctagagccagtttgtaagccaataaaagatttccttgtcaaggaggctgatggaggcactccagatgagacagttttgcaggattatatggtcccagtaaacttgattgagcggtggggcaatgctatggatattgtataccctgaatttaagcggtgctgctgtttcactaaaagctactatcgttatgtgaaggggacaggctctttgttggctacatctaaaaacctcaatgttcctgaagagaagctccaaatttcttccctgaaggagttgggcctacgatttttcacccctcgtgaggttgccaatttccattccttcccttcaaatttctgcttcccggatcacataagccttaggcaacagtgagtttaagttccattatacacttctggttatctttagtaagcgacaagggcatttgaattgcagtacatataagaaacatgagagatgaggctatgctgggtaactatctgaatagtgtttatagttataggttaccatatatcttttgaaaccctcttgttgcaggtatgctatgctgggtaacagtctgagtatagcagttgtgggtcctttgctgcattatctctttgctgaggcctgagtcatagagaagtccagtcagccctggtgacattagcatggcacaaacactgtggctgcgatctgccaaaatttcttcatacgtgatttaagcaaggttttggggactacagtttggccatttgatgagcacaccgtgtaggcacaacctcacaatgtatcaacaaaagtgtaccatacagtagagaagctgtttctgcgcatacttcctccccctcatgcctatgctgtcatggtgaatgaattttggaattgtgatccgttgatgtgtgcatggatgaggctgtcgtaacgattgttgatctgagctttaagtaacttggaacctactt

SEQ ID NO: 150633 - DNA, 249 bp, Zea Mays
ttgcctgcagcatatggccattacgtctgggaaacacggacgggggactcgctgaactcgttgggctgtggcgaaccttcgagactgggcgtgcggagcagggtgtcggccatggccgtggacgggtgcaggatcgccatggcgggcagctctccggaaggctgcatgatgcactaccgtgacttcgcgacggcttctgcccctgtagtgtccttgccaggcaaggagaaggaggtctccaggttctag

SEQ ID NO: 150634 - DNA, 1055 bp, Zea Mays
atcaaccacccactcccgactcgccgcccgaacagccacttccactgcccggctgccttattatttcctctacgccgtctccgtccccgggtcaagtcgtatcgagcacatccatctccattaccgccgccgagagagagacccaccccgctcatccaccaccatgtggcgccgcctccacaccctagcacccgccttgcgcagggctactgccgccgctgccgggggccccgcggtgcccgcctcctctgctgcccgcgccgcgccgctctcctcggcggccgccggcttccgccgcactagccctctcctctcagaggacaagccggcgagggtggaggacgtcatgcccatcgccacggggctcgagcgggaggagctagaggccgagctccaggggaagaagcggtttgacatggattccccggtcggccccttcggtaccaaggaggaaccagctgtcattgagtcatactataacaagcggatagtcggttgtcctggtggcgagggtgaggacgaacatgatgttgtatggttctggttgaaaaaagacgagccgcatgagtgtccagtctgctcgcaatactttgtgcttaaggtaattggtgatggtggagatccagatggccatgacgatgaagatgatggacatcactaaggatgccttgtggttctgaaaataagaatctgatgaggcagatgagtccatcacacttcttttttcttgaaccagactgcacggcatccttgtttatgaacagacatttggccatcaagcgggtggtagttaatcacctagggattttgtccagacaaaagcttattgagatttgacccatgcatttctttaagagcatcatcgaataaaagatgactgcatcagattgctttcttttgttaccgtatggccatcgggtgtgatggacatgtaatattcagtcatggaatggaacagacccatttctttattcagtgtgctggggaatttgcaaaaggtctcctatatctcttacaagtttcaagccagaggttgatccttcagttttatgact

SEQ ID NO: 150635 - DNA, 1792 bp, Zea Mays
ctacatcgccaaaccctaactaggtttttttcaagcctccccttccctaccctcgccccccatggatccgttttccaagaagcgcaagcccgacgacaacggcgccgtcactgcttctcccgccggtggggctgccacgctgggtctcacccgcgaggacgtcctccgcctcctcgagccgctctcccgggaccagcttgcggacatcgcggccgccgctgcactcgtctcggcgcacgcgctcgatgccgtgcgcgcagccgccgaccgcgacccggccctgcgcaagctcttcattcgggggctcgggtgggagaccacatccgactcgctccgcgccatcttctccgcctacggtgacctggaggaggccgtcgtcatcactgacaaatccacggggcggtccaagggctacggcttcgtcaccttccgccacgccgattccgccgtcctcgcactcaaggagccatccaagaagatcgacggtcgcatgactgtcacgcagctcgccgccgccggctcggcaggcgggccgtccgttggggctcccggcagtggcggtgctcctgtggctgatgtgtcgctccggaagatcttcgttgggaacgtccctgcagacatgtcgtcggagcgtctccttgcgcactttgcctcctacggcgagattgaggaggggccgctgggatttgacaagcagacgggcaagttccggggctttgcacttttcgtatataagacacctgagggtgcgcaggcctccctggtggactcggtgaaggtaattgatagccaccagcttgtatgcaagcttgccatagatgggaagaaggggaagcaggggcaatcacagcaatctggacctggcaaccagcagcagcaacagcaacagcagatgctgccgggtggtccgcaggaaattcagggaggcctggggcttggttcacaaatgggagcacagtatggtggccctgggagtggtatgccttcgtttggttttggtggcgttggcggtgggtttgggggtccaaacccttatgctaacatgccatcttccatgggtggaggaggcgcaggtgggttagggtcggtgggaggccaggtgcccactgggttggctggtgctggtggatttgggcctgggggattgggtggtggctcatttgggggatcatctcagtttggtgctgctgggatgggggcatatggtggccttggaatgggtggaggctccatgtaccgcatgcaacagggagcaggtgggctgcctgcaggcgcatttggtgaaggaggaaactaccctcttccaggttctggtttccgaggccacgaccctcaaggtggaatgtctcctcctgggccaggtggcagggctcctcctatgtatcccaacgtgccaccttatttctaaggtgtgtgacaactcttgggagcatatcctttgaaatggttgtgctgaattcagaagtgttgtctgcttacatggatgccttgcatattctggctacttctgatctggaatggaatgtggaatgagtttgcactcgcagtttcccttattaagggatacatgaagctaggtagttgtgataatgcttagccgtgataatgcttcacatgtactttcttatgagtcatgactgctttgcagtttcattttctatatagataagtgaagttgcattaagtgtgtgttgtgttgattattgtcgtattatcctatgaaacccctttattttcatggtatgatgatgtgtttaatcttatggatttctatttgtcttgtctatctgtt

SEQ ID NO: 150636 - DNA, 883 bp, Zea Mays
atggccgcggcctcggcatgcggcaacggagcccattcgcacgtatggtacatcctcggaggggtcgaggccgaatccgccgatgagaaggccgaatccaccgaggagaaggcaacagcagtgatggagaggctggcggtggccacgagggcgttcttcgcttcggcctccggcggcggcaatggcggtgaggagaaattacaagctaatagaaatattggtacaagtatcggtagtgctagcctgatgtgggatcgaacaaagttctggacggatttggacgctgagggggtctgcggcgtgcagctcgcctacgcggagcgtgtgtggcagctcggggagcaccttgcggtgaagtatgttcagacaaatactaaaaacgatgatggtgtcacgacattgttacccactattgttgcatgttccctcccatgcttggaggtcctaatcgagatgaaagtggtggcagccaagatgaaagtggtggtggccgcatcaaaggagaaggtgcaacaagacgaaccgaaagctgctatctcagatgtgaaatgtgacaacccaaaagaggagggcaatgtgcagcaaaccaaaagttgttgcctcaaatgtgaaatgtgatgacctagagcaggaggaagattccaataaaaatggggaactggaggagtgtaacaaatgtgtaatttattttttccactctatatgctatcttagaagtttcaaaagttccttgtttgtgcgtaattcaaaatttactattagtcattgttcctgaacaacccttgattttatttcttgaatgtgcacctgattcgtctaatggaatcatggaaccacatgttgtgctactattttggttaagaattacaatgatcttaaggca

SEQ ID NO: 150637 - DNA, 705 bp, Zea Mays
acagccacccacaacacaggggaatgaatgcatgcattccacttgaccgttcgttccattccagcgcttgacactagctagaacgccatcgaccacgctccgcactctatatatagagggaaggcctccactctcctctgcgggagataccagtaaacggcgacgaagacaatcctctaccaagaagaagactggtcgagtgagagagatggacggcggcaaaggcagcgggattggtggcaatgtcgtaggaggaggcggtgatggcaagagcggcggtggcgctgtcaagggaggaggctccaactccgtgggaggcgcaggctctggcaactcaggtggcggcgttgcggggcatggtgatggtgcagggaagtcgggctccggcgccgacggcatgatgaaggctcccggcggcggcggctacatcccccgctccgacttcgaagccaacccgaaggaattcttccagggcctccaccagcagggaggaggaggcaaaaagtagatccatcgagctagatgttagctagctagctgcttgttgcatggcaagctagcgtgggatttgtgatcctgaatgaatgtatggaccgtagtcagtctccgtagcctttaaataaaatgttaagctgctcgatcgtttctgggtatcatttgctcgcatgtttacgatacaagtttattatatatcattatcaggcc

SEQ ID NO: 150638 - DNA, 765 bp, Zea Mays
atggccgaccggcgccggcatgggcatggccagcgcgtagcggtgtggtgtgcctcccgcgtctcggcgcgtgcctcgttctcggactctcctatcctctatcctttccaggagctcactgctcagcatcacgcgttgatagacagcagcgctgggtgcgggggtggggagtatcatgagccaggtggcgtggcggcccacggtgtctgggaggacggggcacgaccgaagccacggggaacgggggcggggggatcggggcgtaccttgtcgaactcttcacccatggtgcttctccaccaccggcggcctcctgaaatgtgggatctaggcgtcggggtagctgcaaactccaagagcttcaccaccaccgtcggcctcgtgggagctcttgcctgtcttggctctaccgtagatgctggtgccgcgcgggaggttgtaggggaaggcgaggacgacgaggtcagtggtggtgagaagcacgcaggggaggaggaggtaggtgacgtgccagggtatcttaccggtcttagtagtgcatgcgaaggatgggagggcggagcaacatttggagtgcggatggcgagcgcggctcctgttgatgttgggcgagccgggattagggcgaggttaggcgcgtccgagtggtggcgaggaaggcaagagcgcgcagtcggcgccggaaatttggatggtctggtggcgaggagggtgcgcgttcgagtggtggcgaagaaggcaagagcatgcagtcggcgccggtaa

SEQ ID NO: 150639 - DNA, 627 bp, Zea Mays
gggagataccagtaaacggcgacgaaggcaatcctctattaagaagaggactgatcgagtgagagagatggacggcggcaagggtagcggtattggtggcaatgtcggaggaggaggcggtgatggcaagatcggcggcggcgctgtcaagggaggaggctccaactccgtgggaggcgcaggctctatcaactcaggtggcggcgttgcgggacatggtgatggtgcagggaagtcgggctctggcggcgatggcatgatgaaggctcccggcggcggcggttgctacatcccccgctccgacttcgaggccaacccgaaggagttcttccagggcctccaccagcagggaggaggaggcaaaaagtagatctatcgagctagatgctagctagctagctgcttgttgcatggcaagctagcatgggatttgtgatcctgaatgaatgtatggatcgtcgtcagtcttcttagcctctaaataaaatgttaagctgattgatcgtttctgggtatcatttgctcgcatgtttatcgatacaagtttattatatatcattatcaggccatttaaaacacttttggagaagcctaaggataaatctcttatcctgctatttaaaacac

SEQ ID NO: 150640 - DNA, 3066 bp, Zea Mays
atggcgggtgccggtgcgatgggcttcccacgggagctgatggttcagcgtatacagagcttagtggaggaggggttctgggacgcgctccgccgccacaagctcgacgtcctcggcaccgacgactcccccatcccaatcaccggttattatactccgcgccagcgtcgcccgatggcaagcttcttcaacctacggtccggatcattggtgccaccatctcacagttctgttggcgacaggaacaattgcccagttccagggaccctcataaacactaataacatgaggggatttgaaaacctagatagagaacaacttctgaaagcagaagcaaagaagatcttgcatgacattgtgtctggtaaagtagaagaggatccttctgttctacttagattccttgtgacatcatttgctgatttgaagaattggaaggtctattacaatgttgcattcccctcattggttttcaactcaagaatcaccttgctcagcctgcaacctgcctcaaaagtgctcaccaaagaagaggcagcatccatgtatacatcattgcaaaagtggcgtacttctagtgaaacaacagttattccattctttctggttagtatatcctcagattcctctgcctctataagacaacttaaggaatggaaagcttgccaggggaactatcaaaagctgctatttggattttatgaccatggatgccgctcagattgccctggctgggttcttagaaactatgttgcctttctgagcatccgatggaagattgagaaagcccagattttctgctaccgtgaatataaagggaaccctgatctagaacagtccctcattggtgaagcatcatttccatcaccttatggttgggataaccctgaatttctacctgatgctattggatgggaaggagtaaagccagggaagggaacaaaagaaatgaaaccaaaagaaatagatcttcaatcaatgaatccagcaagtcaggatgaagaaaaacaattgatgcacttaaagcttatggggtggcgccactttcctgtgaatatagacaggttatcacatgttcgagttcttctcttgggtgctggaactcttggatgcgaagttgctcgccttcttatgacctggggtgtacggaaactaacggttgttgatagtggtagtgttgttatgtctgaccttgccaagcaatcactctacatagataaggattgtggagttccaagagtatctgcaatagctccacatctgaaagaaagatgtcctgcagtggaggttgaaagcatccaactggaaataccgatgcctgggcatcctgtttcttccagcaaaatggcaagtgtgcttgatgactgcaagcatctgcaaaccttagtggctgccaatgatgcaatcttcttgttaactgacacatgggagagcaggtggcttccaactcttctctgttcaagtgaaaacaagattgctattagtgcattattaggacatgacagttaccttgtcatgcgacatggtgctggaccaggaacaagtgggggtacagatgaagtgactactcagaaattgtccacagaaaatgctcttggtcatcaaagattgggctgttgtttctgcaatgataccgcttcccttattaatccaatttcttatgaaacactacctggacttacctcagttgcatctggcaaagcagtggagctctttgctaggatgttacatcatcctgacgagatacgggccccaggcgatactgctggtacagaaacagaacatcaacttggtctattgccacatcagctacgaggatcactccccaagtgtgatttatttgtggagctcaacaattcctcagtcaactgtactgcatgttctgttgctgtattgtcggagtatagaagaagaggattggattttgtcatgcaggctatcaactatccagcatatctgaaagattttacaggcatttctgattcgaaaagaccagatacttgtcctaaaataccgcccaacatctctgtaaattcagacaagatttctgatgtccgatgtctactattgggtgctggaactcttggatgtgatgtcgctcgcattcttatggactgtggtgtacggaagataacagtagttgatagtggtcatgtagttgtgtcaaatttagcgagacaatcactctatacttctgatgaccgtggtgctccaaaagcaactgcaatacttaggcatctagtggagagatgtccttcagtggatgcacaaggcattaaaatggaaatacctatgcctgggcatcctgtgtctcctggtgaagcagcgggtgtgctccaagattgcgagcgccttaaggaattggtgttgtcccacgatgctatcttcttgttgaccgacacaagagaaagcaggtggcttccaactctcctatgcactaacgaaaacaagattgctatcactgcagcattagggtatgatagttaccttgtcatgcgacatggggctggccctggcataagctgtgaagcttccagtgtggtcactgccatagacaagatgtccacggaggatgcccttgggcgtcaaaggctggggtgttatttctgcaatgacgtcattgctcctgtcgactcagtttccaatcggacactggatcaacaatgtacagtgacacgaccggggttggcctctattgcatcaggacgcgctgcagacctcttcagaagaatgttacaccatcctgatgggatacatgctccaggagagattgctggtacaggcagtggtcatgagcacggccttttacctcaccagatgcgtggatcactatcgcagtacaacatattaaccctgttgggctattcctcgagtaattgcacggcatgctcccatgcggtattgtatcaatatcggaggagagggatggatttcgtgatgcaagtaatcaatgaaccaacctatttggaagacctgaccggcctcacggagttgatgaaatccgcgtcttgctcacaggtcgagtgggtagatgaaattgatgaagacgatttcgtcgaggtctga

SEQ ID NO: 150641 - DNA, 1765 bp, Zea Mays
gggtgccacatttgtgagctgcaaagttcagaaacaaccgatcatgccatgtgagccacaaagccaccaccatcaccaaccaaacccacttgccttgtgtttcagatcagattcgcctaacagaccccgacgacttccaaactccaatccagcgttgagctcgacagctcgtgccaaactaggccgcagctggaaataccctccgctccacttacctgctgctggtgagcaccgcaagcaccaactcgcgcccaccgctccgctacaccagccgacgccatcatgtctaccgtcgccgccgcccccaccgtcgtgaaatcggctccggagctcgtcgcgccagtggggccaacacccggcggcaccctcccactgtcctccatcgacaagaccgcggcggtgcgcgtgtcggtggatttcatccaggtttttcccccggccgtaggagcaggcggggacaaagacgccgccgtggccgcgatgcgcgacggcttcgcgaaggcgctggtgccgtactacccggtggccggccgcatcgcggacgccagccccggggagcccgtggtggagtgcaccgggcagggcgtctggttcgtggaggccgctgcgagctgcgcgctcgccgacgtcaactacctcgagcgccctctgctcatccccaaggaggagctcctcccgcgacctccccccgaggagaagctcgaggacctcgtcctcatggcacaggtgaccaagttcgcctgcggcgggttcgcggtcgggatctgcttcagccacctggtgttcgacgggcagggcgcggcgcagttcctcaaggcggccggcgagatggcgcgggggctgccggcgccgtcggttgcgccggtctgggaccgcgacgcgatcccggacccgcctaagctgccgcgcggccccccgccgtcgttcacggcgttcagcttcgtgacccaggtggtcgagatctcgccggagagcatcgcgcgcatcaaggacgacttcaaggacgcgacggggcagacctgctccaccttcgacgctgtcacggcggtggtgttcaagtgccgcgcgctggcgatggcgctccccgacgacgccgaggtccggctcggcttcgccgccagcacgcggcacctcctccacggcgtgctgccgtcggtggacggctactacggcaattgcgtgtaccccgtgggcatcacccggaccagcaaggcgatccgtgaggcgtcgcttccggaggtggtcggcgtgatgcgggaggccaaggaggcgctcaccacgcggttcacggactggatgcgcggcggcgccaaggacgaccactacaacgtgccgctggactacggcacggtgacggtgtcggactggagccgcgtcgggttcaacgaggtggactacggcttcggcgaaccggggtacgtcttcacgctcaacgacgacgtcaacatcgtcgcgtcggtgatctacctcaaaccgcccgcgcccaagcgcggcatccggctcatgcttcgctgcgtcgaggaacctcatgctgcggcgttcgccgaggagctcgccaaattcgcgtagatggttgtttagtcttgctttatctatacttcattggtgtcggacactcggacctcatcttttacaatattatctatacttcattggtgtcagacgctcattaattgtcatcggcattgttggatgtgggagaatgaaaaagctattataaggaggtgtacatgaaagtttaatactcatgaacatttattttaga

SEQ ID NO: 150642 - DNA, 1699 bp, Zea Mays
gcttcgccaaagtctgaaattaagctggacaccgctcccgcaccaaaccaaatcacctgttcccgcgacctcctccccggcgtacctccagtctccagagatccacacgaccacaccgacccaccaccatctgcatcggcaatggacgccgcgccacccaccataaccaagtccccgccgtccctggttccaccagcggggcccactcccggtggttccctcccgctctcctccatcgacaagaccgccgccgtccgtgtctccgtcgacttcatccaggtcttccccgcccctacgtcggggaaggaggactggagcccctcatctgcgatcgcggccatgcgcgagggctttgccagggcgctcgtgccgtactaccctatcgccggccgcatcgccgagcccgtgcctggtgagcctgagattgagtgcacgggggaaggggtgtggttcgtggaggctgaggcaagctgctccctcgaggaggcgcgtaacctcgagcgcccgctgtgcatcccgaaggaggagctgctcccgcgtccgccggccggtgtgcgcgtggaggacaccctgctgctcgcgcaggttacaaagttcacatgtggtgggttttctgtgggcatttgcttcagtcacttggtgttcgacgggcagggtgctgcgcaatttctgaaagcagttggtgagatggctaggggcctccctgagccatcgatcaagccaatctgggctcgtgatgccatccccaacccacctaagccacccctaggcccgccaccgtcattcaccgcattcaacttcgagaaatcagtcgtcgagatcgctctggacagcatcaagcgcgtgaaggatcaagttgcaagcgaaaccaaccagaagtgttccactttcgacgtggtcaccgccatgatcttcaaatgtcgcgccttggcagtcgacttcgcacctgacgctgaggttcgcctgggctttgcagccagcactcgccacctgctgagcaatgtgctgccctccgtcgatggctactacgggaactgtgtgtacccaggtggtctcaccaagaccagccaggaggtgaaggaagcttcactggtggagatcgtgaccgcgatcagggaggccaaggaggctctgtcgtcgaggttcctcgactggttgagcggcggcgccaaggagaaccactacaacgtgtcgctggactacggcaccctcgtcgtgaccgactggagccacgtgggtttcaacgacgttgactacgggttcggtgagccaagctacgtgttcaccctgaacgacgacgtgaacatcgttccctccgttgtgtacctgaagcctcccaagccgaagcagggcatcaggctggtgctgcagtgcgtggaagggcggcactctgccgtgttcagcgaggagctgcagaagcacgcatagagcgagtgtattccatcccacagtggagattgttgtattttgttgtgtcgaattgctgcccccggaatttgcttgcaataagatagggttggcacgtgtttatactctgtactgttatctcagcacgttacattatacatgtattgagtgagtattgacagtggtgaaagaataatagtgttccatttgaaacaaattatttcagacttgttggcctgatgtaggttcatgaggtctcggctcttgagtcgagttttaattgtgtctatac

SEQ ID NO: 150643 - DNA, 833 bp, Zea Mays
tatggtctattcatgttggtgtttgcttcaagtggtggaagatcgtcgtcttcatcagaacctggctcctcgtcaatctggacagtagtttgtgcttgtgttcctgcctctgaaacttcattcagagttgagttgaaaatagctggcctcatataagaagggacgaaccagtttccagatgccaagctaagcaaaattcagcaacactgagacaaatgtacacggactgattttataagatcagttagtagcttaggatctctaatcctagtattgttttccctctgtcattactacaaagtacaaaatacaacacaaaattcagttatataaaaataattcttttgtggatagtcacgagtctggtaaggctttgggcgaacaaccttccctgatgaattttatatgtactcgttggcggactcaccttggacagacacgtcggcgacggcgggtggaatggggggacgggtccaatcgccagtcagcctcacaccctcacctcctccgcgaccatggcaggtgggtatgacttcttctccggtgtggccatcgccgagtcgaagggtttggcgctggcgggagtctgatgggaggctgcacacccccgatgtagtcgctgcggcggcggagccggtggccagcgtctggcatgtggtacggcgggtagggcgatgtgaacacggaggcgagaggcgcgagcagtccagaatcgaagagagtgagggacggacgtcgcgcatggctatgttggattgaagaaaaagtaggtcaggtccggacacacgtcagattgctggtggcgcgagcatccgtcgattgcggggaggagc

SEQ ID NO: 150644 - DNA, 726 bp, Zea Mays
tatggtctattcatgttggtgtttgcttcaagtggtggaagatcgtcgtcttcatcagaacctggctcctcgtcaatctggacagtagtttgtgcttgtgttcctgcctctgaaacttcattcagagttgagttgaaaatagctggcctcatataagaagggacgaaccagtttccagatgccaagctaagcaaaattcagcaacactgagacaaatgtacacggactgattttataagatcagttagtagcttaggatctctaatcctagtattgttttccctctgtcattactacaaagtacaaaatacaacacaaaattcagttatataaaaataattcttttgtggatagtcacgagtctggtaaggctttgggcgaacaaccttccctgatgaattttatatgtactcgttggcggactcaccttggacagacacgtcggcgacggcgggtggaatggggggacgggtccaatcgccagtcagcctcacaccctcacctcctccgcgaccatggcaggtgggtatgacttcttctccggtgtggccatcgccgagtcgaagggtttggcgctggcgggagtctgatgggaggctgcacacccccgatgtagtcgctgcggcggcggagccggtggccagcgtctggcatgtggtacggcgggtagggcgatgtgaacacggaggcgagaggcgcgagcagtccagaatcgaagagagtgag

SEQ ID NO: 150645 - DNA, 103 bp, Zea Mays
cttgtcgctgccttcgtcgtcgacccctccccaccccttcacaggattgtagcgttagcacgagctatatgctagtttgttcaaacaatttggatacctactt

SEQ ID NO: 150646 - DNA, 1510 bp, Zea Mays
cgcccgcttcccgtccatttattaaactttcgcaagcgcaggtatctccccacagggcagcgcgtgcggaaaccctagtcgccgccgatgtcggaccctttctacccgtactaccgcggagccttcccgggcggcgacggtgcgcagccgccgccacgttactcggattttgaggtcgacctcatcgcggcccgttacgccggcaccctattgccttatccatcctctgccgacgtcggcgccttcgactcgtatgtcggcgcgagacgatccgcggaaggccccgaatgttgaagattcttatcctgagcgaccaggggaaccagattgtccttatttattgaataatagatgtaagtttaaatctaaatgcaagttcaaccatccgaaggatatggtgaatgcattaggaacaggaacaaacaatgaatctctaattgctgatagcgctgtcttaccagtgaggccttctgaacccatttgtgtggcaaatgcaaatttggtgccatttgcaagttcaatcatccaaaagatattaagacatcacctttgattgcaaaggaaaccatatatacagcaacaactgatgcagcagatgccccgaccgaggcgtgtaacgcaaaggggcttcctataagacaaggtgaagtggattgctcgttttatatgaagacaggcagctgcaaatatggttctatttgtcgcttcaaccatcctgatcggccagggccagctgcggatatagcttttatggttccactggttcaagctactcttccttcatcagcacccattgtccctgcagtggttgaacctttgccaatgatctatcctcaaaggccaggagaaactgtttgtgatttttacatgaagacaggatcttgcaagtattctcagaaatgcaagtttcaccaccccatcagtcgttttgccccgcattccaaagaaaacggggatcctcaacagcctgcgacacttgctagcctgccaaggagagaggacgctgaggcttgtgccttctacatgaggtctggcatgtgcaggttcggtgcgcactgcaagttcgaccaccctcctcgcgaggaggctatttccgagctgcaggcagccggaaaggaaggaatagaagggccgagcctcgtccagcgcgaccatgatgtctaatactgtatcctgcttcagtatgtaataccatgtgaatcgcactgttagttaatgcttggtgctgtcagtcttgttgggagtctgactcgtaaagctcattatcatcggaagtgtttgtcggaggagtgctggcactaactatttatcttcagttggttgtcgtgttgccaacttgcgatgtcaaggtgcatatttcagttttttagagtaaaaatgcactttacatcctgccgccaaacttaactatgggcctgtttatggccctgtttggtttagcttttttttaccagcttttctaaaaatctggttgtggaaagaatttgagtatcgtgaagattacatgtgg

SEQ ID NO: 150647 - DNA, 1522 bp, Zea Mays
cgcccgcttcccgtccatttattaaactttcgcaagcgcaggtatctccccacagggcagcgcgtgcggaaaccctagtcgccgccgatgtcggaccctttctacccgtactaccgcggagccttcccgggcggcgacggtgcgcagccgccgccacgttactcggattttgaggtcgacctcatcgcggcccgttacgccggcaccctattgccttatccatcctctgccgacgtcggcgccttcgactcgtatgtcggcgcgagacgatccgcggaaggccccgaatgttgaagattcttatcctgagcgaccaggggaaccagattgtccttatttattgaataatagatgtaagtttaaatctaaatgcaagttcaaccatccgaaggatatggtgaatgcattaggaacaggaacaaacaatgaatctctaattgctgatagcgctgtcttaccagtgaggccttctgaacccatttgtgtgttctatgcaaaaacaggcaaatgcaaatttggtgccatttgcaagttcaatcatccaaaagatattaagacatcacctttgattgcaaaggaaaccatatatacagcaacaactgatgcagcagatgccccgaccgaggcgtgtaacgcaaaggggcttcctataagacaaggtgaagtggattgctcgttttatatgaagacagctgcaaatatggttctatttgtcgcttcaaccatcctgatcggccagggccagctgcggatatagcttttatggttccactggttcaagctactcttccttcatcagcacccattgtccctgcagtggttgaacctttgccaatgatctatcctcaaaggccaggagaaactgtttgtgatttttacatgaagacaggatcttgcaagtattctcagaaatgcaagtttcaccaccccatcagtcgttttgccccgcattccaaagaaaacggggatcctcaacagcctgcgacacttgctagcctgccaaggagagaggacgctgaggcttgtgccttctacatgaggtctggcatgtgcaggttcggtgcgcactgcaagttcgaccaccctcctcgcgaggaggctatttccgagctgcaggcagccggaaaggaaggaatagaagggccgagcctcgtccagcgcgaccatgatgtctaatactgtatcctgcttcagtatgtaataccatgtgaatcgcactgttagttaatgcttggtgctgtcagtcttgttgggagtctgactcgtaaagctcattatcatcggaagtgtttgtcggaggagtgctggcactaactatttatcttcagttggttgtcgtgttgccaacttgcgatgtcaaggtgcatatttcagttttttagagtaaaaatgcactttacatcctgccgccaaacttaactatgggcctgtttatggccctgtttggtttagcttttttttaccagcttttctaaaaatctggttgtggaaagaatttgagtatcgtgaagattacatgtgg

SEQ ID NO: 150648 - DNA, 2224 bp, Zea Mays
cgcccgcttcccgtccatttattaaactttcgcaagcgcaggtatctccccacagggcagcgcgtgcggaaaccctagtcgccgccgatgtcggaccctttctacccgtactaccgcggagccttcccgggcggcgacggtgcgcagccgccgccacgttactcggattttgaggtcgacctcatcgcggcccgttacgccggcaccctattgccttatccatcctctgccgacgtcggcgccttcgactcgtatgtcggcgcgagacgatccgcggaaggccccgaatgttgaagattcttatcctgagcgaccaggggaaccagattgtccttatttattgaataatagatgtaagtttaaatctaaatgcaagttcaaccatccgaaggatatggtgaatgcattaggaacaggaacaaacaatgaatctctaattgctgatagcgctgtcttaccagtgaggccttctgaacccatttgtgtgttctatgcaaaaacaggcaaatgcaaatttggtgccatttgcaagttcaatcatccaaaagatattaagacatcacctttgattgcaaaggaaaccatatatacagcaacaactgatgcagcagatgccccgaccgaggcgtgtaacgcaaaggggcttcctataagacaaggtgaagtggattgctcgttttatatgaagacaggcagctgcaaatatggttctatttgtcgcttcaaccatcctgatcggccagggccaggtctgttcttttcataactaaccatttggtcgacttaaattgtcatggcatcgtataggtcattttgctctgtttccatttgtgttacttcaagaaggatagagaaaccatcggcaataagctaactctaatcaaatcacactttaacttgcagtacatgccctgttgaagacttgccatttgcaaatcatgctgaaagcagagcttatagtgaccttgtaaccttgtaaacattagaggttcttaaaagtcttaataatatagaaaaggcatcagagcttctaatattatatttttgttatgaattgaaacattttattggcatatagtgcagttatgataagcgctttgaatttttcctgaagtgtcttctactcattagcttagggtttgaggatatttatagtttcttgcacttgtgactattatcatgtgtctgtttttgaatgtcatgctgaaatatgttgcccttataccacaatttttcagatagcaattgcaaaatgtttcttgttccattttcaatgttcaggctggttttcagacagcaattgctataatatcttgacctatcaacttaattctaatgacatcatcagcgcttgccattatcaccctccattttttaattaaacttttgacatatctggaattgtttttagatctccctactctctgatattgttttgtatgtgcagctgcggatatagcttttatggttccactggttcaagctactcttccttcatcagcacccattgtccctgcagtggttgaacctttgccaatgatctatcctcaaaggccaggagaaactgtttgtgatttttacatgaagacaggatcttgcaagtattctcagaaatgcaagtttcaccaccccatcagtcgttttgccccgcattccaaagaaaacggggatcctcaacagcctgcgacacttgctagcctgccaaggagagaggacgctgaggcttgtgccttctacatgaggtctggcatgtgcaggttcggtgcgcactgcaagttcgaccaccctcctcgcgaggaggctatttccgagctgcaggcagccggaaaggaaggaatagaagggccgagcctcgtccagcgcgaccatgatgtctaatactgtatcctgcttcagtatgtaataccatgtgaatcgcactgttagttaatgcttggtgctgtcagtcttgttgggagtctgactcgtaaagctcattatcatcggaagtgtttgtcggaggagtgctggcactaactatttatcttcagttggttgtcgtgttgccaacttgcgatgtcaaggtgcatatttcagttttttagagtaaaaatgcactttacatcctgccgccaaacttaactatgggcctgtttatggccctgtttggtttagcttttttttaccagcttttctaaaaatctggttgtggaaagaatttgagtatcgtgaagattacatgtgg

SEQ ID NO: 150649 - DNA, 1526 bp, Zea Mays
cgcccgcttcccgtccatttattaaactttcgcaagcgcaggtatctccccacagggcagcgcgtgcggaaaccctagtcgccgccgatgtcggaccctttctacccgtactaccgcggagccttcccgggcggcgacggtgcgcagccgccgccacgttactcggattttgaggtcgacctcatcgcggcccgttacgccggcaccctattgccttatccatcctctgccgacgtcggcgccttcgactcgtatgtcggcgcgagacgatccgcggaaggccccgaatgttgaagattcttatcctgagcgaccaggggaaccagattgtccttatttattgaataatagatgtaagtttaaatctaaatgcaagttcaaccatccgaaggatatggtgaatgcattaggaacaggaacaaacaatgaatctctaattgctgatagcgctgtcttaccagtgaggccttctgaacccatttgtgtgttctatgcaaaaacaggcaaatgcaaatttggtgccatttgcaagttcaatcatccaaaagatattaagacatcacctttgattgcaaaggaaaccatatatacagcaacaactgatgcagcagatgccccgaccgaggcgtgtaacgcaaaggggcttcctataagacaaggtgaagtggattgctcgttttatatgaagacaggcagctgcaaatatggttctatttgtcgcttcaaccatcctgatcggccagggccagctgcggatatagcttttatggttccactggttcaagctactcttccttcatcagcacccattgtccctgcagtggttgaacctttgccaatgatctatcctcaaaggccaggagaaactgtttgtgatttttacatgaagacaggatcttgcaagtattctcagaaatgcaagtttcaccaccccatcagtcgttttgccccgcattccaaagaaaacggggatcctcaacagcctgcgacacttgctagcctgccaaggagagaggacgctgaggcttgtgccttctacatgaggtctggcatgtgcaggttcggtgcgcactgcaagttcgaccaccctcctcgcgaggaggctatttccgagctgcaggcagccggaaaggaaggaatagaagggccgagcctcgtccagcgcgaccatgatgtctaatactgtatcctgcttcagtatgtaataccatgtgaatcgcactgttagttaatgcttggtgctgtcagtcttgttgggagtctgactcgtaaagctcattatcatcggaagtgtttgtcggaggagtgctggcactaactatttatcttcagttggttgtcgtgttgccaacttgcgatgtcaaggtgcatatttcagttttttagagtaaaaatgcactttacatcctgccgccaaacttaactatgggcctgtttatggccctgtttggtttagcttttttttaccagcttttctaaaaatctggttgtggaaagaatttgagtatcgtgaagattacatgtgg

SEQ ID NO: 150650 - DNA, 1601 bp, Zea Mays
cgcccgcttcccgtccatttattaaactttcgcaagcgcaggtatctccccacagggcagcgcgtgcggaaaccctagtcgccgccgatgtcggaccctttctacccgtactaccgcggagccttcccgggcggcgacggtgcgcagccgccgccacgttactcggattttgaggtcgacctcatcgcggcccgttacgccggcaccctattgccttatccatcctctgccgacgtcggcgccttcgactcgtatgtcggcgcgagacgatccgcggaaggccccgaatgttgaagattcttatcctgagcgaccaggggaaccagattgtccttatttattgaataatagatgtaagtttaaatctaaatgcaagttcaaccatccgaaggatatggtgaatgcattaggaacaggaacaaacaatgaatctctaattgctgatagcgctgtcttaccagtgaggccttctgaacccatttgtgtggtaagatcttacattgctgtcattttttttttctcatggcacagtccttcatttcttgggtgtcctgtatttcagttctatgcaaaaacaggcaaatgcaaatttggtgccatttgcaagttcaatcatccaaaagatattaagacatcacctttgattgcaaaggaaaccatatatacagcaacaactgatgcagcagatgccccgaccgaggcgtgtaacgcaaaggggcttcctataagacaaggtgaagtggattgctcgttttatatgaagacaggcagctgcaaatatggttctatttgtcgcttcaaccatcctgatcggccagggccagctgcggatatagcttttatggttccactggttcaagctactcttccttcatcagcacccattgtccctgcagtggttgaacctttgccaatgatctatcctcaaaggccaggagaaactgtttgtgatttttacatgaagacaggatcttgcaagtattctcagaaatgcaagtttcaccaccccatcagtcgttttgccccgcattccaaagaaaacggggatcctcaacagcctgcgacacttgctagcctgccaaggagagaggacgctgaggcttgtgccttctacatgaggtctggcatgtgcaggttcggtgcgcactgcaagttcgaccaccctcctcgcgaggaggctatttccgagctgcaggcagccggaaaggaaggaatagaagggccgagcctcgtccagcgcgaccatgatgtctaatactgtatcctgcttcagtatgtaataccatgtgaatcgcactgttagttaatgcttggtgctgtcagtcttgttgggagtctgactcgtaaagctcattatcatcggaagtgtttgtcggaggagtgctggcactaactatttatcttcagttggttgtcgtgttgccaacttgcgatgtcaaggtgcatatttcagttttttagagtaaaaatgcactttacatcctgccgccaaacttaactatgggcctgtttatggccctgtttggtttagcttttttttaccagcttttctaaaaatctggttgtggaaagaatttgagtatcgtgaagattacatgtgg

SEQ ID NO: 150651 - DNA, 745 bp, Zea Mays
cgcccgcttcccgtccatttattaaactttcgcaagcgcaggtatctccccacagggcagcgcgtgcggaaaccctagtcgccgccgatgtcggaccctttctacccgtactaccgcggagccttcccgggcggcgacggtgcgcagccgccgccacgttactcggattttgaggtcgacctcatcgcggcccgttacgccggcaccctattgccttatccatcctctgccgacgtcggcgccttcgactcgtatgtcggcgcgagacgatccgcggaaggccccgaatgttgaagattcttatcctgagcgaccaggggaaccagattgtccttatttattgaataatagatgtaagtttaaatctaaatgcaagttcaaccatccgaaggatatggtgaatgcattaggaacaggaacaaacaatgaatctctaattgctgatagcgctgtcttaccagtgaggccttctgaacccatttgtgtgttctatgcaaaaacaggcaaatgcaaatttggtgccatttgcaagttcaatcatccaaaagatattaagacatcacctttgattgcaaaggaaaccatatatacagcaacaactgatgcagcagatgccccgaccgaggcgtgtaacgcaaaggggcttcctataagacaaggtgaagtggattgctcgttttatatgaagacaggcaggtaccttcttcacgggcaggattgctaagttgactttatctcttgtgca

SEQ ID NO: 150652 - DNA, 3067 bp, Zea Mays
ttcgtcttcatgtggttgacatgttctcattgaattacctgaatatgcagatccttatcttaacactgatgctgggactatgtctccattcgaacatggtgaagtgttcgtactggatgatggtggcgaggtggacttggatcttggtaattacgagagatttttggacattaaacttactcgggacaataatataaccactggaaagatctatcagtctgtaattgacaaggagaggaaaggggaatatttgggaaagactgtccaggagtggatcgagcgtgttgctaagataccagttgatggcaaggagggacctgctgatgtctgtgtgatagaattggggggcactataggtgatattgaatctatgccatttattgaagctttgggtcagttctcttatcgtgttggtcctggcaacttctgcctggtgcacgtcagtctagttccagttttgaatgttgttggtgaacagaaaacaaagccaacccagcatagtgtacgtggtttgaggggactcgggctcaccccaaatattttagcttgtcgcagtactaaggaattagaggaaaatgtgaaggagaaactctcccagttttgccatgttccggcagcaaatattatcactttgtatgatgtttccaatatctggcgcattcctttgttgctacatgaacaaaaggctcatgaggctattcttaaagttctgaatctggaaaggatggacagcatcgctcgagagccaaagttagacgaatggattgcaagagctactatatttgatacccttcatgacactgtgaggattgctatggttgggaagtacactggcttatcagattcatacctctctgtgttgaaagccctcttgcatgcatctgttgattgccacaggaagcttgttgttgattgggttgcttcaacggatcttgaggactccactgcaattgaggcacctgattcatataaaactgcgtggaatttactgaagggggcaggtggaattttggtacctggtggctttggtgacagaggtgttcaagggaaaattttggctgctaagtatgcccgtgaaaaaaatgtcccatatcttggtatatgtcttgggatgcagatcgctgtggtggagtatgctcgtcatgtcatgaatcttactgatgcgaacagcactgaatttgatccaaataccaagaccccttgtgttatttttatgcctgagggttccaaaacacacatgggtgcgacaatgcgattaggatcaaggaggacatttttcaagattgctgattgcaagtcttctaaattgtatggcaatgtcacttatgttgatgaaaggcatcggcacagatatgaggtgaaccctgatatggttccagagttcgaaaatgctggacttcagtttgttggcaaagatgatactggaaggaggatggagattatcgaaatacccaaccaccgatattttgttggcgcacaattccatcctgagttcaagtcaagaccttcaaaaccttctcccctatttgtggggctaattgcggctgcatctggacagttggatagggtcctgcaagaccgctgcactggtcatgctgtttcagagaaacatgttctgagcaacggctcatatacacccgcaatacaccaaaatgggcacccaaagaagctcccaaatggtctatcaaacggaacatactatggcaatggcaatggcgtgcatgcttaggagcatcagtggatggatcgaggatttgcaactttttgcttacagatttgcgattcctaatgcatcagttttgtcgtggctggcttgactgactaccatcatggtcgctcgagaaacaaaaagttcctgtgctcgatgtggactgtctggtagggatagtgctcgttcggtggtttctagcgaagcgcgagatagtggtttctgtgttcgccgatctctaccctcttctgtaagcaaatggagcagatttgggtcagaagagtttacatgctgtacatcctaaagaaaagctgaatgttttggttgctcaaattaggttttcagtgaggtctagagctgatgcttagaaatgcgcagcagtgcaagagagtatttcgaaattaagcaagtctgtattttgaatttggatacttttttttgtgcttgtgcgcaaataagttgatgccctgcttcatgatcatatcaatttgtcttccctctagcgcttgcttctccggagagcatctcgaagagatcccaaaatttaatgtcccaataccagagaattaggatcttctttccagaaaaaagtgaagagatcctaaaattaaatgtcccaataccagagaattaggatcttcttaaatctcttaattcttaaatctcttaattccaaaaataggtgaatcatctctaacagcttccaatatattctcaaaaatgcaatgaatagagccctgcacaactgtatctacggccatcgttcacaataatcctccctgcgccaccaaagttgcctcgcccagcaacctccgtcgttgctcacgtgtatgcagtcatttgcttgaataccggcatcaaaggatcaccgtcgctttaaatttagctaatattagaaaaaagcgtctccaataaactatgtaaatagctttttaaatttagtggctctatatgcttccaacttcgttctctatttttggatagtctgctttactgttcctttagtccttaagtttactgagtctattggattatcctacactttttctgtaaaatctatttccaagggtatctaaatcagtaaatttggctatctttaggtgctggtaggcaagctgaaaacatataagctacaaacatccaaaacttcaatccatataccacgataaactctttgtgtcaacaactagaccttgaaaaggtttgtataattgttattcttacaaccatcgagaacttaaaaaaaaatgaacgttcttctgtcaacaactataacgtcaaaagatagaaaaaatataaaactgaaattctatcaagagagctgaaacattattctgtaaggaacaaggctcggtattc

SEQ ID NO: 150653 - DNA, 2571 bp, Zea Mays
cctcctccgtctatccccacagccgccttgcctccattgtctctccactcccttctcttccctctcacctcctaaaacctccattgcccgcgcgcacgagcgcccgcgtcgaggactccagctcgtgtgtccgtgcgaacgcgcggttttcttgtcacgaactgtcgctccggtcaggggattgaggaggtggggcggcggcggcggatttgtcgggcccgagattcccggacaaggagaaatgaagtacgtccttgtcaccggcggggtagtgagcggcctgggcaagggcgttacagccagcagcatcggcgtcgtcctgaaggcgtgcggcctccgcattacgtccattaagattgatccttatcttaacactgatgctgggactatgtctccattcgaacatggtgaagtgttcgtactggatgatggtggcgaggtggacttggatcttggtaattacgagagatttttggacattaaacttactcgggacaataatataaccactggaaagatctatcagtctgtaattgacaaggagaggaaaggggaatatttgggaaagactgtccaggttgtgccacacatcacaaatgccatacaggagtggatcgagcgtgttgctaagataccagttgatggcaaggagggacctgctgatgtctgtgtgatagaattggggggcactataggtgatattgaatctatgccatttattgaagctttgggtcagttctcttatcgtgttggtgagaaacttcacacttattatgttattgtcctggcaacttctgcctggtgcacgtcagtctagttccagttttgaatgttgttggtgaacagaaaacaaagccaacccagcatagtgtacgtggtttgaggggactcgggctcaccccaaatattttagcttgtcgcagtactaaggaattagaggaaaatgtgaaggagaaactctcccagttttgccatgttccggcagcaaatattatcactttgtatgatgtttccaatatctggcgcattcctttgttgctacatgaacaaaaggctcatgaggctattcttaaagttctgaatctggaaaggatggacagcatcgctcgagagccaaagttagacgaatggattgcaagagctactatatttgatacccttcatgacactgtgaggattgctatggttgggaagtacactggcttatcagattcatacctctctgtgttgaaagccctcttgcatgcatctgttgattgccacaggaagcttgttgttgattgggttgcttcaacggatcttgaggactccactgcaattgaggcacctgattcatataaaactgcgtggaatttactgaagggggcaggtggaattttggtacctggtggctttggtgacagaggtgttcaagggaaaattttggctgctaagtatgcccgtgaaaaaaatgtcccatatcttggtatatgtcttgggatgcagatcgctgtggtggagtatgctcgtcatgtcatgaatcttactgatgcgaacagcactgaatttgatccaaataccaagaccccttgtgttatttttatgcctgagggttccaaaacacacatgggtgcgacaatgcgattaggatcaaggaggacatttttcaagattgctgattgcaagtcttctaaattgtatggcaatgtcacttatgttgatgaaaggcatcggcacagatatgaggtgaaccctgatatggttccagagttcgaaaatgctggacttcagtttgttggcaaagatgatactggaaggaggatggagattatcgaaatacccaaccaccgatattttgttggcgcacaattccatcctgagttcaagtcaagaccttcaaaaccttctcccctatttgtggggctaattgcggctgcatctggacagttggatagggtcctgcaagaccgctgcactggtcatgctgtttcagagaaacatgttctgagcaacggctcatatacacccgcaatacaccaaaatgggcacccaaagaagctcccaaatggtctatcaaacggaacatactatggcaatggcaatggcgtgcatgcttaggagcatcagtggatggatcgaggatttgcaactttttgcttacagatttgcgattcctaatgcatcagttttgtcgtggctggcttgactgactaccatcatggtcgctcgagaaacaaaaagttcctgtgctcgatgtggactgtctggtagggatagtgctcgttcggtggtttctagcgaagcgcgagatagtggtttctgtgttcgccgatctctaccctcttctgtaagcaaatggagcagatttgggtcagaagagtttacatgctgtacatcctaaagaaaagctgaatgttttggttgctcaaattaggttttcagtgaggtctagagctgatgcttagaaatgcgcagcagtgcaagagagtatttcgaaattaagcaagtctgtattttgaatttggatacttttttttgtgcttgtgcgcaaataagttgatgccctgcttcatgatcatatcaatttgtctt

SEQ ID NO: 150654 - DNA, 863 bp, Zea Mays
cagcatttcattgttttgaagggaagcaacctccttccatccaagtgtgtgtgcataatagcatgttgaatagtttttgccatatgatattttttactgatctatgaactactctgttcatttgaaacattgtgcgatttaactgacttattcttgagtcttactcttgttattcccttcccaagttcaaacaagtcatcagtagtcatgcttcatggctatatatatgttccgatagtcctgtatttagtcactgacaagtgttttctacaatttctcagggacaaccaaaatcaagaatctagattccaacattgactccttgaaggtgaaactgacagacgaagatctgaaagaaatgggcagccagatacgggaagaagatgtggctggtggaagacaattcacttcatttgcacataccacctggaagtacgctgatacgccaaagaagcagagctaaaaaatacttgaaagcaacaatgatgatgcgattggtatggccctctccctgcagatgccctcaggaacattgccgatgcccctttgtgaacagcctcttctagtaaataataatgtatggagaagaacaatgaagggcccagtcttgttggaagtacgaataatgtacagttacaggaatgtgtgctaccatatatttcgtcgcatcagtttgagttgtggttgtgtgaacctaccatatatttcctcgcaaaagaataatgtatagttacaataatatgtgctatctcaatcagtatgcaggcaggaaaaacatgcaccatctgtagtacagtacatgaattctcgcttgtaatccacatttagacctgaaaatgcgaaaaagaaaaaccaaaacacaa

SEQ ID NO: 150655 - DNA, 1555 bp, Zea Mays
agccctccaatctctagcagaaacgtcttgcccgacacgactactcgtccgactagaaccaaacttttcaatccatcgttcgcagttcagttcacacttcacaggcgagcagcgaccatggatacccaagcacgtccggttcctccccgcgtcaagctcggcatccagggattcgaggtgtccaagctggggttcgggtgcatggggctgacgggcgcgtacaactccccgctggacgacgaggccggcatcgccgtcatcgcgcacgctttcagccgcggagtcaccttgttcgacacctccgacgtatacgggcccctcaccaacgaaatcctcctcggcaaggcgctgaagcagctgccgcgggagcaggtgcaggtggccaccaagttcgggatacggcatgacgagagcggcacgcggaccgtgtgcggccggccggagtacgttcgcgcctgctgcgaggccagcctgcgccgcctcggcatcgactgcatcgacctctactaccagcaccgcattgacaccacaactcccatcgaggagacgattggcgagctcaagaagctggtggaggagggtaaggtcaagtacatcggattgtcagaggcgagcccggacaccatcaggcgtgcacatgctgtgcacccgatcaccgcggtgcagatggagtggtctctctggtctcgcgacattgagcccgaaattgtgccgctctgcagagaattgggcattggaattgtaccatacagtcctcttggccgtgggttttttggtggaagaggagtgaaagaacaagtgtctgctgaatctaatctgcatgggatcccaaggtttgctccagaaaatttggagaagaacaagcaaatttatttgcgaatggaagaactggccaataagcaccagtgcagccctgctcagctagctttagcatgggttctgcatcaaggagatgatgtggttcctataccagggacaaccaaaatcaagaatctagattccaacattgactccttgaaggtgaaactgacagacgaagatctgaaagaaatgggcagccagatacgggaagaagatgtggctggtggaagacaattcacttcatttgcacataccacctggaagtacgctgatacgccaaagaagcagagctaaaaaatacttgaaagcaacaatgatgatgcgattggtatggccctctccctgcagatgccctcaggaacattgccgatgcccctttgtgaacagcctcttctagtaaataataatgtatggagaagaacaatgaagggcccagtcttgttggaagtacgaataatgtacagttacaggaatgtgtgctaccatatatttcgtcgcatcagtttgagttgtggttgtgtgaacctaccatatatttcctcgcaaaagaataatgtatagttacaataatatgtgctatctcaatcagtatgcaggcaggaaaaacatgcaccatctgtagtacagtacatgaattctcgcttgtaatccacatttagacctgaaaatgcgaaaaagaaaaaccaaaacacaa

SEQ ID NO: 150656 - DNA, 110 bp, Zea Mays
tttttttatataaccacaaaagcctcgcttcttttgaagacgtgttggagaagaattcttctcggttctctctgcttggaggaacaactgtccagccatgaaagattcaa

SEQ ID NO: 150657 - DNA, 3081 bp, Zea Mays
aacacagcccagctctccgacaccggccaggcgagtggagtcgtcatagcattcgagagccagccgtccgttgccaacgcccaacggtctgagtgaatcctgccgatcgcgaacgccgccgcgtcgtcgtcctccgtcgccccgcctcggcttccaccgtcagcggccgcgctcgcgataaggctactcgtgtcctgtccactaaaaccaagacccaccgcctccagagttaaagggaaaagaaaaaggggaagaagcccctcgctccaagtcacgcgcctcccgcctcgccggcgccgcccgcccgcccgcctcgcccgccatgagcgcgctccaggcctccctcctcctccgcccgctcttttcgccactgcccccacgccgccggcagctgctctcctccgcctccttctctttcccccgcggcgcccacgcgccccgcctccgcgcattggtccccggcgcgccgcagcccgacgccgccgagccgcccgcgattgcatcctcggcggcggcggcggcggcggcggaggctgagccggaggcggagcccacgacggcggcagctcagcccgtcgcgatgagcgcgaaggaggggctggaggacatggtggacaaggctagggcctgggccgtggcggtcgcggccgcggtgttagccgcggccaggaggttcgtcgactgggtgctgtcgagggactggatgggctggtggcctttctggagatccgagcaccggctgcagcgcttgatcgacgaggcggacgccaaccccaacgacgcggccaagcagagcgcgctcctgcacgagctcaacaagttaagccctgaagatgtcattaaaaggtttgaggagcgaagccatgctgtggatagcaggggggctgcagagtacctgcgggcacttattctcactaacactatagcagattaccttccagatgaacaatctgggaggtctgcaagcctgccagccctgttgcaagagttgaaacaacgtgtatctgggaatgaggacaaacctttcatgaaccctgggatatcagaaaagcaacctttacatgttgtaatggttgaccccaaatctacaggtagatcaacacgttttgctcaagaaatcttctcaacgatcttgtttacaattgctgttggcgtaatgtgggtgatgggtgctgctgcacttcaaaaatatattgggagcttaggtggaattggggcatctggtgctggttctagctcatcatattctccaaaagagatgaataaggatatgatgccagagaagaatgtcaagacatttaaagatgtcaaaggttgtgatgatgcaaaaaaggaacttgaggaagtagttgagtatctcaagaacccttcaaagttcactcgccttggtggaaagctacctaagggcatacttttgactggtgctccaggaactgggaagacactactagcaaaggccattgctggagaagctggcgtaccattcttttaccgagcaggttctgaatttgaggaaatgtttgttggtgttggtgctcggagagtgaggtcattgtttcaagctgcaaagaagaaggcaccatgcattgttttcattgatgaaatagatgctgtgggatcaactaggaaacagtgggaagggcacacaaagaagacattgcatcaacttcttgttgagatggatgggtttgaacaaaatgagggaataattgtgatggctgcaacaaacttgccagacattcttgatcctgcactcacaagacctggtagatttgataggcatattgttgtcccaagtccagatgtgcggggtcgccaagagattctggagctctatttgcaagataagccagtggcaaatgatgtagatatcaatgcaattgcccgaagtacaccaggctttaatggggctgacctagccaaccttgtaaacattgcagcgataaaggctgcggttgaaggtgcggataaattgaatgctgttcagttggagtttgccaaagatcgtattatcatgggaaccgagaggagatcaatgttcatatctgatgaatcgagaaagcttactgcctaccatgaaagtggacatgctattgttgcactcaacacccagggtgctcaccccatacacaaggcaactatccttcctcgtgggtctgcccttggaatggtcacacaactcccctcacaggatgagacctctattagcaagaaacaactccttgcacgtcttgatgtttgcatgggtgggagggttgctgaagagctgatctttggggaagacaatgttacaactggggcaagaaatgaccttcacactgcaacggagcttgcccagtacatggtatcgaactgtgggatgagtgatgctatcggtcctgtgcatgtgaaagaacgaccaagcatagagatgcaatcaaggatagatgctgaggtggtgaagctcctaagagaggcttatgggcgggtcaagcgattgcttaggaagcatgagaagcaattacatgctctagcaaatgcgctgctggagcgtgaaacgcttactgcagatgagatcaacaaagtagttcacccttaccaagaagagccccatctttccttccaagacgaggagtttgccctcgcttaaagattcttttgttgcatcaagatatcggtcaccacccgtgaattgtaaatccgtgtacagtaagtggcgcctagatgagccatggaagttccttcagatgccctcttctgtaaaacagcgcgaaacacctatggtaaattagaagattggtgttgcgaaagctgatgcctgcttattgacaattctttggatggaaggcttcccgggaaggctctgggtttgcaaaaccctctcatacttttggtttagttaggatagatgtaggtttaacactgcatgttctgattgctaggtttctggctagggcaacatgttgatcatgttcttttcacttttttattgacattttctgtaaggaaatcgtacatgtaacgattgttttatttgtcaaacaagcactgtttgtttttgtcaaacagtatacggttaatgtattcgtgttgctaacgtcg

SEQ ID NO: 150658 - DNA, 625 bp, Zea Mays
gtcacaaagcaagaacctgtgatgacaacatcctgaagcccattgccatggattaaacttgtgtatcttccgccgggcagctcacgtcctctcccgtatgagggcagcggttcaatcagaggccagcttgatctgacctgcgtggcgcggatgacggcgccgcgcgcgaggaagagcgtcatgcgcgaggtgaggttgaagggccccgtgagccacaccccgggcggcacgtagagctccgccccgcccggcgcggcgcggcgctcgatgctggcgacggcgcgcgcgaacgccgccgtgttgagcgtccgtccgtcgcccgcgccgccgaagctggccacggacacccgcgccccgcggcgcggcggcgcggggacggtccccgagcacgtctcctgcgcctgcgctgccgcggccacgagcacggccgccgccgccacggctagcagcagcctgcacgggcaccgccgcgccattgcacgatgccccccgcgcaagccgcctccttgtagagagcgaaccgcaacaagcgatgagtgcggagaaaaggaaggcaacaaaagaacaaacaaaaggttactgcgagttgtttgcgggtggatttacgtgggatgggagtatggga

SEQ ID NO: 150659 - DNA, 746 bp, Zea Mays
gtttaatttcagagggggagaatttttagtaccaaagcagacctaagtatatcaaataccaaaaccactattttaaaatttgtgatctttcaattagttatttatgttggttttggtccaagatacgaagtatgtggattatggacttagggggaggcttatgtccataatcacatattatggggaccatttgcttaagcaagagtgtttttaaattccaaatgaccacatatatttcaatttggtatctcacacatcttttttatgcatatacatcaattgcaggtgttgggggccttcgtcccccgaaggtcctcaaaaacatgatttaataatgtcttccaagtgtgacatatgaacaggtaccttcgaactcgggctaaaagtatgcacaatgtggagagcatggtcgtgacgaagggtggtgttgctccgaagctacgagcaaaggagcttcagctaaatggcggaaaaaggaaccgacttaaagggaaaaaggctatttagtcctcatatagttgtccgtaagtcaatagtaaaaatgaagggcatgaatgtaatttctcacaggctgcgttgtgtgcctataaatagatgaacaatacccccgtactgttcacgctgacgcatacttgtttatgcactacgcttgtacttttaccttctaccaagccgaaggtacatttgtaattcaatactgtttctgtctctccatgataatatataatgagaatgaatggaggagg

SEQ ID NO: 150660 - DNA, 2874 bp, Zea Mays
atggggagtgatctcaaggagatgaagtacaggcggaggatcggggcggaggagcggccgcaatgcagcgaccggaggggcggcgcgggctgggccgcgctgcagcaggaccccgtcgagctgctgcgcaagctggacgagctgagggaccagatcgcgcgctcctgcaacgtcgtcgcccagcggcgggagccccgcagggccagccgccgcgcggtctccatgctccccgccgagcatctggaggagccaccgcctctgccggggtaccaccgctcccgccatggcgggcggtttgggccgggcttgccgcctccaggcccatacgcaccgccgcgccctgaacatggggaaaggtatgtgaggcagtctagcgggcactaccgccagtaccctgggaggcagtgggagaacggtgggatggggcctgggagcttccatcactacgggtgtgcctgtccacactgtctgcatgggcagaggacttcgccgcaagaggagaacatcccgatggcgaggtacttcgccaggcagcatgaatcgtaccggttcgagaggtcaccatctgtttcatccgattatgatcggaggtctgtggcgtcatcactttactcgcaccggtctgtatcgaagaggagagcagagtacttcaggaagaaggcggaacatatctgccgtccagtggatggtgctgcacctttctctgtgtgcagttcatgttataaactactgcagatgcctacagaaaaatgcatagggcggaagcagaaccgatttcaatgcgggtcttgttgtcagatagttagtctgaagcatgatgaagaaaatggtattccctttgcaccgtcattatccttatatgcgcctgaaacagagcaaagctcaagtgaccagatgaggcgagatactgtccatcaacatcatgaggattttaattctatgttctacaattcaaatgatcatagcaacatgcaaaacaacatggattccactgatgataattcactttcttcgaccatgagtaatgacaggattggcaaagattgtggttcaactagaagcattcagtcaaaagctgaggatctccctttctctccaagtaggtctgtagacaatggaagcccaaaggatatattgtgcgagagggacacagactgcaaggtggagccttctgtaggtggtccagttagcccacggtctccagctttagaggacaaacttgttgacccattgtgtgcccaagaaaaatgtaacgacgaggatgatcaaggcatggccatggcttacaaatcagacctaacttgcaaaggagaatatgatgttaatgatcagtatgatgggggcattagtacaagaagcaaacaggagagcaatgaagatgacaaagatgccactgaagatgaaatctcatgcagaagttatgaacagaagagcaaggaagataactcatgcaacattgaagatagtagcaaaacatatgagcagaatagtggagaagatgacactagtagtctagtaaatggaagtgaaaagtaccagtgtatgaatattaaagatgaagatagcagccccggaggcgaggacacatgcaataaatatgagtcaaaggtaaaaagagatgaaaattatgttcttggagctgagagcattagaaaaaactgtgatgaaaataatgcagatgtcatggaaactggaagcataagtgagagacatgatgggctgaaaatcgaagaagataatgagaaattgcagcagccatttattgaagatgccaattctcaaacagggagtggttcatcagttaatgagcggacaaattctgggttttctcgtggttcatcagaggctgggttggatgaagatcagtcctctaccggtaagagtggggattcatcattttttgctggttttctgaagaagggttttaaggacctttctttattaaataagtccatggacaatgttaaggtttcaattaatggtcatccaatctctgaaaaagcccttaagaaggcagagaagaaagctggtcctgttgacccaggtacatattggtacgactaccatgctggtttttggggtgtcatgggacgggaatgtattggcattgtccctccatttattagagaatttaattatccgatggccaaaaattgtgccggtggggatacaggtgtttttgtcaatggcagagaactgcatcaaagagatttagatttacttgtaggaagaggactaccacggacatctggcatgtcatattctattgagatgtcaggcaatgtaatcgatgaagcaactgggaaaaaactgcgcagtcttggaaaacttgctcctacgattgagaagttgaagcgtggttttggcatgcacgtccctgaagagttcagataagctggttctagtgctgaatattggctttgccaattatccactccacaaggctgaccatggggtgccaaaccaacgatttctgcgattgtgatgttaaatcctgcgattgtgataaatcgcaggtttctctgaattggactggggctctgcgagccaagataatgtggtccagtgacttaaccaccgattatagtatccctcctgctaatttcatcacttcaatggaagcgacgtttgctagtgactctagcctgccaggcagttcttaacttcactgctctgcctgtacatgttatattcctcaaatgtgtcgtctttatcagtacattgccccatcacaggcacagacatactgttagatgtatgagcaattgtcggcttgtaatttattggtagagctatgcttcccctaacatttatatgtatatatgtgctcatgattcttgaaactctggccgatatgattggctttcggctctc

SEQ ID NO: 150661 - DNA, 1146 bp, Zea Mays
aagtacatctatggcattatgacggggtccatggagccatacctgaagaaattgagacactatgctggtcacttgccgctgctgagtgctgattatggtgcatctgaaggatgggtcggctctaatataaacccaaccctgccacctgaggaggtacatacattatctgtttctccagtagcattcaagcactgcagtcctagttcgtgattttgcatggaaatttgtctataccgatacagactgggagatattgtgaagatagcaggcttccacaacgcaacaccagagctccagttcatctgccggagaagcctagtcctcagcgtcaacatcgacaagaacacagagaaagatctgcagctggccgtggaagccgcggagaagctcttggccgcggagaagctggaggtggtggacttcacgagcctcgtggacaggtcgagcgagccagggcactacgtcatcttctgggagctgagctccgacgacggcgccagcgaagacgtcctgagcggctgcgcgagctgcatggacctggccttcgcggacgcggggtacgtcgggtcgaggaagacccagaccatcggcgccctcgagctccgggtcctccggaagggagccttcgcgcaggtcatgaaccactacctgagcctcggcggcgccgtcagccagttcaagacgccgcggttcgtgagccagtccaacagcaaggtgctgcagatactgagccggaacgtcacccggagctacttcagcactgcgtatgggctctgatcgacgatgctacggcgctacgcaccaagtactggtaataggctggaagtatagtgatcgagagtgcatggcgcacgacgacgatccatcatgctgggagcctgggagttgcacgacgactgacagatgtatcatataattgtcagtgtaaatatagctgttcgacagtgtatgtaggcgaaggttgctgcgttccgtttagcagccgtgtcatcgctcaagaaaactcagaaagatcacatgtgttctgatttctgaatcaaaaagctgtgtacaagaagcagcgaactcactcgatcatattccgcgcgctacagccttcgcatatcagaaataccgccaaaagtttccatgtgctttacatacaaa

SEQ ID NO: 150662 - DNA, 1950 bp, Zea Mays
gtccccacgcacgcagcaagcacacccggttagcgtccactaatccgcgaaagcttgactgctccaccacgggtcaccggacatccggcttcctcgccccgtcccccgcacgcaggccgccccttaggctcctttgtcattcgaccttcctcttaagcacagcacaagcagctacaaggttctgacctacaagttccaatgacaatctgcagtagtgaagaaatcattgatgagtttgagttgctaacgcgtgatgctaggcgcgtgcagcaggatacactgagaaagattcttgaactgaatggtgatgccgaatatctgaatcgcttcaatcttggaaggagaacagactcaaagagctttaaatcctgcattcctctatgtgtgcatagtgacatagagtcctacatccagaggatagcggatggagatgactcgccggtgctaactgggaagcccatcacttccctctccttaagttctggtacgacgcaggggaaacccaagtttttgccattcaacgatgaattgcttgagagtacatttcaaatattccgaacctcatatgcctttagaaatcgtgaatatcctattgtcaatggaaaagccctgcagtttgtttacggtagcaagcaagtctttacccaagggggcattcttgcggcgactgcgacgacaaatctgtacaggagtcaacgtttcaaggaagcgatgaaggacgtcatgactcagtgctgcagtcctgatgaagtcatctttggtcctgacttccatcagtctttgtactgccatctattgtgtgggttaatcaactcagacgaagtccagtttgttttctcaccgtttgcgcacagcctcgtccatgcatttcacagtctcgaggaggtatgggaagatctgtgtgctgacataagagatggtgttctctcaaagagagtcaccgcgccatctatccgccaagctgtttcgaagatcttgaggccgaatcctgagctggctagctccatttacatcaagtgccagagcttgagcaattggtatggggtgatcccaacactgtggccaaacgtgaagtacatctatggcattatgacggggtccatggagccatacctgaagaaattgagacactatgctggtcacttgccgctgctgagtgctgattatggtgcatctgaaggatgggtcggctctaatataaacccaaccctgccacctgaggaggtgacgtacgctgttcttcctaacattgcttatttcgagttcattcctctggaaaaaccaaaatgggaagaaacggagatctgttcctctgttcactacatagagtcggagcctgtaggcctaactgaggttgaggttggcaaaatctacgaagttgtaataacaaattttgcaggtctataccgatacagactgggagatattgtgaagatagcaggcttccacaacgcaacaccagagctccagttcatctgccggagaagcctagtcctcagcgtcaacatcgacaagaacacagagaaagatctgcagctggccgtggaagccgcggagaagctcttggccgcggagaagctggaggtggtggacttcacgagcctcgtggacaggtcgagcgagccagggcactacgtcatcttctgggagctgagctccgacgacggcgccagcgaagacgtcctgagcggctgcgcgagctgcatggacctggccttcgcggacgcggggtacgtcgggtcgaggaagacccagaccatcggcgccctcgagctccgggtcctccggaagggagccttcgcgcaggtcatgaaccactacctgagcctcggcggcgccgtcagccagttcaagacgccgcggttcgtgagccagtccaacagcaaggtgctgcagatactgagccggaacgtcacccggagctacttcagcactgcgtatgggctctga

SEQ ID NO: 150663 - DNA, 2136 bp, Zea Mays
atggagcagctccggcagctcggcgaggtggtgggcgccatcgacgcgctcatggcgttcgagcccgagctccgcgtaaacccgcgccagtgccgcctcctggccgacgcgtgcgcccgcgcgctcgccgccgtcacgggcgaggtgcgcgcgcacctccgcttcgaggagcgcggcgccaagtggcgcgccgtggaacccgcgctccgcgagctccaccgcgcgttccgcgacgccgagggctacgtccgtcagtgcctggacccgcgcggcgggggcagctggtgggggcgcgccgcggcggcggcgcactgcactgactgcgtggagcagcacctccacggcatcctctggtgcgtcgccatcgcggtcgaggccgtcgaggccgccgcggagatcgcaggtcacgacgccgacgagaccgcgcggaggcgtctggtgctcgccaacaagtacgacagcaggagcatgctcgagcccaggctgttccagcacgcgtacggcaagctgtacctggtgtcccaggagctcgttgcgcggatggacacggtgtggaaggaggacaggtggctgctattgcagctgctcgacgagatgaagtcgccggcggcgccgaagccgctgacgaagagcgagcagcggctcgccgacgtcctggcagcgccgcggggaaagctgcactcggcgtctgtcctgctcaacggcgactacagcgtgcggaggcgcctcggcggcaacctcaaggaggcgcattggatgggggagagcttcgcggtgaagcatttcatcggggactccgaggccgaggtctcgatgctgtcgtcggtggcgcacccgaacgtggcgcacgccgcgtactgcttccacgacgaggagaggaaggagtacttcgtggtcatggaccagctcatggtcaaggacctcgccagctacgtcaaggagatgagcagcccgcggcggcgaatcccgtttcccctcgtcgtcgctgtcgacatcatgctgcagattgcgcgcgggatggagcacctgcactccaagaagatctaccacggcgagctgaacccgtccaacgtgctcgtgaagccgcggcagcccgacgggtacgtgcacgtcaaggtcgccgggtttgagcggcggggcgccgtcacaaatggcgcaaaggcgtctgctaatggcagtggcaatgccagcgcagccggcagcggcggcgacgacacctgcatctggtacgcgccggaggttctcgagcatcaggagagccgcgacaggcacaccgagaaggcggacgtgtacagcttcgcgatgatctgcttcgagctgctgacgggcaaggtcccgttcgaggacaaccacctgcagggcgacaagacgagcaagaacatccgcgccggcgagcggccgctgttcccgttccaggcgcccaagtacctggtcgccctgacgaagcgctgctggcacgccgacccggcgcagcgcccgccgttcgcctccgtctgccgcgtcctcaggtacgtgaagcggttcctggtcatgaacccggagcagcagcagggccaggccgacgctccgccggccgtgccggccgctgactacctcgacatcgaggcgcagctgctgaggcggatcccggcgtggcagcgtggccagggcgcaccaccgcgcgtggtggacgtgccgttccagatgttcgcgtacagggccgtggagagggagaagaccgccggcgcgcacgccagcagggacagggtcacggattccggcagcgaggaggactcgctgtgcggcgacgagaacggggtcggcgccaccacgccagacgacgacgcgtccaccgtgtcaaacggcactgtgaggtcgcgcccggacagctgcgacggcaagaagactccggtcaggaaggcagacgtcaaggcgccgcccagacaaggaggcgcgttgcatcctgtcgccacatcttcttcgagaaaacttgagaggaccgattctgaacatggtacttctggattctctgcagggtctcaacagaaggtgaaaccggcgagcgcggtgaagcctccgccggcgacgaggaaaacggtgggcgtgaagcccgagcatccggcgcggcggccgaagtccgggcacgcctcggactag

SEQ ID NO: 150664 - DNA, 1481 bp, Zea Mays
ttcgtcttcagatctagggttctctcgtgctctgttctcatcttctgctcgctggtgtcccctctctctcacccatggcttcggcggcggcggcaactcaggtggggacttacttcctgcggaactactacaacctgctgcaacaaacccccgatgtcgtccaccagttctacagcgaagccagcaccatggtccgcgtcgacgacctcaccggcaacaatactgcaacaaggagctgtcgttcagccattgccaagccgagagcaggtgatggcgctggcaccttgctcgaattgatggtgatgcacgacctgccttggtgtgaggagtatttttgtagtttttatttgtaggatgagtgttcttcctggaaaaaaagggacccaatgtctacgctacgcagttcctctgattgttttttacatctaatttgttgacttgctacttatagagttcagtgattgttttagtgaaacaaattctaatttgcttacttacatggctgctcttagccccaacaattgttttggtgacttcaaagcagaaagcttaatggaattagataagctctatccagatgattttagttcagatgaattgaatgatcttgcttatgatcttcctatcagtacttcaatatctatgatttatttgaaagaatagtattattgttaattatcaaattatttcatatcagtacttcaatatatgacacaatgacacattaaatttttattttcagattacttcatctttatctttttacactgccttatattgatgtctatgctatttagctattgactattggctattttatattactatgaaagaatttaaatggtttgtatcttataaccttttattttaatgtgccgttaaaatataagtcgttacactaattagaaactagaacccttttatactcatagtttctcggtgacaccattgaccaaaaaatcctagatccgcccctgtggcccatcacttagctcatagaaccttactcgctgctatgtggcacacttacatgcatatgtaagtaaatattaccttgtactactacctgcacttttgcactcaacaacttctattgcatttaatctgagcaaactttgctgtgattgtttatccacgaaacagaagcagaagagaaactgagaagaacccagcttagatcagactgaagaactagatgcggtggacgccttcaagacctgctgacatgagggctgctagtcagagctgctgtttttggcctgttctttgacatgagggtacccaaaaactctagttgctcgtgggtgtcaactttttattatatgttgttatgtttgtgcaaaatcaactgaaatgtgaagtcaagtggtgatgctgtgaactgagtttagtgttgtccacttagtttgtatgatcactggaatactagttgtattcatctacggaatatggaattgtgtgctcattcctctgttctagta

SEQ ID NO: 150665 - DNA, 113 bp, Zea Mays
gtttattgtttttctttgatctatggagagttggtcagtcggtccgcttcgcagaatcgctcgacagagacttggtcggcgggtgggttgttttttaagaggccatgtgccta

SEQ ID NO: 150666 - DNA, 1216 bp, Zea Mays
accccgaaggcccgaaacaagattagattagagatagcaaaaggcgaagcgacggtaaccgccaccaccaaatcgctaccgccaatccgccatgatgctcccgacggccaccgcgacggccgtcttcctcaccgcggcgccttcctctttctccacccgccgtcggcgcagtcgcgccatcttcgcatccctttcgccgtccttctcctcctcggaggagccgctgctggtgcgcgcggcgcggggcgaggacggcctcccacgcccgcccgcgtggatgatgcggcaggcagggcggtacatggcggagtaccaggcgctggccaagcgccacccctcgttccgggagcgctccgagaacacggacctcatcgtcgagatcacgctgcagccgtggcgtgccttcgcgcccgacggcgtcatcctgttctcggacatactcacgcccctgccggccatcggggtgccgttcgatatctcggactccaaggggcccgtgatccaatcgccagtacggtccaaagagcaggtgagggagctcgtccccatcgaccttgatatgctccagttcgtcggggagtcactaaagattctgcgaaatgagattgatggaaaagctgctttgctaggatttgtgggggccccatggacaattgcaacttacattgttgaaggggggatgaccaatacgtacacaaatataaagagcatgtgccatacagctccagatgtcttgaagggtcttctctctcaccttgcacaagccatatctgactatatcatttaccaagttaactcgggggcccagtgtatacagatatttgattcatggggtggacagcttccacctcatgtgtgggagcagtggtcaaaaccatatatcaaacagattgtgagtaggattaagaaagagtgccctaatgtaccccttgtgttgtatataaatggaaatggaggtttacttgagcgcatgaagaacacaggagctgatgttattgggcttgactggacagtggacatgactgatggaaggaggcgccttggtaatggcattagtgtacaagggaatgtggatccagcatttttgttctcaccattaccagtactgactgatgaaattcatagggttgtgaaagcagctggtccaaaaggtcatatacttaatctgggctgtacttcagaaaacacccgaagaagctgtagcacatttctttga

SEQ ID NO: 150667 - DNA, 726 bp, Zea Mays
ttggtactatgtgggagcgttgcgctgcgagtgacggcttcttatcatgttggacttgggtggtttctcaaggcccatctgtactgtaacggctcattgttaggtgagaagtaaggaagagtaacagacctacgcgcttcgcacgagacgctcgacgcacgaaactgatgctttaatagagtagagattaaaagatttcatgcaaagttttgatttactgattctgttcaataagcttttctatttttccaacagattgtgagtaggattaagaaagagtgccctaatgtaccccttgtgttgtatataaatggaaatggaggtttacttgagcgcatgaagaacacaggagctgatgttattgggcttgactggacagtggacatgactgatggaaggaggcgccttggtaatggcattagtgtacaagggaatgtggatccagcatttttgttctcaccattaccagtactgactgatgaaattcataggttagtaaaggctcaaagatttccatttaatttacgttattttgtgtttttgcttaatgctcatgtgcaattcattaatgagatcacctaaagtgttgcttgagcagtgtactatacatcttcatgtcaggtatgattggttgcctgcactatgataaacctgcattacaccctatgcagcatagccttagcctttataactgcatgcaatgaggtgtgtttggtttgattgtct

SEQ ID NO: 150668 - DNA, 2163 bp, Zea Mays
atgtcccccgcatccgccgcggatctcgccccccccccccccccccccgcggatctcgcgctagcccacaaccgcgtgccctcccacgcgcgatggaatgcccctcccaccacaaccgcgcagcaccatcctgggcacggcgccccgcgcggggcctcgacgaagaggggctcggcggaggctgcggaggggagcggcgagaaggagatgagcagcgcaggggaggaggagaaggagagcgacgcggagatgaggagcgacgagagcaggaccgatagcagcggcgccgcccaccgccggtcgcccccgccctcgccctcgcccatcggccatgtcgtcgccgacggcctgcgagtcgagcagcgcggcgggcggccccgccctggccgcggcgaaggccgcctcggcgtccctggcgcggagcgtgtggcgtcctcgacggtcgggaaggtgcccagccacacccgcgccgccttctgcgggtcccggatctccgccacccacttcccccacgggcgacgtcccaatgctccaagagtcgaggaagcgtccgttcccgtggccactaaagagcccgtccacgatgccgctgggctcggtggcttcgagaatcctcgaatagtcgagtcttcatcctcgccgtggttttccgttggcgtgataataggacgcgataagagctgccgtgacggcgaggaacgagacgaacctgcgccgccaccgttggcgtctgcgggcaggggagagtggaggagcggctgccgctgtttaccgccgcgagacgtggccatggcgctcgcgctagagcaacaccgccaaggcaatcgagtgagggggaggatgtggtcatcgagccagacgagcacgaggggtgtggtggagatggggagggtggaggctaggaggggaggtggtggggatgaagacgcaagtggtcaccacgcagcggcaactgatgcgcgatctggaggtgctgccactcgaggaggccaccgcaagtgccaagagcatgaacgtgaatggtgcatgtcagcgagggaagctgctacggttcctagagcagatgaagttcttggtagctttcttgcggctctgaacaaatttattgttgatcgttgttcttggaatcactcagtatcaaaataccatgtatacgagttctttaaggttgctctagagagtggtaggatccaaacagccatcaatgacgtgatactcaatctttttgacaagttctttgagatgcagagaaatgacataataagggcacttaacatgtataaaagagaaattgagcaggttcttgatcccacatacaaggaagaagcagtaatggcagggaggatgactgctatagttaactcaaatggggatgtttgtgccattcagaaagctggtggagagggtctcatgtcaagtgttaccatgcagtgtttaagaattgcttcggtaaaggctgctgatataacaagcaaaataaagaaagcaatattaacaggacataaggaaaatgaggaatttgcgcttgccatgtgtccagcagaaccatatgtcctatcaggaggaaaggacaaatctgttgtcttgtggagcatccaagaccatatatctgcccttggggattcctcgtcttctcctggagcatctggcagcaagcagtctgttaaaactgcaaatgaaaaggagagcccaaagttgatcctagagggtggcgagttcgatgctgtgaagcccctgaagcagagccgcgtgggattccggggccaggcatggttccatatcaacttctgggctcgcccccgcagcagcagcagtaataacaagacaatcaagcgcttctttgctgaggtgcactacaagccaacctcgatcagtagcccctcatcgtcttcgtcatcacttgcaataactgcagttcctatagttcaaatatgcatcattatcgaggaacctctatcccaatataggcgtagctgtgccttttgtcccagctaccgggacattttacaccctaagggctgccgtaaggtcgtctgtggaaatgacaaggacctgtttgaacagcgattggacccttgctgctgcactggtatggggattgggaagatgccattcactgcccgcccagacatgtctgcttttctcaacatcagtcctaagtag

SEQ ID NO: 150669 - DNA, 532 bp, Zea Mays
atgcaaaaaaggaaaaaaaaaactgatgtcgacctgagaccttccggcggctctcaagagggcgagcgagctccgcgccgacggcagccggggctggtggggccgataccgttcggcaaggagatgatgtggaggctgggcatgaagctgcgcatcggcggcaacgaggggttgcgcgtcggcggcaacaaggcctcgagggcgtcgttgcgctcggcggcgttgcggactgcgacggtgtgaggagccgcacgacgcagcacttggtttggagctatatatagtactgtagctagccgccgccgcggtgtggccacggtgacctcatcggcggcttccgccaggcgtaacgtcgctggtactcgtgtggagactggagactgttcgtatgtgactgtctacatttcataatttttggagtttttaatttggtgtccttagttttgatgatgtgctcgtttttgccatttttaaaaagtttctaagactcacatcagacaccgaatattccgaataaatccaaaattgtgtt

SEQ ID NO: 150670 - DNA, 984 bp, Zea Mays
ctccgcttgcgccgcccctagccccaccgtcgtcctccccgtgaagccgccggttgagacgcccccctctcgtgttgcctccatgtccgcgcagatatgcctcgctcgccaccccgtcgtgttcctccccgagacaccgtggccagcctctagcccgcgctcttcctcgtcacggcgatgccggcttcccggaccccttccggcttgcttccatgccttcgcttcggtttgttctggcgcaggagaggctacacttcctctatgagtcaaggttggccgtcggcaagagctccgaagggttccaggcgctgcagcaatctacaccagggccagcttcgcgtccacttctgcacaggcgagtgcggctaattgttccaagtttaagcttcacctctagtcatgggtaaagagaagttacacatcaacattgtggttaatggccatgtcgactctggcaagtcgaccaccactggccacctgatctacaagcttggaggcattgacaagcgtgtgattgagaggttcaggatgttcaggttgagcttgagaaggagaagcaagaaaaaacaaaactttgacaagtgttggataacttgaagacggaatcagaaacttcaagggtaaaacattatgaggaaatagaagttgtaaagatgacatcacaagaaatgcacgtcctcctttgttaaccgctaaacttcaaccagggccagcacaatccaaggccataaagtttttaagcccccaacagtgaattattgtagtatgtttcttttttgaaaattggttgttggttgaactatgtcgggttgttttatcaatagttggttgttagtttttcacaagtaggacttagtggctccaagtttgttgatttttgttactagtagccttaagttttgttgaacaatgttgcttcttgctagatgtattgtgacctatgaattggaatttgtctgccacaattttggtcattggatatgt

SEQ ID NO: 150671 - DNA, 1062 bp, Zea Mays
ggtcgtggtttcatgcgcgacgtgctgctgcgcatggcggagcacttcaacgactgggacctgcaggcggtcgtcaggagctgcggcggcgtcgcgcacgcgggcccgccgccggagcccgccgacgcggccaccgcacccgcggcgccgaggggagacgaggcgccggagcgggtgcccggcggcgcgcgtgccacgccggcggtgtctgcccggagacaggaacgggcgccgccgcccgtggcgctcctgtgcgacctggagtacctggattcggaccacaagccgttcctgctgccggtcgcgcggccgtcgccgaggccgcgcgtggggggcggcggccacgggagtgaggtgatgatctctttccccgcgggggccgcatccacgtccggggtgcagcagagggcatcgtcgccacgccgcaagccaggcgcgcgcacgccgcggccgaaaagaagcaagaagagccagctgaagaaggtggtgcgcgagatgccggtggccgacggcagctcgtcgtcgccggacccgtgggcgtggcgcaagtatggccaaaagcccatcaagggctcgccttatccgcgggggtactacaagtgcagcagcatgaaggggtgcacggcgcggaagctggtggagcgcagcccagccaagcccggggtgctcatcgtcacgtacatggccgagcactgccaccccgtgcccgcgcagctcaacgcgctcgcgggcaccactcgccacaagccgtcgtccggcgcggccaccgagctgcacagcgcggcctcctctcccagtagccacgagcagggccagacagtcgagaaagcggccggccttcgagagcgtggcattggcaacaacgagacttcgaattcaacaatggccggcgagtttggcggcgaggagatagcggccgtcgatgacgaggacgagttctggcccgcggagatggacctggacgagctcttggcgcccgtggacggcgacttcgatttcgagcacgtcatagaggaagatggtgtactgggacggcggcggccgcagaaaatttgcccttaa

SEQ ID NO: 150672 - DNA, 1433 bp, Zea Mays
catcaacccatctcattccacgggctgctaaagcacacactagctgcaatgcaaacgcccttcgtggacaagagcccccagtcccaccgccgggacagcgccagcggccggctgaagcgacggctcgcgcggatcctcacgcgttcctcctgcgccaccaacgccacgcccgccggttcgcgcacggccttcgtcagcctcgccaagaccaacaacaccagcgccgccgccgactcctctcacccggagccggaagcgccgccttccccgtacttctgcacgccttgcagctacgagcggcccagggtccgcggcgacagcgacacccgctcgcgccgccgcagccgcagcgcctcgctcgtacacatctccgtggactgcacgggcggggccggggccggggccgcctccggccgccaccccgtccactctgacgcgccgcttctgcagcacctgtcggtgccggcgagggacgtcgtcgtcacgaagcaaagcaagggcaggagcaggggcaagccggtggcgcggtctccttcggcgtcgaggcgacactgctcctcgtcgtggtcctcctcctcctggggccgcgcgcggcggcccagcagctgcttgcccacgccttacagctgctcgtcgtcgtcgttgtcctccaccggaacggacgacgagctcgcgccgttcagcggcagcgacgaggagggcggcgacgaggccgagacgatgacgctcttctcgtccgactccacgtccgagctctaccaccccaacggcggcggcagaaccagcagcaggaggaggagtcatcatcacaggagcaggaggaggaggagtcatcatcaaaggaggagtcatcatcacaggaggagtcacaggaacataagtcgccgcgcgccacggcgtgcgctgccgagaaccggcgacccggcgccggcaccatccgacgctcatttcctgcctctggtgtccgtggacacggagaagcacagggaacgcgacagcgtcaagaagctgatgacgacgggcgcggcgtcggcgggcatggcggtggtgaagcgctcgagcaacccctacctggacttccgcagctcgatgatggagatggtgctggggcggcgcatcggcagcgtggggaacatggaggagctcctggggtcgtacctctcgctcaactcgccgcgccaccacccggccatccttgccgccttcgaggacgtctgggaggccgtcttccgcgaggacgaggagtgactgtgagcaacgacagcgactcaaatcgtgatgatcattcagagtatggtttggacagctacgtatatgccaatgcctcaattgtcatgcatgattttatttgccactgagatactgactgtggtactaatgtatgtaacgggttcgatattacatgatcataattgagcgcctgagttcttagg

SEQ ID NO: 150673 - DNA, 695 bp, Zea Mays
accatctagccatcagatcaaacaatccccaaacgcctccgcctccgcctccctagggttttgctctcggctcgtcggatccagttcgggggatcctccatggcgtcgcgtccgtcgctgaagtcgaagcccaagggcaagggcgggaagaaggccaccgccgacgacgaggacgccaccgcggcggcgaccacggtgcggctcatgaaggagtggaccacgtggacgatgaagaaggcgaaggtggtggcgcactacggcttcatccccctcgtcatcgtcatcggcatgaactccgagcccaagccctccgtgttccagctcctctcccccgtctgatcggatctccccgtcagggcccggatgaggtcggtccgtagtagtttgtagctggtacttcatttgcttacatatgtccgagatcgagttgaagaaggtggatcatgctttctgggcgaatttgaaggatttggtttaataattttgtagtggcggatgtcttctatacatcggatcaaaaatgtcttggttatgtgatctgcagtgcttatgattgtatgaactatatccgttttcgtctgcgtgtactgattttgttgcgcgtcttgtgctgatgttttggatggttgtggtcttgttgaatctgacatcgactagcctacatatgtgattaatatgtcgttcagtttcgccgt

SEQ ID NO: 150674 - DNA, 635 bp, Zea Mays
gacataatgctgatgagttgaaaattagaagtggtggtgaatcgctgattgtctgttccaaacacttctcttagatcttattggcctttcagaactaacacagatacctttgcaaaaagaaaaaaactgacacagataaatagttatctaacctgcctagctacagatcttgcaattttgcatttagtctcaagattcaacgtgctatgctcaagaaatgtggttttagttttacgttacaggaacatagtttatatacctacatgcgaagaggctttttggcccatgcctgactggtgcattactggcacagcatggccaatgcatcttcaaaggttgttcagagatagcaatgatcagcatatttttagattcaaacctttttcttttcagccatgcatgccattttaaaagtgtcatactacagttttaagaatcagcttttgcaaaactacatgcatgagcactttattccattcaggtccacctgcaggcttcatggatgtccaaactatccatctcactgttgtggcatgatatgcgggttgtttcaatggaatgtggacccaacatgtcattcccaattcaatgcaaaaaagttattttaagcaaaatttcgtgatattgtttatatg

SEQ ID NO: 150675 - DNA, 1038 bp, Zea Mays
atggcagcggtcgagaggacgaagaagaagaaggtaatcatctacaccgaccccggaatgcacagtccactaattgatctattgtttgaccactacctcgacgacatgaacatcggtgctgcgcagaatgccaccattcgcgttgtgctcgttgtcttccagtggtggggattgaacgttgctatcatcatcaacaagtggaacttccagctgaagcgggtcacagggtttgtccagtccactaaattcagaataggtgctccttacaatgccaaccacaccaacagatcggatgaaggaaattgcacaagcttcacaagaatttctttatatttggacttgtgcaactatgtaatttgcagtctccataaggatgctaatgataggtcctcaacacaagccttattgggtgggtacactatggagacggtattcgacagcagcatgctggggatcgagccctactccagggaggtcacccagagtggcgaactactcgtcatggacaatgtcgatagcaggccaaagcttgttgccggttcgcctgaaggatttccgggtcatattgatgggaagctggataacatggtggatcctgctgctgtctttgggatgctttttggaagtgactattttgaagattacgttggccagcttggtctagcatctatagcttcagtggaggttgaggaaaactcaaatagtcaagaggcaagagcaaaagttcaagaaaagataaaagagttacaaagagaaagagaacaaaagcttactcagagtctgaaggaccgacttcaatcatatgtagatgggagaaatgatgaatttgcattattggctttccaagttttaaacttgtctcaaacaaaaatttcagcatttggtgaggttatgcttcacaccattggttatatttatgtccggcaagcagcaagagaactcgggaaaagtagaatttacatgggtgtaccgtttatagctgaactcgatattaaataccttaaagctgagagtgacacaaatggagatactgaataa

SEQ ID NO: 150676 - DNA, 1915 bp, Zea Mays
ctctagctcaatagctctgccgcagagacttgctttgcttgacgttcactaggtgcaccaagaagccaaagccaatggcgactctacctctgctcctgcacctgctatgggaggcctctccgtgggcccgtgcaggcgcggcgacggccgccgtggtgctggtgtggctagcggcctggacgcttgagtgggcgtggtggacgccacggcggctagacagagccctacgggcccagggcctcaagggcaccaggtaccgcctcctcaccggcgacgtgagggagaacgctcggctcaaccgagaagcccgcacgaagccactgccgcttgggagtcacgacatcatcccacgcgtgctacccatgttccacaacgcggtgaaggagaatgggacaaattcattcacttggtttggcccgattccgagggtgataattccagacccggaattaatgagagaggttttgtctaacaagtttggccactttggcaaaccactgtttagccgtgttggcaagttactagccaatgggctcgctaatcatgaaggcgagaaatgggcaaaacacaggagaattctcaaccctgcattccaccatgagaaaataaagcggatgctgcctgtatttgctacctgttgtgccgatatgattaacagatgggaaaattcaatgtcttccaaggaaccttctgagatggacgtctggcctgagttccaaaatcttactggagatgttatctcaagaactgcttttggtagcaactatcaggagggcaggaacatcttccagctacaaggagagcaggctgaacgccttatacaatcttttcaaacaatatttatcccaggctactggctcttgcccaccaaaaataacagaaggatgaaagaaattgatcgggagatccgtaaaattctgcatggaataatcaggaaaagagagagggcttttatagatagtgaaggaactaatgatgacttgttaggcttattggttgagtcaaacatgagggaatcaaatgggaatgcaaaactcggaatgactaccgaagatataatcgaggaatgcaagttattttactttgcaggtatggagacaacatcagtcctgcttacatggacgttaattctgctaagcatgcaccctgaatggcaagagcaggcaagagaagaagttttaaaccactttggaatgggtacaccagactttgataacttgaaccgcctgaagattgtaaccatgattttatatgaggtccttaggttgtacccaccagtagttttcctatccagaagaacctacaaggaaatggagctcggtggcatcaaatatccttcaggcgtgagccttctactgcccatcatcttcattcaccatgatcccaacatctggggaaaagacgcaagcgagttcaatccacagaggttcgaggatggcatttccaatgcgaccaagcatcaggccgccttctttccatttggatggggtcccaggatctgcataggccagaacttcgcgttgctggaagcaaagatggcactgagtaccatcctccaacgcttctcctttgagctctcatcatcctacactcatgcgccatacaccgtgataactttgcatcctcagcatggtgctcaaatcaggttgaagaagctttgaccatgatggtcatactgaatgccaaaacatgcactcctagtaacatattgtgattgttcatgtatgcaggtttaaatttagctttgatatgaataatgagaaccaagtgtgtatgaatggagtaggggtgtaatcggatcggatacgaacggatattgcttgtaccatatttgtttcatattttctgtttggattcagataacatcaagttgtgtcggataagatttgaatagatattgatatcttaaatatcc

SEQ ID NO: 150677 - DNA, 1776 bp, Zea Mays
ctctagctcaatagctctgccgcagagacttgctttgcttgacgttcactaggtgcaccaagaagccaaagccaatggcgactctacctctgctcctgcacctgctatgggaggcctctccgtgggcccgtgcaggcgcggcgacggccgccgtggtgctggtgtggctagcggcctggacgcttgagtgggcgtggtggacgccacggcggctagacagagccctacgggcccagggcctcaagggcaccaggtaccgcctcctcaccggcgacgtgagggagaacgctcggctcaaccgagaagcccgcacgaagccactgccgcttgggagtcacgacatcatcccacgcgtgctacccatgttccacaacgcggtgaaggagaatgggacaaattcattcacttggtttggcccgattccgagggtgataattccagacccggaattaatgagagaggttttgtctaacaagtttggccactttggcaaaccactgtttagccgtgttggcaagttactagccaatgggctcgctaatcatgaaggcgagaaatgggcaaaacacaggagaattctcaaccctgcattccaccatgagaaaataaagcggatgctgcctgtatttgctacctgttgtgccgatatgattaacagatgggaaaattcaatgtcttccaaggaaccttctgagatggacgtctggcctgagttccaaaatcttactggagatgttatctcaagaactgcttttggtagcaactatcaggagggcaggaacatcttccagctacaaggagagcaggctgaacgccttatacaatcttttcaaacaatatttatcccaggctactggctcttgcccaccaaaaataacagaaggatgaaagaaattgatcgggagatccgtaaaattctgcatggaataatcaggaaaagagagagggcttttatagatagtgaaggaactaatgatgacttgttaggcttattggttgagtcaaacatgagggaatcaaatgggaatgcaaaactcggaatgactaccgaagatataatcgaggaatgcaagttattttactttgcaggtatggagacaacatcagtcctgcttacatggacgttaattctgctaagcatgcaccctgaatggcaagagcaggcaagagaagaagttttaaaccactttggaatgggtacaccagactttgataacttgaaccgcctgaagattgtaaccatgattttatatgaggtccttaggttgtacccaccagtagttttcctatccagaagaacctacaaggaaatggagctcggtggcatcaaatatccttcaggcgtgagccttctactgcccatcatcttcattcaccatgatcccaacatctggggaaaagacgcaagcgagttcaatccacagaggttcgaggatggcatttccaatgcgaccaagcatcaggccgccttctttccatttggatggggtcccaggatctgcataggccagaacttcgcgttgctggaagcaaagatggcactgagtaccatcctccaacgcttctcctttgagctctcatcatcctacactcatgcgccatacaccgtgataactttgcatcctcagcatggtgctcaaatcaggtttaaatttagctttgatatgaataatgagaaccaagtgtgtatgaatggagtaggggtgtaatcggatcggatacgaacggatattgcttgtaccatatttgtttcatattttctgtttggattcagat

SEQ ID NO: 150678 - DNA, 2720 bp, Zea Mays
accaccacccgtcctcggccctcctctctctctctattcccccctccccggaggccggagcgctcgtgcggaccacgaggaggaggagagagagaggcagggagccctagccctgccctgcgcgccggcgtcgccagggttagggtctccccggggcccccgccttccttgccaatccctccgccgtcttctcgctctggccgatccccccgcccgacgcgcggggggcgcctagcggcgtgtctgcgttcggcctcgacggcgcggcgcgagccaatgctgtgtgcctgaccgtcgctttgggattgattccactcggaggtggccagctagccacccgagctcgctgtccttgccggtacggcgtttcctgaggaggttccgtgcgagatccgaaggccggcgtgatgcagcacgatcagcgcaagaagggttccgtggaggcagagtttttcacagagtatggggatgcaagtcgatacaagattcaggaagtcattggtaaaggaagctacggggtggtctgctccgctgtagatgtccacactggagagaaagtagcgatcaagaagatacatgacatctttgagcacatatctgatgctgcccggattctccgtgagatcaagcttctgagactcctaagacatccagatattgttgagatcaaacatattatgttgcctccatcaagacgggaattcaaagatatttatgttgtttttgaacttatggagtctgatcttcaccaagttatcaaggctaatgatgacctgacaaaggaacattatcagttctttctctaccaactgatccgtgctctgaaatacatccacacagctaacgtttatcaccgggacctgaagccaaagaatatattagcaaattctaactgcaaactgaaaatttgtgattttggactagcacgagttgcattcaatgataccccaacaacgatcttctggacagattatgttgcaacaagatggtacagagctccagagctctgtggatccttcttttcaaagtatacaccggccattgacatttggagcattggatgcatctttgctgaggtgttaacagggaaacctttgtttcctggtaaaaatgttgtccatcagttagacttaatgactgaccttctaggcacgccatcgatggatacgatttctcgggtccggaatgagaaagcaaggaggtatctaagtagcatgagaaagaaagagacaatttcgttctcacaaaagtttccgaatgcagatcctttagccttggatcttttgcaaaggcttttagcatttgatccgaaagaccgtccaactgcagaacaggcattggctcatccatactttaaagggctagccaaggttgagagagagccatcttgtcaaccaatcacaaagatggagtttgagtttgaaaggagaagagtgacaaaagaagacattagggagctgatattccgtgagatattggaatatcatccacaactgctcaaagactatatcaatggcacggagaggacaacctttctgtacccaagtgctgtcgaccaatttaggaagcaatttgctcatcttgaagaaaatagtggaaacggacctgtgattccaatggaaagaaaacatacttctcttcctaggtctactattgttcactcatctccaattcctgtcaaggaacaaccccgtatcggcccatgtagggaaaggccttcatctgatgagtcctacaggaatcctcgggagacagaacaatattccggcaatctccccagaacgtcacaggctccacaaagagtgccaacagcgagaccaggaagggttgttggtccagtaatgccttaccaaaatggagacaccaaagacccctacgacacacgaaggttggcaatgagctcaggatatcctccccaacaaatcccacaaacgtttggttattatcagacacatggtaaaccagcttgctgcgagccatcacaggctgaaaggtacacgctgcatcagcaggctgcctatgcctgcgcaaaccgtacagccgcgtctgatgttgctctggacatgagagcacccccttttcagcatctatcggcagggcagagaagtgactcttgtgataggctgacagcagagacaaacttgtacacgagatcaaccaacggcatcgctgccactgcagcaggagtggcagcaactactcacagaaaggtcggcgttgttccgtttggcatgtcaaacatgtattagtgactggatcatggccgaatcatggtgaatcctctgtgcggttgatgggtctatgctgccttcaggtggctaaacaccgacaacttgaagcggccaatcaaacctttggctggatgctgcaagtttagagtgcagtagacagtgttttttctgtgtggtcaggaaaagaggaacaccgccggcggcatgaagcctgccaaaaagtttgtatctgcctgtgcctgagaagtgtgcccttggttgcacactgagaaggggtatagtcggcagtccggcggcatgtaatctgggcaatttaggcgccaatttcttttctagagcgaggaggcagaagggaaaggaaggaacattaacgttttaaatgttgtatagagacgtttctcatgcatcaatgtgctacatcagaattacttcagaaagatatgagatacagcaaaaaaaactgtatggcatatgcatgtttttagatct

SEQ ID NO: 150679 - DNA, 651 bp, Zea Mays
attgattatttccatatgattgactgatggtccattgatctgtgaagattctttctgtggaagcataaacgctgtatatacgtactttagtaacttaattttgcaaaaaaactttgcagggttccgtggaggcagagtttttcacagagtatggggatgcaagtcgatacaagattcaggaagtcattggtaaaggaagctacggggtggtctgctccgctgtagatgtccacactggagagaaagtagcgatcaagaagatacatgacatctttgagcacatatctgatgctgcccggattctccgtgagatcaagcttctgagactcctaagacatccagatattgttgagatcaaacatattatgttgcctccatcaagacgggaattcaaagatatttatgttgtttttgaacttatggagtctgatcttcaccaagttatcaaggctaatgatgacctgacaaaggaacattatcagttctttctctaccaactgatccgtgctctgaaatacatccacacaggtacagggaatcttgctatctgtcttcctggaagatagagattgtatatttcatatgattaacgacatcaggtgcttagtgctttgtagtgaaaatgaattgagttagtgccttctttttaaa

SEQ ID NO: 150680 - DNA, 101 bp, Zea Mays
aaaaaatcaaacatatttagcaaatgcattctcaaaataatcacctagatgacaattgcatgctttgtacatggctaaattggccactaactcctagctaa

SEQ ID NO: 150681 - DNA, 790 bp, Zea Mays
tccatggctgccaccgatggcaggggtgcgccgctgtccagctcccgcgtggcggtggcgaggggactcgtgcacgcggcgcaggtcgctgcaggcttggccgtgctcctctgcgccttcgccgacttgccctgggctgccgccgcggccgccgcctgcatcctccgcgtcgccgcctccttcctcgccccgccgcgcctctgcttcctcgccgcgcacgtcatcctgatcgccctcgccacgctcttccgccgcgacgcagcctcgtcctcgccgccgtccgcggaccctcccggctccagcggcgacgcccaggcccagcacccgttcctcgcgctcctgggcccgccgctgccgccggtcaccgaggcggcggagccctccggggaggaggaggcgccgccggatgaggcgctcgacggcaaggaggcggcgcaccacgcgaggacggtgtgcgcccagccgccgcggcgggccatgtcggagaagaccggcggcagcggcggcgcagcgggcggcacggcgagggcggcgtcggcggagctgcggcgtgccaagtcggagagcggcaggcgccggcaacgacgttcggcggcggcggcggcggcggcgccggtggagctggggatggacgacgcggaggcgttccggctggcggtggaggcgttcatcgcgaagcagcagacctggttccaccgcgaggagtcgctgatcgcccgtaccgccgacgacgccggcggggaagacggcacggcgatcgccggcgctgcggtggctgtgaagtgagcga

SEQ ID NO: 150682 - DNA, 2673 bp, Zea Mays
cccccaccaactcctctctccccgcaatcccagctgcgtccgctcagatcgctcctcgcaatccatcatcgtgaatcgcgtccgcttcctcccgctctctccatccgcgaatcgtgtccgtggagtcttcgcaatccatcaccgcgaatcgcgtccgcccgcttcctccatctctctctagccgtgagaaaccgcgtccgcttcctcctgctctctccatctgcgaatcgcgtcctgcaatcccagccgcgagaaactgtgtccgcttcctccgctcattccctgctctctccatccacgaatcgtgtccgcttcctcgaatcacgtatgcttccctactccccaaggttttcttcgccctccgtcgggatccacagattccccatccaccctccgctcggatcgacagacgcaatccctgctctctcctcgccctccgcccggatcaccaggtcatacttatggcgtcgccaccacaaccaaagcagctggtgctcgctatgtcatccacggattcggacctggctgccttggacctccacaccggcgtggaggactcatccatggatctaggcccagctgcctgggacctccgcacccggtgtggaggacatttgcctccgccccttcgcttcccaccctcggtcgctcgcctcagttgtcgaccgcttcctcgccttcgctcaggcttttcccgctggccacaactctaggaccatccacatctactactgggacaaggtaagcacggtctgcataaaaccccgaacgacgctcttgaactctgaaccatgaccccaagtcgtttcctgatttcaattccagccgcaagtggtcgtttagagcttgtgcattactgaaaggaaaaatccctataccaagccaatctacttggttctttagttcgattttattttattattggttattaatgtttcaattgctgaagttatactttgcatctggttactgcataacttactattatgtattgcactgattcttaattttcaagtttgctgacattggaacccagtaactatgcaatctgaagggtgagataaagaattatagctatttatctttatttttcttctcatatattcatgtgtgatacttagaccttctttgctttggttcagtggtataatctgcatcttagactgggcggatattattaacgctcacatagttcctggacctaggattgtagatggcttgaagttgaaggtactttatgacatatatgcgtaagccttttgcaattactgagttaaagagaatagtcaatgctacaactgctaatatctaatatattgcatttctcatagtaactattgtgttctggcattgaagggtttacctaaaggaaaggactacttttgcttgctgaaatgagctcagctggcaacctttcttagactacactgctgcggttgtaaagattatcgagcaacatcctgctttgtaataggatctatatcagtaaatcctgcatcttggtctctagcaccgtcgagccctgcattcatccatgccactcttggagtttagatggctgctggaggatatgcccttgggaaacaatataatactcccatttttgtgagtgtgtttttgccattcggttcttgttggatggctcacttgcttcttgttgactggggattaggtgtgttgggttgtggccactagccggcgtcagctaggaacaacaacctgtagtaggtgtcaattgaggcgacattgtgtcaggaagcagaagacatgcacgcaattggtgaatgacaactttgcatctgtgatttggcccaagaaaatttgttcttaacacttggtgggaataaaaagtaacagagagatagtgatggatgggcaggagaggcgagggtcgcctcaccgtagatggaacccacgaggcgcgcaaggagtggcgccggcgcgccttctctggctccttgctccgctccaatggcatcaatgtccatgtgccacatcatggagcggatgcagcacaattggctagtaccaagaagcagaagaagaaaacacctgggagcagtaatgccaaccatggtcatccaagacataagcgtcggcacgcagacaagtaaaacattgatcaaccatggtcattatttttttataactgatacaaccattattttccctatactatagatccatttcccctttaggtttgggaataatacaaaatattgttgtgtaagatagtgtttggctttccatggcattttgagttttcgacttgagtatttgattttgcatcgtgcagatcatggaagtttgaccatgttacctttcactgagtttgttgtctggtataggctccatcacctatcatcgccgaaccttattgtgtatctacagttctacacactagaatattgtgtttctgcccccaatttttttgattgatcttttagtgatatatatctctactactctatatgttcttagagtgggcgtccaccatctctcgtgaagcctgcccccgccggctctcctcgcgtccaaggaagattgatcttgtagattggctagatagagattttagatgatctgaatctaactgttttcactacattaagttctgaatctaaccgttttcactatattattgttgtttgccttcgcatttggtttcaaaaa

SEQ ID NO: 150683 - DNA, 1721 bp, Zea Mays
cccccaccaactcctctctccccgcaatcccagctgcgtccgctcagatcgctcctcgcaatccatcatcgtgaatcgcgtccgcttcctcccgctctctccatccgcgaatcgtgtccgtggagtcttcgcaatccatcaccgcgaatcgcgtccgcccgcttcctccatctctctctagccgtgagaaaccgcgtccgcttcctcctgctctctccatctgcgaatcgcgtcctgcaatcccagccgcgagaaactgtgtccgcttcctccgctcattccctgctctctccatccacgaatcgtgtccgcttcctcgaatcacgtatgcttccctactccccaaggttttcttcgccctccgtcgggatccacagattccccatccaccctccgctcggatcgacagacgcaatccctgctctctcctcgccctccgcccggatcaccaggtcatacttatggcgtcgccaccacaaccaaagcagctggtgctcgctatgtcatccacggattcggacctggctgccttggacctccacaccggcgtggaggactcatccatggatctaggcccagctgcctgggacctccgcacccggtgtggaggacatttgcctccgccccttcgcttcccaccctcggtcgctcgcctcagttgtcgaccgcttcctcgccttcgctcaggcttttcccgctggccacaactctaggaccatccacatctactactgggacaaggtgtgttgggttgtggccactagccggcgtcagctaggaacaacaacctgtagtaggtgtcaattgaggcgacattgtgtcaggaagcagaagacatgcacgcaattggtgaatgacaactttgcatctgtgatttggcccaagaaagtatgttctcctttgcgtccaaaatatatggatgggcaggagaggcgagggtcgcctcaccgtagatggaacccacgaggcgcgcaaggagtggcgccggcgcgccttctctggctccttgctccgctccaatggcatcaatgtccatgtgccacatcatggagcggatgcagcacaattggctagtaccaagaagcagaagaagaaaacacctgggagcagtaatgccaaccatggtcatccaagacataagcgtcggcacgcagacaagtaaaacattgatcaaccatggtcattatttttttataactgatacaaccattattttccctatactatagatccatttcccctttaggtttgggaataatacaaaatattgttgtgtaagatagtgtttggctttccatggcattttgagttttcgacttgagtatttgattttgcatcgtgcagatcatggaagtttgaccatgttacctttcactgagtttgttgtctggtataggctccatcacctatcatcgccgaaccttattgtgtatctacagttctacacactagaatattgtgtttctgcccccaatttttttgattgatcttttagtgatatatatctctactactctatatgttcttagagtgggcgtccaccatctctcgtgaagcctgcccccgccggctctcctcgcgtccaaggaagattgatcttgtagattggctagatagagattttagatgatctgaatctaactgttttcactacattaagttctgaatctaaccgttttcactatattattgttgtttgccttcgcatttggtttcaaaaa

SEQ ID NO: 150684 - DNA, 641 bp, Zea Mays
atgcagatttgttcttaacacttggtgggaataaaaagtaacagagagatagtgatggatgggcaggagaggcgagggtcgcctcaccgtagatggaacccacgaggcgcgcaaggagtggcgccggcgcgccttctctggctccttgctccgctccaatggcatcaatgtccatgtgccacatcatggagcggatgcagcacaattggctagtaccaagaagcagaagaagaaaacacctgggagcagtaatgccaaccatggtcatccaagacataagcgtcggcacgcagacaaatcatggaagtttgaccatgttacctttcactgagtttgttgtctggtataggctccatcacctatcatcgccgaaccttattgtgtatctacagttctacacactagaatattgtgtttctgcccccaatttttttgattgatcttttagtgatatatatctctactactctatatgttcttagagtgggcgtccaccatctctcgtgaagcctgcccccgccggctctcctcgcgtccaaggaagattgatcttgtagattggctagatagagattttagatgatctgaatctaactgttttcactacattaagttctgaatctaaccgttttcactatatt

SEQ ID NO: 150685 - DNA, 1409 bp, Zea Mays
cccccaccaactcctctctccccgcaatcccagctgcgtccgctcagatcgctcctcgcaatccatcatcgtgaatcgcgtccgcttcctcccgctctctccatccgcgaatcgtgtccgtggagtcttcgcaatccatcaccgcgaatcgcgtccgcccgcttcctccatctctctctagccgtgagaaaccgcgtccgcttcctcctgctctctccatctgcgaatcgcgtcctgcaatcccagccgcgagaaactgtgtccgcttcctccgctcattccctgctctctccatccacgaatcgtgtccgcttcctcgaatcacgtatgcttccctactccccaaggttttcttcgccctccgtcgggatccacagattccccatccaccctccgctcggatcgacagacgcaatccctgctctctcctcgccctccgcccggatcaccaggtcatacttatggcgtcgccaccacaaccaaagcagctggtgctcgctatgtcatccacggattcggacctggctgccttggacctccacaccggcgtggaggactcatccatggatctaggcccagctgcctgggacctccgcacccggtgtggaggacatttgcctccgccccttcgcttcccaccctcggtcgctcgcctcagttgtcgaccgcttcctcgccttcgctcaggcttttcccgctggccacaactctaggaccatccacatctactactgggacaaggtgtgttgggttgtggccactagccggcgtcagctaggaacaacaacctgtagtaggtgtcaattgaggcgacattgtgtcaggaagcagaagacatgcacgcaattggtgaatgacaactttgcatctgtgatttggcccaagaaagtatgttctcctttgcgtccaaaatatatggatgggcaggagaggcgagggtcgcctcaccgtagatggaacccacgaggcgcgcaaggagtggcgccggcgcgccttctctggctccttgctccgctccaatggcatcaatgtccatgtgccacatcatggagcggatgcagcacaattggctagtaccaagaagcagaagaagaaaacacctgggagcagtaatgccaaccatggtcatccaagacataagcgtcggcacgcagacaaatcatggaagtttgaccatgttacctttcactgagtttgttgtctggtataggctccatcacctatcatcgccgaaccttattgtgtatctacagttctacacactagaatattgtgtttctgcccccaatttttttgattgatcttttagtgatatatatctctactactctatatgttcttagagtgggcgtccaccatctctcgtgaagcctgcccccgccggctctcctcgcgtccaaggaagattg

SEQ ID NO: 150686 - DNA, 2123 bp, Zea Mays
cccccaccaactcctctctccccgcaatcccagctgcgtccgctcagatcgctcctcgcaatccatcatcgtgaatcgcgtccgcttcctcccgctctctccatccgcgaatcgtgtccgtggagtcttcgcaatccatcaccgcgaatcgcgtccgcccgcttcctccatctctctctagccgtgagaaaccgcgtccgcttcctcctgctctctccatctgcgaatcgcgtcctgcaatcccagccgcgagaaactgtgtccgcttcctccgctcattccctgctctctccatccacgaatcgtgtccgcttcctcgaatcacgtatgcttccctactccccaaggttttcttcgccctccgtcgggatccacagattccccatccaccctccgctcggatcgacagacgcaatccctgctctctcctcgccctccgcccggatcaccaggtcatacttatggcgtcgccaccacaaccaaagcagctggtgctcgctatgtcatccacggattcggacctggctgccttggacctccacaccggcgtggaggactcatccatggatctaggcccagctgcctgggacctccgcacccggtgtggaggacatttgcctccgccccttcgcttcccaccctcggtcgctcgcctcagttgtcgaccgcttcctcgccttcgctcaggcttttcccgctggccacaactctaggaccatccacatctactactgggacaaggtaagcacggtctgcataaaaccccgaacgacgctcttgaactctgaaccatgaccccaagtcgtttcctgatttcaattccagccgcaagtggtcgtttagagcttgtgcattactgaaaggaaaaatccctataccaagccaatctacttggttctttagttcgattttattttattattggttattaatgtttcaattgctgaagttatactttgcatctggttactgcataacttactattatgtattgcactgattcttaattttcaagtttgctgacattggaacccagtaactatgcaatctgaagggtgagataaagaattatagctatttatctttatttttcttctcatatattcatgtgtgatacttagaccttctttgctttggttcagtggtataatctgcatcttagactgggcggatattattaacgctcacatagttcctggacctaggattgtagatggcttgaagttgaaggtactttatgacatatatgcgtaagccttttgcaattactgagttaaagagaatagtcaatgctacaactgctaatatctaatatattgcatttctcatagtaactattgtgttctggcattgaagggtttacctaaaggaaaggactacttttgcttgctgaaatgagctcagctggcaacctttcttagactacactgctgcggttgtaaagattatcgagcaacatcctgctttgtaataggatctatatcagtaaatcctgcatcttggtctctagcaccgtcgagccctgcattcatccatgccactcttggagtttagatggctgctggaggatatgcccttgggaaacaatataatactcccatttttgtgagtgtgtttttgccattcggttcttgttggatggctcacttgcttcttgttgactggggattaggtgtgttgggttgtggccactagccggcgtcagctaggaacaacaacctgtagtaggtgtcaattgaggcgacattgtgtcaggaagcagaagacatgcacgcaattggtgaatgacaactttgcatctgtgatttggcccaagaaagtatgttctcctttgcgtccaaaatatatggatgggcaggagaggcgagggtcgcctcaccgtagatggaacccacgaggcgcgcaaggagtggcgccggcgcgccttctctggctccttgctccgctccaatggcatcaatgtccatgtgccacatcatggagcggatgcagcacaattggctagtaccaagaagcagaagaagaaaacacctgggagcagtaatgccaaccatggtcatccaagacataagcgtcggcacgcagacaaatcatggaagtttgaccatgttacctttcactga

SEQ ID NO: 150687 - DNA, 1261 bp, Zea Mays
gtatagccagcggttgacctggcttcttcacatacactattatacgtacattgatatatacgaaccgtcctggttcttgcaccaccgccgcaccgattcgcgcgaaagcgaactccgtgccttagggccgaatcatcaccgtcgtccgatcgatccgggaccgggactcgggaagcatgttgttaaatggcgacagcaggcgggccgcggcgacagcagcagcgctgctggctctcgccgcctgcttctgcgcagctactggagacggggatatggcgggcccgcggccgctcgtcctcgtggttgaccagtccggcaagggcgaccacaggaggattcaggacgccatcgatgcggcgccggcgagcaaccgctccgccggcggccgcggcagcgtcgtcatccggatcaagcccggagtgtacagagagaaagtggtggtggacaagccttgcataactctcgtcggcgcgaccgccgccagctcgaccgtcgtcatcacctggaacgagtcctgggtcgccgccgacagcccgacagtctccgtgctggcctccgacttcgtcgcgaagcgcatagcgttccagaacacgttcgggactagcgggccggcggtcgccgtgagggtggccggagacagggcggcgttctacgggtgcaggttcacgtcgttccaggacacgctcctggacgacacgggccgccactactaccgtggctgctacgtccagggaggcaccgacttcgtcttcggcaacggcaaggctctgttcgataagtgccacctccactccgtctcgccggccggcggcgcgttcacggcgcacagacggtcgtcggagtcggaggacactgggttcagcttcgtcgggtgcaagctgacggggctcggggccggcacgtccgtcctcgggagaccctggggtccctactcccgcgtcgtcttcgcgctcagctacatgtccggcacggtgaggccccagggctgggacgactggagcgactcctccagacagagcaggagcaggacagcgttctacgggcagtaccagtgctacggggaaggctccagaactgacgggagagttgcgtggtctcatgacctgtcgcaggctgaagctgcgccgttcatcaccaaagtttgggtcggtggacaagagtggcttcggtaggaaacactggctagctgtgctctgtttggttcgtcaacagtgacgctgggaataagctagagctgcagacgcgttatggccggttggtg

SEQ ID NO: 150688 - DNA, 1983 bp, Zea Mays
cgtgtcaaggccaccatgtccacggagaactacgacccctgctaccccgaccagccggtggtcgaccggtacctcccggtatgggccgagcagccggcgttcgcccgcaagcccgccttcgtctgggccgacgatgccggcggtggcgcgccgtcgtacaccgcgctgacatactccgagctcaacaccgccgcgcaacgcatggctctgggcctcctccagaccgtacgcaggggcgacaccgtcctcctgctcgggtcgccgggcctccgcctcgtcaagctcatcttcgcgtgccagcgcgcaggcctcgtcgccgtgcccatcataccgcccaccgacccgtccaagctcggcacgtccgcgcagggcgcggctcaccgccaccttctgcgcgccgtggcgcagacgaggccggccgcagccgtcgccgacgacgccgggtacatcgccacggtcctggagtctccggtcgccgcactgaagcggctgcggtggctgtcggtcgcgcacttggagagccgtggtccgcgtgacgtggccgccgatgaacggacacggacggcggcctattgcggctgcgcgccaggggagacgtacctgatccagtacacgtcgggcgcgaccggcgccccgaggcccgtcgtggtcaccgcgggcgccgcggcgcacaacgtgcgcgcggcccggaaggcctacgacctccacccggccggcgtcgtcgcgtcgtggctgccgcagtaccacgactgcggcctcatgttcctcctcctcaccgtcgtcgccggcgccacgtgcgtgctcgcctcccccgccgccttcgccaggcgcccgcgcctctggctcgagctcgtcaccgagttcaaggccacgtgcacgcctgtcccgtccttcgctctgccgctggtgctcaagcgcggccggcgctccgagcacggcacgcgcccactcgacctcgcgagcctacggaaccttatcctcgtaaacgagcccatctacaagtcgccggttgacgacttcgtggaagagttcggacgcgccggcctggacgcgtcgtccatctcgccgtcctacggactggccgagaactgcacattcgtgtccaccgcatggtgcggtgggcggccgagcctcccgtcgtacaagaaactgttgccgtccgccaggctaccgtcgctcgcgtcgtcttcaggcgaggagacggagatcgatatcgtcgtcgtcgatggacgcaccggagagcccgtggaggacggcgtggagggggagatatgggtttcctcgccgagcaacgcgtcgggctacctcgggcacccgtcggcgagccgcgaggtcttccgcgcaaggctgccagggacaggcggcacgagtttcgtgcgcacgggcgactgcggcgtcgtgcgcgggacggagcggtatctctacgtgctcggccggagcacggatgccattgcaatcgacggcgggcaggggcaacggcgcctgcacgcgcactacattgagacggcggcttttcgcagctcgccgggcgcactgcgaggtggctgcgtcgtcgcctttgctgcgccgtcgccttcgtctcccgtgacggtcgtcgtcgtggcagagctgcaaaaggggagagacaacgtgcatctttctagcatctgcgacggcataagacgagccgtgtggaaagaagaaggcgcaaaggtcgggtgcgtcgtgctggtcgatagtggtggcgtgcccaagactacgtcagggaagctgcgacgaggctacacgagggatatgctcgcaggcaaactgatccccaaggttttcgaggtgctctatgacgaatatgccaagggcggcgctacgcctgagaaggagacggaggtgtgtggaacgagtgctagttgggtagtgggagaggcagcaggggacaccgccgcaagcatggtcgtcatggccagcgggaatgctagtcaccgcatgcgtttgcggtcatctctctga

SEQ ID NO: 150689 - DNA, 1506 bp, Zea Mays
gtttggatgtctcaactaattttagccactaaatattagctctagtgcattcaaacacccccttagacatacagtaaggattaaggaattaccacaagccaggtttgtatgatgaatgctgacatctttggagttctgcaggtgtattccgtcagtgttgagactgttctcaggggaggatatagtcaagtcatggaccatcactccttgacagttgtcaaacttaagatgacactgtgagctgttgacaatagtgataccagccactacaacgttgaaactaccataaaacctcaatgcctgcatcaggtttaatctgtggcattctttcaaactccacatcgtactgcaggaaagcatccaaagtaagcacttaacatgactatcttttattttgagtacttaataaaaaattatacacttgctggccagctctcaccgtgtcatcatcatcctcgtcttctgtgtctgagtaggtccaccattgttgccctctgccatttataatgccgttcccttgaataaccattccatttagtttggtgaactcgagccactggagcaagcctgaaccccaggatttagcactggttggagctaggattgttccttccagctgcaaagtgagtacaacattaaacagcattactcaacgaacttattcttccattggtgtgcatctcaaattagataaaatacaatcccatcctgccttttgttgctcaattcaagctatgttgagaaaacccttttaagtatcttatcatttgggataaagaacatgcttacctgaaagacaatattcgatttgcagtaaggcccagagaacgagattggcccaactaggaactctagttctggtggtacgagaactgtacatgccccctttttgcaggcagcagcccacgctccttcaaaagcctgtatgcaaatgcacgtacaattattagctctagatttctgaaaagacaatccctggaatctagcatcacaaaaaataactgagagtccagacccctaagcagggtaatcagctgttgcactcttgtcttatatctttttggtcgctgtgccaaaacaagaatcagtttgtgaccccccaccccacccccaccacacacgaaggatttgaaaaaaacgaagttaatttacttgagatattaaaaaatctataggattgatagagctttcagataatgagacaacgcatactggaaaatatcgttaagtatggcttatttcttgttaacctggtacaaaacttccatgaactttctatttcgctttgctgtaagaacaaaaaaatatggtgttattggtgcatgcagtgtgctgttgcaaaagaaagaaagttgtgctctgttaatgtcatagagagggagttcgctattctcttatctgtaaagcctgagaatcacaatattacaattgggtttgtttgttttctctgtacacagaaacgtcttgtaagagctgtggaaagggttctgcattatgtgtattctg

SEQ ID NO: 150690 - DNA, 3010 bp, Zea Mays
acgctctaccgcatagtatctactctcgtgccttcatttcggtgcagcctacatgttcgggcggctcaaacttgcagccacgctacccgagcgcctcctgtcctgtcacgcggcgtcctcggctcgccgctcaccccaccctctcctccggtccggccacttctcaccgcctcttgccggacgcccaaaaaaatcgaagccgaaggagccgctcccatggccgctgccctctgcccgcgcctgcgcggcttcatggcctcctctcgcccgctcctggccttgcgccccgtagcgctgcgcctacccatgcgccgcgccgtcccggccatgcccctcgccgcccgcgcacgccgcggcttaggttcctccaccgccaacgcccagctcgacgaagacttcgccacggcttctgacctccggttcgaatcgccactcgaggtagtcaaataccccgatcccgtcctgcgcgcgcgcaacaaacgcatcaacacgttcgatgacaacctccgcgccctggccgatgagatgttcgacgttatgtacaagaccgatggcattggtctctcagcaccacaagttggagtcaatgtgcagcttatggtattcaatcctgctggggtgaagggggaaggagaggagattgttcttgtcaacccagtgatatacaagtccgccaaacgattgcttgtgtttgaagaagggtgcttatcgtttcctggaatatatggcaatgtggtgagaccagaaagtgtgaaaattgaagctcaagatgttacaggggcaaagatcaaagtaaaattatctggtatacatgcaagagttttccagcatgagtttgatcatttgctggggattcttttctttgatagaatgacaattgatgttcttgaaaccgtacgtgaggaactgaagaacctagagaagaaatatgaggaaataacaggactagctagtcctgaaactgttgagaactgcaagggtgcaaaagatgtatttagtcttccaagatgatggctgtgacagactcgggaaattttgcgaatactggaacacattgtccagctgagcattacactgaagagtttctgggacagctgattataccagtaccacacacaatacttgtggtgttggcagtcttactatgtctaatttcttgcaatttaatggaactagagataacaaatttattagttacaactgaggttttatgtttgatgtgtacatctataatattttatcctcatattcgtgactcttaggataaggagatattgtactgcctgttttctccttttcaaaaaattttgtgtgttctttgtctcagtcttaataaacgtaccactgagacacaaaatttctaacaaagtaacaatgagataaatctgtagctggcccttacaacatgcaaatgcatcatgtttcagtgacaggattagttaggctgcatcttttattgggtaaatcaccccctccctgggatcaaaatataaagatttatcacctgtttgatttatgggacgcaaacagtgggtgatgttctttgtcaaattggcattgctagtatccccaaatcagagttaatggatgtggtttattttcatgttccaattcatggtgagagcttgcatttttgtacttgatcagttttttgtttgtatgatataaccttcatatgccacatcgattttgttggctggtcgactgttggacaagcgtgcaatggcagtatggactgcagatgacgtagtccactaacaattggacatcaccatcttcccaaaactttcgaattatggccatcagtgtttaagttatattgaacttccgtgtaagtatgtaacatatgtgaccttagattaatcaataggaagttaggaagacttccagttccatggcactagacctacgattatctaagggcatggcagaccgagtgccaaaggccccccacataagtcggatctggggaagggataaaccgaggcaagctttcccttcgctaatgcagagaggctgctttgaaaccgcaaactgctgacttagtgagatatctctcaccactgtaccagcctaccaggtctacccttctacctacgattatgtaagttttaaatattgattgatggattagagcttcaagaattttggcaaccagtgtgagtggagacaataagatgaatggtagagggaaaattcttgaccaattcatactttttcttgataatagacagctggcgacacataggtatactatgtttagttgaaaaaattaagaaaggcacagaaaaaaagatatgctatgttttatctttttctaactggtacaatatctttcacaattctaaatcttgctttcagtttccttcttcctcataatgtgttaacgaatatgaagttagtaaccgattgcaggaccttacatatttactatttttatgctgctttgttttattatttagctgaggttctagaaaacaaagcaaaaaaaaaatatgcatatggatgttgtttacattggaattgatttctaaatatcatgttcttttgattagttatttcctctttctgcatatttacagaacatttttattgccatttttcataattatttcagctaaacacatcaatagcccctttcctaagtgttatctctatggtaatcatattcgtgcagtgcaatatgtcatatttgttaactagaaactgactattatgcttactcatttttctaaacattgtctagtttttccgagcaatcattttctttccgtatttgatccaagagatcttacccttagacattgacttctaattattaatctcattcttcaggattagctatcattatagttgtaaatgtacgcccatgttgtttatcaatttatagttggaccctttgccatagccctgtttacacttatttaaataaacaattgtcattatgtttactcatttttggagaactcaagtacatactgttgctgtatgaccatttcaaatgaatata

SEQ ID NO: 150691 - DNA, 1373 bp, Zea Mays
acgctctaccgcatagtatctactctcgtgccttcatttcggtgcagcctacatgttcgggcggctcaaacttgcagccacgctacccgagcgcctcctgtcctgtcacgcggcgtcctcggctcgccgctcaccccaccctctcctccggtccggccacttctcaccgcctcttgccggacgcccaaaaaaatcgaagccgaaggagccgctcccatggccgctgccctctgcccgcgcctgcgcggcttcatggcctcctctcgcccgctcctggccttgcgccccgtagcgctgcgcctacccatgcgccgcgccgtcccggccatgcccctcgccgcccgcgcacgccgcggcttaggttcctccaccgccaacgcccagctcgacgaagacttcgccacggcttctgacctccggttcgaatcgccactcgaggtagtcaaataccccgatcccgtcctgcgcgcgcgcaacaaacgcatcaacacgttcgatgacaacctccgcgccctggccgatgagatgttcgacgttatgtacaagaccgatggcattggtctctcagcaccacaagttggagtcaatgtgcagcttatggtattcaatcctgctggggtgaagggggaaggagaggagattgttcttgtcaacccagtgatatacaagtccgccaaacgattgcttgtgtttgaagaagggtgcttatcgtttcctggaatatatggcaatgtggtgagaccagaaagtgtgaaaattgaagctcaagatgttacaggggcaaagatcaaagtaaaattatctggtatacatgcaagagttttccagcatgagtttgatcatttgctggggattcttttctttgatagaatgacaattgatgttcttgaaaccgtacgtgaggaactgaagaacctagagaagaaatatgaggaaataacaggactagctagtcctgaaactgttgagaactgcaagggtgcaaaagatgtatttagtcttccaagatgatggctgtgacagactcgggaaattttgcgaatactggaacacattgtccagctgagcattacactgaagagtttctgggacagctgattataccagtaccacacacaatacttgtggtgttggcagtcttactatgtctaatttcttgcaatttaatggaactagagataacaaatttattagttacaactgaggttttatgtttgatgtgtacatctataatattttatcctcatattcgtgactcttaggataaggagatattgtactgcctgttttctccttttcaaaaaattttgtgtgttctttgtctcagtcttaataaacgtaccactgagacacaaaatttctaacaaagtaac

SEQ ID NO: 150692 - DNA, 1637 bp, Zea Mays
cgccctagtagtgtagtacgtggctattttacccaccccactcgccgtgaataccctctccaccaacaccgagaggcactaccgcagcagcgcgggagcaggcccggcaggcatgggcgtgcttcggagcacgcagagccttgaggcggaggtggacgagctgcgcgccgcgctcctggcgggcgggtggcgccgctcggcgggccacgcggacgctaagcgcgctccccggggtgacgccggaggggccgcggcgcgcgccgtgtgcgtaactggcggcatctccttcgtcgggttcgccgtcgtcgaccgcctcctccggcacgggtacaccgtccgcctcgcgctggagacgcaagaggacatggacaagctgcgggagatggagatgttcggcgaggacggccgggatgggggggtgtcgacggtgatggcgaacgtgatggacccggacggcctgcgccgcgccttcgacgggtgcgccggcgtgttccacacctccgccttcgtcgaccccgggggcatgtccggctacacgaagcacatggcagcgttagaagcccaagcagcggagcgggtgattgaggcctgcgtcaggacagagtccgtcaggaaatgcgtcttcacctcttccttgctggcgtgcgtgtggaggcaggactaccctcatgaccggcggtgccctaccaccatcgacgagagctgctggagcgacgagagcttctgccgcgacaacaagctgtggttcgcacttggcaaaacggcggcagagaaggctgcgtggagggcggcgcggggacgagacctgaagctggtcaccatctgccccgcgcttgtcactggtccggggttccgccgccgcaactccaccgcgtccatcgcgtatctcaaagcaggggctcgagccatgctcgccgacggcctgctcgccacggcaaacgtggagacggtggccgaggcgcacgtccacgcgtacgaggcgatgggcgacaacaccgccggcggcaggtacatctgctacgaccacgtggtcaagcggcccgaggagttcgccgagctggagcggcagctggggctgccgggaggggccgcgcccgcgcccgcgcacggctctgacgaccggccggccaggttcgagctttgcaagcggaagctgtccaggctcatgtcctccaggaggaggtgcgcgtacgacacctactactccgtcgcgtttgaggtttgactagctactagctagctcaggcggcgaaggtgcatttgccatgaaggggggaaccgctggcactgacgacgagaaatcggcgcagcaagggttgatcaccagtatgcaatctgtggtccattgacaagagtggacagtggacaccggaagcgaagcggagcaatagcaaagctctgcttgatgtccttgtggacggggaaggagcagggagagggagagccaagtgtttgtgcaattttgtacagaatattcatgcaacaataaaggcgagtcatccataggcagcgcgcatcacaacatcgtgtccacctccaccatcgatccacgccaccacaaaatccgcacaccgcttgacgtccaacgaagtttgtacacaggctgatgaccttcgataaagaagtatgcttctgct

SEQ ID NO: 150693 - DNA, 796 bp, Zea Mays
cgccctagtagtgtagtacgtggctattttacccaccccactcgccgtgaataccctctccaccaacaccgagaggcactaccgcagcagcgcgggagcaggcccggcaggcatgggcgtgcttcggagcacgcagagccttgaggcggaggtggacgagctgcgcgccgcgctcctggcgggcgggtggcgccgctcggcgggccacgcggacgctaagcgcgctccccggggtgacgccggaggggccgcggcgcgcgccgtgtgcgtaactggcggcatctccttcgtcgggttcgccgtcgtcgaccgcctcctccggcacgggtacaccgtccgcctcgcgctggagacgcaagaggacatggacaagctgcgggagatggagatgttcggcgaggacggccgggatgggggggtgtcgacggtgatggcgaacgtgatggacccggacggcctgcgccgcgccttcgacgggtgcgccggcgtgttccacacctccgccttcgtcgaccccgggggcatgtccggctacacggtgaggacgacaacaaactttcgttcttactgggagcgtttcctttttcctatgaattctagcctcatacctctcacgtcgacactaggactagacatgtcacgtggcgtcaataggttcgggctgtgttggggacatgcatggtagcatgtgtaatagaacctggattgcaggatagtctgataaggagacatgatccatgaaatctgctgctcaaccgttggcttgtcaggctgttgttgttgatgttcagtcgtt

SEQ ID NO: 150694 - DNA, 321 bp, Zea Mays
ggttctttgcgccgagttttggcgtagcagctatatttcggttcatccttttcttccaaggatttcataattggacgttgaacccatttcatatgatgggagttgccggagtattaggcgcagctctgctatgcgctatccacggggctaccgtagaaaacactctattcgaagatggcgatggtgcaaataccttccgtgcttttaacccaactcaagctgaagaaacttattcaatggtcactgctaaccgcttttggtcccaaatctttggtgttgctttttccaataaacgttggttacatttctttatgctatttg

SEQ ID NO: 150695 - DNA, 2791 bp, Zea Mays
gccaaggcgaggcgcattccgtgtctccacgctgcctagctcgatcggacctgccggcggacggacggacggacgtttacccatgcccatgtctatgtgagaggcccggccgccgctgcccccgtctcccctgccgatgcgcgtttgagatgccattattccggctcggctcctaaccactctccccggaacgacgacgataccgccgaccgcgcggcggccctgtgacgccgcgcgccctcatggcgtcaaccgagcaactggcgtcgtcccccgcgggagggccgccagggccgaaggcacgggcagcaccgcctccggaatcatcgtcgtcgccgccacccccgccgaaggcttcctcgtcgtctcctccgccgccgacaccgccgccgccaccgtcgaagcagtcgtccccgcctcccccggcccacaacagcacgacgtcgccgaacacaccagcgaccccgccagagaagtctccggcggcttcccctcctcctccggcctcgccgccgccaccaagccggtcctctcctcctccttcgccgtcttcgccgcccccgtcgccacctccgcagtcttcgccgccgccgcccgcggcgtcgacgtcgcagcagtcgcctccggcaccggaaccgaccaagccaccgacacccccgtcgtcggagaagcccggagcagccgccgggacgacggcctcgtcacctcccccaaatgcgggacaaccgccaccgcgcgagacaccgtcgacgccaccggacaccgccggtcaccagccacctccgccggcgcccacgcaaatgctgcctcctccgatggcgctgacggtgatcatgccgggcggcgtctctggcggcccacctgcaggcggcatgtggaggtccccgcctgggccccccgcgggtgggggtgggtcgggcagcaacagcaacatgaagaacgaggcggtggtcatcgggatctccgttgccgggctggtcctggcactggcgtcgctgctgataatcgcgtgcgcaaccggcaagcagggcaaccgggggaggaagcgggagcggcacgcgtcgcgcaggcacagcatcgtggtgccggaacgtcagtgtggcgcagccgcgggcgtggtgtcggcggacgtgtaccagccgtcgaacgggccggcgccgtcgccgtcgccgagcgggacgtcgagctcgtacgacctgtcgggggccaacaagtcgtggttcacgtacgacgagctggcgggcatcacgggcgggttctcggcggcgaacgtgatcggcgagggcgggttcgggaaggtgtacatgggcgcgctgggcgacgggcggcgcgtggcggtgaagcagctcaagctgggcagcgggcagggggagaaggagttccgcgccgaggtggacatcatcagccgcatccaccaccgccacctcgtcacgctcgtcggctactgcgtcaccgagaaccaccgactcctcgtctacgagttcgtggccaacaagacgctggagcatcacctgcacggaaaagggctgcccgtgatggattggccgaagcggatgaggattgcgatcggagcggcgcgtgggctgacgtacctccacgaagactgccatcctaggatcatacacagggacatcaagtcggccaacatactcctggacgacgccttcgaggccaaggttgcagatttcggcctcgctaaactgacaaacgactcgctgactcatatctccacgcgcgtaatgggcacgttcgggtacatggcacccgagtacgcacagagcgggaagctgacggacaggtccgacgtgttctcgttcggggtggtgctcctggagctcatcaccgggcggaagcccgtagacgcatctcagccactgggagaagagagcctggttgaatgggctcggcttctcctcgtggacgccttggagacggacgacttccgagaggtcgccgaccccgcgctggagtgcaggttctccaagaccgagatgcggaggatggtggaggcggccgccgcgtgcgtgcgccactccgccgccaagagaccgaggatggtgcaggtgtggcggtcgctggacgtggacgagtgctcgtcggacctgaccaacggcgtcaagctggggcagagcatggcgtacgactcgacccgctactcggcggacatcgagctgttccggcgaatggcgttcgccaacgacctctccaccgccgagctgggcgtcgtggacgaggacgaccaccggtaccacaacagcagcaaagccagctccagctccaggcggtacaagtaatcgaaacgacacgcgtgcgtgcgtgaaccacaaacacgtgatccagtccaggcggcaggtcgatcgaatcgcgcaaaggaccgcacgccagccgccactacatacgcggcgcgcggctgcacgggggacggtatacgtagtagcggagaatcgcagaggagaagctagctgacgacgtgaggcacagcacagcagcaggcggcaataatcttcgtttgagctagctagcacggtatctgtacgtacgctgctattcactgcgtgctgtttgcttttgtgtgtacagccgtgcaattcttgtcgcctataacaaaagaaaaccgcttggcatacggtacaaccacgtccatctggttattagacgctctccaacggtccactcaagcctccccctcccctcgcgagagtgcatcatctccgaaacgcctaccattatatatatgtgttactgaactgtatatggtattacataccattttttatgtcttagaataccc

SEQ ID NO: 150696 - DNA, 428 bp, Zea Mays
gttttatttttattttttatgtttccatgtttttttgtttttctttatttttcttttttttttgtttctatgacccttagttaagttgtttatttttgtatatatttggtttttcttattcatgtttttagttgtattttcatgttttgttgttttaatcaaattaattagcatgctagttgttatttttttatttactatattttttgagatacatataaatattcatataatatacatatgtgttttatgtagtatacatgtgactttctacgatgcatatatgagcactcttgtcgaacgtcacagtttgttaaaagcaaggctaaagatttatccggctctaaaccattcgtatgttcttcccagctaactatatatatatatatatatatatatatatatatatatatatatatatatatata

SEQ ID NO: 150697 - DNA, 76 bp, Zea Mays
tcctcacatggggagacatcatatattgacaagcataagaaagataattgttttagtggtcactttatataggtcc

SEQ ID NO: 150698 - DNA, 311 bp, Zea Mays
cttgtattgtctctgccactcgtgactgggaagttagcgccccccttaactcatttctggatccgccactgggggcttgtggcgaagagggcagcggcgttcttgatgagcctggggcggtgggttttggcgaggttgccgacgacgctagacgacgcggaggtgcggatggggaaggcaggcattctacgagcgcgccgcttgtgctctgtgctgccgacttatacacacgaacgcacgcatgctgacaagcaagaccattacagccccgtctacgagagcggcggcgacggcgtgcggctcggctggac

SEQ ID NO: 150699 - DNA, 1301 bp, Zea Mays
aaaactgggaaagccacacgtaacctctccccgccgatcccttccttccatccttccgccacgcgcggcagcggttcgtcacactcacacgcacacaccatggcgtccacgccacggacgccggcgccggagcggtctccgccgcccgtgcccactcctcctccgcctctggaggacgagccgccgccgtatctggccgacgggtcgccgcgggaggaggccagcttctccagcgacgggagggaaggagcgccccccaagaacccgcagctctcgcccacgcaccacgctgcgccacgcctcgtgccgccgcccagcagcccagccaggcaagacgggcaagaacaagaagggagcgctaataaggccgccgcggccacggcggagccggcccgcgagccgctccgccagatggcgacgggcctcgcccggccactgtcgtcgcagacgtcgcccgccaccaccaactctcctactccgtcggcgtctccgacgccgtcgagtcccgcgcccgtggccaacaacagcaagaggagcggccagagcacgcccaagcgcgcggagacgaagctgccgctgtcgtcgccggccgtcgcggtgcacttcgacccagtcgaggaggccgtcacgtcgccgctgcgcctcggcaaggcgcgcctcgaccagcagcagcagcagcagcacgcggcgggggcggcggagagcggggcatccgtggtccccggtgtggcggcggccgtggccgcggtcgccgagcggagggagctgttgctggcgctgcgcctggccacggcggtgctcagcctcgcggccttctcggtgatcgccagtgcccggacgtccggatgggccggcgactactacgcccgccacctgcagtacaggtacgccgtcgcagtgaacgtgatcgtgttcgcctactcggtcgcgcagtcattgggcaaaatccgccacctggtctcacccaggtttacgttccggaccatgtcgagctactactgcagcctgttcctggaccaggttctggcgtacctcctcatgtcggcgtcgtcggcggccgcgtcgcgcaacgacctgtgggtgtccaggttcggcacggacgccttcgtcaggaagatcaccggcgccctgtggctgtccttcgtcgcgttcctggtgctcgctctgaacgcggtcatctccacggctaatctcttcagcatggtctgacacgactcgtcctgctctggcgttgttggaatcaagtactaattgtagattctggaaataaatgtaaccgcgcgttaattagctgttgcaca

SEQ ID NO: 150700 - DNA, 1276 bp, Zea Mays
aaaactgggaaagccacacgtaacctctccccgccgatcccttccttccatccttccgccacgcgcggcagcggttcgtcacactcacacgcacacaccatggcgtccacgccacggacgccggcgccggagcggtctccgccgcccgtgcccactcctcctccgcctctggaggacgagccgccgccgtatctggccgacgggtcgccgcgggaggaggccagcttctccagcgacgggagggaaggagcgccccccaagaacccgcagctctcgcccacgcaccacgctgcgccacgcctcgtgccgccgcccagcagcccagccaggcaagacgggcaagaacaagaagggagcgctaataaggccgccgcggccacggcggagccggcccgcgagccgctccgccagatggcgacgggcctcgcccggccactgtcgtcgcagacgtcgcccgccaccaccaactctcctactccgtcggcgtctccgacgccgtcgagtcccgcgcccgtggccaacaacagcaagaggagcggccagagcacgcccaagcgcgcggagacgaagctgccgctgtcgtcgccggccgtcgcggtgcacttcgacccagtcgaggaggccgtcacgtcgccgctgcgcctcggcaaggcgcgcctcgaccagcagcagcagcagcagcacgcggcgggggcggcggagagcggggcatccgtggtccccggtgtggcggcggccgtggccgcggtcgccgagcggagggagctgttgctggcgctgcgcctggccacggcggtgctcagcctcgcggccttctcggtgatcgccagtgcccggacgtccggatgggccggcgactactacgcccgccacctgcagtacaggtacgccgtcgcagtgaacgtgatcgtgttcgcctactcggtcgcgcagtcattgggcaaaatccgccacctggtctcacccaggtttacgttccggaccatgtcgagctactactgcagcctgttcctggaccaggcaagttctggcgtacctcctcatgtcggcgtcgtcggcggccgcgtcgcgcaacgacctgtgggtgtccaggttcggcacggacgccttcgtcaggaagatcaccggcgccctgtggctgtccttcgtcgcgttcctggtgctcgctctgaacgcggtcatctccacggctaatctcttcagcatggtctgacacgactcgtcctgctctggcgttgttggaatcaagtactaattgtagattctggaaataaat

SEQ ID NO: 150701 - DNA, 812 bp, Zea Mays
taactagtacctgcttccaccctgaaccgtatatttttgtttgatttactgtgcttgcagtatggatgatgccaagaggcttatagagctagtccaagggatcccatgcaagataaacctcatctctttcaatccccacggcggttcccaattcaagcccacaccagacgataagataattgagttccgcaacgttttaattcaaggtggcctcactgtttttgttcggctcagcagaggggatgatcagatggctgcctgcgggcagctaggagagcctggaggctatcagctacctctgctccgtgtgcccgagaaatttcaggtcgccttgtgatgctaaacagtgcatacagtaaaaatggtcctgagcagcttgacgaacacacggagtaattggcttggaacgacgattcgatcgtgcaaatcttgcaagttctaccgccttcggaagcttgtgtggacttctgcaataacgtgcaaatctgaacctgggtacttgtgcgacaacacatttagacatggtgttgcttctgctagtacgtggtgtacccaaaccaaattcgataagattattattattataaattggtattttctggcaaatcgttgctgtataagacattaacagtgtaacatgctttcacttggtacttcgaaaaatatggaatgaacttatacggtaatcagcaatgagagaagaatctggaggacaaggttgcttgcctgaatgagataccttaaccactaaggtgtgcatggtactagccacctacacacctgatcaccccaaatgaaagaaagaaaaaaaa

SEQ ID NO: 150702 - DNA, 1929 bp, Zea Mays
actagcccagcccatgtatatccaccggcactcggcacgaagtccatagccagcgaaactcccgaaaccgtaccaaccagacaattcaccatggcggcgccggcgcaggcgcaggcgcaggtcctgcctctcctccggtggagccggagcgcctccttcctctgcgcctcgtcgcgccgcctcttctccgccctccaacgcccctctgccgctgctcgctgcgaggccggctccaaggccatgctcaaggggatggactactcggaactcgagaattgggtgcaggcgcaggggtttcggccaggccaggccatgatgctgtggaaatgcctgtacgggaacaacgtttgggctcattgctacgacgagttggctggtttaaataaggatttcaggaagatgataaccgagcatgctgatctcaaggcattaactatgaaggacatccatattgcatcagatggaacccgtaaggatgttacagatattgttctctcttgaagatggttcagtgattgaaacagttatcattccttgcgctaggggcaggacaactatctgtgtttcaagccaagttggttgtgccatgaactgccagttttgtttcactggaaggatgggtttgagaaaacatctctcgacagctgaaattgtcgagcaggctgtgtttgctcgtaggttattctcagatgaattgggatcaattaacaatgttgtatttatgggcatgggtgaaccatttcacaatattgacaatgtaataaaagcctcagcaataatggttgatgagcaaggtcttcattttagccctcgcaaggttactgtctccacaagtggtcttgtccctcagttaaaacgcttcctccaggaatccaattgctccctggctgtcagtcttaatgcgacaacagatgaggtagtgattattctattctttttttttttttttgcattgggcagacccagcgctggaggcacccacatgagtcaggtctgggaaaggattgtttcactgttttgtaaactaacttgttttgcaggttaggaactggataatgcccataaacagaaagtacaatcttaacttgcttcttggcactttaagggaggaacttaacctcagacaaaaacaaatagtgctatttgaatatgtcatgctttctggagtgaacgacagtatggatgatgccaagaggcttatagagctagtccaagggatcccatgcaagataaacctcatctctttcaatccccacggcggttcccaattcaagcccacaccagacgataagataattgagttccgcaacgttttaattcaaggtggcctcactgtttttgttcggctcagcagaggggatgatcagatggctgcctgcgggcagctaggagagcctggaggctatcagctacctctgctccgtgtgcccgagaaatttcaggtcgccttgtgatgctaaacagtgcatacagtaaaaatggtcctgagcagcttgacgaacacacggagtaattggcttggaacgacgattcgatcgtgcaaatcttgcaagttctaccgccttcggaagcttgtgtggacttctgcaataacgtgcaaatctgaacctgggtacttgtgcgacaacacatttagacatggtgttgcttctgctagtacgtggtgtacccaaaccaaattcgataagattattattattataaattggtattttctggcaaatcgttgctgtataagacattaacagtgtaacatgctttcacttggtacttcgaaaaatatggaatgaacttatacggtaatcagcaatgagagaagaatctggaggacaaggttgcttgcctgaatgagataccttaaccactaaggtgtgcatggtactagccacctacacacctgatcaccccaaatgaaagaaagaaaaaaaa

SEQ ID NO: 150703 - DNA, 1736 bp, Zea Mays
actagcccagcccatgtatatccaccggcactcggcacgaagtccatagccagcgaaactcccgaaaccgtaccaaccagacaattcaccatggcggcgccggcgcaggcgcaggcgcaggtcctgcctctcctccggtggagccggagcgcctccttcctctgcgcctcgtcgcgccgcctcttctccgccctccaacgcccctctgccgctgctcgctgcgaggccggctccaaggccatgctcaaggggatggactactcggaactcgagaattgggtgcaggcgcaggggtttcggccaggccaggccatgatgctgtggaaatgcctgtacgggaacaacgtttgggctcattgctacgacgagttggctggtttaaataaggatttcaggaagatgataaccgagcatgctgatctcaaggcattaactatgaaggacatccatattgcatcagatggaacccgtaaggggcaggacaactatctgtgtttcaagccaagttggttgtgccatgaactgccagttttgtttcactggaaggatgggtttgagaaaacatctctcgacagctgaaattgtcgagcaggctgtgtttgctcgtaggttattctcagatgaattgggatcaattaacaatgttgtatttatgggcatgggtgaaccatttcacaatattgacaatgtaataaaagcctcagcaataatggttgatgagcaaggtcttcattttagccctcgcaaggttactgtctccacaagtggtcttgtccctcagttaaaacgcttcctccaggaatccaattgctccctggctgtcagtcttaatgcgacaacagatgaggttaggaactggataatgcccataaacagaaagtacaatcttaacttgcttcttggcactttaagggaggaacttaacctcagacaaaaacaaatagtgctatttgaatatgtcatgctttctggagtgaacgacagtatggatgatgccaagaggcttatagagctagtccaagggatcccatgcaagataaacctcatctctttcaatccccacggcggttcccaattcaagcccacaccagacgataagataattgagttccgcaacgttttaattcaaggtggcctcactgtttttgttcggctcagcagaggggatgatcagatggctgcctgcgggcagctaggagagcctggaggctatcagctacctctgctccgtgtgcccgagaaatttcaggtcgccttgtgatgctaaacagtgcatacagtaaaaatggtcctgagcagcttgacgaacacacggagtaattggcttggaacgacgattcgatcgtgcaaatcttgcaagttctaccgccttcggaagcttgtgtggacttctgcaataacgtgcaaatctgaacctgggtacttgtgcgacaacacatttagacatggtgttgcttctgctagtacgtggtgtacccaaaccaaattcgataagattattattattataaattggtattttctggcaaatcgttgctgtataagacattaacagtgtaacatgctttcacttggtacttcgaaaaatatggaatgaacttatacggtaatcagcaatgagagaagaatctggaggacaaggttgcttgcctgaatgagataccttaaccactaaggtgtgcatggtactagccacctacacacctgatcaccccaaatgaaagaaagaaaaaaaa

SEQ ID NO: 150704 - DNA, 1799 bp, Zea Mays
gaaaactagcccagcccatgtatatccaccggcactcggcacgaagtccatagccagcgaaactcccgaaaccgtaccaaccagacaattcaccatggcggcgccggcgcaggcgcaggcgcaggtcctgcctctcctccggtggagccggagcgcctccttcctctgcgcctcgtcgcgccgcctcttctccgccctccaacgcccctctgccgctgctcgctgcgaggccggctccaaggccatgctcaaggggatggactactcggaactcgagaattgggtgcaggcgcaggggtttcggccaggccaggccatgatgctgtggaaatgcctgtacgggaacaacgtttgggctcattgctacgacgagttggctggtttaaataaggatttcaggaagatgataaccgagcatgctgatctcaaggcattaactatgaaggacatccatattgcatcagatggaacccgtaagatattgttctctcttgaagatggttcagtgattgaaacagttatcattccttgcgctaggggcaggacaactatctgtgtttcaagccaagttggttgtgccatgaactgccagttttgtttcactggaaggatgggtttgagaaaacatctctcgacagctgaaattgtcgagcaggctgtgtttgctcgtaggttattctcagatgaattgggatcaattaacaatgttgtatttatgggcatgggtgaaccatttcacaatattgacaatgtaataaaagcctcagcaataatggttgatgagcaaggtcttcattttagccctcgcaaggttactgtctccacaagtggtcttgtccctcagttaaaacgcttcctccaggaatccaattgctccctggctgtcagtcttaatgcgacaacagatgaggttaggaactggataatgcccataaacagaaagtacaatcttaacttgcttcttggcactttaagggaggaacttaacctcagacaaaaacaaatagtgctatttgaatatgtcatgctttctggagtgaacgacagtatggatgatgccaagaggcttatagagctagtccaagggatcccatgcaagataaacctcatctctttcaatccccacggcggttcccaattcaagcccacaccagacgataagataattgagttccgcaacgttttaattcaaggtggcctcactgtttttgttcggctcagcagaggggatgatcagatggctgcctgcgggcagctaggagagcctggaggctatcagctacctctgctccgtgtgcccgagaaatttcaggtcgccttgtgatgctaaacagtgcatacagtaaaaatggtcctgagcagcttgacgaacacacggagtaattggcttggaacgacgattcgatcgtgcaaatcttgcaagttctaccgccttcggaagcttgtgtggacttctgcaataacgtgcaaatctgaacctgggtacttgtgcgacaacacatttagacatggtgttgcttctgctagtacgtggtgtacccaaaccaaattcgataagattattattattataaattggtattttctggcaaatcgttgctgtataagacattaacagtgtaacatgctttcacttggtacttcgaaaaatatggaatgaacttatacggtaatcagcaatgagagaagaatctggaggacaaggttgcttgcctgaatgagataccttaaccactaaggtgtgcatggtactagccacctacacacctgatcaccccaaatgaaagaaagaaaaaaaa

SEQ ID NO: 150705 - DNA, 663 bp, Zea Mays
gcctataaaacacctcgtcccgtgcctccatcaggcatccaagctcaaagcaagcagatctaagctccaggcagcgtcgcgacagagtgagctagtgagtagcacgacaacaacaatggcttccctgaaggccgcgaagcccagcggagttgcggcgcagggcaaggagccggcgcccaagctcagcgagacggcgacgaagccgtcagccgcgaagagcggcggcgttaagaaggctgagcagaagccccgggaaaccaaaaggaaggtgaagagcagcaaacaggcggcggcggccaaaaagtgacgtacagtacgtgtggagtgtaatggagcttccatgcatgagtgaatccatgccatgttatgaatctagtccttcctttcttgtatcttccatgtgacgcggcgtgtgcgtcccctcatgtgtgatgatgccagatgaatactacaaataagacgttgttgtgactgtgtgccatcgtcgcctccttcatgcgtccctttgccgcttcatgctcaagcattaataatgaactaatggtagtcattcttccagcataactacgtgttctacgcgttgttcagttgcatatgtaaacaaaatcttagacatgaacggaaaacaaacaaaaaaataaacctggatctcgtcccataggg

SEQ ID NO: 150706 - DNA, 608 bp, Zea Mays
gcctataaaacacctcgtcccgtgcctccatcaggcatccaagctcaaagcaagcagatctaagctccaggcagcgtcgcgacagagtgagctagtgagtagcacgacaacaacaatggcttccctgaaggccgcgaagcccagcggagttgcggcgcagggcaaggagccggcgcccaagctcagcgagacggcgacgaagccgtcagccgcgaagagcggcggcgttaagaaggctgagcagaagccccgggaaaccaaaaggaaggtacgtgctgtagtatatcactgcacaggcacagctgcgtcatatgtctatgctatccttgtgattaccttgtgacctgttcgtgtcgtgatggcctaaaagtacgtgcttcccatgatgaaaccaggtgaagagcagcaaacaggcggcggcggccaaaaagtgacgtacagtacgtgtggagtgtaatggagcttccatgcatgagtgaatccatgccatgttatgaatctagtccttcctttcttgtatcttccatgtgacgcggcgtgtgcgtcccctcatgtgtgatgatgccagatgaatactacaaataagacgttgttgtgactgtgtgcca

SEQ ID NO: 150707 - DNA, 374 bp, Zea Mays
ataggaacaattagttgaacaaccaaccggacaccggaattcatggccatggtcttcgctagtaggaaatcttcagtggagctctctgcatcttgttgatgtttagccatcatgcggaggctgtggagcgtcgcaatcgtcgtattcaccccacccgcacttgggtcgggaggccattaaggaatctgggtgcggcaagaccttctggagcagcgacgggagcaccttggggtctcggcgtcgaaccttctcagagatccatcgcatggcgaaccttcaggccgtgcgcgcaggcctcgtcctcgtctccgcagtgtgaggttacgaggatctgaagttcatcctgtcacctggaatctcaagtcccaggcaag

SEQ ID NO: 150708 - DNA, 1747 bp, Zea Mays
cgctcccgcgctgcccgcgcaccgcgcgcccgctttggtcgggcgtccgctgcccactttgcgcgcttccccgctgctcccccgccgtacgtaaaatggacctatccacaattccacatcacccggcgcctctccgtcttcctcctccctcgccgtcgccgcgcccccaaccgtcactaccgacagcagcacggttcaccccgggcgcgagggcgacgctgccgagggcgaggggtgcgtcccgccggatcggcgcaggagcgacacacgcgacgccatggacgagaagaagggctccgaggaggcgccgttcttcacggactacggcgaggcgagccggtacgaggttaccgaggtggtgggcaagggcagctacggcgtggtcgccgcggccctcgacaccctcaccggcgagcacgtcgccatcaagaagatcaacgacgtcttcgagcacgtctccgacgccacccgcatcctgcgcgagatcaagctgctgcgcctgctgcgccacccggacatcgtccagatcaagcatatcatgctcccgccatcgcgccgcgagttccgcgacatttacgtcgtcttcgagctcatggagtccgacctccaccaggtcatcaaggccaacgacgacctcacgcccgagcaccaccagttcttcctgtaccagctgctccgcggcatgaagtacatccacgccgccaatgtcttccaccgggacctcaagcccaagaacattctcgccaacggcgactgcaagctcaagatttgtgacttcggccttgctcgggtgtctttcaacgatacaccttcagccatattctggacggattatgtggcaacaagatggtatcgtgctccagaattatgcggctccttcttttcaaagtatactcctgcgattgatatctggagcctaggttgtatatttgctgaaatgcttatagggaagcctctctttcctggcaagaatgtggtacatcaactggatctcatgacagatctacttggcactccttcaccagagtcactttcgaggattcgaaatgaaaaggctcgccgatacttgggaaacatgaaaacaaagcatccagttccttttacacagaagtttcctggtatagatccaatggctcttcatttgcttgaacgcctactttcttttgatccaaaggaccgaccaactgctgcagaggccttgacagatccatacttcactgggttagcaaattctgcacgtgaaccagtagcacaacctatctcaaaatttgagtttgagtttgaaagaaggaagctggccagagatgatgttcgagaattaatttacagagagacattggaataccatcctcagatgttgcaggagtttcttggtggtggtgtcaaggcgaactttgtgtacccgagtggggtggatcgtttcaagaggcaattcgttcatctcgaagaaattgctgctaagggtgagaagactagcccacaattgcgacaacatacttccttaccaagagaaagagtaaatgacagcggcgacgaccttgagaaaccaagtgcagattactgcataagattgcatgtatgtgatcaactctcaagctctcgtaactttctgaagagcgaaagcatcagtgcttcccagtgtgtggtcatcaaaccgaagcgagagaaagatgaggagcccatatctgagtatgcgagcagtccagttgatggtgtgccaccgaggattgctgaactcaaaacctga

SEQ ID NO: 150709 - DNA, 855 bp, Zea Mays
aatcgtccctctgccaaaaaaagggcatcactccattgcacttgcagtgcagtctagctcttgcacccgatcgagccggccttcacttcacgccatgttcagtgccatgtccgccctcctctcctccctggcccggcggctggtggtgcccctccgccgcaggaagagcatcacgtcctccgctttcgccgccagacgttcgttcttcccgtgcggcgcgggccaccgcgacgtcgtccgcgacagctccttcgtcgtcgtcatcaagcgcaagacgctgaggaaggtgatgcccagcagaagggtgggggagcggaagcgcgggcgaggaggcgatgacctcgttgacgacggcgacgagccgtgcgtgtggcggcggacgatcctcctggggcgtaggtgccagccactggagttcacgggggccatacactacgactgcgaggggcagcggcttcggcagccccgcacgccgccgctgccgtcgtcgccgctgctgagccccgtccatccttccaagctccgctatatggaccgcgcataagaggatccgcacagcagactgcacgtactatgctagcttacggatggatgaagaagatgacacggttttcctttggtgacttcactgcttcgtctcgtgtctcgtgacgtgtgatgaatgagtacatcatgttcgaccgatctgttatcttgtggaacagaataattaatgagtatattgtattatattacaattgtttcagtggaaaagtaggtgattgttaacttgtgtcgtgtgtaagatcttggtagatgaacagcgatgaatcctttccaaaacaaaagatatggtagatgagaggttgttcaact

SEQ ID NO: 150710 - DNA, 1464 bp, Zea Mays
cacacagtcagtcgatcgtcctctccaacataccctctgcttcctgccttcctccacgagctgccttggaagcctcgaccatgcaggaagctctcgtatctccggccaatgccggccgccttcgctttcgctcgggccttggagctcaagccgttcgccttcggggaccagcgcctcgcctcgccgcgctacctcaacctcaacctcaacctcggcggcgcccgatgacgcgctgttccgctgctcgtcgccgacgttcagccccagcttcggcttctcctcctcgccgtcgccgctcgccacgtcctccgtctcgctctcgccgacctcctccgcctccctcgccgacgacggctgcgacggcgcccggcaccgacgccgacgccgacgccgccacgggccacacgctccggctcgcccgcctcgcgctgcagtaccaggaggtggccgaccgctacgagctctgcctcgcccgcctcgccgacgccgcggacgacgcggcggcgctccgccgcgagaacgccgagctccgcaacgccaacgccgacctcacgcgccgcctcgcgctcctcagcggcattggaaagcaggtcgccgccgccgccgccgccgccgaggaggcccgccggctccgcttcggggagcccaaggccgtcccggccgccaaggattgcgctaccgagaagcccgccgtgctgccgcccaagagcatttccgtccgctccattgacttcctcctcaagatgaaccagcccaaacaggtacagccccccgccaccacgccggccgcaagcaaccgcaagcatcgcgcgtccaacccgaccaaaccaagctcgcgcgtgtacaagggcaatggcggtgaaaaaaaagacgaggaattacccaaggagcaacacgcggcgggcggcgtggagctggaggtgttcaaccagggcatgttgaagacggagctgtgcaacaagtgggaggagaccggggcgtgcccctacggcgaccagtgccagttcgctcacggcgtcgccgagctccgccccgtcatccgccacccacgctacaagacccaggtctgccgcatggtgctcgccggcgaggtctgcccctacggccaccgctgccacttccgccacacgctcacccccgccgaacgcctccacctagcctgcccttagcaatggcaggcacgcggcagagcgcagccaaggccagcctttcgccgcgctggaaccgttggtttttgtttcgtctaaagtcagcaagtgcagtatgtaaatcacacgaaaaatgtataaaaatacgaacagcaatgtaaataagatacttgcatacgatcgagtaacacacaaaaggtcatactgtaattcataaactaaacctgatggtaggattagttttcgtgctatgtgaatattcatacacaaggacaagattgctcaccgtcaatcagctgtgggttatcaggtgctt

SEQ ID NO: 150711 - DNA, 1175 bp, Zea Mays
actgctctcatgggcctagcgggctgaaccttatgtttcccctgcctgctgctgctgctgcgagccgaggtcaggtcggctacagtgcacattgctaaacgctcccgccgtctcgcgagccgccgccgggtccttacgcaagtccgcgacgtgcatcgcctggagaggctcccgtctcgccgccctggggatcccatctcatctgtgcagccgcgcgtggcccaagggagccagaagctaagagttagagaggcgcgtgatgtcttcagaggaggcgagggcaagcttttcggagttggtggttggttcgccaacccggacagagggcgaaacttattcttcaggtgatatgtcgtctgaggagggtgcacacgtcacttgtttcacagaggatcttcacgatgtaacacttcactttcagatagtgaggttttctaaacagatatacgtgtgggttggatgcaacacagcaaagtttggccatttatatgctgctgcaaccactagaccggataacagagtgagtgttacctctgtactaggaggaacatctgataacaccggttcaagtatggctcgccgtctagtgctgaagactggcctgaacatagtcctggcatgcaacatcccaaaggacagccccatacttgaggctgctgcggagaggaagctggttgagaagctgaaaggtttgggctacattaaaaccccagctgtgggggctaacacttcctcggcacaatgatccgtggtgtgatctagtgagctttcggtcgacgtgtagcttcatcactacatccagcagagagcggttgtgatttttggcgggctttgactgtgctacctgttctctcatgtggcaaaaggttattgtgaacatgttcgttgtgatgtactccgccctaaaataaacccccttcgtatttcaaggagaaacaatcttaattctgactaaatatataccaaaaatactgatatttatgataccggataaacatcattagattaatcatgtcatacattttatagtaaatatgtttagagatccaaatgtagatacaatttttaacctaatgaaagttaagattgattgatctgtcgaaataatgagatgaggacgtagggagtaaatacgatagtggaatgcatattgtacaatgccttgcaactttgag

SEQ ID NO: 150712 - DNA, 823 bp, Zea Mays
actgctctcatgggcctagcgggctgaaccttatgtttcccctgcctgctgctgctgctgcgagccgaggtcaggtcggctacagtgcacattgctaaacgctcccgccgtctcgcgagccgccgccgggtccttacgcaagtccgcgacgtgcatcgcctggagaggctcccgtctcgccgccctggggatcccatctcatctgtgcagccgcgcgtggcccaagggagccagaagctaagagttagagaggcgcgtgatgtcttcagaggaggcgagggcaagcttttcggagttggtggttggttcgccaacccggacagagggcgaaacttattcttcaggtgatatgtcgtctgaggagggtgcacacgtcacttgtttcacagaggatcttcacgatgtaacacttcactttcagatagtgaggttttctaaacagatatacgtgtgggttggatgcaacacagcaaagtttggccatttatatgctgctgcaaccactagaccggtaagcgctaatcgttttcattcttagaggatgctgtctaattatttatgttgtcatttgtgccatgttgtcttttcgtgtcccttttaggataacagagtgagtgttacctctgtactaggaggaacatctgataacaccggttcaagtatggctcgccgtctaggtaccgtttctgtttgcagttgcagtggctaattgtgctgcattcacggttagcttttagtaacagaaaggttgcaccctacatgtcccagtgctgaagactggcctgaacatagtcctggcatgcaacatcccaaaggacagccc

SEQ ID NO: 150713 - DNA, 1763 bp, Zea Mays
cgcgaacttttttcttcactatttgtgtggacatcttcaacgacatgggcacatggcccacacatcaggacggaaggtggacctaatgacttttttaatagcttatatagaattttaaacttttataattatactgatacaaaaaaaaactaaaaaaatgggtagctttgtctcatgttccatattccttccctgattctcacatttccccccacaagctattgcttccatacacatgttgctttccttccagctgcagttctgcagccctgtgcatgcagcacaccctgcacgcgctgccattcatacgcccatgctccacaggtccataaataaacgacagccagttcgttcagttgcaattgcaagcagcacaagctagtctccaagatgcaccgctccttcctcctcgtctgtgcactcgtagccaccgcgctttccaccgacaccaccgttgccgccgcccagagccagagccagagccagagccagaggtcatgggccgaactcagcgggcgggacaactgggacgggctcctggacccgctcgacggcgacctccggcgcgccgtcatccggtacggggagctggcgcaggcgacgtcggacgcgttcatcggcgacccggcgtcgccgtacgcgggcgcgtcgcggtacgcccccggcgcgttcctccgcagggcgcaggcgcccgacccggacgcgtacaacgtgacgaggttcctgtacgcgacgtcgagcgcgcgcgtccccggccagttcatcacgcggccggcgccgccgggggcgtggagcgccgagtccaactggatggggtacgtcgccgtggccacggacgccggcgtcgcgaggctggggaggcgggacatcgtggtggcgtggcgcgggaccaagcgcgccgtggagtgggccaacgacctggacatcacgctggtgccggcggcgggcgtcgtcgggcctggccccgggtggtcgcagccggcggtgcaccggggtttcttgtccgtgtacgcgtcgaggaactccacgtcgcggttcaacaagcaaagcgccagagagcaggtgttggccgagattagaaggctattggacgcgtacaagggcgagaactgcagcatcacgctaaccggccacagcctgggcgcggcgctctccacgctcaccgccatcgacatcgtcgccaacggcctcaacgtccggggccccaacaacgacacggtccccgtcgccgccatcgtcttcggcagcccccgcgtgggcgacgaccagttcaagaaggcgttcgactcgacgcccggcgcccggctgctccgggtccggaacgcgcccgacgtcgtgcccaccgtcctgcccaacgccttctacaaggatgtcggcgtggagctgctgctggacacgcgcaagtcgccgcacctcaagaggcccggcccgggccccgccgcctggcacaacctcgagtgctacctgcacggcgtcgccggcacgcagggcgccggcgacgccgccgggttcagcctggaggtggaccgcgacgtcgcgctggtgaacaaggaggtggacgcgctcagcgacgactaccccgtgccggcggcctggtgggtggaggggaacaagggcatgaccagggacgccagcggacgctgggttttgcaggatcatgaggagggtaacctcgctatgtgatgattttgataacttcattaaaggtggttattaacgaattaataatacgaaagcaagagttttctcgacaataaaaaaca

SEQ ID NO: 150714 - DNA, 845 bp, Zea Mays
gcagcacaagctagtctccaagatgcaccgctccttcctcctcgtctgtgcactcgtagccaccgcgctttccaccgacaccaccgttgccgccgcccagagccagagccagagccagagccagaggtcatgggccgaactcagcgggcgggacaactgggacgggctcctggacccgctcgacggcgacctccggcgcgccgtcatccggtacggggagctggcgcaggcgacgtcggacgcgttcatcggcgacccggcgtcgccgtacgcgggcgcgtcgcggtacgcccccggcgcgttcctccgcagggcgcaggcgcccgacccggacgcgtacaacgtgacgaggttcctgtacgcgacgtcgagcgcgcgcgtccccggccagttcatcacgcggccggcgccgccgggggcgtggagcgccgagtccaactggatggggtacgtcgccgtggccacggacgccggcgtcgcgaggctggggaggcgggacatcgtggtggcgtggcgcgggaccaagcgcgccgtggagtgggccaacgacctggacatcacgctggtgccggcggcgggcgtcgtcgggcctggccccgggtggtcgcagccggcggtgcaccggggtttcttgtccgtgtacgcgtcgaggaactccacgtcgcggttcaacaagcaaagcgccagagagcaggtaatctagttttgactcctccctcgtgtgctttattcgccgacacagtctctctagtgtttcctttccttgtgtccttccattccatggcacaatagccactgactgatggccagtaattttgcggtgactttcgtaatttttttgcatg

SEQ ID NO: 150715 - DNA, 1950 bp, Zea Mays
cgtgcccttcccctgcacaggctgtcgtccacaatgcccgcgccgctgatactacccacagtcgcgcgcgagctggcagagctcctcgtcgccctctccgccgcccgcgcgctcccaaaaggacagcagctccacggccatctcctcaaggctggacacgtccccgccaccgcctcctcccacgcgctgctcgcgcaccacctccttacgttctacgcgcgctgcgcgctccctgacctctccctccgtgccttccttgacctccccgcgccgccccttcccgctgcatggtcttccctcatctcctccttcgctcagaacggcctcgccgccgctgccttcgacacgttccgccgcatgctcgccgcgggcgtccctgccaccgaccgctccatccctttggctgcaaaggccgttgccgctgccgagaccttgtcgcgccctccgttctcccctcacgcgctccacggccttgctgccaagactccgttcgctggcgacgtgtttgttggctcggcgattgtcgacatgtatgccaagtgcggccaccttgcagacgcccgccggctattcgatgatatgccagaacggaatgttgtttcttggtctgcactcatatgtgggtatgctgacgcggggatgcatcctgcagcgatgggaatcttccgcttggcacttgaggaggctgtgcctgtgaatgactacaccgtttcttccatcatccgtgtatgtgctgcagcgacgctctttgagcttggagcccaggtgcatgccagggctacaaagacagcgcttgacgcgtcaccttttgtgagcagctcacttgtctcggtttactcgaagtgtgggcttgtagagtgtgcttaccgtgtgttcaatgaagcacctgagaagaaccttggcatttggaatgcagtgctcattgcatctgctcagcatgggcatactgctgcagcatttgagcgatttatggagatgcagaaggctggattccagcccaatcacataaccttcctgtgcttgctcactgcttgtagctatgctggccttgttgatgaggggaagcgatatttttctatcatgaaagattatggcattgaaccacaggctgaacattatgcttcgatggttgacctacttggtcgtgtaggacttataaaggaagcccttgatcttattgagtccatgcctatggaaccacctgagtctgtttggggtgcactgctcatgtcatgccgcatatttaaagatgctgacactgcagcaattgctgcaaagaggctgtttgagactgggtctcgcagctctggagcacatatgcttttatcaagcacatatgcagctgcaggaaggcatattgatgcagctcttgctaggaaagcaatgcgtgatgcaggtgtacggaaagaaacgggacttagctggttggaagctgcaggggaggtgcatacctttgcatcgaactgcaggagacaccaacgaagcgaggaaatttacaaggtgctggagaacgttggtgagaagatggaggcagctggttatgtggcagacactagtgcagttgttaaggatgtagatggggatgagaagcgagcaacagtgaggtatcacagtgaaaggctagcaattgggttaggtcttttgattgttccacatggtgtgccaatccgagttatgaagaatttgcgcgtgtgtgacgattgccacaatgcaattaagtatctaactaagtgcacaggtagagttgtggttcttagagataatcgtcggttccaccgatttgaaggtggggtgtgttcttgtggggatttctggtaagggaccaatatgtttctgatgtgttcttggattttttttctctatatggattcatttagaaggtaaacatatgtttcctcagtaaatagacctgtttcagttcagtggtgatatgataataaaggagtactg

SEQ ID NO: 150716 - DNA, 149 bp, Zea Mays
aaataagagattgtatagtcctctgtaataatgggtcaaaaagacagtcatcgattttgaatggaagtgcccccctaataatattgctttctaaatttaggataaaaatacagagagaattgggtatactctatgggtttctgaactga

SEQ ID NO: 150717 - DNA, 558 bp, Zea Mays
atgagagcgaccaagctagggcaggcgctggtggctgggcgccatggcgagcagcaggaagctgcacggcggcgcgaggagagaagcagacgcgcggctgtgcgcgcagagagggatcgagcagggcctcagctggggaaggagcggctaggcgcgccatgggagtccagggcgcggcgagctgggccggagacgcgcacagagcagggcacgcgcggttggagaagagagcggcgttggagagagagcgcggtggccagggagcttcacggccgcacggtagttttgagtgcagcgtcttctattgacccctgttcccaccagagaaagcaccggaccgggggtagctctttgggtggagcagaggaaggagccgagggagcacgcagaagacgccgagaggagggagatgaaggagctccggccatggagcagcggcgcacggcgagggagatccacgaggtggggaagaagacattagagatgggcgcgcagcgagccagggctgaagctcacgccggcgaggaagaagacgcagggtgccgtgggagctcgtag

SEQ ID NO: 150718 - DNA, 2347 bp, Zea Mays
acctcaaagtcgtctacccacatcataatcgacggcccacgcggccacgcgtacgtccccgattcatacaggctggccccaccttccgatcctaataagcccgctcccacactcctttcttcccctgcctgccgtctctcttccaccttccaccacaagcgccgccgcagccggtgcctgctccttcccgatccccgaggcaaagctgcgactccgcaaccgccgccatggcgttcgagaagatcaaggtctccaacccaatcgtcgagatggacggtgatgagatgaccagggtattctggcagtctatcaaggacaagcttatcctcccatttctggacctggacatcaagtactatgatttggggatactgcaccgtgaagcaactgatgacaaggtcacagtggaggctgcagaggctactctcaagtacaacgtggctattaagtgtgcgaccattactccagatgaaactcgggttaaggagttcaatctgaaacacatgtggaagagcccaaatggcacaattaggaacattataaatggcactgtgttcagagagcctattatatgcaaaaacgttccaagacttgttccaggatggactaagcccatctgcattggaaggcatgccttcggtgatcaataccgagctaccgatgcagttctgaaggggcctgggaagctgaagctagtttttgagggaaaagaagaacagattgatctggaggtattcaacttcactggtgctggaggagttgccttgtctatgtacaacaccgacgagtcaatccgagcttttgctgaggcttctatgacaactgcttatgagaagaaatggccactctaccttagcaccaaaaacacaatcctgaaaaaatatgatggcaggtttaaggacattttccaggaggtctatgaagctgactggaagtccaaatttgaggctgctggaatatggtatgagcatcgtcttattgatgacatggttgcgtacgcgcttaagagcgaaggaggctatgtgtgggcttgcaagaactacgatggagatgtgcagagtgatttcttagctcaaggttttggatctttgggtttgatgacatcagtgttggtgtgccctgatggaaaaaccatcgaagctgaagctgcccatggcacggttacccgtcatttccgtgtccaccagaaaggaggcgaaaccagcacgaacagcattgcttcgatctttgcatggacaagaggacttgcccacagggcaaagctcgacgacaacgctagactactcgacttcgctctcaaactcgaggctgcttgcgttgagaccgtggagtccgggaagatgactaaagatctggcgattcttgtccatggatcttccagcgtcacgagaagccattacctgaacaccgaggagttcatcgacgcagtcgctactgagctccgatcaagactgggagccaactgagcctacaagaaactttgcatggcgactttgaatgcttcgtcaccgtcaccgatctgctagtcgtcttttctgttatgaagaagtgaatgtgcgtcaccgcagtttcgatgcaagctaattatagatgtggtgtcacgtgagcgctcaaaataaaggatacacatgattaaattgtttttatgtcagtactaagctcagtcatccccccccccccagtatttttgtcgtttttctcctttgatttgcgtgtccattgtgttgtgtagtttacaaaatgccttccgttcaagccgcgtactaccgcgggatcacggaccactctctcagacggccaggtggttgtggtctcccaattccgcgctccagtggcaccacgtctccaggccacgcgttccaatttccacggcgctagtgacgtcgccaaaaaaggtgagaggaaaaggagggccgcgacgaggacgaccatgccggggcaaccgacaccgggactgccgcgtgatttgtgcccttgcgcacagtactacctatctatgcgtgtgtacgatatcttgtgtgcgctgcttggctgctctgtctacgcgcgcgtggactgcgactctgaaacctttcggcagcgtacgcaattgtcggatttcaataaaggaccgtctggtctgaatctctcaataaggacatgtataagtctaggttcttggttggctttttcagtataaaaacagctaagagatcagcatgatataactctaaactttaaatcagaaatgtatttcaaagacaatatgtatagaaagttgtgttgagatatgttttttatgaagagtctgtctcttgtaccttttttagttaatccttaaatacttctcaagagaccttatattaaa

SEQ ID NO: 150719 - DNA, 4197 bp, Zea Mays
gaaaatcaaccaacaattttccttccccattttctccacccacgaactcgtcgtctctcatccccggccgccaccgcctcccctccgttctcgcaccccaccaaaaccctagccgccgtaccccagcgcgctcgcggtcccctctccccgccgccacgtctgtctagatccgcgcgcgccctagggcttcaagggccccgcgtcgccagcttccgcatctgggctggtagtttttcagttagggttggcccgccatgcctcggagctcgcgtcacaggtcgcaccggtcccacaggcgaggagggtccgctgaccggtcggagtcagatggcgaggagtcggctccggtcgccggcgcgcgcgaggaggccgcggcggctagggtttccagagatcccgagcctgagaggcgccgctcgtcctcgggacaggaggccgtgagatcagggaacgggtacgctgagcacgggaagaagaggaaggagagggttgaggaggccgtggttgatgtggtcagcgaccggtggaacagtggcgtctgtgacgatcacctggtcgacaagaggtccaagagcgagacctttgggcatgctgaagtggagaagctggccgacaggtccaggggatcaggggatgagtccaagaggtcaagcagacgagcagtggctgtggatgacagggctgaggaggttctgtctaagagtgactctgggaaacggaggtcagagaaacagaaggatgtggggaggaaggagagtaccgggcattataaggataacagagatagggagaacgaaagggaaaggggggaagaatgggagcggcagaaggagcgagataggggaaggagtagggatagagagcgtgagaaggaaagagcacgagagaaggagagggagagagaacgggagcgtgagaaagatagggaccgagagcgggacagggagcatgagagggagcgtgataggcagaaggagcgggagtgggacaagaaagatcatgattccaagcacgagaggtatgaggatggcgggagcaggaagagtggcttgaagatgagtaggacggaacaggaggcctactcatataggagagatacagatgtcaatgaaatttcagcgaaagagaagtacaataatcctgatatgcaagctgaaaaacacagccgaagaaaagatgattctgaagatacagataagtggtccactgacaatagagacagtgatgacagaaagaccctgtccagatatgaacatggtaaatctaggagctctaaggaacaaaggtttgatgacgacaagtataaggaaaagtacaaggatgattacgtaagggataagaggcaacatgacgacaagttttctaatgagcgagtggcccgtagtcatgaaagtgatagagctgaatataagagtgctaaagatggacgcagaagctcagagagccattacagaaaggatgcagttcaagatgttgatcattatgaggattacaacaataggtacaaggaaagtagagggaaaaaacgacctcctgaggaaaatgatgaccaatatgatttaaagcctccaagcacacgtgatcaacgtgtgcatttggaaaaatcttcaggcagtgggcgtctggattctctgactgagagagcaagacctgatcgtagttctagtccaagtaaaatccactcaagaagttcacctagcccaagttcttatcatgacaaagatcagagccggcatgggtctaaagtggtggatcatggaaagagagaaattccatatgatgagagaaataatcgtccaagagcatcttctggtagagaaaggacacctgcttctagacttcgtgacagggatgcagaaaattggtcgtctgaaaggcttaaacagaaggatgattaccaacctcgtgatgtaacattggaaatttctacatcacactatgaccgcacacctagcaaagataagcatacttcaccaaaacaactgtctgaaaaatctccatcttcaggtgaccataggttttcaggtaggcttagtggtgggcgtagtcttgataataaaggagaaagaaagagccttacgaaatacagagatagagatggtgacatagctcaagagcgatcacatcatcaagatcgaatgccagctaaggttccattcagggagccaacaccgtcaaattcatccataagtagaggtggtcattttttgggcagttcaccaaataatcctttgccacctgcacggaacggtgacccttccttccagggtccacatgatgatgaccgtaggcctcaaaatggagataggaggttccatggtcatcaaaaaaggaatgacatgaattctgttcgtggacatggacatggctggaacagccagccaaactggccttctccagtttctaatggtttcgtccccatccaacatggtggtgctcctggttttcatccacctgtccatcagtttccaggcccacctatgtttaaccttagacctcaaatgaaattaaaccaacctggagtttcatatcctatgcatgatgctgttgataggttttcgacccacatgcgcccatttgggtggcctaatcatctggatgaatcatgcccacctcatatgcaagtttggaatggaggtagtggtgtatttcctggtgaaccctatatctatggtagacaagagtgggatcagaatagacctcatgctggtagcagaggttgggagctgactggtgatgtatccaagggaccaaatgatgtgccggatgctgaacttctggtagctaagaaggatcctgactctgcaataactgctgtttctgattctggtggacaacacaatcttcaacctgaggctgaccaaaaggaaattggacgcttgactgctgaaaactttgaagcgaagaatcatactaaaagttcaaaaagtttggaagctcctcaaggagcacaacttgtgacttctatgctgtcaaagaatagcgtggtcttttgtaaaaactatctatccagaatcagtgtttcacatgatcttgttgagcctgagttgtacaaaaggtgtatatccttgctgggagatttggacgtaacaaaaacctctcatttggttaggaatgaaattcagcaggataatggaaatattggaaaaatgtcaacaaaatatggaaacctcaaccctttcagttcacgttacctcaaaagtgacaatactatctttgagagagctttggcccttcataagaaccagactcaaaagggtttaactactgcctctgcatctgtaaaaatggaagagaagatggctgtaccagaagatgaccatgacatggaattgcttgaaccagtggtgagcaatcctgctccacaacgtcacactgatgtcatggaggaaggatcagtatcaaaacatgaacttggtgatggcatagggagaactattgctgcaactataggatctggggttctggatgcacctccagaaatttcacttccccaacctgaggtggtggtggcaacaacagtaatcacacagccgaacaagcacatggaggatgtgttgcctccagcaattgaggatggtgcactacaagcaaccctcgaacatgctgttggcataccggaagttacacccgctgatgtcttgctggatgttgcaccttctgctgttggagaatcaggtgatgacatggagatcataccctctgctatggcagaacctcaactaggcaaggagcctgctcctgttgctagtcctgacagtcaagagaagcccttcatgcttgattctgagacaggtatggaggttgaggttaaggttatcgatgataatcctggggatggtagggtgagctctatactcggcaccaaacttgattttgctgcaattgatggggattctgaagctttgttggtggaaagtagggtaaatttaagtcggatacctaattccccagaaagtacacattgaactcttcctattttattttaattccttttctgagggtcttgtgccctcagcctagccttttgagctgccatattctgtttacatctgggcgttcttctgtagtgtaatgttcccagtgagataggtatgcttatggggaacttggacgtacctgcgggacgcaggacctgctgcaatggcacgcctctcaagtagtgcgtgcccatccagctgcgtctcttgttctctg

SEQ ID NO: 150720 - DNA, 1129 bp, Zea Mays
tacgtacgcagccagccgccgagacaactcgtacgaacagctagcgctgaggagaggagtgagcgagtcagctaggccagctgccggcctgcagcagaacgggagctagctagctaccactgcggtgcggagcaaacctgccgcgatggaaggtgtgccggaagacaagtgcacccttatcgcggagctggtgcgagtactggagatggcgaggcagctcgagacgtacatggcggtccagcagcagcagggcgacgctgccggcggggaccagcggtgccgggcgctggtgagcaccatgcgcgcctgcatcgacagggcggtgtcctgctgcgccgaggggcgtccggactcgccgccgtcaggtggggatggcagtccgcgcagcggcgtgtcggaccaggccggcggcgagtttcggggtcgcggcaatgcggccggccagtgcaagaagaggaagacgctgcccaagtggagcagccaggtgagggttagcgccgtgcaggacgtgagccccctcgacgacggcctcagctggaggaagtacggccagaaggacatcctcggcgccaagtacccaagatcctacttccggtgcacgcacaggcacacgcagagctgtcaggcaagcaagcatgtgcagcgcacggacggcgacccgctgctcttcgacgtcgtgtaccacggcagccacacgtgcgcccaggcccagggcgccgccgcgcgccccgtcaaccagccggctcagcagcaaacggacacggagcagacgacctccccggggttccaagcagggcccgccgtgctgccgttctcgctccgtccggcatccaacaagccgccgggcgcccacgacgccggcgacggcgcgacgagcagccgtttcatcgcgaccggctgtactgtcaccgcgtctcctttcgtgtccccggcgacgtcagagtgccggatagttagcggcggctacgcgttgggaggtggcgtgaccatggccggcgtccggaacgtgcctgatgttgagctcgccgccacgaccaactcgcttatggctatgggacagatggatttcatgttcccgctggacgccgccagtttcttggagctggagagtccggccagctattgctaa

SEQ ID NO: 150721 - DNA, 2022 bp, Zea Mays
ccactccccccaaaaaacctcgccaaacccccagaaactcccatcccatcacctccatcctccgcaccactcctccccctccacctcacgtcgccaccgcaccgccgccgtttcccagctctgctctcacagggtctcctcctcggctttctccacgccacgccacgccacaccgccgctgccacctcccttccttcgtctccggccttgttcttcgagcctttttctttattatcgtcggtgctcctgctccaggaccttccgaagctagctccccgctccctctcgccgaggagcccggagtgtcgctcacggagctcgaaaaccgttatagctacagcgtccccgtcggggccgcggcagcagcgcctgcgtccgtagtactacgaactcggcaggggacaacaggacgggcgcgcggcctgactgctgctgcctctctctgctttcagctactcgtagctgctgctgcatttccgctgctctttttaaagagcccgtcgtctttactgcggccattccctcctccccctttcttcctccgatcccctgcgccccggtctgccttcctgctcgcatcgcctcgcctccctcccttcccgaccctttctttgctctttattcccctgccgatccgcagtgcaggagccaggcaggagggaaatccacccggccgtccgttccgatcgcgcgccccccctgcagcttcttttcctgctggggtcagggtagcagcctgcatgcagggcctggtttggttggggttctcgtgtcatctcaacgccagggaggtacttgctcgtctgtctctccttgcctgtgcgcttcggttattagctagctagcttgggtctagtctagtgtaactcccggccgccatctttgctgtacttcgttcgtgccatgtcgcgctcgcgcacggtgcggatcttctgggacgatcctgacctgaccgattcctccggcgacgacgagggctgcggagcccggagggtcggcagaatggtgagggagctggcaccagcaccagcaccagcaccggcggctcttcccgtgccggatcagtgcaaccccggggacggcgaccgcgggaggaaggccggcgtcgctggtcccggcgtgtgcagcggggcgcggagacggctggccaagggcgccggtggcgcggcgagcaccaagttccgcggcgtgcggaggcggccgtggggcaagttcgcggcggagatccgcgacccgtggcgcggcgtgcgcgtctggctcggcaccttcgacaccgcggaggaggccgcacgcgtctacgacgccgccgccgtccagctccgcggggccaacgccaccaccaacttctccgcgtccgccgccactaactgcggctccggctccggggccggggccgggcaggacccggcgacgacaccggcggcgggctacgagtccggcgcggagtcgtcgccgacgtccgtgctccgcaaggtcccctccctgtcctccctcgccgaggacgactcggacgcgccggccgcccagcgccgcagcctggccgtcctcgaggaggaggagctgggcgagttcgtgccgttcgaggacgcgcccgtctacgccaccagcggcttctgggacttcgagcccgacgcggggttcctctacgccgagccgtcgtcgccggaggcgtcgtggaatgccgccgccgccgtcgccgagcccgcctcgtctgacgacgcgcccagctgggccgcgtcgccggtgcaggagaacgactacttccaggacctgcgcgacctcttcccgctaaaccggcttcccgcgattttctgaaaacaggcggacggtgaacgccggaaccgggaacggcgccgttggtccgtcgtcgagagtgtgttgtgtctcgtgcctacgtgcactgtgtacttgtacgcctttcccacgctgttcgtgttactatcttcgagtcgatgagaaatgtaatatgctgccgaatgccgatgagcacgtagagttttgatgtgcgctggagtctacgaa

SEQ ID NO: 150722 - DNA, 1330 bp, Zea Mays
atagcaatttggcgctgatttgatgccggccactttcatcgatcagccatggtggggaaagaagcgctggttcgatgaagctgcataaataaagccagcacgcgaaccagcagcgttcaggggaagaccatttacatatatgcccttgccccggttcctttccccggccccaactccattatttgcttgatccttgacgagcgggagagagagagagaggaagacgagaggcagcgaaggaaacagtagttcttcagttaggcaggagggcacaggaggaggaagatggcgtcgaagaggatccagaaggagctcaaggatcttcagaaggaccctcccacctcgtgcagtgcaggtcctgttggtgaagatatattccactggcaggcaacaataatgggtccatctgatagcccatattctggtggagttttcctagttacaatccattttcctcccgattatcctttcaaaccaccaaaggtggcattccgcaccaaggtgttccatccaaacatcaacagcaacgggagcatctgccttgacatcctgaaggaccagtggagcccggcgctaaccatctccaaggtgctgctgtccatctgctccctgctgaccgatccgaaccccgacgatcctctggtccccgagatagcgcacatgtacaagacggaccggaacaagtacgagaacaccgcgaggacctggacccagaggtacgccatgtagggagggggtaccctacctggccctttgggggtccgccggaattgccgctgctgcgttgtgttcctggacctggacctggactggagactggacgtgtctccgtgtattcgatcctgtgctgtataatgatgcatcagattgggtttgcagtgcagtgcgccgtgtggtgctgaatgctgtattgtgccgcttggaggctgtaattctgaatgccaaaaaactggtgattggaaccattttgcgttggatgctgctgcagacgaggccatgtttgcgtccgtcgtattggaagaaagggcgatccggagcaggtggtttcattttttttaccggcatttcaattcttttttttttcactaaggaggccttggatcaggaattagaatctatttaatagagtagactatctggtttggaattcgacattccaccactttctaaagtctacctcaaatttatatttatagggtggagaatagaaattgattccatgtatcttcgaactgtgtttctattctgcaatctgtaacatgttgttccgcttgctctcctacaataaaaatgtatggagtagcatatataattatctcctcttcatgac

SEQ ID NO: 150723 - DNA, 1429 bp, Zea Mays
atagcaatttggcgctgatttgatgccggccactttcatcgatcagccatggtggggaaagaagcgctggttcgatgaagctgcataaataaagccagcacgcgaaccagcagcgttcaggggaagaccatttacatatatgcccttgccccggttcctttccccggccccaactccattatttgcttgatccttgacgagcgggagagagagagagaggaagacgagaggcagcgaaggaaacagtagttcttcagttaggcaggagggcacaggaggaggaagatggcgtcgaagaggatccagaaggagctcaaggatcttcagaaggaccctcccacctcgtgcagtgcaggtcctgttggtgaagatatattccactggcaggcaacaataatgggtccatctgatagcccatattctggtggagttttcctagttacaatccattttcctcccgattatcctttcaaaccaccaaaggtggcattccgcaccaaggtgttccatccaaacatcaacagcaacgggagcatctgccttgacatcctgaaggaccagtggagcccggcgctaaccatctccaaggttggtgactgctctcttggataacatcatcttctccatggttgtttgtaggtttgggagctacctacctaccagcaccctcaatctggtcgatttcaggtgctgctgtccatctgctccctgctgaccgatccgaaccccgacgatcctctggtccccgagatagcgcacatgtacaagacggaccggaacaagtacgagaacaccgcgaggacctggacccagaggtacgccatgtagggagggggtaccctacctggccctttgggggtccgccggaattgccgctgctgcgttgtgttcctggacctggacctggactggagactggacgtgtctccgtgtattcgatcctgtgctgtataatgatgcatcagattgggtttgcagtgcagtgcgccgtgtggtgctgaatgctgtattgtgccgcttggaggctgtaattctgaatgccaaaaaactggtgattggaaccattttgcgttggatgctgctgcagacgaggccatgtttgcgtccgtcgtattggaagaaagggcgatccggagcaggtggtttcattttttttaccggcatttcaattcttttttttttcactaaggaggccttggatcaggaattagaatctatttaatagagtagactatctggtttggaattcgacattccaccactttctaaagtctacctcaaatttatatttatagggtggagaatagaaattgattccatgtatcttcgaactgtgtttctattctgcaatctgtaacatgttgttccgcttgctctcctacaataaaaatgtatggagtagcatatataattatctcctcttcatgac

SEQ ID NO: 150724 - DNA, 902 bp, Zea Mays
ctcttttttccccaaaagaaatcttggggcatgccacgagcctagctttttcatggcaaatcctgattactagtttcttttatcttgctcttttttttcgaaaataggagggcacaggaggaggaagatggcgtcgaagaggatccagaaggagctcaaggatcttcagaaggaccctcccacctcgtgcagtgcaggtcctgttggtgaagatatattccactggcaggcaacaataatgggtccatctgatagcccatattctggtggagttttcctagttacaatccattttcctcccgattatcctttcaaaccaccaaaggtggcattccgcaccaaggtgttccatccaaacatcaacagcaacgggagcatctgccttgacatcctgaaggaccagtggagcccggcgctaaccatctccaaggtgctgctgtccatctgctccctgctgaccgatccgaaccccgacgatcctctggtccccgagatagcgcacatgtacaagacggaccggaacaagtacgagaacaccgcgaggacctggacccagaggtacgccatgtagggagggggtaccctacctggccctttgggggtccgccggaattgccgctgctgcgttgtgttcctggacctggacctggactggagactggacgtgtctccgtgtattcgatcctgtgctgtataatgatgcatcagattgggtttgcagtgcagtgcgccgtgtggtgctgaatgctgtattgtgccgcttggaggctgtaattctgaatgccaaaaaactggtgattggaaccattttgcgttggatgctgctgcagacgaggccatgtttgcgtccgtcgtattggaagaaagggcgatccggagcaggtggtttcattttttttacc

SEQ ID NO: 150725 - DNA, 1431 bp, Zea Mays
atagcaatttggcgctgatttgatgccggccactttcatcgatcagccatggtggggaaagaagcgctggttcgatgaagctgcataaataaagccagcacgcgaaccagcagcgttcaggggaagaccatttacatatatgcccttgccccggttcctttccccggccccaactccattatttgcttgatccttgacgagcgggagagagagagagaggaagacgagaggcagcgaaggaaacagtagttcttcagttaggcaggagggcacaggaggaggaagatggcgtcgaagaggatccagaaggagctcaaggatcttcagaaggaccctcccacctcgtgcagtgcaggtcctgttggtgaagatatattccactggcaggcaacaataatgggtccatctgatagcccatattctggtggagttttcctagttacaatccattttcctcccgattatcctttcaaaccaccaaaggtattgggcaatgatcattccttatttttgtgcataatttttcctcattatttttgctgcactgaatttgtaaagtagacatatgcgcaagctcatttacttcccaggaacatcactctgagatatgcacttgatatcggcagtgtttggtatcttgacaacgcgtatgagctatgtgcagtagccaatagcttatggatgagatgccatggcactaagtgcacttgctgaaaacacccgagttattttttttgatgaactcattatcacagttttcatgtgcaagcttgaaacttttgaagccagaaattcatctgccttattaccaaacccgtatatcctataaaacgttgtcacattccaatatgcaggtggcattccgcaccaaggtgttccatccaaacatcaacagcaacgggagcatctgccttgacatcctgaaggaccagtggagcccggcgctaaccatctccaaggtgctgctgtccatctgctccctgctgaccgatccgaaccccgacgatcctctggtccccgagatagcgcacatgtacaagacggaccggaacaagtacgagaacaccgcgaggacctggacccagaggtacgccatgtagggagggggtaccctacctggccctttgggggtccgccggaattgccgctgctgcgttgtgttcctggacctggacctggactggagactggacgtgtctccgtgtattcgatcctgtgctgtataatgatgcatcagattgggtttgcagtgcagtgcgccgtgtggtgctgaatgctgtattgtgccgcttggaggctgtaattctgaatgccaaaaaactggtgattggaaccattttgcgttggatgctgctgcagacgaggccatgtttgcgtccgtcgtattggaagaaagggcgatccggagcaggtggtttcattttttttacc

SEQ ID NO: 150726 - DNA, 1056 bp, Zea Mays
atagcaatttggcgctgatttgatgccggccactttcatcgatcagccatggtggggaaagaagcgctggttcgatgaagctgcataaataaagccagcacgcgaaccagcagcgttcaggggaagaccatttacatatatgcccttgccccggttcctttccccggccccaactccattatttgcttgatccttgacgagcgggagagagagagagaggaagacgagaggcagcgaaggaaacagtagttcttcagttaggagggcacaggaggaggaagatggcgtcgaagaggatccagaaggagctcaaggatcttcagaaggaccctcccacctcgtgcagtgcaggtcctgttggtgaagatatattccactggcaggcaacaataatgggtccatctgatagcccatattctggtggagttttcctagttacaatccattttcctcccgattatcctttcaaaccaccaaaggtggcattccgcaccaaggtgttccatccaaacatcaacagcaacgggagcatctgccttgacatcctgaaggaccagtggagcccggcgctaaccatctccaaggtgctgctgtccatctgctccctgctgaccgatccgaaccccgacgatcctctggtccccgagatagcgcacatgtacaagacggaccggaacaagtacgagaacaccgcgaggacctggacccagaggtacgccatgtagggagggggtaccctacctggccctttgggggtccgccggaattgccgctgctgcgttgtgttcctggacctggacctggactggagactggacgtgtctccgtgtattcgatcctgtgctgtataatgatgcatcagattgggtttgcagtgcagtgcgccgtgtggtgctgaatgctgtattgtgccgcttggaggctgtaattctgaatgccaaaaaactggtgattggaaccattttgcgttggatgctgctgcagacgaggccatgtttgcgtccgtcgtattggaagaaagggcgatccggagcaggtggtttcattttttttacc

SEQ ID NO: 150727 - DNA, 834 bp, Zea Mays
atgtggtggatgatgatgagcggcgaggagctggtggtgacgctggcgccggtggccgtgtactgggtgtacgcggggatctacgaggcgctgctggcgcgtaccgcggtgctggacaggtacaggctgcactcgaggcgggacgaggagaccaagaacgtcgcctccaggaaggacgtcgtcaaaggggtgctcctgcagcagggcatccaggtctccatttccgttgccatcctcaagatgaagggacacggtgccgctgctgctgatgccaccgccaccaacgacgatctcgcggcggcggtggctgtggcggaaccgttcctgctggtggcggcggcgcggttcggcgtggcgatgctggtgctggacgcgtggcagtacttcacgcacaggctcatgcactccgtcccgtacatgtaccggcagttccactcgtgccaccaccgcgtggcggcgccctacgcgtacgcggcgcagtacgggcaccctgtggacggcgtgctcacggagacgatgtcgggcgttgcggcgtacctggcctcgggcatgcccccgcgtgtggccacggccttcttcgtcttcgccaccgtcaagggcgtggacgaccactgcggcgtggccgcgccgtggaacccgttccacgtcgtgttccggaacaacaccgtctaccacgacgtgcaccaccagcgcggcggcggccggcacaacttctcccagcccttcttcgtcatctgggaccgtctgctcggcacgcacgcgtcgtacgtcctgagacataggaacgacggcgggctcgaggtcaaggccttcgaggatcgtcggatgcgttaa

SEQ ID NO: 150728 - DNA, 114 bp, Zea Mays
tcattttgccgattggtttgttaaaagggtatgccattcacattccctgttctgtctttccgattcccccactccgcacagtccattctcaccattccctattctgccttttcg

SEQ ID NO: 150729 - DNA, 126 bp, Zea Mays
gatttttcgtttatgtcgctgatttgtccgtccaaatttatttctcatccagttttttcgttggatagctttggtactacaaggccgttataccatggcacgttgttaaaataaaataaaataata

SEQ ID NO: 150730 - DNA, 2380 bp, Zea Mays
acctccttttatagatcaactcagcacagcttctttaattacctggtaagagtattgagtatgcaagtcgatcgatgatagaaagcatgtttgtgaaggatgagtctggaaaaggtgaagaaggcgtcaattctcaggaacagttaaagaaaatgaccattccttccaagcctctaagaacactagaaaagaatttaagagcaagaatgtgcaaatagtaaaaaaagatgaggtccatgctctgcagtaataaaacaagttgaatttgattgacatgatatcactctttcttcatccttttctatataggtagtccctctcttccaaattgtaagtagtttagctttattttaagtcaaacttgtctagctttgaccaagtctatagaaaaatgcacaaatatctacaacaagtaataagattcattagatacacatgaaatatattctgatagtgcatttattaggtattataatattaatatattttttctgacttagtcaaagttaggcaactttaatttaagacaaagctaaaacgacttacaatttgaaacagagggagtagattactccttatgacatgcatcttatttctgcagcgttttcgaaacagcaaacacaatatatagaatagctaatgaaatttctacttgccgcttattctgaaggatccaaggtaacaataataccatgttaattctcatttcatgtgagacatgcaactatcatactattaaggggcagatgccaaagtcagcgtgttactgttcccagaaagaatccagtacattttatactgctcctcgatatggctaatgcaagaaaggcatgttatatacttatctgtagtactttctgcgatgaatgttatcagttcaatataattgctgaaacatgttcgaatgtagcgataaagtgactgttctgaacgtttatcttgattattattattattagtttctatatgaactaaatatattctgttcatctgtattaaaagtgaactccaatgctaaatagatgaacattttctccctcaaaattaacaagagaacatcaaatttcactgattagaagaaaggctgttacatgagttccaaaggagatgcggaaagggcgagaacagcaaatttcactgattagaagaaaggctgttacatgagttccaaaggagatggcgaaagggcttaactcgctcattattctcgttttatgggagaaggttgaagcagcaccttgttgggtggacagtcaaaatgaaacaattagagaaggggatgatcttgcatgggctcatgtggatgatgcaatcggtgcttctagttcacttcaaggtcgcaacttcccaagaagagcccgatatgagtctgtttattcaaggcgttgtcaagctgctgctacacaggaggagagagttatggaagaggaagagcaaggcaatgagggcaatgaacaagatgacgaagagtacatgtctaattatgatgaagaagtggatgactttggtgaatccccacataacagtccaactcaagctggtgctggtggtgaagaaaatgcaatggatgatcttgatttgggagatatttagggtatctagtatctatctagctacaacagcagcttagatctaatggagtttatttcctttcaagtttgaactatattttcttgctatttgttttccaatttgaactatatgactgttatgacttatgagtttatgacttatcacttatgtggctgatttggttcagtttgaggcttcaaatgaggtaagacttgctgtttatttcagtttcgttcaatttcaaacttcaaaagaggtaaaacatcctctttcttcatatataattgatatattgtctatatgaagccattatataggcaaaacagccactatattggcaagtccacgactagtcgactgacttatcgactagtcaccaagtcggtaccttgtcgactcgactcgacttactgacttgaaaaccttgtgtggaagcaccggaattcttgtgtgtttgaaggggctgtctaatatccatacccttcttcagaccatagatgatgaatgcagtttgtggtgtatggctgaagcatcaaagctgaatgaattgctagcaaggtcgttggtccagattacccagtgtttggagtagtttgttcaggtcctggtcatgtatcttcccacccctcccttttttcagtgtgggtgggagtgtgttcggttatttacggcgagttgggcttctttcaaaatccaactcgttttatactctttctatcttaatgaaatgacacgcagctctcctgcttcattcacaaaaaaaaagaattgcagcaagacaaaatgaaaaaaaggctcggctctcaac

SEQ ID NO: 150731 - DNA, 417 bp, Zea Mays
atggcgaaagggcttaactcgctcattattctcgttttatgggagaaggttgaagcagcaccttgttgggtggacagtcaaaatgaaacaattagagaaggggatgatcttgcatgggctcatgtggatgatgcaatcggtgcttctagttcacttcaaggtcgcaacttcccaagaagagcccgatatgagtctgtttattcaaggcgttgtcaagctgctgctacacaggaggagagagttatggaagaggaagagcaaggcaatgagggcaatgaacaagatgacgaagagtacatgtctaattatgatgaagaagtggatgactttggtgaatccccacataacagtccaactcaagctggtgctggtggtgaagaaaatgcaatggatgatcttgatttgggagatatttag

SEQ ID NO: 150732 - DNA, 1062 bp, Zea Mays
gaaagcgcgcctaagtagtcattaaaacacgaactttaaccaaacagcacgggaaccacgcccaaacgaagagaaaagagaagaacctcaatccggaagcgaaaaggaccagaagaaaccagaggcgactccaggttcgtgggcgatgctgcgcgcgggagctaggcagctccttgccccggggctccggcggctcggtctgggcaccggcgccgccggtcaggtgggcccggccgccgcggcggcggggatgagggcgtaccacgagcgggtggtggaccactacaacaacccgcggaacgtcggttccttcgacaaggaggaccccaacgtcggtactgggctggtcggcgcgccggcctgcggcgacgtcatgaagttgcagatccgcgtcgacgaggactccggtaaaatcgtcgacgcctgcttcaagacctttggctgcggctccgccatagcgtcctcgtccgtcgctactgaatgggtgaagggaaaaccaatggatgaagtcttgacaatcaagaatactgagattgcaaagcacttgtcccttccaccagtaaagctccattgcagcatgcttgcggaggatgccattaaagctgctgtgaaagactacgaagccaagaaggcgaagatggggcaaaagagtgaagacagtccatcagagaaagctgctgaagcatgaaagtttctgccttttttaagtgtaattgagctgatatgtttctcagtccatgactccccgctgcttcagataaatgcttctgattgcgaggcgaggcgagggaccgcgtgtaatgttcacaaattctggtagtgcggcatgtgccttaactcttttgaggatggtgacaaccaatttcaaataaatttggtgccatcttagaattagaagtactatgtggatatcacatagtggaagtgttttctgtcaactacataattgaattacggccgtcgttgcacggaggctattttaaaatgttgtattgtatgtggtatggattcgcttacgggcctgaaactgttctattggaatcgataattttatttataggc

SEQ ID NO: 150733 - DNA, 101 bp, Zea Mays
ttatactggttcaggctttcgccctagtccaatgtagtgttgatcgtagtattgctttgaggcgtgctacaataggtgtgtttgtgtccatgagaaggagg

SEQ ID NO: 150734 - DNA, 830 bp, Zea Mays
ctttgagcctacagcaaaggaggacggcaacgtgaacagcaagcagttcacgtttgccaagtgcctataaatagtagccaccctatagcagcaacgagatcaaaacagcagagcttgcaagagctaaaaacgacttcagtccagccatccaacaagaagatcagtctacacataaaaccagagatgtctgggtccaggagctcttcgtctcacaacgttaccattgattccgagtggagcaaaaaggagaacaagctgttcgaggaggccctagcctgctacggcgcgggcacacccgaccgctggcacaaggtggcccgtgccatgggtggcatcaagacagccgacgaggttcgccgccatcacgagatccttaatgaggatgtcacgctcatcgaatccggcagagttccattccccaactacaacacgcagggagcttggaactaaggagtgaaggatgatgtgaagaaccaccagacaggaactactgctacgcatgaaatagatatcttagccattgaagtaaatgtgctgatatattgtgttaagaagtttatgattgctcaggtaataaataagaggagctagagaatacacataagtgtgttatgtgtaaatagctatatataggctgtgagcaaatcatcagttatgctatagaaaccagggaaccctatctgcccatagtgtgtactgtgaagttatagtcccctcccctatggatgaatacttgtatagtaaagtgtggtgtaaaactcttgtaccagtttgttaattataaagttgtgcttggttaaaacttgaaagtaaccgtgctcttctgataa

SEQ ID NO: 150735 - DNA, 3155 bp, Zea Mays
atttggccgccgtttgcgttgcgtgggtaggggaagaagcaggcggccaggcgcagagccgcaaaagcagacgcggaagcagcccaggcccgagccgaagcggggaggcgacgccgctgcactaccactcacccggtcagcgatttgccgccttgcgggagccagttttggcgtcggcgtcggcgtggagttcccggagaggggttctggcgaggatgagcggcagcggcagcggcagcggcggagggggagccagggggcagtcggggcccgtgccggcgtccgcgaggaagctcgtgcaggggctcaaggagatcgtgaaccgtcccgacgcggagatctacgcggcgctgcgggagtgcggcatggaccccgacgaggcggtcagtcggctcctctgccaagatacttttcaagaggtaaagagcaagcgtgataagaaaaaggaggttaaagaaaccctagatccaagatctcgaggagcaagtaactcctgtcgatccagtagaggtggtatggaccgtgctggacgaagcagttcagtccagtctggatccagtggcactgattatgtgacttcaaggtcatccatattgggacctgctgtgccagttaagccaacagttcctagtttgtcaacaaacaaagatgtggtttttaatggatcagttggagcaccacaatcatcatctggttttcagcataattggtttggggtgccaggtcagatgtcaatggctgatatagtgaaaatgggaagacctcaagtgaggtcttctggaaagcctatggctgcagcagacacatcatatgctggtcaaaccccatctttatctagctctgtaaaccagaactcgaaacaatctgctagcacaaccctaccaactacttttgatcagggctttcctgctctcccagaccctattccacatactgtgaattctagtcatggttctgctgggaacaaccatacacatgagaatgattggtttcctcaggatgagcctcaatctggagttcagtccacaggcattgaggcatctggtgaccaatcgctatctgtggcatcactggaccaatctatgttggttgctggtactgcttactcacaagaaaattctcatgcagaagagaacaactcaactgcagttaaagcaacagtgtcttccgaaagacacttggaaattgtggaggaggacaatcattacaacgatgggttattgcagaactgtgcttaccaggctcaagtgcactcctatgttgataatgaagttggggtttctaatgttgatgcagaatcagccgtggcaaactttcagcatttaagcctacagaatgaagatatagttgtaaccaaatctgaagataaccatgcggttatactccctgatcatctacaagctacaaatgcagactgtgctcatctgagctttggtagttttgaatctggtgccttctctggcttgttttcatcaaaggtcacaaaagacagtttggaggacaacgaggtgcatattccagatgaatccccatcagttaatctcgatgccaggaatcaagattactacgacaacgatgctctaaatttgtcagcaaatgaggatgttgagacaagaattggtactaacatggataacattgatggaccttcagtttcacagtctgatgtaccgaggcagggggccatagatgtgcctggtcttcaatatgacatgccatcagttccaagtcatgcatattcaagcacaacgcagccaagtaaaatggaagacccacaaggaaacacacaagcacaacccctttcccatttttctggcttactgcaagcaaatactctacccaattacttgttggggtcaaatcttacccctattcgggagtttgacttctcgcagttacttcagacacagtcagctacaaagtataacccatctgcggcacctaataatctgccagcaatctccatgcaagagactttaaaaccaggaggctttcccaacactcagtctacgcaacatgttcccaatacgagcataccatcgggtcttcctctcccacaacaattgcctgtatactctcagccaactctgcctcttgggccttttaccagcctggttggctatccatatttgcctcagaactactacctaccatctgcggccttccagcaagcgtactcaagtaatgggcctttccatcaatctggtgctcctgctgtgcctggagctggtatgaagtattcgatgccacaatacaagagcagcccacctgcttcgagcctaccacagccatcatcactctctggttatggagggttcggaaatgcaaataatattcctggaaatttcagcctaaatcagggtgctccctctgcgcctacaactttgggatttgatgaagctttaggcacacaattcaaagaccccaatcactatgcagctctacagcagagtgataattcggcaatgtggcttcatggaggcgctggttcaagaacagtttctgcagttccgcctggtaacttctatggtcttcagggccagagccagcagggtggcttccgccaggcacatcagccctctcaatacggtggtcttgggtacccaagcttctaccagtcgcagtcgcaggccagtctgccacaggagcacccccagaacctcaccgagggaagcttgaacaattcccagggcgtaccatcccagccatcgcaccatctctggcagcacagctactaaaccttctgtgctctcttgggagatgcctctctacgctgccaggttatctgcaagccttggcacgctgcgccgtgaagcgaacagactagctgaactgccgtcttgagcggtgctgagcagaggacggtccatccaacagcgatggagtgcttgtttttttccctttctttcccagttgtgttctgaaactaatttaagctgtcgcggtttttatttgatagtgagtggtgttgcaaaggtgctatcttgtaacggtgaagtcctaactcatctaacagatctgcttcccatacccctgtaatatgccattttgttcttgatgcctagaagcttgaagcttctacgtgttgctgctactttcatacgcatgtatgtctatgaagctgaaatcctggtttgcggactgggtgtttggtt

SEQ ID NO: 150736 - DNA, 1010 bp, Zea Mays
cttcatgtgcgcaggtgcgcgccgtgctcgactttccggcttctcctctctcgccaggaaacaaaggccgtgctcgactttccgcattccggcgtcactgcgcgcaagcaatagcagtaggccccttctcctgttctaactgaggggtcgaggacaaagctcctcattgagttctccttcagtggggtttgatgcgaggtgctgccaaggtcatttcctcttgctgtgctccgcctctcgttcagataaagcggtcgggataagtttgtaaattgcttgtcaaatcaggacaagattctgaattaggggaacctaccgcatagtttgctcatcagacaggccgaaggacaatgtcatcgcctaacaattctgtcagcgcggcactgtcagaaacgacccccgtgtttcagttgagagtatggcaactgattgccattgctgtcgggatagtcatggcgatcctgctcgtcattgcgctttgcctttcgctccagaggaaaaagaagacagtgaaagggtttgacaacagttcgctggctgagatccctatcgtttctaaggaaatcaatgttgacagagttggtgctcagagtctacatgacagtgaagcgcccttcatgccagtgcgggataagtatacgcagaccaaaggtgcagggcagttgggagagagtagatccgtcgacgccgataccttcagccagttcagctcagtgtacaacgtagagaagggtgggagctcatactctgaagattacagtcacagcagctctggtccagctaggaaaggtagctcaccatatgcatattcagcatcaccgctggttggcctgcctgagttatcacatctaggctggggccactggtttaccttgagggacctggagtgtgcaacgaatcggtttgcaaagagtaatgttcttggggagggtggctatggagttgtctacaagggtcgtctggtaaatgggaccgagattgccgtgaagaagatccttaataatctgtaa

SEQ ID NO: 150737 - DNA, 2577 bp, Zea Mays
ttcgcgcgcgcacaccacgtacacatagcaccccccatccctttcgttccctaccagcactacgctacgccccccactgccatatagccgtatacgacgctcgcttgcctggccgtcttgatctctcacttcctcgcccccgataagtgagcaagcggcaagaaccagcaggcaaccacacagtcgcagcagcagcagcagcggcggcgcgcccatgtcgtcgggagacttccactaccacgacgagctggcggcgctgttcgcgcagcggccggcgccggcgggagagatgacgatggcgctgcagcaacaggcgccggcggcgtcgtggttcgcggactacctgcacgcgggcgcccccggcatggggatggacatggactacgacctgctgtgccgcgcgctggacctgccggtgccgggggacgaggacggcgtcgtcaagcgcgagctgctgctggtggcggacacgggcgggggaggcggaggcttcgcggcgccgctcacgcccaacacgacgtcgtccatgtcctcctcgtccagcgaggcggcgggcgccgccgccggaggaggaggcggtgggagctttggcgctgcggaggaggaatcgcagtcgctggggaggtgcaagaaggaggacgacggggatggggaggagagcaaggacaaggaggcgatgaagggggaggaggacgacgcggacacgggcaagaaagggtcagcggcggggaagggcaagggcaagggcgagaagcggcagcggcagccgcggatcgcgttcatgaccaagagcgaggtcgaccacctcgaggacggctaccggtggcgcaagtacggccagaaggccgtcaagaacagcccataccccaggagctactaccggtgcacgacgcagaggtgccccgtgaagaagcgggtggagcggtcgcaccaggacccggcggtggtgatcaccacgtacgaaggcaagcacacgcaccccatcccgtccacgctccgtggcagcagcacccacctcctcgccgcgcagctgcaccaccaccaccaccacaacatcgtcggcgccttcccgccgccgccgccacccccgcagacgatgtgcttgccgttcgtcgggcggacaggcgacggcggcggcgtcatcgacatgctgggtctctgcctgcctccgcgcaaccacgccgccgtgccgccggcggcgacaggcctcgcgccgtccccctgctgcatgagcggtccggtgggcacggtggcaggcgcgacgacgacgacggcgcccaccaccaccaccgtcaccacgaccactacctcgtcgcctcctcctcctccctcgctccagacgatgcagcactttatggcgcaggacgacttcgggcttctacaggacatgctgccgtcgtcatcgtcgtcgttgtccttcgtcgtccacagcaacggcagcaacgtccagctgccctgaattcgatcagctaatagtcgtcgtcaccagtcaccaccaccacaagcgatcgagctaatgaggaaggaagctagcagagataagagatgatagtacttagtttggtccttgttaatgcttgacctctctttaatctttcgttttttttttcaccgatctactcccccctagctagatggatcgtatcgatcggttcttggttttcttttcgatcccgctgtgccgcgaccgcgagacacacgtacgccgctgcagtgcagatcgagtcttgtggcgccgggtctcgtaccgttcccttacgatgatctagctagctagcccttgcagtagcaggtagtacgtactagcggctcttgctgtacatgtacctagctaatcaacccccagctcatgcgcgcgtttgcactctgtctgatctgatcatctgatgcagtagtgtggccatgcacgagcctatgataatttatgctagctcctctttgcagtactcctcctgtccatctccattagtacaggacaggacaacactactgcatcatgttcggcagcaagatggtgcactgctagctagctgcaggtgcatggatcgaccgttccgtgtatgtgtctgctagctaatagcctgttgtcatgcgtgatgggactgttcgtgcgtggttggtgcaaagagttgttatggaaaagcactgggcgtcattttgctccttgtcttcttttttttctctcccgtgcatgcatgcactattaatgtggcctggtcaggtcgttccaggagccagtactagtagtaccaccactcatgcatgtagtgatgtgaacctgcctacctagaactagctacaatggccgcgtagtatatgattgattgaacaaggatttggacgggcgggcatatgcacgtacacaacgtaacaagccagtgcgcgcgacgcgccagagatcgaggtcgaccgatcgtgtcacgcacggtcagtgtgctttgccagaattgtcgctgaaattgtgagagaccaagaggtaccagctagagaaacacctggttaatttgaacatggacaaggcgctggaaaatacagatgtttgggggtatttggaccccatattttcccttactggag

SEQ ID NO: 150738 - DNA, 1800 bp, Zea Mays
ccagagtacgtctcaagattagggggcgtcgatcgtcagtttctgtgccttggattctgcttcctattccctttcccttatggcccaatcagccattcattcctcttctgttccttgttccttccttctcctctttgttctcctctttctttttttaatgaggtacagccgcggcaaggcgaaggtgtgaacttgggctagggtttcacactcgcatgccacaagaaaacaaacacggggaaaagtcggtcattggtattgtatagctactatatatatataatctgctagttgcgtcctcctcttctcttcctcttttgctttatggatttcatgctagctcagctacgcctgcctaggctgagcatgcatcttcttccactcgaccaagagatattcctcccctctctgtagggatttgcgcagctacctttctgatgcaaatgcaatctatctatctgacatatggcataatattggtagaaatctgccgcatagcagaaaagggggtgtgcaaacagcagcacacagcggtgtgaacctgtttgaaaccatgtgcttactctagtctagagctgattcgtgcacccagccaacaaccgcgcgtacgtttgaagaggatcccagcaaatcgcgtatagtatcttagtcgatctgaacgaaatccgcagcacttgccgcggacccggctagctggtggacgtacgcacgggaggagctgatgagatcgacgccgacgccgacgccggctctcttgcttgttgcaggtcagcggcggggaagggcaagggcaagggcgagaagcggcagcggcagccgcggatcgcgttcatgaccaagagcgaggtcgaccacctcgaggacggctaccggtggcgcaagtacggccagaaggccgtcaagaacagcccataccccaggtacgtggtacatgcacagcacgtatatacagctatacctactggctactgcacgtatatacagcacctctcttcgatcctactccatgacgtacggtacggtagacattgctgcatgagctaatggtgatggcgtgcaggagctactaccggtgcacgacgcagaggtgccccgtgaagaagcgggtggagcggtcgcaccaggacccggcggtggtgatcaccacgtacgaaggcaagcacacgcaccccatcccgtccacgctccgtggcagcagcacccacctcctcgccgcgcagctgcaccaccaccaccaccacaacatcgtcggcgccttcccgccgccgccgccacccccgcagacgatgtgcttgccgttcgtcgggcggacaggcgacggcggcggcgtcatcgacatgctgggtctctgcctgcctccgcgcaaccacgccgccgtgccgccggcggcgacaggcctcgcgccgtccccctgctgcatgagcggtccggtgggcacggtggcaggcgcgacgacgacgacggcgcccaccaccaccaccgtcaccacgaccactacctcgtcgcctcctcctcctccctcgctccagacgatgcagcactttatggcgcaggacgacttcgggcttctacaggacatgctgccgtcgtcatcgtcgtcgttgtccttcgtcgtccacagcaacggcagcaacgtccagctgccctgaattcgatcagctaatagtcgtcgtcaccagtcaccaccaccacaagcgatcgagctaatgaggaaggaagctagcagagataagagatgatagtacttagtttggtccttgttaatgcttgacctctctttaatctttcgttttttttttc

SEQ ID NO: 150739 - DNA, 1610 bp, Zea Mays
ttcgcgcgcgcacaccacgtacacatagcaccccccatccctttcgttccctaccagcactacgctacgccccccactgccatatagccgtatacgacgctcgcttgcctggccgtcttgatctctcacttcctcgcccccgataagtgagcaagcggcaagaaccagcaggcaaccacacagtcgcagcagcagcagcagcggcggcgcgcccatgtcgtcgggagacttccactaccacgacgagctggcggcgctgttcgcgcagcggccggcgccggcgggagagatgacgatggcgctgcagcaacaggcgccggcggcgtcgtggttcgcggactacctgcacgcgggcgcccccggcatggggatggacatggactacgacctgctgtgccgcgcgctggacctgccggtgccgggggacgaggacggcgtcgtcaagcgcgagctgctgctggtggcggacacgggcgggggaggcggaggcttcgcggcgccgctcacgcccaacacgacgtcgtccatgtcctcctcgtccagcgaggcggcgggcgccgccgccggaggaggaggcggtgggagctttggcgctgcggaggaggaatcgcagtcgctggggaggtgcaagaaggaggacgacggggatggggaggagagcaaggacaaggaggcgatgaagggggaggaggacgacgcggacacgggcaagaaagggtcagcggcggggaagggcaagggcaagggcgagaagcggcagcggcagccgcggatcgcgttcatgaccaagagcgaggtcgaccacctcgaggacggctaccggtggcgcaagtacggccagaaggccgtcaagaacagcccataccccaggagctactaccggtgcacgacgcagaggtgccccgtgaagaagcgggtggagcggtcgcaccaggacccggcggtggtgatcaccacgtacgaaggcaagcacacgcaccccatcccgtccacgctccgtggcagcagcacccacctcctcgccgcgcagctgcaccaccaccaccaccacaacatcgtcggcgccttcccgccgccgccgccacccccgcagacgatgtgcttgccgttcgtcgggcggacaggcgacggcggcggcgtcatcgacatgctgggtctctgcctgcctccgcgcaaccacgccgccgtgccgccggcggcgacaggcctcgcgccgtccccctgctgcatgagcggtccggtgggcacggtggcaggcgcgacgacgacgacggcgcccaccaccaccaccgtcaccacgaccactacctcgtcgcctcctcctcctccctcgctccagacgatgcagcactttatggcgcaggacgacttcgggcttctacaggacatgctgccgtcgtcatcgtcgtcgttgtccttcgtcgtccacagcaacggcagcaacgtccagctgccctgaattcgatcagctaatagtcgtcgtcaccagtcaccaccaccacaagcgatcgagctaatgaggaaggaagctagcagagataagagatgatagtacttagtttggtccttgttaatgcttgacctctctttaatctttcgttttttttttc

SEQ ID NO: 150740 - DNA, 1493 bp, Zea Mays
cttcgcttttaaattcgagaagcaaaaccgcgacctcgccggagaacaatggccaatgcactgccaggccagaaaaccggcgaggtcacggcgacgcagaatccgttcgagttccatgtgtacgggccgcgacacctgtcgtcccccagctggtgggatctcctccgttcgagctggaaggatcccagctaccggcggatggtgatcgcgtgcttcatccagggggtgtacctgctggagctggaccggcaggacaagcgcgacgagcgcaccgcccttgcgccgcagtggtggcgccacttcatgtacaggctctcccagacactcgtcgacgagcgcgacggctccatctacggcgccgtgctcgagtgggaccgccgggccttgctggctggctacgcgccgttccgccccgccggcgccccggccgccgtcgtggcgctccgcggcacgctgctgagcggggccacgttccggcgcgacgtcgtggacgacctccggttcctggcctgggacagcctcaagggctccgtgcggttcgccggcgcgctggccgcgctgcggtccgcggcgcgcaggcacggcacggggaacgtgtgcgtgggcgggcactcgctgggcgccgggttcgcgctccaggtgggcaaggcgctggccaaggaaggcgtgttcgtggagtgccacgtgttcaacccgccgtcggtgtctctggccacgagcctcaggggcttcgcggagacggccggcgagatgtggggctacgtgcgcgcgtggctgccctacgtgggctcggctgcggcggcggacgcgggcggcgaggccaaggaagtgtcgctggggcgcgccgggacggccaagtggttgccgcacctgtatatcaacaccaacgactacatctgctgctactacaccgacactgcggccgggacggcgaccgtgacggccagaggagggagcgggggcagtaaggttgctggaggggacggtggcatcggcaagccggggctggcgaggatgttgacggtgtccaaggggccgaccaagttccttgatgcgcacgggctgcagcagtggtgggctgacgatgtggagctgcaggtcgccctcaaccacagcaaactcatcgaccgccagctcaggtcgctctatgccgcgcagccggcctcgccgcaagtgaaccagtaggctgtgtagctctgtagcagctcacaaaacgctgagaaaaaaacgcaacgctagcatgatgctgttgatggattggactccgctgcgtgatggtccgctgagcgcacggatgatgagcgttccaaacatttcggatttgaaacagttgtgggcttgtggcaaatttaaaaaattcaaaaagtgaatttcaaaataatacgactccgctggggatcgaaacccagaatctctggttccgtagaccagcgccttatccattgggctacggagtcatttttgttttgaattgttaaccagattttatgtcc

SEQ ID NO: 150741 - DNA, 1167 bp, Zea Mays
accagcccagcccatacagcctttctcccctctttccccactggctggttcctctgtcctgtcctgccggccgacgaacctcacccttgtggcacggacggcaccgccgcgatgtcgttgccgtcagcgaccgcaccgtcctcttcgggcgcgacgcagcccttgccaacggagcagcagggagtctcgagggagcggcggatggagtcgctgggttggctgacggagtcggcggtgatgccgaagaagcacaaggccatcgagggcgtcggcgccgcctccatcctcgacctcaaggcacagctctaccgcacccaggaagaggcccgaaaccccatcgcccccagcgccgtcgcggccgctgcttctggtggggagtttcgccgcgcaaagatacgctccgcacccaccgaccccctcggggccaagaactccggcgttgaatcccgggcgcacaaggataagctggagcttaaagccgtgaaagacggttcagaaagctatgctgctctggaaaagaaagcagagttgtatgaaaagttatccagaggtgaactacctgatgaagaagacaaggaaaaatactgtgtggatttcttccaaaaaggtttcgatcgggtttatgagcctcagataccagaatgtagccacagagccactgatggtgcggaaccggtaaacgatcgtgaagattctatgcctaatgccaaaccattgggccttggccgagcaggcactacaatcgacagagatgaacacaagcgctttgtgagggaagttcacgaggaagtaactgaggcaaggcagaaggcctcaacagtaagatctcgacgacaagagcaggatgctgctcgtagagagaaactcaggcaagcttacctgaagaaacgattggagaagttgattgctgaaaaacaggcctcttcaaccagtgattgacctacccagctagctagtatatttccttgcatgttctatcaggctaccagctgtagcctgtagtagtccatggtctcatgcaaccatggaacggttactgtaaatgtcttctgatccagtacagtcgaattcaggaaatagcgtttgcatgtacaggtggtgttgcagaatattgttgtacacaattctaggcaatggcatcatgattttctgagacattcgctagac

SEQ ID NO: 150742 - DNA, 1148 bp, Zea Mays
cttcgtgtccccatataccctagaaatccaaaatgtcacaggtgaaccacacgtgcactggctgcacagttctgtgaccgtaaatttccatggacatgtattcacactgaggttaattcttcatacatacaacagagcagaaaacaaataaataaataaattgccggtctgttcaaaacatcgaggtgcacatccgggcctacgacaaaatcacgttgatcaatatgctccttgaaaggatagccgatcccgcaatgtatcgaaaatggaggcggcagcactgctctgtgcaagtgtaatctttaggcggccaaatagctcatcactatctttagcttgtgaggctgcatcttgggcctccttcgccatgcccatccgagcatatgcctacacaaacaatcacaacgttgttactgctccctcgtgcctcgcgcccaccgctgcccctggccgcggccgccgcgccattggtctccgcgaggctaagcataagcggcggggtgcgccccgttcggaggtggcggcggcgctacgccgctcggctgtcggtgtcctccgtggcgaccgagacgccgaggagcagcagtcgtcgccgtccggggaggagcggttcgactggctggacaagtggtacccgctggcgcccgtgtgcgacctcgacccgcacgtgccgcacggcaagacggtgctggggctcagcatcgtggactggtacgaccgtggcgccggcgaggggcgcgtcttcgacgacgcctgcctgcactgcctagcgtcgctctccgagggccggatcgacgacagggggcgcctccagtgcgtataccacgactggtgtttcgacggtgccggcacctgcaagttcatcccccaggcaccgcccctcggcccaccgatgcacacgagcagcagggcgtgtgtggcgtcatacccctgcgtggtgcagaacaacatcctgtggttctaccagagggctgaccctagagtacagggacgtgctgcaaaggaagcgcccgccgctcattccggaaattgacgacccggacttcgtcaccgtgtatggcatcagagaccttccttacgggtatgatattttggttgagaatctcatggaccctgctcatgccccgtatgcacacaaggggatcatg

SEQ ID NO: 150743 - DNA, 873 bp, Zea Mays
gcgagaattacggcccattagggttcacttccaaactcggcatctataaacacttctctcacgccccgccgccgcctccgctcgccaccgtcgtctaagttaggctagggttcgaccagctagcggaaatggtggccttcaggttccatcagtaccaggtggtggggcgcgcgctgccgacgcccggcgatgagcaccccaagatctaccgcatgaagctctgggccaccaacgaggtccgcgccaagagcaagttctggtacttcttgaggaagttgaagaaggttaagaagagcaacggccaggtcctggccatcaacgagatctttgagcgtaacccgacgacaatcaagaactacggcatctggctgcgctaccagagcagaaccggctaccacaacatgtacaaggagtaccgcgacacaaccctgaatggcgctgtggagcagatgtacaacgagatggcctctcgccaccgcgtgaggtccccctgcatccagatcatcaagactgcgacggtgcacttcaagctctgcaagagggacaacactaagcagttccacaacagtgagatcaagttcccgctcgtgcaccgcaaggtcaggccgccgaccaggaagctgaggaccacgttcaaggcttcgaggcccaacctgttcatgtgatttagctgtggtcagtgtatgcgatcataagagtcacaagtgtttctgtttttttttaagttttgacttcctaatagtaatacttaatcggtttgatgattcaactcgttttgaagcgagcttggtgaaccaatcgacgtgttgcgggttgttcgctctcggcatacttgaagtggtaatgttgatctattcggattccttacctcaa

SEQ ID NO: 150744 - DNA, 746 bp, Zea Mays
ttttttttagatttaggaacaaaacttgaacttggtgtccattcttccttggcacatgcagattggaccgcagattgtgagatccaatccaatccaatccaacaaccgaatccaatccaatccaatcagagaaaaagaaagacggcgaaaggctcgtgtctgtgtggcaccacatcttgccatcagggaaaatggggctgtcaatctcgtacccaccggacgactacctgccagcagtggaggacgacatggggcggctgttcatccggtctctcagcttcgacgacatggaggccgccgccgattcgccttcgtattcgccttcggcattgccccccgcctttggctccaggaagctgatcatggagggctccctgggcttcttcgaaagaagagaagctgacagcgtccagatgcagaacgtgttgtccatcaggaatcctaaacctcctgatagagaagcctgcagcagcgtcagtcccggtcatgaaaacttgcataactccattgacgaagctatcatgttgaaggtattgatcaagatcatatcaagaaatcagaacaagttatgttatacttatataggatatgtaccacttccatgcgcacctgtggtgggagatcgagatccagtgtggcctcaaccaccccaacgttccacgatgaagaacgagtcgtcctcatcctcgagcacgcggcccttggcgagatcaataagatccttcacgccactggccgctcagtaa

SEQ ID NO: 150745 - DNA, 124 bp, Zea Mays
caaacagccgaacgagattgctcgatgtggagttgtattttatttagaaaggagtttaatttttaaacttttagagaagacgttggattttggaggcaaggtctgtttcttgattcttggtcaa

SEQ ID NO: 150746 - DNA, 973 bp, Zea Mays
atcaacaaacaaacaaacaacgcgcaattccctagttctctcgtgaccgccttccctcctctcctgcgtcccaactgggcaattccccaaacctaactaacctttgccaccgcgggagccaccatgggtggccagatgccggacgccgacgggaaggcccgctcggcggactcctcgtcctcttacgggtacccgccgtcggcgccgccgcagcaccagtacggcacctttggtcccccatccggagcctccggggagtttccgcagccggcggtcgggttcccccagccggcggcgccgcctgggatgcagcactacccgcagcctcctccggcgtcgtatgccgtctacccacccccgcagcaaccctactcggccgccgcgccgtactacgcccaaggctaccagatcgctcaaggttatattcctgttgttgaaggaaggcctgttagaatccgtcctcttccatgttgtggccttggcatggggtggtttctgtttataattgggttcttctttgctgccattccatggtatcttggagcttttgtgctgatttgtgtccgagtacgtgattacagggagaaaccaggatatgttgcttgcactattgctgcctcgcttgctgcaattgctgtgctgcttggcgccacaaaaggagcggaggtgtggtgagcattatgccttcaattaccagcagtccggttaatgtaaatgtccgttgctcggctactttgttacctgtgttgtacatgtgttgtgcgtacaaaggatagggtgtaacgaaaatgatgtatgctcctatttgtagttggacatatacatttgacaaacggagtagcatgaatgcacaccctcattaatcatttgatgtaaaatttactggaatgccaccatgttatggtagtctggtcgacaatatatccatgagtaccgttgagaccttttcgtacttttgacatgggatgatggg

SEQ ID NO: 150747 - DNA, 2972 bp, Zea Mays
cccccttccacccgccgatcgccctccgctcgctccaccgcggcgggcgatcgctcatctccccctaacctcccccgctcgcgattcccgaggcgaggtgccacccaccgcagatttcttccgacggacggttggctcgctcaccccctacttcgctgatcggatcgcgtgctgcccgaggtggaactttataattttgttgcgtgttttcataatgaaattagggaatgcctatggtggaaaaaatgtagaggtgatgataaggcatagttgtttgacttagcctgccttagctatttcttgaagctaagggaaataataattggtgttatggcatttagaaatatggtttgcactccccaagtcattaatcttacatcagactcagagagagggcaagctcaaggaggcaatggtagtgagatatctgagcaaggtgcacaacatgctgtcagagttgtaggaaatgcaatgaacattggtctctctggtgtgcgaagttactatgatatgagcataaatcatcaccatcagtctgttcataacccacccccgaatttaggtgttgattctggttttgtcttcgcatcaaatatgtacaatccctgcatgtcatcaacatcaatgaacagacatgtttctcatgctcagagctttggatcagggaatcaagtgttgcctcaaaaccaagtcccaggaactatggatgagagtagcagaaatgacagtattggtgaaagtgctagagagcatattaaaaggaaaaatgctgcagttgctggaagctatcattttgttaatggatttgcaagctcaagctcatcttctcatgcacctcaaaatcctatgcttgggccttgggacccttcttttgaatcaactgtttcttctaatgttgcaccattcaacccatcagaatatcatggacacaacaacagttggccgtccttagaaggatcttccataacaggaagtaatggattcaactcaatggttgttcatccagactcagtacagcgtgggaactatacatttccacccactcatattagccattcatggatgtcccatgctacaaatggtattgctgatggagttccccagtgggaatatgccaatgcaactgctaatattcaaggcagatttgcccattcaggagccacagaaatcgcaaatgttggttttcatgaatatcagaatggcccttcaactatttgtcggggaccagtaccttatttccaccagcatgcgatgcatggcatgcaagctcttgatcctactcaaatgcaagttccttatcaacaatgccacagtaatggtttcttgcatggtggtattaattaccctggaaaccgtctccaattaggtccacgaaatccagttctcttcaccagttctgaacgtgcttttgggcctccacagcatccgttcctggcaaatccagttaaccaccgcaacataaggattctaccacccgagcagcatgctacaataatggatttttcgagattgtatgaagtgtcaaatactgtagatgagcatagagatatgcgtctagatatagacagcatgacgtatgaggagcttttagcattagaagagcagattggagatgtcaatactggtctgacaaaaagtcacattgtagataaattgaggactagcctatatgttccaggaatatcgagcatgtctgatcagccatctaaatcttctctagagaatgatgcttgcataatatgccaggaggagtaccaggctagagactgcgttggcacccttgactgcggtcacaggtaccacgcggagtgcgtgaagcagtggctgatggtgaagaacttgtgccccatctgcaagacgacagcattgtctgccaacagaagacaaggacagtgagcgggaatggagaagcctgttggttatttgctttgacaaacgttcagctcaattttgtatataaagaagtggtagacaatggcgctacctgtatttgttgttcactttgttgtgactgggagtactcagcttcctgaaactgtacagccataacatttgttatttttcttcaaatgtagaatgttttaaatcgctcagttcgcccccaatgtgtatgataactgataaggcgaaccaaggagacggagcttccgaaatggcatctctaggcagccttgtaactattagctttgatgaaactagtcgcacatggatcgtcctgtacattttttaggagttgacggcatcacaattgctcgttatcattatcagcgcggccagtggataaagttttctgcagtccaatgttgggttttcaaaattccaggagcgggtatattgcgcactcttgctccaagctgtcaaaacatgccaatgtttacatccaaatcagtggaaatacaatcgaggacaggattgcaagtcagcgaaacatcatggcgccctctccgaaccacgttgtcaatgtcgagtgccaatcacccgtaaccacttgacgatgtcaagaaagattgtcatcacgttttgtgttccttaaaccagtagagcgtatgcttgaccagggctaagacgaaaaggtagttggaaaaaagaaagagaaacgaaaagctaggccgagcagcacccgcccgcgttcacgggcgagacctctcgtccttggcggcgtcgacgtcgatggtcttgcctctggacggcgcggcggggtcgtccccgatgtcgagcgcgttccggctcacgacgtggtagatctggcggagcacctcggcgaaggcgcgctctacgttggtggcgtccagcgccgacgtctccatggagaaggtgccgtggcgctgggcgaaggccgcggcgtcctcgggtgacacggcgcgcaggtggcgcaggtcggccttgttgcccaccagcatgaccacgatgttggcgtccgtgtggtcccgcagccagcgctccgcgttgtcgaaggtgacgcggcggggcac

SEQ ID NO: 150748 - DNA, 2485 bp, Zea Mays
cccccttccacccgccgatcgccctccgctcgctccaccgcggcgggcgatcgctcatctccccctaacctcccccgctcgcgattcccgaggcgaggtgccacccaccgcagatttcttccgacggacggttggctcgctcaccccctacttcgctgatcggatcgcgtgctgcccgagggaatcaagtgttgcctcaaaaccaagtcccaggaactatggatgagagtagcagaaatgacagtattggtgaaagtgctagagagcatattaaaaggaaaaatgctgcagttgctggaagctatcattttgttaatggatttgcaagctcaagctcatcttctcatgcacctcaaaatcctatgcttgggccttgggacccttcttttgaatcaactgtttcttctaatgttgcaccattcaacccatcagaatatcatggacacaacaacagttggccgtccttagaaggatcttccataacaggaagtaatggattcaactcaatggttgttcatccagactcagtacagcgtgggaactatacatttccacccactcatattagccattcatggatgtcccatgctacaaatggtattgctgatggagttccccagtgggaatatgccaatgcaactgctaatattcaaggcagatttgcccattcaggagccacagaaatcgcaaatgttggttttcatgaatatcagaatggcccttcaactatttgtcggggaccagtaccttatttccaccagcatgcgatgcatggcatgcaagctcttgatcctactcaaatgcaagttccttatcaacaatgccacagtaatggtttcttgcatggtggtattaattaccctggaaaccgtctccaattaggtccacgaaatccagttctcttcaccagttctgaacgtgcttttgggcctccacagcatccgttcctggcaaatccagttaaccaccgcaacataaggattctaccacccgagcatgctacaataatggatttttcgagattgtatgaagtgtcaaatactgtagatgagcatagagatatgcgtctagatatagacagcatgacgtatgaggagcttttagcattagaagagcagattggagatgtcaatactggtctgacaaaaagtcacattgtagataaattgaggactagcctatatgttccaggaatatcgagcatgtctgatcagccatctaaatcttctctagagaatgatgcttgcataatatgccaggaggagtaccaggctagagactgcgttggcacccttgactgcggtcacaggtaccacgcggagtgcgtgaagcagtggctgatggtgaagaacttgtgccccatctgcaagacgacagcattgtctgccaacagaagacaaggacagtgagcgggaatggagaagcctgttggttatttgctttgacaaacgttcagctcaattttgtatataaagaagtggtagacaatggcgctacctgtatttgttgttcactttgttgtgactgggagtactcagcttcctgaaactgtacagccataacatttgttatttttcttcaaatgtagaatgttttaaatcgctcagttcgcccccaatgtgtatgataactgataaggcgaaccaaggagacggagcttccgaaatggcatctctaggcagccttgtaactattagctttgatgaaactagtcgcacatggatcgtcctgtacattttttaggagttgacggcatcacaattgctcgttatcattatcagcgcggccagtggataaagttttctgcagtccaatgttgggttttcaaaattccaggagcgggtatattgcgcactcttgctccaagctgtcaaaacatgccaatgtttacatccaaatcagtggaaatacaatcgaggacaggattgcaagtcagcgaaacatcatggcgccctctccgaaccacgttgtcaatgtcgagtgccaatcacccgtaaccacttgacgatgtcaagaaagattgtcatcacgttttgtgttccttaaaccagtagagcgtatgcttgaccagggctaagacgaaaaggtagttggaaaaaagaaagagaaacgaaaagctaggccgagcagcacccgcccgcgttcacgggcgagacctctcgtccttggcggcgtcgacgtcgatggtcttgcctctggacggcgcggcggggtcgtccccgatgtcgagcgcgttccggctcacgacgtggtagatctggcggagcacctcggcgaaggcgcgctctacgttggtggcgtccagcgccgacgtctccatggagaaggtgccgtggcgctgggcgaaggccgcggcgtcctcgggtgacacggcgcgcaggtggcgcaggtcggccttgttgcccaccagcatgaccacgatgttggcgtccgtgtggtcccgcagccagcgctccgcgttgtcgaaggtgacgcggcggggcac

SEQ ID NO: 150749 - DNA, 3036 bp, Zea Mays
tcctctctcctctttctcccctttcgcctctctcttcttctaccaccactcttctgctcgctaaaaaaagcttctcgagcttataaatacgttccccttccccccggcgccaagttcctccccccgatccgcttcccccttccacccgccgatcgccctccgctcgctccaccgcggcgggcgatcgctcatctccccctaacctcccccgctcgcgattcccgaggcgaggtgccacccaccgcagatttcttccgacggacggttggctcgctcaccccctacttcgctgatcggatcgcgtgctgcccgaggtagaggtgatgataaggcatagttgtttgacttagcctgccttagctatttcttgaagctaagggaaataataattggtgttatggcatttagaaatatggtttgcactccccaagtcattaatcttacatcagactcagagagagggcaagctcaaggaggcaatggtagtgagatatctgagcaaggtgcacaacatgctgtcagagttgtaggaaatgcaatgaacattggtctctctggtgtgcgaagttactatgatatgagcataaatcatcaccatcagtctgttcataacccacccccgaatttaggtgttgattctggttttgtcttcgcatcaaatatgtacaatccctgcatgtcatcaacatcaatgaacagacatgtttctcatgctcagagctttggatcagggaatcaagtgttgcctcaaaaccaagtcccaggaactatggatgagagtagcagaaatgacagtattggtgaaagtgctagagagcatattaaaaggaaaaatgctgcagttgctggaagctatcattttgttaatggatttgcaagctcaagctcatcttctcatgcacctcaaaatcctatgcttgggccttgggacccttcttttgaatcaactgtttcttctaatgttgcaccattcaacccatcagaatatcatggacacaacaacagttggccgtccttagaaggatcttccataacaggaagtaatggattcaactcaatggttgttcatccagactcagtacagcgtgggaactatacatttccacccactcatattagccattcatggatgtcccatgctacaaatggtattgctgatggagttccccagtgggaatatgccaatgcaactgctaatattcaaggcagatttgcccattcaggagccacagaaatcgcaaatgttggttttcatgaatatcagaatggcccttcaactatttgtcggggaccagtaccttatttccaccagcatgcgatgcatggcatgcaagctcttgatcctactcaaatgcaagttccttatcaacaatgccacagtaatggtttcttgcatggtggtattaattaccctggaaaccgtctccaattaggtccacgaaatccagttctcttcaccagttctgaacgtgcttttgggcctccacagcatccgttcctggcaaatccagttaaccaccgcaacataaggattctaccacccgagcatgctacaataatggatttttcgagattgtatgaagtgtcaaatactgtagatgagcatagagatatgcgtctagatatagacagcatgacgtatgaggagcttttagcattagaagagcagattggagatgtcaatactggtctgacaaaaagtcacattgtagataaattgaggactagcctatatgttccaggaatatcgagcatgtctgatcagccatctaaatcttctctagagaatgatgcttgcataatatgccaggaggagtaccaggctagagactgcgttggcacccttgactgcggtcacaggtaccacgcggagtgcgtgaagcagtggctgatggtgaagaacttgtgccccatctgcaagacgacagcattgtctgccaacagaagacaaggacagtgagcgggaatggagaagcctgttggttatttgctttgacaaacgttcagctcaattttgtatataaagaagtggtagacaatggcgctacctgtatttgttgttcactttgttgtgactgggagtactcagcttcctgaaactgtacagccataacatttgttatttttcttcaaatgtagaatgttttaaatcgctcagttcgcccccaatgtgtatgataactgataaggcgaaccaaggagacggagcttccgaaatggcatctctaggcagccttgtaactattagctttgatgaaactagtcgcacatggatcgtcctgtacattttttaggagttgacggcatcacaattgctcgttatcattatcagcgcggccagtggataaagttttctgcagtccaatgttgggttttcaaaattccaggagcgggtatattgcgcactcttgctccaagctgtcaaaacatgccaatgtttacatccaaatcagtggaaatacaatcgaggacaggattgcaagtcagcgaaacatcatggcgccctctccgaaccacgttgtcaatgtcgagtgccaatcacccgtaaccacttgacgatgtcaagaaagattgtcatcacgttttgtgttccttaaaccagtagagcgtatgcttgaccagggctaagacgaaaaggtagttggaaaaaagaaagagaaacgaaaagctaggccgagcagcacccgcccgcgttcacgggcgagacctctcgtccttggcggcgtcgacgtcgatggtcttgcctctggacggcgcggcggggtcgtccccgatgtcgagcgcgttccggctcacgacgtggtagatctggcggagcacctcggcgaaggcgcgctctacgttggtggcgtccagcgccgacgtctccatggagaaggtgccgtggcgctgggcgaaggccgcggcgtcctcgggtgacacggcgcgcaggtggcgcaggtcggccttgttgcccaccagcatgaccacgatgttggcgtccgtgtggtcccgcagccagcgctccgcgttgtcgaaggtgacgcggcggggcac

SEQ ID NO: 150750 - DNA, 694 bp, Zea Mays
aaaacgatacgcaccagagcctcttgctcctcgttagggatggcaatgggtcgggttcggatcgggtatggtaaatatccgcccgcgacaatacccgcgggcattactcatacccgcccgcgactatacccgcgggtaggattttgtacccgtgcccgtacccatcgggtatcgggcgggtatcggatacccgtggatataattacaatccacacaaataaaacacatgattcacaaacaaatgacaaggtagaaaaaacaaaacataattaatctaattactgttacagaagcaaacaaaaaacacatggttagctttgctcagtacctgtgctcggcttgatgcctactacagtactggctgggcaggacgccgcccgacccacctccttgagcttctcgctcagcttcacgttcctgctctgcatgatgaccgagccatcgacgagagaggaccgtcctaggccttctgcaccaacaaggagacacagcggcggcgggtggcgtccacggccaccggcaccgtggccagcacaacgcgccccaggaagcccaagcggtggagggacaaggaagcagcagcacaggagcgacgagcatggatgtggcgagttattgcgcggccgagggggagggggacattgcgattgccgccatggttgctttccttctttcttccttgatttcgacggag

SEQ ID NO: 150751 - DNA, 489 bp, Zea Mays
atgactgctatggtacaagttctagaaaaaaataacatcgaaacaattacatacctgtttcaatctgatggatatggatcacatgcaataactcattggacagcatttctcgtatctgaccccctacttcgagttccctgtgcccagctgttactggtgcagcacgaagaagttgggctaatcatcccaggtgcacaagtcttggtcaacaagaaggacgccgccacggcgctgtacgcgctctgcagcggcgcacgcgagaaccggcagcgcgccgtggagaccggcgacgtgcggcccctgctggacctcatggccgacccggagtccggcatggtggacaaagccgcgtacgtcctccactccatggtgacctccggcagaaaccgcgccgccgccgtcgaggaaggcggcatccccgtcctggtcgagatggtggaggtcggcacctcacgccagaaggagatcgccaccctctccctcctgtag

SEQ ID NO: 150752 - DNA, 422 bp, Zea Mays
tccaacaagtaatttatttaacagaaatgtcatctaacaagtaaatttgaagttcaaattttgataaaagaagtggtatatgattcaagcaatctgattctacgactacataagcaaatcatcacaatgaaaagttgatcccacaacgacggtttatgtcacttcgtaggcttctgtagtactgctgctgatctgcatccattccgctaatgcccactttcattactcttcctctaggctctagcattctcttcatatgcatacatttttgttcatttgcaatccttgtgcgctctatctcagtctctccttctcaatttctagtgattcgttgaatctttcttcttcagttctttgtctacatcagcttgtttctttttctcccacaaattgtccaatgcctcaatgtaaccatcagcacc

SEQ ID NO: 150753 - DNA, 89 bp, Zea Mays
ttatatatttgtctcatggatgatatattttagaatttactgcatatacaactgttgtgctcgccggataaaaaatttgaacgaataaa

SEQ ID NO: 150754 - DNA, 1436 bp, Zea Mays
aaccatcacccgcccacacggagcacgctccacgccccgcgcggaaaagacggagagagaacaaaaaagttaggggggggaagaggagactcggcggcccgaacgacaagcgctgacgcacgtacgtcggcaagtaatgtaccaggccatcccctacagcagcgcccggccgtggctgatgccggcgggcgaggcggccgccgtcgtcgccgtgaagccggagcctgagccggcggcggcggcgaccgtcgcggaggagcgcgcccgggccgacgccgcgggcgggacggacgacgacggcgacggcggcagggcggaggtcgggagggccgtggcggagagcccggtgctggtggtggggcggcgcgggtgctgcctgagccacgtggtgaagcggctgctgcaggggctcggggtgaacccggccgtgcacgaggtcgcggacgaggccgcgctcgccggggtcgtcccggccggcgcggaggccgccgccgccgcgctgcccgcggtgttcgtgggcgggaagctcctcggcgggctcgaccggctcatggccgtccacatctccggcgagctcgtgcccatcctcaagaaggccggtgccctctggctctaattttaaatctgtcaggcaggcgtatctcttccttcttcgttttcccttttctcccccttccggaaaacgattggcgtcgtggtttggccgttggaccgagttaagattacatcacgccgccaccgccgctgatggatgcgttggaatagggctttgatctctctctctctgttttttttttcatttgctttattaggggaaacagaagaagaagaaaaaaaaggaatgatgagaattctaatcacataatttagtctagctttatctggtgggtagcgtgtggtgatgactgctcgcttcgcgtcgcgcttcgtccatcatgtacagtcgtttccgtttcagattctagtgaggaatgagctgtccagtttcccattctcccgtggcctggaccatttgcgtacatcacctgatatgtatgtatactactgctgcgttcattgccgcccgtatatatacggcatttgtcctgtactactcgactggctcgatccaccgccggttgctgatgaggtggtatggtacaggtgtactacgtcactggcttttgatgcgatcagatggcacgtcaaggctgcacctacctttgctcctcgagctttttgctcccccattctgatgagtaaaattcaaagcctggttactttactggtgccagaaatggaaaacgatgcaattaaaagaagaaacatatcttgtgcaccaattatatttaggtacaaccgtacaagcaatcaatcttgtgcatgtaatcgaaatctaatggaaactgctattttatatttaaccacaatttaaaacctactagtattttatattt

SEQ ID NO: 150755 - DNA, 207 bp, Zea Mays
atggtggaggtgctctcatgcatcaaggactcggaactggctgaccaacacaagcaacatactgtggagaaagaaaccaaggaccttgaggcaacttttgaagctatgtatctcgatgatgagcaacaattatcacctgggagcaagagaaagaatcaagaaggaagcaaagatgagcaagagggaagaaggaaggaaaaagcttga

SEQ ID NO: 150756 - DNA, 915 bp, Zea Mays
atgaaaaggttgacagccactaacctggccgcttttgacggacctgctgagagtacaacgaaatcgcataacgcgacgcatgtgccggcgccgaagcggatggctgatcaagcagatataagtctttgtggtagatgctatgtaaataataactaccggccgggcttgtctcctgctaacttcaagagagttgaaattactgaagatgcaaaaccagattggacagacaaagaaactcttcacttgcttgaggctgtcttgcattatggggaagactggaaaaaggtgtctgaacatgttagcagtcggtcagaaaaagattgtattgcaagatttataaggctaccttttggagaacagttcatgggacacaaggaggatagaatgaggtttgagaatactgatgacaacactgatgagcctggagcaaatgtctcaaaacgactatgtctcactccactagcagatgcaagcaatccgattatggctcagtctcatcccctcgactgtgcagttgcaacaagcggaattgataacacaataaaggcaactgaagagtatggagatgttgatgtcttcgttgccaacttgaggcccctcaaggccactctgtctggactacctgatcgtgtattgatgaagattcttgtgtgcgctacgtcaaacaaagttgtaggagtgcacatgtgtggtgatgatgcacctgagataattcagctatggacaccagatgcaaatgctacatctatggttgctggaccagaacttgatgtattaagtgccatagagaataaccagcggttgtactgccttttgattttttggaacgagttcggatgcgagagttttcagaaagtttcgagtgtaaccagagctgatttactatcgctggagttactgaggtacttgtattga

SEQ ID NO: 150757 - DNA, 2467 bp, Zea Mays
cccaaaaaacgggcttcgtgccgggctcgcgggcctcgtgcttattggacatctatgctctactcccccttttgctgcgctcgtcagcgtcggcgcagcacacgctgcgcgccggctcctccctctccgtggaagaccacgcgcggccttccttgtgtcccccgacgccaccttctcttgcggcttcctggaggccggcaacaacgccttctccttctccgtctggtacagcgacgcagcgaacaagaccgccgtctggacggcaaaccccgacgcgcccgtgaacggcagggggtccaggatctcgttccgtcacgacgggagcctggctctctcgggcgccaacgggatcgggacgacggtgtgggagagcaaaaccagcggcgctggtctctccgtctccctcctcgacaccggaaacctcgtcatctcggatgatccatcgtcgagcggtggcggccgcaccctgtggcaaagcttcgactggccggtggacacgctggtcccgtcgcagcggcttaccaaggacaccacgctggtgtccaggtacttcatcctctactacgacaacgacaacgtgctgcggctccgctacgacggccccgacgcatcgagcatctactggccgaatacggactacgccgtcttcccgaacggccggacatcctacaacagctcgagggtcgccgtcctcgacgacgccggcgtcttcctgtccagcgacaacctgcaagtcgtcgcctccgacctgggagtccccggaatcaagagacggctgaccatcgatccggacggcgacctgaggatctacagtctggagtctggacccatcgacggggggttggacagtgacgtgggcggctatggcgcaggcgtgctccactcacgggctgtgcggccggaacgccatctgcgtgtacttgccgagcctcaggtgcttgtgcgcgccggggcaccagatggtcgaccagcacgactggcgacaaggctgcaagcccatgttcagcgtcaccaccaactgcagccaagcggcgctgccggagcagaggtttaagttcgtcgaggtaccgcacaccgacttctacggccacgacatggcgtacaacaactcggttacgtttgagtactgcaagaaactgtgcttggagatgtgctcgtgcgccgccttctcctaccggccgttcgaagggcatggcaaatgctaccgaaaaggctccctcttcagcggctacacgtctccagacttcataggcaacatctacctcaaagtgccaatcggtttcgatccctcggctcggtcagtgtccgcacgtagctcccaaggccttgcttgcgatcctgacggccccgagatcgtccaaggaacgccggacacgttccaatggtcgtacctgttcgcgttcgccggagtgctgggagttctcgatcttatcttcattgctacaggctggtggtttctctccagcaagcagagcatacccagttcgctagaggaggcaggctacaggatggtgaggggccaattcaggaggttcacgtaccgggaactcaaggacgcgacggggaacttcaaggaagagctcggccggggcggctccggcgtcgtctaccgcggcgtgctcgacaaagggaaagtggtggccgtgaagaagctgacgaacgtggcggggggcgacgacgagttctgggcggaaatgacgttgatcggacggatcaaccatatcaacctcgtcaggacctgggggttctgctcccagggcaagcacaagctgctggtgtacgagtacatggagaacgagtcgctggacaggcacctgttcggcacggcggacaggacgctaccatggcgcgagcggtacaggatcgcgctgggcacggccaggggcctagcctaccttcaccacgagtgcctcgagtgggtcatccactgcgacgtgaagccggagaacatcctgctgacgcgggagttcgacgccaagatcgccgacttcgggctggccaagctctagggacgacggcgccggcgacagcgacggcatgcggctgtcgcgcatgagggacgacggggtacatggcgccggagtgggcgctgaatgtccccatcaacgccaaggtggacgtgtacagctatggcattgtgctgctggagatggtcgtggggtgcagggtgtgtgaccagaccacggcgggcggggagcgcctggagatatcgcagatcgcccaggccttgagacaggtggtggcttccggcgacgtcgttccattggtggacggtaggttgcaggggcagtttaatccccgacaggccctgcaaatggtgcggatttccttatcgtgtatggaggacagggccaaccggccgacaatggacgacgttgccaaggatctcacagcctgcgacgacgaggacgagcatcccgcgtacaagtagagccatatactgttaggatcagaactagtgagccga

SEQ ID NO: 150758 - DNA, 697 bp, Zea Mays
cttttgcgcggcctgtcattcccctggggatcagccttggcgttgcctcatatgggggcgagctgaggagcaaagcggacaacaagaggctttcgatcgatctccctccctatctctctctctctgctatcccttcccctgcttccctcccccctagcttttagtagaaagaggagggccgggacgtggtgacaaggctaggctagcttggggccggcggagatcgatcgtcgtcgtcgacggccatgacatggtgcaacagcttcaacgacgtgcgtgccgtggaggacaacctggccaccgccgccgccgccaagaaacagcagctgcaggcctcctcccacgtcaacctcatcaggacctgcccctcctgcggacaccgcgcgcagtatgacgaacaggtgcagcaggcggcggcgatccaggacctgccggggctgccggcgggcgtgaagttcgatccgacggaccaggagctgctggagcacctggaggggaaggcgaggccggacacccgcaagctgcacccgctcgtcgacgagttcatccccaccatcgagggcgagaacggcatctgctacacgcatccggagagacttcctggtcagtagctagccacgccaacaaagttttttttgagtgctgctgaattacatcatctatcaaaaggaaaaaaaaaagagaaaagaatagctcc

SEQ ID NO: 150759 - DNA, 2734 bp, Zea Mays
gcgtaggcgtgcgatcctcatcacttcctcagaacggagaccctgctgtcctggaaccccgctgttgaggtctgggctcagaccattccagcccacgcatcctcctcggcattccgtcgaacacctctcttaccaccgcccccatgccgccggccaactccacgccgcccaaatggccgaagaccctcaccgcagaccacctccaccgcctggttcgggccgaacgggaccctcgccgcgcccttgcgatcttcgacggtgccaccgccgccgcttccacttcggcgccagaccccatcaccccgtctctggccaccgtctctctccttacctctcgcctcgcctccgccggccacctccccctcgccacctccctcctctcccgctcacgcggggtcttcccctccgttgccgctctcgagcctcccttcctcggcctcctccgcgccttctcccgcacgcaccgcccgctcgccgctctccacctcttccgctccgccccctccgacctcgcgctcccccactctgctcgctcctacaacgccgtcctcgccgctctcgtcgcgcactcgcacctccccctggcccgctccctactcgccgacatgcgcgccgccggattcgcccccaccgctgccacgtacaacgtcctcctcaaggcccactgctccgacgccgccgctcacatcgaagatgctctccgtcttttccggaacatccccaaacccgatgtatgctcctacaacaccatcatcgacgggctctgccgccgcggccgcctggcggaggccctcgacatgttctctgagatggttgggaaatgcattgcacctaccgtcgttacttacaccactgttatccattggcttgcaagggagggctgctttgatgatgccttaaagatatttcatgaaatggggaggagaggggtctcgcctaatctggtcacttatagttcactgattgatggactgtgcaagggtggacgtgccacatcggcattagaattgctggatagaatgatcaaggagaagaaactgccaaatatgatcacatatagctcggtgattgatggactctgtaaggagcacatgctgagtgaggcaatggagatcttggaccggatgcgactacaggggaggaagcctgatgctgggttgtttgggaagctaattgttgggctatgtgatgcaggaagggctgtggaagctgcaaattacctggatgagatggttcttgccggtattgaaccaaaccgggtgacttggagcttgcatgccaggataaacaataccgtgctgacagcattatgtgataagggtgaacttggcagggcttttcaggtctaccagagcacaaggactcgtagtatttctaccgacccaaccactttccatcttcttgttgagagcttctccaaaaataacatagagaaagctgcccgtgttgtgcttgacatgctgtcggagagatgcatccctgagagggagacatgggatgttattatcagtgggtactggagtaagaaaaaggtgaggcaagaagccaaggaaatctgggaccatataacagttagttgattttagaatttggctctatgttgtgttattacctggcgtcgcctagcgcgggagcttactcgtcaggaaccagggcggacaaaaaattgaagacactattattgtgaagagagtgtggagccaatgctgtgacgagtggtagggaagctaacaaacagcatgcttccaatgattccaattcctactggcaatgctgtgagtagttgctttgtatcctcggatggtgttggatagaagcaagacaccacgtgttggtcaaacagtgcgattgctacaaaaatcatagctgaaacaatggcatgcacaaagtctagaaaccgcatcctgaatcctgctgccccaagtggatcaagaggagccccaccatcaatgacccacaatcccctgggtgtggcgaacccaaatcggaccttcccttcctcatccctgaaactgtctgtgaagctgagaacgcagcaggacaacgcacagagcaccacaaggcctcctgtcatcatccggttcatgtcactgcagtggccttgctttgccagggtgggagccaggatctggaaagaaaggacagtgccagaaggaaggagtttggcgaggtgggcagtgctctggtatgtttggcctattgccttttgcatggggctcatgttgttgtttccatcagctctgttcgtcaagagaggacgtctctcgttgtgctgcaactcagcgtcgaggtgtgtagcaaccattgttgctggcctcattggtttttttcaccctaacaaagttcacgagtcggggatttaagcagaagatgggtgtttctgccgatggaaggggagggatctgaaggggggtaagctgtagtcgtttgctgtttactgccattttagatgccccgtcaataaaaataggatcaaaactgacacaagctgggagttacatttttaggtttttggcgagacaaacatgtgagagttttggtgttgcagtttctcttttgcgttccagctgttttaatgcacgttcgggtaacagcgggaacactaactagtagtgcttatgtaaaccgtacggttacagtgtagccgtcggaaaattcataattgtggcctgtggctttatttttcttctatggggataattggacatgccaagaaccaggagatggcttgcta

SEQ ID NO: 150760 - DNA, 246 bp, Zea Mays
atggccaggaggaaccgccggctgcctctgctgcaagtgccgcagagggtgttgttgttgggctccaatgacgatgacacacctaatgaggacatggaagaggaaggggacggacaggacatgtaccgcgctgcggagcacggctcactccgtgctgtgtggtcggaacttggaaccacgccttggcccataggcacccacgccactcccgatgtcttcgtccttattgcttccaaggtctactag

SEQ ID NO: 150761 - DNA, 2244 bp, Zea Mays
gctctcggcgctataggcagctcacggacttggcggttttacattggggggctgcctgcaactgcaagtgcatagccgccctccactcctccctctctttccccgccgcttcctcctcccgcctcggattcccacccccagctccggctcctcacctcacggcaccaacccaaaactctagcccgcgcatggcgtcccccgcgcgccccgctgccgcctccgtctccggcgccttcggcctgcccccggacgcgcgctgctcctacgatcagcccctgccccgccgccgcgagggcttgcaggacgggaggctggtgcggacgttcgtggccgcctacggccagccgccgccgccgcagcagcagcagcagcagcaggacggtttcttgtaccccaaggacgccgtggtggcggccgtggaggagtgcacgcggaagcaggccgacgcactgctgcactcgctcggcgccatcgggggcaggctctcccagctcgagctctactgctacaagctcgagaggtccatcggggagctgcgcagcgacgtcatggactaccacagcgacagcaacgccaacttcaaatgcatcgacaggaacctcagacagatctacattttgggttgccaggtccacaaatcgctccagcttcttcaggatagacaagacttagccgaaactgcaaaagaactcagcaagcttcagatagcacacgaggcgccttctcagacgaagggtgaggccgccggtttccccatgctcgcggcaagggaaaacggccacagcacgcgagccccaaaacacgaggtcgcccttttgccgcttcaccaggtcaatgggacgatgcactcccctgccgtgcccgtgcaggtccagaccagcaacggcttcgttctgcagcacctggtgcccgtcgctttgagcacgcagcagcatgagcagcagcagctgaaccaggctcccgtgttctacgtgcaaagccgggaccgtgctaaatgcaccgagggcaaggcggcgttggagcctctggttcaggttgtgcagccgcttgcgcacagccctgatgccgtggtgcaagtcgagctgcctcagaaagctagtcaagcagcagcagctgaactgtaccctcagcctcagactcagagtcacaggctgcagacgcctacccagcaggttgatctgcatacatggcatccccagcagcccatggtgcaagtgcaacagcagcagtacagtatccaacaagtttcacgacatatggtggtggctcagcagccgtcctcgtctcctcagtctcagctgagcgctccacaagccacacccttgtttcctccattcagttccgtgaaaccttcgagttgtaacacggagacaattacaagaagaatggctgggcagcctccatactcttcatcacagcagcaataccagcagcagcagcatgaagttgcccattcattctatggccaaggcaacacagtattgcttcctgtagcagatcataacgctcagcatcagcaaccgcaaccagtgcagctacacagccagggcccctcctgtccacctcagccaggcaagcccagtcactgcagcgccgcaccctatgctgttcaaggaaacggccagacctacagctccgcatacaagaacccttctaactgccctgcaactgcagccgttgtagctcttctgcctcagcctcctgccatcgcctgtatggcgtaccatcccttgggaccacaggtcgtgcacaaccatccatttggaaatactatggttgaaacgtccaggtccagcgtggtagggtacccacgggatcagtttgagatgctcccggcgattactgccgcccaacctgtactaccggttgataagctcaatgctggcagcaatgtaacatcgtcccctagggaatggtcagcatagcggtggacggtgcgcggtcttgcatttcactgcttccacacagcattctactatacgtattgcagctgggagctcgtcgggtctattttatctggctcttttttcccccatcagccagcagattagaacggatccttctacctttttcagctgaaggtcggtatggaataagataagtaggttggctgagtgatcactggtcgctgttggcatatgccctcacttttaatgggcatatgtgcttgtaaccaggtgcgagcttatattatatgcctttcttatatgagtacatgacgggtttacatcagcttgtcagatg

SEQ ID NO: 150762 - DNA, 1640 bp, Zea Mays
gacgccccgctgtcccgggctcccggccgcttgtttgttgtttacttctattttttttgcccgtcagccccaccgcaaccgacgcctccagtcctactcctccacccagctcgccgcttcaggaatccggagagctcgcgtcgcgcgtgcgtgggcgtgggtgcgtgcggcggcgaagcaccagcaccaccctctcgcgtcgcgcgcgcgcgcgcgtctcgatggccgacggcgagccttccctcacgcgctggaccttcgaggatttcgtggtccactacgaggcgcgcttcggcctccggcgcgaggccgacggcgacgacgcacccccgccgcgcggatccgatcatggggccagccgccccgccactgcccgcgccaacggcggcgcggacctcgccgtcttcgagcagttcgagcggatggagaggaaggtggagataagcaatggagcaatagaggatggtccactgcagaaatctctacttccttcatttgaatctgcagaaatgcgcaacttagctgagacattgttaagggatataattcgtggaagtccagatgttaaatgggaaagcataaaaggtctggagaatgcaaagcgtcttctcaaagaagcagttgtaatgccaattaaatatcccaaatacttcacaggtctattatcaccttggaaaggcatattactgtttggtccacctggaacaggaaagacaatgctagctaaagctgtggctactgagtgcaaaacaacttttttcaatatttctgcctcgtcgattgtaagcaagtggcgcggtgactcggagaaactagtgaaagtgttattcgaacttgcaaggcatcatgcaccatctactattttccttgatgagattgatgctatcattagtcaacgtggtgaagctcgtagtgaacatgaagctagccggcgattgaaaactgagctattaatacagatggatgggttgactaagacagatgagcttgtttttgttctagcagcaacaaatttaccatgggaattggatgcagcaatgctgcgtcggctggagaagcgtattcttgttccattgccagagccggatgctagacatgctatgtttgaagagctcctgccatatacacctggcacaatggagattccctatgatgttcttgtggagaaaactgaagggtattctggctctgatattcgcctggtatgcaaggaagcagcaatgcagcccctaagacgggtaatggcagttcttgaaggcaggaaagaagaggtccctgagggtgagttgcctgaagttggcccagtaactacagaagatattgaacttgctttgaggaatacaagaccgtctgcacatcttcatgcacatagatacgaaaagttcaaccaagattatggcagtcatgtacatggctaaaggggagaagcttgttgtagggtttaatttgtatgctcatgcgtgggccaataggtgactactgaattcatcgacatgctgaggtatccttgtaaacactatgcttatccttgtatgctgtacactatcattcatttgatgagcaataagctgtttggtaactcagtctcacctggataaggagaaactacgattttccctgcatttggctcgatttatcta

SEQ ID NO: 150763 - DNA, 1601 bp, Zea Mays
gacgccccgctgtcccgggctcccggccgcttgtttgttgtttacttctattttttttgcccgtcagccccaccgcaaccgacgcctccagtcctactcctccacccagctcgccgcttcaggaatccggagagctcgcgtcgcgcgtgcgtgggcgtgggtgcgtgcggcggcgaagcaccagcaccaccctctcgcgtcgcgcgcgcgcgcgcgtctcgatggccgacggcgagccttccctcacgcgctggaccttcgaggtgactggctggcctctccgtgcgctctccctgtactcctccctctcgtgttcagtaccgctcccccagcacgtgcctgagctgagatctcgcggcgcgatcggttggcctcccgcaggatttcgtggtccactacgaggcgcgcttcggcctccggcgcgaggccgacggcgacgacgcacccccgccgcgcggatccgatcatggggccagccgccccgccactgcccgcgccaacggcggcgcggacctcgccgtcttcgagcagttcgagcggatggagaggaaggtggagataagcaatggagcaatagaggatggtccactgcagaaatctctacttccttcatttgaatctgcagaaatgcgcaacttagctgagacattgttaagggatataattcgtggaagtccagatgttaaatgggaaagcataaaaggtctggagaatgcaaagcgtcttctcaaagaagcagttgtaatgccaattaaatatcccaaatacttcacaggtctattatcaccttggaaaggcatattactgtttggtccacctggaacaggaaagacaatgctagctaaagctgtggctactgagtgcaaaacaacttttttcaatatttctgcctcgtcgattgtaagcaagtggcgcggtgactcggagaaactagtgaaagtgttattcgaacttgcaaggcatcatgcaccatctactattttccttgatgagattgatgctatcattagtcaacgtggtgaagctcgtagtgaacatgaagctagccggcgattgaaaactgagctattaatacagatggatgggttgactaagacagatgagcttgtttttgttctagcagcaacaaatttaccatgggaattggatgcagcaatgctgcgtcggctggagaagcgtattcttgttccattgccagagccggatgctagacatgctatgtttgaagagctcctgccatatacacctggcacaatggagattccctatgatgttcttgtggagaaaactgaagggtattctggctctgatattcgcctggtatgcaaggaagcagcaatgcagcccctaagacgggtaatggcagttcttgaaggcaggaaagaagaggtccctgagggtgagttgcctgaagttggcccagtaactacagaagatattgaacttgctttgaggaatacaagaccgtctgcacatcttcatgcacatagatacgaaaagttcaaccaagattatggcagtcatgtacatggctaaaggtgagctggaatgaccaagagtgactgtgtctttgatttctgggttgttctttgaactactcc

SEQ ID NO: 150764 - DNA, 927 bp, Zea Mays
atggcgctcctttccatcctcgaccgcggtttcctcgccactgcgctccatctctctcgccctttccggatcactgcccctgccctctctctcgcttcctcttctcccaagatcccatcgctgagagcacgcaagcacaagcagggggcccttccatccatggctcgccccgcagaggcagggggcccttccaacgatggagcacctcgccccgcactggcagggggcccttccatccatgagagcaccgaggagccgtggagccgcgcccgaggaggaccgccgaggccgggcggccgggcacgcgccgcgccgggatgcacgggtgttggggccagaccgcgcccgcccctgcgccggatccgaggccgaggccgcgcccttgcctggaggaccgccgaggagccagtcgtggagccgcgcccgaggaggactgccgaggccgggcggccgggcacgcaccgcgccgggatgcacgggtgctggggccagaccgcgcctgcccctgcgccggatctgaggccgaggccgcgcccttgcctggaggatcgccgaggagccagtcgtggagccgcgcccgaggaggaccgccgagatcgtcgacgtctcaaaccacctcgattggcgacggcgacgccccctgccgtgtggatccgatcatggggcggccgccctgccactgcccgctccaacggcggcgcggacctcgccgtcttcgagcagttcgagcggatgattcagtctgttgcaagatatgtaagtatacacactggtcttagtattgtctatgcatggagtcagggtgtcaatcatgctataatacgtcataaccagcctgaagtttgggcattttgcttgggaaatggctatgctggattgaaggatgctcttggttcaaatgattccagacttcaaagaatttgctaa

SEQ ID NO: 150765 - DNA, 1083 bp, Zea Mays
gtacaatacaaacatatcttggctgacttggatttgtagtatgtatttggattaataatgtcttctgttagaagggctagctattttctgtcccttccattgttttcaagtcatccgattaatcgcgattaatcgtccaagtcgttttggaccagtcgtgattaattgcccaagtcgtccgacaaatcgtgattaatcgcccaagtcggtcagccagaacgatcaacaagtcgttcgacctgaaaacaatggtcccttctctttggtgtccattgaagtgttagaactagtcaaatacactgttctagtgtttatgatcacagtgaacacttatattagcttgtgctgttgcaggttaggtttctgacaaagatttatcatcccaacatcgacaagcttggtaggatatgcctcgacattctcaaggacaaatggagcccagcacttcagattcgaacagttcttttgagtatacaggctctactgagtgcgccaaatccagacgaccctctttcggataacattgcaaagcactggaaagccaatgaagtagaagctgtcgaaacagctaaggagtggactcgcctgtatgcgagcggtgcatgagaacgcagtgatgttcttgatgtaataacccatcatacttcagtcctcatctattgccatttgcttgataaaaaataggctggagatatttgccatggaatgaagtctctacatgactatcactctgaattgtttggttgtacacctgtggtcggttccctttaccttggggcacctttgacaaatcagtatctgtggtagaacttgctgatactgtaatatatttgttacttcatgtagaagagcttctcaactgtccatattgttgaaactgaagcttggttgcacctttttttctttgcccgtcgactgtcatcggagaatgcaaattgccaaaactaatgtgcacctggtcagctttgctgcgaggtgctttcctacgaagtgatcacagggtcgttttatcacaatacttaagcagctttacaggaatttgtattgttgcagtacatttttgacagtcataatcaggtggaa

SEQ ID NO: 150766 - DNA, 1192 bp, Zea Mays
ccggagcaagttatgcgctggtcacgggcgctgtagccagcagggatagcagcggctgcatgttctgtcttgctgaccagctcacctcccgttcttcctatcttttccctccctcaatccatctttttgctgacctttttttgtcatggagaccaggatacccagaaggtcagaatcgcagtgtctcattgcataggcgataccttgaaaaccatggtggaactcacttttatctggcttagtggactattatgttcagctcattatgtgtgttgtagcaatcaccacatgaccacaatacctttgcttgtactggggatatttgtgacacctaattggtttccttgtaagttgtaatcatacttagttactgacaatgttactttcacttattgattggtcaggtggagtttttaagcttgaactctttttacctgaggaatatccaatggctgccccaaaggttaggtttctgacaaagatttatcatcccaacatcgacaagcttggtaggatatgcctcgacattctcaaggacaaatggagcccagcacttcagattcgaacagttcttttgagtatacaggctctactgagtgcgccaaatccagacgaccctctttcggataacattgcaaagcactggaaagccaatgaagtagaagctgtcgaaacagctaaggagtggactcgcctgtatgcgagcggtgcatgagaacgcagtgatgttcttgatgtaataacccatcatacttcagtcctcatctattgccatttgcttgataaaaaataggctggagatatttgccatggaatgaagtctctacatgactatcactctgaattgtttggttgtacacctgtggtcggttccctttaccttggggcacctttgacaaatcagtatctgtggtagaacttgctgatactgtaatatatttgttacttcatgtagaagagcttctcaactgtccatattgttgaaactgaagcttggttgcacctttttttctttgcccgtcgactgtcatcggagaatgcaaattgccaaaactaatgtgcacctggtcagctttgctgcgaggtgctttcctacgaagtgatcacagggtcgttttatcacaatacttaagcagctttacaggaatttgtattgttgcagtacatttttgacagtcataatcaggtggaa

SEQ ID NO: 150767 - DNA, 1108 bp, Zea Mays
cccaagcaaagcagcaggtagaccgctgcagcaaaaccgcgccccaccgctttcccgttccccaccccgaccgactgctccccctcccccgcaccagcctcaagccctcaaggcctcaaggcatcgccggcgccgcaacttcgctgaggaagcccgcacccctgcccggatccgatggccaacagcaacctcccgcggcggatcatcaaggagactcagcggctgctcagcgagccagcaccggggatcagcgcgtcgccctcggaggagaacatgcgctacttcaacgttatgatccttgggccggcgcagtcgccctatgaaggtggagtttttaagcttgaactctttttacctgaggaatatccaatggctgccccaaaggttaggtttctgacaaagatttatcatcccaacatcgacaagcttggtaggatatgcctcgacattctcaaggacaaatggagcccagcacttcagattcgaacagttcttttgagtatacaggctctactgagtgcgccaaatccagacgaccctctttcggataacattgcaaagcactggaaagccaatgaagtagaagctgtcgaaacaggagtggactcgcctgtatgcgagcggtgcatgagaacgcagtgatgttcttgatgtaataacccatcatacttcagtcctcatctattgccatttgcttgataaaaaataggctggagatatttgccatggaatgaagtctctacatgactatcactctgaattgtttggttgtacacctgtggtcggttccctttaccttggggcacctttgacaaatcagtatctgtggtagaacttgctgatactgtaatatatttgttacttcatgtagaagagcttctcaactgtccatattgttgaaactgaagcttggttgcacctttttttctttgcccgtcgactgtcatcggagaatgcaaattgccaaaactaatgtgcacctggtcagctttgctgcgaggtgctttcctacgaagtgatcacagggtcgttttatcacaatacttaagcagctttacaggaatttgtattgttgcagtacatttttgacagtcataatcaggtggaa

SEQ ID NO: 150768 - DNA, 1154 bp, Zea Mays
agcacaataagttgaggtaacgtgacagggccgagataaaacccaagcaaagcagcaggtagaccgctgcagcaaaaccgcgccccaccgctttcccgttccccaccccgaccgactgctccccctcccccgcaccagcctcaagccctcaaggcctcaaggcatcgccggcgccgcaacttcgctgaggaagcccgcacccctgcccggatccgatggccaacagcaacctcccgcggcggatcatcaaggagactcagcggctgctcagcgagccagcaccggggatcagcgcgtcgccctcggaggagaacatgcgctacttcaacgttatgatccttgggccggcgcagtcgccctatgaaggtggagtttttaagcttgaactctttttacctgaggaatatccaatggctgccccaaaggttaggtttctgacaaagatttatcatcccaacatcgacaagcttggtaggatatgcctcgacattctcaaggacaaatggagcccagcacttcagattcgaacagttcttttgagtatacaggctctactgagtgcgccaaatccagacgaccctctttcggataacattgcaaagcactggaaagccaatgaagtagaagctgtcgaaacagctaaggagtggactcgcctgtatgcgagcggtgcatgagaacgcagtgatgttcttgatgtaataacccatcatacttcagtcctcatctattgccatttgcttgataaaaaataggctggagatatttgccatggaatgaagtctctacatgactatcactctgaattgtttggttgtacacctgtggtcggttccctttaccttggggcacctttgacaaatcagtatctgtggtagaacttgctgatactgtaatatatttgttacttcatgtagaagagcttctcaactgtccatattgttgaaactgaagcttggttgcacctttttttctttgcccgtcgactgtcatcggagaatgcaaattgccaaaactaatgtgcacctggtcagctttgctgcgaggtgctttcctacgaagtgatcacagggtcgttttatcacaatacttaagcagctttacaggaatttgtattgttgcagtacatttttgacagtcataatcaggtggaa

SEQ ID NO: 150769 - DNA, 1147 bp, Zea Mays
agcacaataagttgaggtaacgtgacagggccgagataaaacccaagcaaagcagcaggtagaccgctgcagcaaaaccgcgccccaccgctttcccgttccccaccccgaccgactgctccccctcccccgcaccagcctcaagccctcaaggcctcaaggcatcgccggcgccgcaacttcgctgaggaagcccgcacccctgcccggatccgatggccaacagcaacctcccgcggcggatcatcaaggagactcagcggctgctcagcgagccagcaccggggatcagcgcgtcgccctcggaggagaacatgcgctacttcaacgttatgatccttgggccggcgcagtcgccctatgaaggtggagtttttaagcttgaactctttttacctgaggaatatccaatggctgccccaaaggttaggtttctgacaaagatttatcatcccaacatcgacaagcttggtaggatatgcctcgacattctcaaggacaaatggagcccagcacttcagattcgaacagttcttttgaggctctactgagtgcgccaaatccagacgaccctctttcggataacattgcaaagcactggaaagccaatgaagtagaagctgtcgaaacagctaaggagtggactcgcctgtatgcgagcggtgcatgagaacgcagtgatgttcttgatgtaataacccatcatacttcagtcctcatctattgccatttgcttgataaaaaataggctggagatatttgccatggaatgaagtctctacatgactatcactctgaattgtttggttgtacacctgtggtcggttccctttaccttggggcacctttgacaaatcagtatctgtggtagaacttgctgatactgtaatatatttgttacttcatgtagaagagcttctcaactgtccatattgttgaaactgaagcttggttgcacctttttttctttgcccgtcgactgtcatcggagaatgcaaattgccaaaactaatgtgcacctggtcagctttgctgcgaggtgctttcctacgaagtgatcacagggtcgttttatcacaatacttaagcagctttacaggaatttgtattgttgcagtacatttttgacagtcataatcaggtggaa

SEQ ID NO: 150770 - DNA, 1038 bp, Zea Mays
agcacaataagttgaggtaacgtgacagggccgagataaaacccaagcaaagcagcaggtagaccgctgcagcaaaaccgcgccccaccgctttcccgttccccaccccgaccgactgctccccctcccccgcaccagcctcaagccctcaaggcctcaaggcatcgccggcgccgcaacttcgctgaggaagcccgcacccctgcccggatccgatggccaacagcaacctcccgcggcggatcatcaaggagactcagcggctgctcagcgagccagcaccggggatcagcgcgtcgccctcggaggagaacatgcgctacttcaacgttatgatccttgggccggcgcagtcgccctatgaaggtgcaggcttctgattcggatttttttatgcgctgttcgtgctgtgtggtgtggtgactagagtggtaatattggagtgcttccagatatcgatagtcgagtcgaatcaattcttttcaaaagatgccactggaaatggcagaaatgctgaaatgtttgctctagtttatgcgcacataggtaagcttgtatagtttggtcggctggtgacttttggcttgtcaattttagtttttgggcggtattatggctgatgagtctcagcttctatttgcagaattctgttagctatgttgaagggcaggtaatttgagtaatgtttgcactagtatagtatgtgatagttattactagttttgttttatgtgtgctgtttttctgcatatttgtgtagggaacaaaagtcattttttatttcctagattatagttttctgtagactgtagcttctttggatgaattggtaataatatattttgttccttccgtgatctattagttcttatccatgtatgctgtgatgatctccatactctgatttgtttaagtagtaatatagcagattcacttgctaacctctttttcggaggcaaggactaaggaagtcactagtatgcaccttgggaaatgggttagttgatctcgattctaaaatggtagtgaatgaatgaa

SEQ ID NO: 150771 - DNA, 1602 bp, Zea Mays
gagtcgacgatctcccgttcagccgtcccagttccggatcactctctcggctgccactggtccgctccccgcgtctgcggcttccactctccgctcttcgctcctcctcccgccaagatatttccggagaatttgagagccccctcctggtcatgtcgctgctcgccgtcgcctcctccacccgcgccgcggcagtgcggccgctgtgcgcctcggcggcctcggacgaggcggtgccggcgcctgctgtggcggataccgcagggcggaggccggtgaaggtgatcctaccaaagaagaaaccgcagaagtggtcgacggggatggcaccgggtgagtacggcggtgggccggccaccatcaagccgcgcaagtactggtgggggaaggaggaccgcgaccccgtggggaacaccgacgacttcatctggaacaaggacttcctcccccacatggaacgcgtcatcgccaacggcggcgccgatgcagaacccaccatcacccgccttgcgccggtggatgaggagggggagtccgggtttctgagcatcaaccgcgcaatgagccttgacagcgtggaggttgatctgagccaggagcttcaggcgccgaccaggccaatcttgcaaacccaggttgaggctgcctggagaggacgggcaattggtgctgaggctgtgaatggagccagcgctcctagatggaggctagtccctactcgcagggagcaggcaaagtgggacagagcggccaaggcagccactggtggaagtgatgttatactaagggagtcaaagtcaagagtgcagcaaggagaccctaaggtattggcagctcggtccagagaagactacttacagctgaaacaaagattacagtggttcactttaggcattggtggcgttggtgtaatctctgcttatatttcatacactcctgaaattgctgtcagctttggtgcagggttgattggatcattggtgtatctccgcatgcttggaaccagtatagattccctagcaggtggaactggagaaactgtcaagagtgctgctgcacaaccaaggttgcttattccagtggtacttgtgatgatgtataacagatggaatcagatattagttccggattatggtttcatgcagcttgagttaataccaatgcttgttgggttttttacctataagattgctacattcgctcaagcaatccaggattctatacctccagtcggaaatcgtgaaggttgaaaagtgtcatgttgtatataaacgaaggtggtagccatggtccctggtcagtggtcacccagatagtaaggtatgtatagaagaatctggtctggtgtcatcgccaagtagatgagatgctcgttgaggacgccatttgaaaatctcgagtgcttaactatgttctgcacaaatattttgacgaaaggtgatgttaccacattcattccatattacacgcagatcatcagtgtataaatttacggctccgaacttttaccacaacgattaattgacaaaacaattgtatgattgaattcacatttagcactggatgcaaattatgcagtctgcaagtacactcatttaaagc

SEQ ID NO: 150772 - DNA, 2165 bp, Zea Mays
cggccccctccacttcctctgtccttcgccctcctgtcctttcaaaccccacggcggtgcagagcgcatcgccgagcccccgcccacccgacagcctcacctcgaattcttctccagcagttcgttgccctcctccttccccttccctcctcgacaggtgtccggcggcttggatctatgcggacccggcatctgtattttacctcattggtaaagagttcgttccggttctccttttcccattttcgtttccgcgagcaatcgattccatatctgtgttctgacatggattcatccacttttttcgcattgagctcgtccccgatcttcgttgcattttcctttttttctttttgcaggggatggaggtgcaggtgctggatttgtcttccgattccgagggcgaggtgtcggcgcactcgcccgatcacaagcgcccctctcagcagccgggtgtagaccccaatcgccgggttggcgacaatggttccagcgccgtggacagcctcttcgaggaagcgggcgcggcgaggccaccgcgtcaccccagcgacgcgctgaacaaagggaaggagaaggtcgtcgatgtggagagcgtggagtctccaaagcacggtggggaatcgctcggtgctgctggccgcgtcctgggagctgggagtgatccgtggagcgcactggtgagcaagtgcaaggctggggacagtgggaataatggaactgagtgttgggatagttggggtgactggggtgatcagcttactaactcggcccccgtggcgcgtctagggtcagagaggacggggtttcatgagacatatgaactgcgagggacgcctcagcttcacagtgactcttcagcattcagtgaccagtggaagggtattctgggtgcaagccctgctgatcctgtcaactcactgtggtgctccagggatactagcatgaaagatagtgaggatgaaaccttgtctcaaaggtctgtgtctgttcgtgaaatttctagctgtgattattttcttaccgaagatagtagctcgtcatggctgtcgaaggtcaaggggctgaacttcccacttcctgatgagcatcagttgagaaccaggcagattgagaatgatgagatgtttgcccgtagacttcaggagcagctcaatcagcaacagccaggatctcagcattctgaagcggttgataaaacaatagcctggacattacatgagcaagatgctgagcatgccagatttgctgcaagagaagtccagtctagttctagggacagatcaatggcacacctatattcttatggacgtcactcacctgttcaaagttttgcttcttgggcatcaaatcatactccaatttcaatgtcaagcagaggcggcttgcaaagaaactccaactgccctcaagcggagcaacgcaatatgcttatctctcagttaaccagaggatgcttcagagaagacatggatctacaaacgagattgggctgtactggactcactttctgaagcatttaggaactgcgaggacacgcactctccagattcggatgatgatgattacgaggaccaaatagcgctcggcgtcgacagccagcaaagaggcgcctctgatgatcagataaacagcctgccactatcagtaatcgagggtgaaggtcgttccgatgaaccctgcaatatatgcttggactgccctgctgctggtgattcactccggcgtttgccatgcatgcacaagtttcacaaagagtgcattgacaggtggctcgggatgaagatatggtgtccggtttgcaagtcaaatgtgttctcccagtaggccgtgagcatctcttatactttttggagcagcatcgaagctagattatagttggctgatacgaggcattgttacggctgcagtgtgtacattgcgttcttgacttgtgctctcttctgctccgtggggagcatttgaatgctctttttccgcggagagtttttttggctgtgagagaaggcacggaaaacctcattctgctattctcatttcttgtatacgtgtatgtaggctgacatgcatacaactacctagcgtacgtcagtcttgggcggtgccatgggggtatgaagcgctgagatgggacttgcaccctgaccttgggttgccgaaggccg

SEQ ID NO: 150773 - DNA, 2303 bp, Zea Mays
accagccaccaaaaccacctgctgctcgacctttttcgagatcctggtgggcccggagcaccctccgccttccacggccccctccacttcctctgtccttcgccctcctgtcctttcaaaccccacggcggtgcagagcgcatcgccgagcccccgcccacccgacagcctcacctcgaattcttctccagcagttcgttgccctcctccttccccttccctcctcgacaggtgtccggcggcttggatctatgcggacccggcatctgtattttacctcattggggatggaggtgcaggtgctggatttgtcttccgattccgagggcgaggtgtcggcgcactcgcccgatcacaagcgcccctctcagcagccgggtgtagaccccaatcgccgggttggcgacaatggttccagcgccgtggacagcctcttcgaggaagcgggcgcggcgaggccaccgcgtcaccccagcgacgcgctgaacaaagggaaggagaaggtcgtcgatgtggagagcgtggagtctccaaagcacggtggggaatcgctcggtgctgctggccgcgtcctgggagctgggagtgatccgtggagcgcactggtgagcaagtgcaaggctggggacagtgggaataatggaactgagtgttgggatagttggggtgactggggtgatcagcttactaactcggcccccgtggcgcgtctagggtcagagaggacggggtttcatgagacatatgaactgcgagggacgcctcagcttcacagtgactcttcagcattcagtgaccagtggaagggtattctgggtgcaagccctgctgatcctgtcaactcactgtggtgctccagggatactagcatgaaagatagtgaggatgaaaccttgtctcaaaggtctgtgtctgttcgtgaaatttctagctgtgattattttcttaccgaagatagtagctcgtcatggctgtcgaaggtcaaggggctgaacttcccacttcctgatgagcatcagttgagaaccaggcagattgagaatgatgagatgtttgcccgtagacttcaggagcagctcaatcagcaacagccaggatctcagcattctgaagcggttgataaaacaatagcctggacattacatgagcaagatgctgagcatgccagatttgctgcaagagaagtccagtctagttctgtaagttgtcacgtggcgaggatagtttatcgtttgtgaattcaatgtagatatgtttatgcatagtcagatcttttatttatgaacggttatgttgatacctataggttttttttttgaaagttatggaacgcattatcaagctggccaagagctatgtgttgaaacggaagaggatggcataacatcatatattcatatctgcctagccagagggacagatcaatggcacacctatattcttatggacgtcactcacctgttcaaagttttgcttcttgggcatcaaatcatactccaatttcaatgtcaagcagaggcggcttgcaaagaaactccaactgccctcaagcggagcaacgcaatatgcttatctctcagttaaccagaggatgcttcagagaagacatggatctacaaacgagattgggctgtactggactcactttctgaagcatttaggaactgcgaggacacgcactctccagattcggatgatgatgattacgaggaccaaatagcgctcggcgtcgacagccagcaaagaggcgcctctgatgatcagataaacagcctgccactatcagtaatcgagggtgaaggtcgttccgatgaaccctgcaatatatgcttggactgccctgctgctggtgattcactccggcgtttgccatgcatgcacaagtttcacaaagagtgcattgacaggtggctcgggatgaagatatggtgtccggtttgcaagtcaaatgtgttctcccagtaggccgtgagcatctcttatactttttggagcagcatcgaagctagattatagttggctgatacgaggcattgttacggctgcagtgtgtacattgcgttcttgacttgtgctctcttctgctccgtggggagcatttgaatgctctttttccgcggagagtttttttggctgtgagagaaggcacggaaaacctcattctgctattctcatttcttgtatacgtgtatgtaggctgacatgcatacaactacctagcgtacgtcagtcttgggcggtgccatgggggtatgaagcgctgagatgggacttgcaccctgaccttgggttgccgaaggccg

SEQ ID NO: 150774 - DNA, 2245 bp, Zea Mays
accagccaccaaaaccacctgctgctcgacctttttcgagatcctggtgggcccggagcaccctccgccttccacggccccctccacttcctctgtccttcgccctcctgtcctttcaaaccccacggcggtgcagagcgcatcgccgagcccccgcccacccgacagcctcacctcgaattcttctccagcagttcgttgccctcctccttccccttccctcctcgacaggtgtccggcggcttggatctatgcggacccggcatctgtattttacctcattggtaaagagttcgttccggttctccttttcccattttcgtttccgcgagcaatcgattccatatctgtgttctgacatggattcatccacttttttcgcattgagctcgtccccgatcttcgttgcattttcctttttttctttttgcaggggatggaggtgcaggtgctggatttgtcttccgattccgagggcgaggtgtcggcgcactcgcccgatcacaagcgcccctctcagcagccgggtgtagaccccaatcgccgggttggcgacaatggttccagcgccgtggacagcctcttcgaggaagcgggcgcggcgaggccaccgcgtcaccccagcgacgcgctgaacaaagggaaggagaaggtcgtcgatgtggagagcgtggagtctccaaagcacggtggggaatcgctcggtgctgctggccgcgtcctgggagctgggagtgatccgtggagcgcactggtgagcaagtgcaaggctggggacagtgggaataatggaactgagtgttgggatagttggggtgactggggtgatcagcttactaactcggcccccgtggcgcgtctagggtcagagaggacggggtttcatgagacatatgaactgcgagggacgcctcagcttcacagtgactcttcagcattcagtgaccagtggaagggtattctgggtgcaagccctgctgatcctgtcaactcactgtggtgctccagggatactagcatgaaagatagtgaggatgaaaccttgtctcaaaggtctgtgtctgttcgtgaaatttctagctgtgattattttcttaccgaagatagtagctcgtcatggctgtcgaaggtcaaggggctgaacttcccacttcctgatgagcatcagttgagaaccaggcagattgagaatgatgagatgtttgcccgtagacttcaggagcagctcaatcagcaacagccaggatctcagcattctgaagcggttgataaaacaatagcctggacattacatgagcaagatgctgagcatgccagatttgctgcaagagaagtccagtctagttctagccagagggacagatcaatggcacacctatattcttatggacgtcactcacctgttcaaagttttgcttcttgggcatcaaatcatactccaatttcaatgtcaagcagaggcggcttgcaaagaaactccaactgccctcaagcggagcaacgcaatatgcttatctctcagttaaccagaggatgcttcagagaagacatggatctacaaacgagattgggctgtactggactcactttctgaagcatttaggaactgcgaggacacgcactctccagattcggatgatgatgattacgaggaccaaatagcgctcggcgtcgacagccagcaaagaggcgcctctgatgatcagataaacagcctgccactatcagtaatcgagggtgaaggtcgttccgatgaaccctgcaatatatgcttggactgccctgctgctggtgattcactccggcgtttgccatgcatgcacaagtttcacaaagagtgcattgacaggtggctcgggatgaagatatggtgtccggtttgcaagtcaaatgtgttctcccagtaggccgtgagcatctcttatactttttggagcagcatcgaagctagattatagttggctgatacgaggcattgttacggctgcagtgtgtacattgcgttcttgacttgtgctctcttctgctccgtggggagcatttgaatgctctttttccgcggagagtttttttggctgtgagagaaggcacggaaaacctcattctgctattctcatttcttgtatacgtgtatgtaggctgacatgcatacaactacctagcgtacgtcagtcttgggcggtgccatgggggtatgaagcgctgagatgggacttgcaccctgaccttgggttgccgaaggccg

SEQ ID NO: 150775 - DNA, 2096 bp, Zea Mays
accagccaccaaaaccacctgctgctcgacctttttcgagatcctggtgggcccggagcaccctccgccttccacggccccctccacttcctctgtccttcgccctcctgtcctttcaaaccccacggcggtgcagagcgcatcgccgagcccccgcccacccgacagcctcacctcgaattcttctccagcagttcgttgccctcctccttccccttccctcctcgacaggtgtccggcggcttggatctatgcggacccggcatctgtattttacctcattggggatggaggtgcaggtgctggatttgtcttccgattccgagggcgaggtgtcggcgcactcgcccgatcacaagcgcccctctcagcagccgggtgtagaccccaatcgccgggttggcgacaatggttccagcgccgtggacagcctcttcgaggaagcgggcgcggcgaggccaccgcgtcaccccagcgacgcgctgaacaaagggaaggagaaggtcgtcgatgtggagagcgtggagtctccaaagcacggtggggaatcgctcggtgctgctggccgcgtcctgggagctgggagtgatccgtggagcgcactggtgagcaagtgcaaggctggggacagtgggaataatggaactgagtgttgggatagttggggtgactggggtgatcagcttactaactcggcccccgtggcgcgtctagggtcagagaggacggggtttcatgagacatatgaactgcgagggacgcctcagcttcacagtgactcttcagcattcagtgaccagtggaagggtattctgggtgcaagccctgctgatcctgtcaactcactgtggtgctccagggatactagcatgaaagatagtgaggatgaaaccttgtctcaaaggtctgtgtctgttcgtgaaatttctagctgtgattattttcttaccgaagatagtagctcgtcatggctgtcgaaggtcaaggggctgaacttcccacttcctgatgagcatcagttgagaaccaggcagattgagaatgatgagatgtttgcccgtagacttcaggagcagctcaatcagcaacagccaggatctcagcattctgaagcggttgataaaacaatagcctggacattacatgagcaagatgctgagcatgccagatttgctgcaagagaagtccagtctagttctagccagagggacagatcaatggcacacctatattcttatggacgtcactcacctgttcaaagttttgcttcttgggcatcaaatcatactccaatttcaatgtcaagcagaggcggcttgcaaagaaactccaactgccctcaagcggagcaacgcaatatgcttatctctcagttaaccagaggatgcttcagagaagacatggatctacaaacgagattgggctgtactggactcactttctgaagcatttaggaactgcgaggacacgcactctccagattcggatgatgatgattacgaggaccaaatagcgctcggcgtcgacagccagcaaagaggcgcctctgatgatcagataaacagcctgccactatcagtaatcgagggtgaaggtcgttccgatgaaccctgcaatatatgcttggactgccctgctgctggtgattcactccggcgtttgccatgcatgcacaagtttcacaaagagtgcattgacaggtggctcgggatgaagatatggtgtccggtttgcaagtcaaatgtgttctcccagtaggccgtgagcatctcttatactttttggagcagcatcgaagctagattatagttggctgatacgaggcattgttacggctgcagtgtgtacattgcgttcttgacttgtgctctcttctgctccgtggggagcatttgaatgctctttttccgcggagagtttttttggctgtgagagaaggcacggaaaacctcattctgctattctcatttcttgtatacgtgtatgtaggctgacatgcatacaactacctagcgtacgtcagtcttgggcggtgccatgggggtatgaagcgctgagatgggacttgcaccctgaccttgggttgccgaaggccg

SEQ ID NO: 150776 - DNA, 2089 bp, Zea Mays
accagccaccaaaaccacctgctgctcgacctttttcgagatcctggtgggcccggagcaccctccgccttccacggccccctccacttcctctgtccttcgccctcctgtcctttcaaaccccacggcggtgcagagcgcatcgccgagcccccgcccacccgacagcctcacctcgaattcttctccagcagttcgttgccctcctccttccccttccctcctcgacaggtgtccggcggcttggatctatgcggacccggcatctgtattttacctcattggggatggaggtgcaggtgctggatttgtcttccgattccgagggcgaggtgtcggcgcactcgcccgatcacaagcgcccctctcagcagccgggtgtagaccccaatcgccgggttggcgacaatggttccagcgccgtggacagcctcttcgaggaagcgggcgcggcgaggccaccgcgtcaccccagcgacgcgctgaacaaagggaaggagaaggtcgtcgatgtggagagcgtggagtctccaaagcacggtggggaatcgctcggtgctgctggccgcgtcctgggagctgggagtgatccgtggagcgcactggtgagcaagtgcaaggctggggacagtgggaataatggaactgagtgttgggatagttggggtgactggggtgatcagcttactaactcggcccccgtggcgcgtctagggtcagagaggacggggtttcatgagacatatgaactgcgagggacgcctcagcttcacagtgactcttcagcattcagtgaccagtggaagggtattctgggtgcaagccctgctgatcctgtcaactcactgtggtgctccagggatactagcatgaaagatagtgaggatgaaaccttgtctcaaaggtctgtgtctgttcgtgaaatttctagctgtgattattttcttaccgaagatagtagctcgtcatggctgtcgaaggtcaaggggctgaacttcccacttcctgatgagcatcagttgagaaccaggcagattgagaatgatgagatgtttgcccgtagacttcaggagcagctcaatcagcaacagccaggatctcagcattctgaagcggttgataaaacaatagcctggacattacatgagcaagatgctgagcatgccagatttgctgcaagagaagtccagtctagttctagccagagggacagatcaatggcacacctatattcttatggacgtcactcacctgttcaaagttttgcttcttgggcatcaaatcatactccaatttcaatgtcaagcagaggcggcttgcaaagaaactccaactgccctcaagcggagcaacgcaatatgcttatctctcagttaaccagaggatgcttcagagaagacatggatctacaaacgagattgggctgtactggactcactttctgaagcatttaggaactgcgaggacacgcactctccagattcggatgatgatgattacgaggaccaaatagcgctcggcgtcgacagccagcaaagaggcgcctctgatgatcagataaacagcctgccactatcagtaatcgaggtcgttccgatgaaccctgcaatatatgcttggactgccctgctgctggtgattcactccggcgtttgccatgcatgcacaagtttcacaaagagtgcattgacaggtggctcgggatgaagatatggtgtccggtttgcaagtcaaatgtgttctcccagtaggccgtgagcatctcttatactttttggagcagcatcgaagctagattatagttggctgatacgaggcattgttacggctgcagtgtgtacattgcgttcttgacttgtgctctcttctgctccgtggggagcatttgaatgctctttttccgcggagagtttttttggctgtgagagaaggcacggaaaacctcattctgctattctcatttcttgtatacgtgtatgtaggctgacatgcatacaactacctagcgtacgtcagtcttgggcggtgccatgggggtatgaagcgctgagatgggacttgcaccctgaccttgggttgccgaaggccg

SEQ ID NO: 150777 - DNA, 1489 bp, Zea Mays
gcggtcgccacggtccacgggccggcgctcctcccctcgccgcccgcccctcccccttcttttaatccccaccccgcctcgtctcctccaccgccgcccccacatctatccacccgcccgcccgtccgtccgttcgttcgtctccacgcgcaaacgagagagagagaaggctaggtcgtcgtcgtcgtgaggcggagagatctgggaggaggaggagcgatggacgggaagctacccccgccgaacccgaacctgccgtaccgggaggactgctggagcgagggcgagacggcggcgctcgtcgacgcctggggctcgcgctacctcgacctcaaccgcgggagcctccgccagccgcagtggcgggaggtcgccgacgccgtcaactcccgcccgggggcctccgcgcgcggccgcccgccgcgcaccgacatccagtgcaagaaccgcgtcgacacgctcaagaagaagtacaaggccgagcgcgcgcgtggcgggccgtcgccgtggtccttctacggccagctcgacatcctcgtcgggcccacgctcaacggcaccaagaaaccgtccccgccgcgcgccgcgctgcccgtgttccggaggcgccagacgccgccgcgctccccgtcgccgcaatcgccgccgccgcttcccgtggccctcccgctgcacaattaccgccgtggctccgacctcccttccgcaaacttcatccataaggccgccgcggcggccgccgccgccgccgccgccgcggagtccgactcggaagatggctacaacaacaacgagtacgacgatgacgaaggctctcagcagtcgccgtcacgttctgtatcttctcgctccggtggtgctcctgctgttggcaccaagaggaagaggcgcagcgggagcggtggattcggggagctagcgagggcaatcgagaccttcgcggatatgtacgagcgcatggaagcagccaagcagcgacacgcagaggagatggagaggcagcgaatcaagttcctcaaggatctggagctgaagcggatgcggtcttttgtggacatgcagctgcagctttcgagggcaaagcacgccaggaagggtgatgcttcctcggagatgctcatgtctctcgctgcactgcccttcctcagcagctctgcttatctttaagggcctgttcagttagggatggattctccaatcccctcaatccacccctagccttaaattggaagagtttggtaaaggaatattttgaccttcaattaggaatttaggatacagtgagttggttgctgtgctagacttgttcgtggattgtttgtgtttcctaagatactgtaatttttcatacgaaccacggaggtattgcaggtcttcaaaatttaaatgtaccttgcaatgcattatgcccaagttttttcttagatggaatgaaatttactggtttacaacacttactgtcagtgtaatacgaatctcatctcaacta

SEQ ID NO: 150778 - DNA, 3038 bp, Zea Mays
ctcgcctcgctgttctcctctgtcacctctccctgagaagcgtggctcctgcaaccggcctccccacctgctcctcctctacgcgccgagcaccacacgacgcgacacaaccgagcacggccgctccgccactccactgcttccgcggtggcgccgcttcactcccgtgctgcagcgagcgttacggagatccgtggggacatgaaccagggtttctcctatctgttgatatgaactaaatttatcagtggtcctattgaatatggagctactgttatatgtcattgtctcatgcaaatgatggtggctgtaagttgtgattgaggaactccattgtctgagaaatggatgaaacaccaactagttctgggcaatctgaagctagttcatgtgaacctaattggtggcctccagacttcttggagaagatacagtctgcttccataccaaggaaacatgatgttttgggtaatcaaagttcctcatcctggaaggcttctcaattactgtggtcaacaggatcttattcagggttaatccctaatggtttctattcaatcatcccggataaaaagttgaaggagactttcccaactattccatcactagatgacttgcaaactcttgaagcagatgggcttaaggctgacataattattgtagacactgagagggataagaaggttttcatgttgaagcagcttagtgctgcacttgtgaaagggttaagctctagcccagcattagtgataaagaaaattgcaggattggtctttgactgcttcaagcgccaaattcccgatgccagtccaactagaggctcgattgaagatacccatttctttggaaataaaggaccacaacttctggggcagataagacatggatcgtgccgaccccgagctattctatttaaagttcttgcagatgccgttggccttgagagtaaacttgtagttggtctaccagatgacggtgctgttggatttgtggactcttacaaacatatgtctgtggtagtttcactaaactctatggtgcttcttgtggatcttatgcgatttccaggccagctgattccgttttcagctaaggctatatttatatcgcacatatctgctgcgggtgaaagcgactcagctgaaaatgactcttgtgattctcctcttgagcccaacagcccactttatggattgtctgataaagttgaagttgaaggaattgaatcttcatcatatctatctggacgatcactgcgtaatatgatgttgagatcaaggacattctctgaggggaaattaagcacgtcatgtagtgaaccaaatatagcaaatgccttttggaggcgcagccaaaggagagttgccgaggaaccccgtggtgctagttccagccctgagcatccattaatgagagcaaggggaagatctatacttggtagtgagaagcaatcatttcaagaatacacagaatctggagctgcttcaagatcagatggtcttgggggcccttcaacctctaatgctcgaagaataaggcgaagaagcattagcattacacctgagattggagatgacatcgtgagggcagttcgggctatgaacgaaacactaaagcaaaatcgcctccaaagggatcatgtcgaaggttcatgctcatatgttatggaagatcaaagcaacaccaatgactgcccaaataaagatgatgcatcttggagaattggtgctactgacagtgactcaagaaaccgaactggttctactcagaaggccatgtcactaccttcttcgcctcatgaatatagaggtcaagttacccaaaaaagtgatgattttataagtaaagagaagatggcattggcatggaacaaagttttccagagctccccatttcttaataaggctttgctgccttttaaggaatggaacatagatttctccgagataacaattggcacgcgggttggaataggattctttggagaagttttccgtggtatatggaatggaactgatgttgccatcaaagtgtttctagaacaggatttgacaactgaaaacatggaagatttttgcaacgagatatacatcctcagccggttacgacacccgaatgttatattgcttcttggtgcatgcattacacctccacacctgtcaatggttactgaatatatggaaatggggtcactgtactatctcattcatatgagtggtcagaaaaagaaacttagttggcgtaggaagttgaaaattattcgtgatatatgcaggggattgatgtgcatacaccgcatcaagatagttcacagggatctcaaaagtgcaaactgcctggtcaataagcattggactgtcaagatatgtgactttggtctatctcgactgatgattgatagtcctatgaccgataattcctctgctggcaccccggaatggatggcccctgaacttatacgtaatgaacctttcacagagaaatgtgatatattcagccttggtgttatcatgtgggagctgtgcacattgagtcgcccatgggaaggcatctccccagttcaagtggtgtattcagttgctaatgaagggtcacggcttgagattccggaaggacccctcggcaggttaatcgcagattgctggtctgagcctgagaatcgaccgagctgccaggagatcctaacccgtctgctagactgcgaatatactgttagctaaaatggaagctgcatgctcgttcacccaattcctgcacaggtgagaatatttcttgtataaaacctataaaaaaagcctgccgattctgcggacttgaggtcacatattgaagccctgttcttttttttttacaacggcgaccttttctctcaaaaatgtaaaaaaatgcttccccggttatagaagaacatattctggcccagaaatgtgccttatcgcagggcaagctaattctagataattagcatgccctcgaattaaccaagtgtttgttccgaagaatgttgccagtttgccattaccctgtggaatatggta

SEQ ID NO: 150779 - DNA, 1959 bp, Zea Mays
ctcgcctcgctgttctcctctgtcacctctccctgagaagcgtggctcctgcaaccggcctccccacctgctcctcctctacgcgccgagcaccacacgacgcgacacaaccgagcacggccgctccgccactccactgcttccgcggtggcgccgcttcactcccgtgctgcagcgagcgttacggagatccgtggggacatgaaccagggtttctcctatctgttgatatgaactaaatttatcagtggtcctattgaatatggagctactgttatatgtcattgtctcatgcaaatgatggtggctgtaagttgtgattgaggaactccattgtctgagaaatggatgaaacaccaactagttctgggcaatctgaagctagttcatgtgaacctaattggtggcctccagacttcttggagaagatacagtctgcttccataccaaggaaacatgatgttttgggtaatcaaagttcctcatcctggaaggcttctcaattactgtggtcaacaggatcttattcagggttaatccctaatggtttctattcaatcatcccggataaaaagttgaaggagactttcccaactattccatcactagatgacttgcaaactcttgaagcagatgggcttaaggctgacataattattgtagacactgagagggataagaaggttttcatgttgaagcagcttagtgctgcacttgtgaaagggttaagctctagcccagcattagtgataaagaaaattgcaggattggtctttgactgcttcaagcgccaaattcccgatgccagtccaactagaggctcgattgaagatacccatttctttggaaataaaggaccacaacttctggggcagataagacatggatcgtgccgaccccgagctattctatttaaagttcttgcagatgccgttggccttgagagtaaacttgtagttggtctaccagatgacggtgctgttggatttgtggactcttacaaacatatgtctgtggtagtttcactaaactctatggtgcttcttgtggatcttatgcgatttccaggccagctgattccgttttcagctaaggctatatttatatcgcacatatctgctgcgggtgaaagcgactcagctgaaaatgactcttgtgattctcctcttgagcccaacagcccactttatggattgtctgataaagttgaagttgaaggaattgaatcttcatcatatctatctggacgatcactgcgtaatatgatgttgagatcaaggacattctctgaggggaaattaagcacgtcatgtagtgaaccaaatatagcaaatgccttttggaggcgcagccaaaggagagttgccgaggaaccccgtggtgctagttccagccctgagcatccattaatgagagcaaggggaagatctatacttggtagtgagaagcaatcatttcaagaatacacagaatctggagctgcttcaagatcagatggtcttgggggcccttcaacctctaatgctcgaagaataaggcgaagaagcattagcattacacctgagattggagatgacatcgtgagggcagttcgggctatgaacgaaacactaaagcaaaatcgcctccaaagggatcatgtcgaaggttcatgctcatatgttatggaagatcaaagcaacaccaatgactgcccaaataaagtatacctctacaagttgcattgttttcatcttctccatattggtcctctgtatcttgtgcgcacacggaaaatctgtagcggaaaccacatcataggtggaaacatggaaaccaattcagaaaacgtattccgatcactcgaagatgtactatttcacttttgccaaaataattacatctatggatgtattgtacatgtgccaaatttgtaaatttcatttagtgatcgaaatactatctttccatttctcacct

SEQ ID NO: 150780 - DNA, 973 bp, Zea Mays
gtaatcttcccacctgcctcggcgcctcctccctctctcccaacctcgcccgttctcgcctcgctgttctcctctgtcacctctccctgagaagcgtggctcctgcaaccggcctccccacctgctcctcctctacgcgccgagcaccacacgacgcgacacaaccgagcacggccgctccgccactccactgcttccgcggtggcgccgcttcactcccgtgctgcagcgagcgttacggagatccgtggggacatgaaccagggtttctcctatctgttgatatgaactaaatttatcagtggtcctattgaatatggagctactgttatatgtcattgtctcatgcaaatgatggtggctgtaagttgtgattgaggaactccattgtctgagaaatggatgaaacaccaactagttctgggcaatctgaagctagttcatgtgaacctaattggtggcctccagacttcttggagaagatacagtctgcttccataccaaggaaacatgatgttttgggtaatcaaagttcctcatcctggaaggcttctcaattactgtggtcaacaggatcttattcagggttaatccctaatggtttctattcaatcatcccggataaaaagttgaaggagactttcccaactattccatcactagatgacttgcaaactcttgaagcagatgggcttaaggctgacataattattgtagacactgagagggataagaaggttttcatgttgaagcagcttagtgctgcacttgtgaaagggttaagctctagcccagcattagtgataaagaaaattgcaggattggtaagtttttacaaagtgttaaaattaggtacaattttcgggcgaaagggcctctagcttaatggttaaggcttccgagtagcacctccaggtccgggttcgatccccctcgggggcaagtttcgggcttggttaaaaaaatcctttcg

SEQ ID NO: 150781 - DNA, 539 bp, Zea Mays
agccgcagtccgcataaaccactgtgccgatgcgcagtgcggcgacggtgacgccggccgtggccacaacgagcctagcgttgtctctgcacctgccggagctgccgtcgcaggtgaaggacaagatcctgagcctggagctgatgggcgtggactatgggcgcgcgctggagcagagcccggcgctccgcgacgcggcgccggagtccatccacgcggtggtgtcgttcctccagtcccgcgggctccagttcaaggacctgggccgcgtcttcggcatgtgcacgtccgtgctgaccgccaacgtccgcgccgacctctgccccgtgttcgccttcctctccgcggacctgggcgtgccggagtcggcgcactggcgcgtggtgatcaagtgcccgcgcgtgctggcctgcagcgtccgcgaccagctccgccccgcgctcatctacctccgccgcctgggcttccgggttgggcggagactcgggtggacggcggtaagagcgagcaggcctacgtatatggtaacggaaatataa

SEQ ID NO: 150782 - DNA, 105 bp, Zea Mays
tttttttttgtccccttcaccactgggttcagcttagctatatcctagtagtatattattctacttgcgctaaaaggtaatcacccatgcatctcgatcagagga

SEQ ID NO: 150783 - DNA, 1414 bp, Zea Mays
cggttttgagtaaacaagcgagcgaaaaaataagaagagagagaaaaagaaaaaggagaggcccgcgactgtagtgggattgtgggaagatgcctcgggatggcgcgcaggcggcgccgccaccggagcgcggcgagatggacgaggtggtagaggcggacccggatacggaggcggaggatcaggaggagaggtgggcgaggctgctgccggagctgctctccgacgtggtgcggcgcgtcgaggcgtccggcggcgagcggtggccggcgcggaaggacgtcgtctcctgcgcctgcgtgtgccgccggtggcgggaggccgccgtctccgtcgtgcgtccgccggcggagtccggcaagatcaccttcccctcctcgctcaagcagccagggccaagggagagaccaatgcagtgctttatcaagaggaataagaacaactctacattctacctctaccttggcttcacaagttcacctgtggataaagggaagtttctcatggctgctagaagatttaggcgtggtccccataccgagtacattatatctcttgatgcagaagacttatcacaagggagcaatgcatacatggggaaactgagatctgatttctgggggacaaacttcaaaatatatgatagcaagccaccatatgatggtgctaaagcatcaagtagtcgatctagtcgtcgtttcggaagcagaaggattagtccccaggtatcggctggcaattatgaagttggacaggtttcatacaaatacaacttgctcaaatccagaggccccaggagaatgtattgcactctcgaatgcccttcagcccaagagacttgggaaaactcactcaagacaaagttcaggcgccccctgggccccacaactttacgaaataaagcaccccgctggcatgagcacctgcaatgctggtgcttaaacttccatgggcgggtaacagttgcatcagtcaagaatttccagcttgtggctgctgccgaccccagtgagcctactaccaacgtggatgatgaaacggttctgctgcagtttggtaaggtcgatagcgatatgttcacaatggattaccggcaaccactctccgcgtttcaagcatttgccatcagcctcagcagctttgggaccaagctagcctgtgaatagcgatgcagtttgatgctcttcgtgtggctatatggtttgtgttggtggttgcttgcttgtttcttgttgttacgatgtgatccgttcttcgttttagttgagtatttatgtactatttgtaccacaagagatgtaataaactattgtattgtcaaacggatttgttcaaggaaattatgtgtaatgaacttttgctctagttccatgcaaaagacaaaaaaaaatgctaagcaacagtaagaaaaata

SEQ ID NO: 150784 - DNA, 1969 bp, Zea Mays
cggttttgagtaaacaagcgagcgaaaaaataagaagagagagaaaaagaaaaaggagaggcccgcgactgtagtgggattgtgggaagatgcctcgggatggcgcgcaggcggcgccgccaccggagcgcggcgagatggacgaggtggtagaggcggacccggatacggaggcggaggatcaggaggagaggtgggcgaggctgctgccggagctgctctccgacgtggtgcggcgcgtcgaggcgtccggcggcgagcggtggccggcgcggaaggacgtcgtctcctgcgcctgcgtgtgccgccggtggcgggaggccgccgtctccgtcgtgcgtccgccggcggagtccggcaagatcaccttcccctcctcgctcaagcagccagggccaagggagagaccaatgcagtgctttatcaagaggaataagaacaactctacattctacctctaccttggcttcacaagttcacctgtggataaagggaagtttctcatggctgctagaagatttaggcgtggtccccataccgagtacattatatctcttgatgcagaagacttatcacaagggagcaatgcatacatggggaaactgagatctgatttctgggggacaaacttcaaaatatatgatagcaagccaccatatgatggtgctaaagcatcaagtagtcgatctagtcgtcgtttcggaagcagaaggattagtccccaggtatcggctggcaattatgaagttggacaggtttcatacaaatacaacttgctcaaatccagaggccccaggagaatgtattgcactctcgaatgcccttcagcccaagagacttgggaaaactcactcaagacaaagttcaggcgccccctgggccccacaactttacgaaataaagcaccccgctggcatgagcacctgcaatgctggtgcttaaacttccatgggcgggtaacagttgcatcagtcaagaatttccagcttgtggctgctgccgaccccagtgagcctactaccaacgtggatgatgaaacggttctgctgcagtttggtaaggtcgatagcgatatgttcacaatggattaccggcaaccactctccgcgtttcaagcatttgccatcagcctcagcagctttgggaccaagctagcctgtgaatagcgatgcagtttgatgctcttcgtgtggctatatggtttgtgttggtggttgcttgcttgtttcttgttgttacgatgtgatccgttcttcgttttagttgagtatttatgtactatttgtaccacaagagatgtaataaactattgtattgtcaaacggatttgttcaaggaaattatgtgtaatgaacttttgctctagttccatgcaaaagacatttcaatgtacatctgttcatggtgaagtgatacttctcccttttctataaatatcgttttgttttgtttggatactactgttactagtactgcctaggagtgtggattctttggaagcataggaacgttagtggcgctcgacctcaaaggaccggagagccgcttgcagatagggtctggctccataaaaaacaaaagggttttttaaggtagtgcctttgattttgctgatgtacttatttttatctttagtcatgttttttatcagttttgttcttctagtactattccagtgctatagaatagaaagacaaaactgagaaaaaacacgattgagagtaaaaatgagcacaccagcaattttgttggagcggctggtctacgtgctcttgatttgtggaattcataggtagttttagtttagttgttgtggtcagggtttctcttgcttgttggtttggttagcctttcttttggtttcctatttggcctctttctttgcctggggttggaggccgtttttatcgggttttcttcttattattgttgtaatgatacacaactctcttgcgtattcagaaaaaaa

SEQ ID NO: 150785 - DNA, 797 bp, Zea Mays
cggttttgagtaaacaagcgagcgaaaaaataagaagagagagaaaaagaaaaaggagaggcccgcgactgtagtgggattgtgggaagatgcctcgggatggcgcgcaggcggcgccgccaccggagcgcggcgagatggacgaggtggtagaggcggacccggatacggaggcggaggatcaggaggagaggtgggcgaggctgctgccggagctgctctccgacgtggtgcggcgcgtcgaggcgtccggcggcgagcggtggccggcgcggaaggacgtcgtctcctgcgcctgcgtgtgccgccggtggcgggaggccgccgtctccgtcgtgcgtccgccggcggagtccggcaagatcaccttcccctcctcgctcaagcagccagggccaagggagagaccaatgcagtgctttatcaagaggaataagaacaactctacattctacctctaccttggcttcacaagttcacctgtggataaagggaagtttctcatggctgctagaagatttaggcgtggtccccataccgagtacattatatctcttgatgcagaagacttatcacaagggagcaatgcatacatggggaaactgaggtgaggttcaacatgattccagagttctcctgaaccttcttggattacctatgcttatgaattggttgctgaaagtgacgtgttctggtgtgattaggtggcacatacatttcatgtagttgacaaaatatttttgaaagcataacttaagatacacaaaatgaatgaagttgcaggatccttccaactg

SEQ ID NO: 150786 - DNA, 866 bp, Zea Mays
gagcgagaccaccccacccattcactcgcctgcgctccctcgccgccccagttccccaccccctgctcacccacccgtcccctcctgctcgcccatggctcccatcgctgtcggcgacgccctccccgacggccagctcgggtggttcgacgagaacgaccagctgcagcaggtctccgtccacgcgctcgccgccggcaagaaggtcatcctcttcggcgtccccggcgccttcaccccgacctgcagcaaccagcatgtgccaggcttcatcacacaggctgagcagctcaaagccaagggtgtagacgagatcctgcttatcagcgttaacgaccccttcgtcatgaaggcgtgggcgaagacctaccccgagaacaagcacgtgaagttcctcgccgacggatctggagcgtacaccaaggcgctcgacctcgagctcgatctcacggacaaagggctgggcgtgcgctcgaagaggttcgctctcctggccgacgacctcacggtcaccgtcgcaaacatcgaggaaggcgggcagttcacgatctccggcgctgaggagatcctgaaggcgctttagaagctccgtctcctctagaagccgcagcaacgatcggtctatagtttgaactcgcctttgaataacttgtcgttgggcaaggtctagttcggtgttgtgtatggaacggtcgtcactgagtcatgcacgatttggtatccgtgttgtttatgttcaccggtttgaggaactctctgatccgccgtgacacaaagttgatcctgagagaacgaccgagtatttttttttcctgcaatttgctgccgtcgtgcagagtgcagctttgcgcgctcctttagatgct

SEQ ID NO: 150787 - DNA, 97 bp, Zea Mays
ctctcctctctctcctactttctacactcaatggctctccaaccaaacagagaacggagtggcttcgctatattctactattcaaccaaacaaaaaa

SEQ ID NO: 150788 - DNA, 1464 bp, Zea Mays
ccgtgcccaatgcctcaggttcctattccatctcgaattcggagtcttctctcgtccctgtccccctccagcaccgccgccgccgccaccgcgccgcaacctcgccatggcacgccctccgtcggcggccctcaagccgccgtatccggccttccaatcccatcccagcgatctcgagctcgtcaacttctatctccgtccctgggtcgagaccggcgtcaagaccggcgcgttcatccacgacgcagacgtgtacgccgctgaccccaactacctcacccgtcagttcgcgccggcggtggcccaggacggcgagcgggcgtggtacttctacaccccgctgcgccacaagagcgtccacgggacgcggaagacgcgcaccgtggccaccggcggcgggtgctggcacaacgaggcgaaagctaggcccgtgtacatggtctccaacgggatgcaccagattgcgcatcgccagagcttctccttcgtcgagaaggatggcggcgtgcgggtccgcacgggttggctcatgatggagctccgcctcgtcgaggacggcgccgccgggcagaaaccggaggaggacggcgccctcgggagtcgcgtcctgtgcaaggtgtaccgcagcccgcgcaaccccgagccaagcggcatcgaagccgcgacggcgcccgggcagaaggcggaggcagacgacgatgaatcttgcgacgacgaatctagcgacgcgacgttggacgacgatgacagctccaacgcgtcactagcggcggcatcgggacccaagagggaatccgacgaggtggaatccagcgacgcgacggtggcggcacctagtcgccatagcgcgccgaacgacgagatctccggcgggtccgcggtggcgcccggacgcaaggaaaagacggagatcggggaggtctccaccgagacgtccgcggcggtgcgcaagaggagaaaggccgacggcagcagctcccctagcactccggtttctacgacggatatgcactgccctcagtgcggcacccatctcatgctaacactgaacatggcggagtccaaatcggaggcggggctcgcgaaggacgagtcggccaccgccgcgcctgatcaaggcgggacgggtgagtcttcacagaagaatgttcgggttcggttccatcagttcctgtgagatccagggttccttcctgcccagacaaatcctgggaaacagagccatagtttcttgtctgttatttggaagaacgaaataagaagattttagattaagaattcgttagaagtaaccgtgtctattgctgcaacggtgatgtaatcgtgaaaccaagacataaggcgtacgaatttacacaggcatgcaaatacagggatggatatgaaactacatttttgaaactatatttttaaagtaaccctctaacatggtatatatactcgtaagactttcttgacataatt

SEQ ID NO: 150789 - DNA, 811 bp, Zea Mays
ccttgtagaagctagaacacacagtcctaagcttctgtagagacacagccgaacagagcagcagcagaaatggagctcgccgtggcgcaggtgcagccgcggtacatcgtcttggacctctccggcgggggcctccgacgacgcctcggtccaccacccccggcagccggcgttccgcctgacgccccggccatggcggccctggaggcgcatcaccggacacggcgatctggcgccgaagacgacctcgcaacgagccggccaatgatccagtcaggcgcggtgatggcccggagcgttcatgcggaaaccaccggcgctgacgcagacgccgtgtctggcgcaggcacgtctggttcggaggcggcagaggaggagtccggagacgaggcggatagcttcgacgcgtccttctgccaagagggctttgcgagaaagatcgaggcgctggctgagctggtaggtatggacggcgcctgcgaacctgtggctgtgctgagcgaagttgttagggtgctccggtcgatcgatacacacagacacagtgagtacatcccgtgtgcgagcgactaggggccatctgatgtaatctttgttttgtaattttgctttccgagacggagtgcgcgcgctaaagctgcataatgttttccgtttcttagtttttactgaagagtaagcatcgttccctccccgtcaaataaagacacgggaaaacactgagggcctgtttgacactaagatttatttacagtcccaattaggagtggtaatggatcgcgatctaaatatttcttcacaatttgttagg

SEQ ID NO: 150790 - DNA, 1416 bp, Zea Mays
gaggattcatcaccatatatatccttttactggcatggtgaaaaaaacatattatgtttgctttgtttcattgaaagccttgattgttcgatgtcttgtttctgcggaaacaaaatatataatagatgtttcttaatgcaatgatatgcagcgtatttgagaaaaagtatataatacatacaatagtgtacctttgttttaaaatataaactggaattgaaattaatgtattagcacatgatagtttgagtaaaataaaatgcaatctcttggctgtgatctttgcagctagatatagagaacagctcttcacagaaagtgtggcaagaagtggaatttgtctttggatggatctatgttgtggagatggcacttaaaatattttcattaggatttggcgcctattggatggagggtcagaataaatttgattttgtgattacttggactatttttattggagagactctgacatttgccttcccatcaacgcttccttttctttctaatggagagtggattcgatatcttctccttggaaggatgttgcgtttaacaagaattttgttgcaaattcggcgtttcagagcatttgttgcaacattctttaccctcatgtctagcttgttgccatacttggggactgtgttttgcatactttgtgtatattgctccataggtttacagttttttggtggcatcgtgtatgcaggaaacttgaagttggaagaaacagatctctttgggaacgattatcttcttttcaacttcaatgactacccaagtggtatggttactctgttcaatttgttagtcatgggcaattggcaagtctggatggagagctatgcacacctgactggaagttcttggagcctggtttattttatcagtttttaccttatttcagtattactgctgcttaatctgattgtggcatttgtgttggaggcgttttttgctgagatggaactggagaaagctggagaagctgatacgcaggattctaccccacaaggaagaaacaagcggcgatccatgcgtgtgaggacgaagggtactatggttgacattcttctgcaccatatgttgagcaatgaacttgatggatctcaaaactcggattgattactcatcttaatggtaccagatcactagtactaccctgctgttcttttaactttgaccacggcttccgttatgaacacctgtctcatctatactctacagcatccgagacttcgattggtaatttatataccatacgtatagcttaaagtgacacaacggatactgacagatgcttatttatctgcaatttcagtcaatatatatacccctacattttttttttgtttttatatgtatcttctacagccttctgatttctgacagtgtggaatatgccgtattgag

SEQ ID NO: 150791 - DNA, 1158 bp, Zea Mays
atgacggaagtggaggcgccgctcatcaccgaggtggagggggtggagggccgtggcttctgcggttccgcgtccaccggagggggcagctctggtctcggcagcggcgtgcggggcacgaggcagtaccaccgccgctcggacgcgctcgcctacggcgaccgctaccagaaggcggcagcactcgtcgacctcgcagaagatggtgtcggtatacccgaggatgtcttgaatgacacaaggtttgagagggccatgcgattttatttcgtgtatctccgattggattggctctggtcacttaacctatttgctttgattctattgaatttcctagagaagcctctctggtgtcaaaagtacgccccacatacttgtgatcaaagggatctttactttcttgggcagttgccatacttaagcaaaacagaatcactcatatatgaggcgctaacccttgtcattcttgtcttggatatcttctacccactttcctacgaaggtttaaatctattctggaagaactccatgaataaattgaaggttcttcttctcttcatcttagcatgcgacatacttgtgtttatgcttagttctggacctttcagagtagctccgtacattcgtgttgtgtttctaattatgacaatcagctggctagcctatgtaacatttgaggacacaccacaaggaaagaccattttcacatcatacggtacaacattatatcagatgtttgtcctgttcaccacatccaataatcctgacgtatgggtccctgcttacaagagctctcgttggaacgccctgtttattgttatttatgtgctgttaggagtttatttcctaacaaatttaattcttgctgtcatttatgatagctttaaagagcagcttgcaaaacaacttgctcaaatggactctataaggaaaagtattctacagaaggcatttgatctcatcgatactaacggtcagggttaccttaacaaagaacagtgcatatcgttactggatgagctaaacaagtacaggtcgttgcccaaaacctggagggaagattttgaactaatcttttccgagcttgatcggagtggtgatttcaagggaatgaattatttcttaaagttcattagcaccatgatgaagaaaaagtag

SEQ ID NO: 150792 - DNA, 77 bp, Zea Mays
gatgagtggaagtctagcactttaatcccagatttggctcgccgttccagatctccgttggcgtttgtccccttcag

SEQ ID NO: 150793 - DNA, 1588 bp, Zea Mays
gttttatagtcgacgaacaaaatccgtagagttcggtagtcgtgagagttagggcatattggaaaaaaaaatcaaaaatcctttctttatgtgttttttcttttaaaaccgaactgatttctataaaacacattcatgcgtgattcatacgaaattcttacgttcttagaataaaattcgaaaaaaagaccaccaaactcgaccaacggccagatatggccaccgcccaccggctgaatacctccactgctccacacgtccctgtgccgccgtatcttggtgcgctcttgctcctaggtaacatacatctctgtccctccctaggagaccgagacagcaccgtaatggcgtccccctgcggcgatgctgcggcggcagccgagctcaccagcctgcgcatcagcgaaggagctgggatccctccgcttcccggacggcgaagcgtcggcggcaatgcagctgagggagaagaggagggtgataagaacaagaaggcgaggaaggggaaggctggtacgcagcggatcgccgggtgggggctccgcgagttcagcaagatagtttctaaaaaggttgagaccaaaggacggactacttacagtgaggttgcagatgaaatttgtggagagctgaagttgactcttattggtcaagagtttgatgagaagaatatcaggaggagagtgtatgatgcttttaatgtgctaattgcactacgtgttatcacaaaagatgaaaaagagataaaatggatgggcttgtctaatttccaatatgaaaagataaagttggaggaaactcgcaaagaactcatgatcaggattaagaacaagaaaaaacttctccaggaaattgaaagacagtttgatgacctccagaatatcaagtttcgcaaccagtttctacagaggccagcagagagtgtgaatggtatctgccttccattcttattggtcaaggcatccagaaaagcaagggtggagattgagatctcagaaaactcaaagtttgctggtttggacttcaactggtactaccagaactcaaaactgatgctccctccaaattaacgtgtcttggtcctaacccgtatgtactttccactcaatttttcagcgtaccattcaccttgcacgacgatgtatcaatccttgaagccatcaggtgtaatagcgtaaaaaaaagctagctacttgggcacgcttcattagatgatcggggaagtggtcgatctgttgaaagtgacgaatgatacgatcatttccctttgcacagccatcagcatgtgtaggtatataactatatatatatatatagtacgaaaacttgacctcgtcttcaaggctgcctttctggcatggtgaagctttaacctgcaaattttgcccctttttgcgcctagcgggttattaggtcaggtagattattctcatatataatgctatgtattaactacattgattatagctcagattcggaagcttgtgcacgagctttgctggttgttatgatgttcgggcgttttgcccttggcaaaccatgtgtttctctagctgcagtgactacgagaatgttatcttccgttcaa

SEQ ID NO: 150794 - DNA, 1516 bp, Zea Mays
cacgcgtcctcttcgttgtgccctgtgtctggcggaggctcgccgccaagttcctagccgccttcgctctcctcttcgcctaccacgccgctgccgtgctcgtcttcacggcctcctcatcgtcgggttcaacggctccagcctctcgggcctactccgccccagcgccccctccccgaccgcctacctcccaacccttgcccccgcccagtgcagcagccggcctgctccgtgcgcctcatctggggcctccgagacggcaagacgaagaccatcagcgcgctcctgtggtccatgctgatcgagaaccagaggacggtgacctgcgccccgaccaacaccgctgtggcggaggtcgcgtcacgggtccttggtgttatcgaagagtccagcggcggcggtgctgcaacgaagtgtttctttggcgatgtcgtgctcttcggcaacgaggacaggatggctgtggaccggaaactagaaaatatcttcttagacacgcgtgttcgccgtctgcgtcagtgcttgatgccaatcacagggtggacaaagtccctgagctccatgattgcacttcaggaggattcgatggttccgtatgaaaggtatgatgaggccatacaaggttgtgtattggatttggtttcagaagaaatcaagctaagaaatgtaacagttgtctgttctttacggacgatggatgacaaaaaagttaaggagatgcagaaaagatttactggaagtgcagaaaaaagcacgagaagtagagcgagagaaaatgtcattcgagacctacttccagagtaactacaagaagctcgctaaggatttgcgcacttgtgtggagactttcgtcgatgatcttcccagatccgcaacatcagaagaaaacttttgctgcatggcggaggtgctgctcttgctcgatgcgtttggagtgctcgtgcagtctgaaccagtcgaacagcttcaagcgctgttcaaaaggcactccgatgttaggttccggctgagggaggcgatatcctcgtgtcttcgcaagctatggctcctttcttctaactttaagcttcccgaaatgtatgacagccgaacgatcgatctagagttcttgcttcagaatgctaagatcgtgctctgtacagcttcgagctcgtaccgcctgctctacatgcagaaggcccagcccttggaggtccctgtcgtggacgaggccgcgcagcttaaggagtgcgagtcactgatacccctgcagctgcctggcgtccgtcacgctgttctcatcgatgatgagtacctgcttcccgcattggtcaaaagcaagctgaattcttgttgacttcagctcgacgtcgattaccgagagaacgatcaatcagtcgagtattgaagaagaacagtgaaaaacagaggattttctttggacaggccaaaccgggcgacctgcctcctttttgtgtttttctatttattcactggactacacaacgcattacaattactcagctccaaacttccc

SEQ ID NO: 150795 - DNA, 1138 bp, Zea Mays
tgcccccgcccagtgcagcagccggcctgctccgtgcgcctcatctggggcctccgagacggcaagacgaagaccatcagcgcgctcctgtggtccatgctgatcgagaaccagaggacggtgacctgcgccccgaccaacaccgctgtggcggaggtcgcgtcacgggtccttggtgttatcgaagagtccagcggcggcggtgctgcaacgaagtgtttctttggcgatgtcgtgctcttcggcaacgaggacaggatggctgtggaccggaaactagaaaatatcttcttagacacgcgtgttcgccgtctgcgtcagtgcttgatgccaatcacagggtggacaaagtccctgagctccatgattgcacttcaggaggattcgatggttccgtatgaaaggtatgatgaggccatacaaggttgtgtattggatttggtttcagaagaaatcaagctaagaaatgtaacagttgtctgttctttacggacgatggatgacaaaaaagttaaggagatgcagaaaagatttactggaagtgcagaaaaaagcacgagaagtagagcgagagaaaatgtcattcgagacctacttccagagtaactacaagaagctcgctaaggatttgcgcacttgtgtggagactttcgtcgatgatcttcccagatccgcaacatcagaagaaaacttttgctgcatggcggaggtgctgctcttgctcgatgcgtttggagtgctcgtgcagtctgaaccagtcgaacagcttcaagcgctgttcaaaaggcactccgatgttaggttccggctgagggaggcgatatcctcgtgtcttcgcaagctatggctcctttcttctaactttaagcttcccgaaatgtatgacagccgaacgatcgatctagagttcttgcttcagaatgctaagatcgtgctctgtacagcttcgagctcgtaccgcctgctctacatgcagaaggcccagcccttggaggtccctgtcgtggacgaggccgcgcagcttaaggagtgcgagtcactgatacccctgcagctgcctggcgtccgtcacgctgttctcatcgatgatgagtacctgcttcccgcattggtcaaaagcaagctgaattcttgttga

SEQ ID NO: 150796 - DNA, 537 bp, Zea Mays
atgggcgacatcgacgggcaaggaacttgcgtgattcagggggagggggacagcgcggatgggcgacatcgatgggtggggaccttgcgtgattcagggggagggagctgttgcgcgtggcaggggcatggaggggctgagcagggggaaggcggggatgacgcggcagcggacgcaggtatcccgacggcgggcacgagatgcctggcgggtccccgactcgcgcgaccttccttcactgtgacggctggcggcggatctcgccttccggtttggtgggggcgcggaggtggcgggctgtcgaggaaggaacgcccgctgagcttccattgcggcggcggtggggaggacacgcggatccgcgtgggggaggaccgcgttgattgcgtcggcgatggggagaagggtgagagatccgcgggcgttgattgctggcggtgcggtgtggtggcgctgatggcggggcgggtttggggcagcgcgtgcgggaggacgatcgcggcggcagaacattggtgctgtggacgcctacagtaa

SEQ ID NO: 150797 - DNA, 838 bp, Zea Mays
cccagtagtgtccattcggtgtctgtctgtccactctcgtgtcctcacgccaggtccagtcaacctgccccagcgccatcccttatttaagtgtttgtccagggagccctgttgtctcaagctttagttggatccttgggcatctctgtgaaggtgtgtacaagcctgagttcatctccttagcctccgcgtcggctttgttcagttcatcaagtgccattccattgtctggtactctggtgccacagcaaccatccttccacctcgccatggtcagagtatctcgagaagtttgttacccaggtgaaccttgttcggtaatctccctagattagtgaaactcaccgaactgggtttcctaattctagagtcttgtgctgctcagaacggagttgtgccaccgcagaccggagccgtgaacagcctctgcgttgaccgaacaactcacgctttctccggtcgattccttgtgagcaccaaagtttagaattcccagaagaagatgataaaattcaagaagtggtttctgaagaggagtctgcttcagtgcctgctcatcaagtgatgggagccatctaactggggtttaatagagggatttagacctccgtctctgcaacaaaggtgatgaggagttctctatgtgttcatgaggctggagggcgcttccagttctagatgaggattagttaggcttgtgtataaggtttggagggttcctaccttcctgctagtgtaataagttatgcactttgagtatatcaggacttgtaataaatgtaactcttcctatgtaataaccttcagttttagaaatgaaaagaatatttttgtaaaa

SEQ ID NO: 150798 - DNA, 1103 bp, Zea Mays
gccgccaccttgcggtcgccttcttcctgcgcctgctgcgtggtgctgtactcaccgtacaggtaggaggagaagccccagacgcagagcaccgtggccacggccttctcccagccgaacgggtcgcggaacacggccacgccgccgatcacgttggcggtgagcacggcggtcatgcacacgccgctgtgcagcgacgacgtcaggtacaccatcccggcggtgcccatgaagcaggcctgccacgtgaccaccagcgcggccaccaccgcccagtacgcggccggcgagaggtcccagcgcgccagctccccgcgccacccgccgccagccgcggccagcccggcgaccgccagggccgtcgcggcggcctgcatgaccacctgcacctccaccgccatgcggaacccgccggacacggccctgcggtacaccagctccatcaccggcaggtaggcggcgaagagccccgcggcgccgagcgtgacggcgaggcccgcgaggtagctggcccggctcccgccgtcggggcgctcggccgacgacgaccggagcgcgagcagcacggagctgagcgtgaggagcacgacggcgttgaggctggagaaggtgagcgggtggcgcacgatggcggcggccagcacgagcgtgaaggccagctgcgtggacagcagcagcgacgaggtggacacgggcagatacgaggagctgtaggagaagagcaggttgttcacgcccatgagcacgccgatgacgacgcacgcggccaccagcagcggccgccgcgtgagccacgcgaacggccggggctgggactgggactgggagtgggaggcgggccggccggcgtagacgggcaccagcaggactgggaacccgaccgactgcaccagcgtggccacccaccggtcgcacccgccgtgcgcgaagtagtaccgggacagcaggctggacgccacggagccaccgaggagcgcagcgtagttggcgcacagcagcagcagccgcgcgcgccgccgactcgccgtgccatttttggcgtcggcgtccgtcgagggcgccggcgtgtcgaggagtgggaccggggaggtagtggagagcat

SEQ ID NO: 150799 - DNA, 537 bp, Zea Mays
atgggcaacaccgtggcgccgcgcatgtgccgcaaggaggccagcgcggccgccgcgacggccagggcccagcggacgcgtcccaagagcctcgtcgccgaggtgtcggcggcggtggctccagacgttgagccgaggcgctcagccgcagccgccgccgccgcctccgtcacgccgcggaagcgtcgggacgacgtcgagctcgacgaaacgacgagggcggggccggggcgctcgcgtgctcgtgcggggggagtccgagtctcgtgggcgggcggcgtcgggtccgacgacgacgacgccgtcagaaaggcaaaggcctcggtcgtcgtcacggtgaaggtcgtgctgaagaggaaggacgcggaggcgctggtggcgaggctgaacgcgcagggcgcgcgggagcgcaaggcccggatggaggagctcaagggcgagctccgtgccgaggactgcgtcggcggcggcgccagcacgtcgccgtgccgggacccgtggaagcccaggctcgctccgataaaggagaactactga

SEQ ID NO: 150800 - DNA, 6771 bp, Zea Mays
atggcagatagcgaggcttgctgttcagccatgtcgacggcgcaagggacagcgttgaagtcggcgccgataggcgcaggtcatcgggcccggcgcggccgccccgtggtgccgccgtaccgttctggctggcaagcatacggcggcgtttccctcgagggcagcgggttcctcggcggcctgcagcgcaccgaggagcgcgtcgctacgctggcgccccgcgcggcggcgcgcgacgcggaggtggtgaggccgctctcgaagctcccgaacagcagcattgggctctatgatccctcgttcgagcgtgacgcgtgcggcgttgggtttgtcgctgagctttctggcgattacaaacgcgagactgttaatgatgctattgaaatgcttgagagaatggcgcaccgtggtgcctgtggctgcgaaaagaacacaggagacggtgccggcattatggtcgctctaccacatgacttcttcaaagaggtcacaaaggatgctgggtttgagctacccccgccaggcgactatgctgttggaatgtttttcatgccaaccgatgaaaagcgtcgcgagaagggcaaagctgagtttaagaaggtcgcggaatcactgggacatgtaatactcgggtggcgtcctgttcctactgacaactcagacttgggtgaatctgcactcgagactgagccagtcattgagcaggttttcgttaccaagagttcaagatcagaggctgagtttgagcaacagctatatatccttaggagactctcaatcatctctgtccgagcctctctgaacattaagcgtggaggagagagggatttctacatgtgctctctatcttcaaggactattgtttacaagggccagcttaaaccgtgccagcttaaggggtactactatgctgacctaggtcaagaaaacttcatgagttatatggctctggttcactcaaggttctccacaaacacctttcccagctgggaccgtgcgcaaccaatgcgtgttttaggtcataatggagagatcaatacccttagaggaaacaagaattggatgacagcacgtgagggtctcttagaggcggagaagcttggattatcaaaggagcagcttgcaagaattctgccaattgttgatgctacctcttctgattctggcgcattcgataatgttcttgagcttcttgtccgtggtgggcgaagcctgctagaagccgtgatgatgatgatccctgaggcatggcagaacgatggaaacatggatcctgagaagaaagctctctacgagttcttgtcagcacttatggagccttgggatggacctgctctaatatcttttactgatggtcgttaccttggagctaccctggaccgtaacggtttgaggcctggtcggttttatgtgacgcacagtgggcgtgtgatcatgggtagtgaggtcggtgttgttgatgttcctcctgaagacgtgctgagaaaaggcaggttaaaccctggaatgatgctattggttgattttgagaatcacactgtagtggatgatgaagctctgaaagcacaatactctaaagctcacccgtatggggaatggctcaagagacaaaagatatatctcaaggatattgtagaatcagtaccagaaaccgatagggttgctccaagcatttctagctcacttcctgcaaagaatgagaacaaggaccatgttggtatcaatgggattttgaccccactgaaggcttttgggtacacggtggaagccctggacatgttgctactgccaatggctaaggatggagtggaagctctcggttccatgggaaatgatacaccacttgcggtgatgtcaaacagggagaagttgacttttgagtacttcaagcagatgtttgcacaagttacaaaccctccgattgaccctattagagagaaaattgttacatctatggagtgtatgattggccccgaaggcgacttgttggaaacaactgaaaaacaatgcaaccgtctttcacttaaaggtcccttggtttctattgatgaaatggaggctattaaaaagatgaattatcgaggttggcgaagcaaagtgcttgacataacatacccaaaaaagtctgggaggaagggcttggaagaaactttgaacagaatgtgtgctgaagctcgtgaagccatacgcgagggatatactattttggttctctcagatagaggattttcctcagaccgtgttgctgccagttctctcttagcagtgggagcagtgcatcagcaccttgttgcaaatcttgagaggacacgcataggattgttggttgagtcagctgaacctcgtgaagtgcatcatttctgcaccctgcttggatttggtgctgatgctatatgcccttatttggctattgaagcaatttggtgcttgcagaatgatgggaagattcctcctaatggtgatggacaacccaactcaaaggaagagctggtgaagaagtatttctatgcttctaactatggaatgatgaaagttcttgcgaagatgggaatatccacccttgcatcctacaaaggtgcacagatttttgaagctcttggtctttcttccgaagtgattggcaagtgtttcgaaggcacacctagcaggattgagggtgcaacatttgaaatgcttgcacgagatgcacttcgtcttcatgagttagctttcccatcaagaacccctccagctggcagtgcagatgcaaaggcccttcccaacccaggggattaccactggaggaaaaatggtgaagttcatctcaacgacccacttgcaatgggaaaactacaagaagcagctagagtcaacagccgggcagcatacaaggaatattcgaaacgaattcaggagctcaacaaggcgtgcaatttacgtggcatgctgaaatttaaagatatttctgacaagatatctttggatgatgttgaacctgcaagtgagatagtgaaacgcttttgtactggagcaatgagttatggttctatttcattagaagcacatactgcccttgctattgccatgaacaaacttggaggaaaatctaatacaggtgagggaggggaacagccctctcggatggaaccacttcctgatggctcaatgaacccaagacgaagtgcgattaagcaagttgctagtggacggtttggagtttccagctattacctgactaatgcagatgagctgcagataaaaatggcccagggtgccaagcctggtgaaggtggtgagcttccaggccacaaggttattggtgacattgctgtcacaagacattccacagctggtgtaggactgatcagtccacctccgcatcatgatatttattcgattgaggatcttgcacagcttatacatgatcttaagaattcaaatcctggagcccgtatcagtgtcaaactagtttctgaggctggtgtgggagttgttgctagtggtgttgtaaaaggacatgcagaccatgttcttatatctggccatgatggtggcacgggagcttcaagatggacaggtatcaagaacgctggacttccatgggaacttgggttggctgagacacatcaaactctagtagcaaatgggcttcgtggtcgagctgttctgcaaacagatggacagttgaagactggtagagatgttgctgttgcttgcttgcttggtgcagaggaatttggttttagcactgcaccactgatcacactcggttgtattatgatgcgaaaatgccacatgaacacttgtcctgttggtatagctactcaagacccagtgcttcgagaaaagtttgctggagaaccagagcatgtcattaacttttttttcatgcttgctgaggagctaagagaaatcatggcaaaccttgggttccgcaccattactgaaatggttggacgttctgatatgcttgaggttgatccagaagtagtgaagactaatgagaaacttgagaacattgatctctcactaatcttgaaaccagcttcagagattcgtccaggtgttgctcagtactgtgttgagaagcaagaccatggcctagacatggcattagataacaaactaatagatctgtcaagaactgctattgaaaagcaagttcgtgttttcatcgagactccaattcagaacacgaaccgagcagttggaactatgctcagtcatgaagtcacaaaacgttatcacatcaatggattgcctgctggtacaattcatgtgaagtttactggaagtgctggtcaaagctttggtgcttttctttgtcctggagtcactcttgaactggaaggagacagcaatgattatcttggtaagggattatctggtgggaaaattgttgtgtacccaccaaggaacagttcatttagtccagaggacaatattgtcattggtaatgtggctttatatggtgctaccatgggagaggcatatttcaatggtatggcagcagaaaggttttgtgtccgcaactcaggtgctcaagcagtggttgaaggaattggagatcatggatgtgagtacatgactggaggcactgtggttatccttgggaaaactgggcggaactttgctgctggcatgagtggaggcattgcctatgtttatgatgttgatgggaaattcagtgctcgctgcaacaatgagttagttgatctatatcatgtggaggaagaggatgacatcatcacattgaaaatgatgattgagcaacatcgtcgcaacactgagagtgttttggctagagacatactctccgattttgataatcttcttccaaaatttgtaaaagtatatccaagggactataagagggttttagaaaacatgaagttggaaaagagtgttgctaatcatgcaaaggagcctaagatggtaaatggaatatctgtgacgactaagaaagtacaacctgatcagtcagcaagccggccaacacgtgttgccaatgccaaaaagtaccgaggttttattacatatgagcgagagagtatttcttacagagatccaaaagagcgtgttaaagattggaaggaagttgcaatcgaatcaacacctggtccactattaaatacacaatctgctcgttgcatggactgtggtactcctttctgtcatcaggaaagctcaggtgctggctgtcctcttggaaataagatcccagaattcaatgaattagttcaccagaacagatggcgcgaagcattggatcgactacttgagacaaacaacttccctgaatttactggacgagtatgccctgctccttgtgaggggtcatgtgttcttgggattattgagaatccggtgtctatcaaaagtatagaatgtgcaatcatagacaaaggtttcgaagagggatggatgattccacgacctccacttcaaagaacaggaaggaaggtggccattgttggcagtggaccagctggtttggctgctgcggatcaactaaacaaaatggggcattttgtaactgtgttcgaacgtgcagaccgaattggaggtttaatgatgtacggcgttccaaacatgaagactgacaagattggcattgtccagcgccgtgttaacctaatggcagaagagggtgtcacatttgtggtgaatgccaatgttggtagtgatcctctgtactcaattgaacgtctacgttctgagaatgatgcagttattttggcttgcggagcaacaaaaccaagagatctcaccatccctggacgcgagctatctggagttcattttgcaatggaatttctccatgcaaataccaaaagtttactcgacagcaacctggaggatggtaaatatatatccgcccgcgggaaaaaggtggtggttattggtggaggtgatacaggaacagattgcattggcacatctattaggcatggttgcaccagccttgtaaatcttgaactcctgacaaaaccaccaagcaatagagctgctgataacccatggccccagtggccaagaattttccgtgttgactatgggcatcaagaagctgctaccaagtttggaaaggatccaagaacttatgaagtcttgacaaagcgttttattggcgatgaaaatggcaaggtgaaggctcttgagttagtgcgtgtgaagtgggagaaagtagatggaagatttcaactcaaggagatccaaggatcagaagagattattgaagctgatctcgtcctcctagctatgggattcttgggtcctgaagcgtctatcgctgagaaactgggtttggagaaggacaacagatcaaacttcaaagcgcagtttggagacttcgctaccagtgttgatggtgtgttcgcagccggggactgcaggcgtggacaatcactggtggtatgggccatcacggaggggcggcaggctgctgcagcggtagacaagtacatatcaaggcatgatcagaatgtcgcaggcgacatcactccctttggggcagggctcgttcagccggttggagcataaaaaaaacatagaccgaggcatgttttaggttctcgtcagtggttcctcacagcaaattttgttcttgtatattttgacgatagataaacagttgaaagttttggtgtctattgtttctttttcttctccggttattatgttttgcgtgtctgcatgtggttttctagtccaaaatgtacagttttccttttattaaatagatgtaaatttggtgggtgatatggcgatcattttgtgtgtatatgaaag

SEQ ID NO: 150801 - DNA, 653 bp, Zea Mays
aacgccccgtcttcttgccgctctccaccctgtcccaatggagctgagcgccgtcgccgcctgtactcctcccgctactactactccagatgcaacggcctggccagcaccgcctggggatccaagggagccgccgccggtgagcagctcgcgttagttgagctctcgcaccgccgtgctgctgcatatgcagatatgcttctcgctgcgagctagctggcgcgcgcggagcatggttgcaagggtgtgcgtggtgtgcgcgcgtggccggggaattgaggcgtcatggtccgagatatatatacatgtctagctcgatctcttgctaggtatcttatgagatttattgttcttagtttcagtattagcactccgatccctggaatgaacatgccttctatttcctttttcctctcttgttttctgtgtcaaagttgctggccattttccctgggattaagaagctgtaagtgacgcattcctggcgtgtagctcgttaattcctgtgatgttaggcatcatatcgtctcgtcttcttgagcagcattgttagtatatatatgtaagctgttgagaaagaccagaagtcttaagcctggaatgcatcagttacactttgtcatgtgtgtcaatgtaatctctctgttttcacc

SEQ ID NO: 150802 - DNA, 986 bp, Zea Mays
atggagcaacgtgagtggatgtacacggggcgtagaggaagaaacgatgtcactactgaatggattagaaagaccgatgatttcgttgaacgggcatatggcgaagctgctaaaggagcgagtctagtcccatgcccgtgcagcaaatgtgacaaccggaaaagaaaaccaaagaagaccatggtagaacatatttggaagaatggatttacgccgggctatactcggtggatatttcatggtgaagcgcattgtacgagagaggaggtgctgagacaacgtgtcgaggattatgacgcggatgcgggggtagcagatatgttgaacgactatcaggaggcacagtacacgggaggatgtatggatgacgagccagagccgactgcaaaagcgttctacgacatgttcgacgcggcacagaagccccttcacggccagacaaaggtttctcaactggatgccattgggcgtgtaatggcgttcaagtcgcagtatagcatgagtagagacgcattcgatggcttgttgacggttattgggagtctgcttccggatgatcatgttctgccaaagagcatgtacgaggcacagaaactacttcgtgtgagagcaaggagcactggctcgagcccagccattcgacctcggcacgacagctcacagcatcgcatttcacaactcgagagatggaggcgaggataatggcggagcgggcggcgggctgatcagaggatggcggagatgttccagtacatgcagagccttggcgccgcacagggcatcgctccgccacctccattgttccccccagttgaccctactctcttccacactcctgtgagtaccaaaattgtagttagatgtttgtaatgcatctggtataacacatgctatctcttctttgtgcaggccaatctggggcggcatccaacaaccctccggaagggttcagcccaacgcaaccccggccaaaccgcccacctcca

SEQ ID NO: 150803 - DNA, 1289 bp, Zea Mays
cttctccgcggcctttgcatcgcatccttccgtttctttcttcccctcccctccctatgttcgtggagaaagccagcaggatctttgcggcggcagagccaggcgtgatgcgtgctataacgcgtctcgtgccgtgaaaacctcgcgccttttctttctgcctcggctagtcggctggcttccgttctctttggcccaggacgacccagagacagcgtgcgtctaggaagcagcgccgaggatggcggaccacttcgcgttgatgacgggccggctgctgacggagtcgacgctccagtccgccatccaggaggcctttgccgatgccgtagcctcaacagccgccggctacgaccgtacagatccctccgctgttcctgaagatgttcagccgggcatgggcgtgggcaagggcaagggcaagagtggtgtcatggtggagtgcagaatctgccaagaggaaggcgacgaggcttacatggagacaccctgctgctgcaagggcagcttgaagtacgctcaccacagatgcgtccagcggtggtgcaacgagaagggagacaccatatgtgagatatgcttgcagcaattcgaaccaaattacactgctcctttgtttcggcatggaaggagcctaataaattcaaggggagctggagaagtacgggaaaacgtcggtgctagtcatggtcaaacctcggatcaggctgatggtgcatcaagcgttgattctcagaacctccacctgaaaggagtcgtatattgccgagtagttgccattgctttgatgattttgttggtgctccgtgacgcgatcttgcttatgctccgcgacgatgaaatgtgctcagtagagctaatcactctgctgctgttcagaacggctggaattgtcataccagtctacatcatcttggtatcagttaccgcattgcttcattggtgcaatcaacgacggatctttagaatccaggttgtgcacgagacgacggtttcagaacctcgtggagcagggggcctgcagcatatcatcaacattcggtaggaagctgcacggacgcacggtggttcctggtcaggcagcctctgtaaatacctgaaaagtgtttgagattcaggcttgtcgtaatggggtttggaagagacagaaccattgcgagactgtatagtttcatagcatagtttctatgtacaaaagaaattctgaaaacacatccactcaacttcaccaaatgatgaagacgaagttggatcggtgtctgttaagaaaattgagttagagttttaca

SEQ ID NO: 150804 - DNA, 1179 bp, Zea Mays
cttctccgcggcctttgcatcgcatccttccgtttctttcttcccctcccctccctatgttcgtggagaaagccagcaggatctttgcggcggcagagccaggcgtgatgcgtgctataacgcgtctcgtgccgtgaaaacctcgcgccttttctttctgcctcggctagtcggctggcttccgttctctttggcccaggacgacccagcgttccagcgatcgccgccgcatgccgaccacgggtttgtgctgatgattccacctctccagagacagcgtgcgtctaggaagcagcgccgaggatggcggaccacttcgcgttgatgacgggccggctgctgacggagtcgacgctccagtccgccatccaggaggcctttgccgatgccgtagcctcaacagccgccggctacgaccgtacagatccctccgctgttcctgaagatgttcagccgggcatgggcgtgggcaagggcaagggcaagagtggtgtcatggtggagtgcagaatctgccaagaggaaggcgacgaggcttacatggagacaccctgctgctgcaagggcagcttgaagtacgctcaccacagatgcgtccagcggtggtgcaacgagaagggagacaccatatgtgagatatgcttgcagcaattcgaaccaaattacactgctcctttgtttcggcatggaaggagcctaataaattcaaggggagctggagaagtacgggaaaacgtcggtgctagtcatggtcaaacctcggatcaggctgatggtgcatcaagcgttgattctcagaacctccacctgaaaggagtcgtatattgccgagtagttgccattgctttgatgattttgttggtgctccgtgacgcgatcttgcttatgctccgcgacgatgaaatgtgctcagtagagctaatcactctgctgctgttcagaacggctggaattgtcataccagtctacatcatcttggtatcagttaccgcattgcttcattggtgcaatcaacgacggatctttagaatccaggttgtgcacgagacgacggtttcagaacctcgtggagcagggggcctgcagcatatcatcaacattcggtaggaagctgcacggacgcacggtggttcctggtcaggcagcctctgtaaatacctgaaaagtgtttgagattca

SEQ ID NO: 150805 - DNA, 125 bp, Zea Mays
cggctctcttgtttcattgcctgcggtcgatagtcgagtgatgtattttcttcaaggccacagtgagcaggttactcttcttccttggacttcatattgccagaaattagacatgaatattgcag

SEQ ID NO: 150806 - DNA, 294 bp, Zea Mays
atggcaccgccctccgtgctcctccgcgccacatccgcctccttcacttcggctcctaagttctatctccgcataaccacttccggtgtctataccacaactgtgtcgccttcaaccctccaacgaggctccactctgccagaccacctcgcagcgtcgatttccgtccatggccagcgtcgatttccgtccacggcctcgtggtgccagagcctgtgcggtcatcgccggcctgctggtgcctatgctgtgatgatgatggttgctgccaacgtggtgccagagcaggtctag

SEQ ID NO: 150807 - DNA, 1140 bp, Zea Mays
gtccgtctctttctaccctcggcccctccttgctttcctccaccgccgcctcgacgtcccccggcgagccgaccgccgcagccacccctgcgccagcccgctgcatctgcttctcccgttccgtcgcgtcgcctcccctcagtgcgcggacgccgcgaggagaccatggcggcgaccgcggatccgagggcgaagccgccgcccgcggcgtcgcaccacctcaagccgtgggcgccacagccgcgccctcgcgcacgccgcgtgcctcccctcccaggcccggtagtgaccgggggaggcggcgcgcgcgatcggcgccgctcctcctcctcatcctcctcctcgtcgtcgcaccgacgtctcagcgccgacgcgggcaccgtgcagatggagctgccttgcgacggtcagataaaagatccccgtgccaagctcatgggccacctccgccctctgccgcccccgcccccgcccccgccgccgcctaagccgcaaccccggccgccgggacccgagccggcagcgccgcttccgcagccgacgccgtctcagccggaggaggctgcggcggccaggccctggaacctgcgtgaccggaagtgccgccgaccaacggcacgcggggcggcagcggctgcggcagcggcactcgacgcgtcgcacgcgcgggacgccgccggggcgggggcggagaaggcgcggctgcccgtgcccctggagcgcgcgccgttcgccgtggcgctgacggcggaggaggtggaggacgacgtgtacgctctgaccggcgcccggccgcggcggcgtccccggaagcgtcctcgcgtcgtgcagcggcagctcgatgcgctgttccctgggctgtggctgaccgagatcaccgccgacgcctacaaggtgccggacgagtagcaagccgccgaagccccgccgctgtctgctccagcgtccggccggccagctagtcgttcgccgttctaccattgatgggtcgccagaaacattaagcataatcttgtcgtctgtaagtaggcttagtcgtctcgatttgatggtaggtgcttgtgcccgctcgccatgtcccatcgcttgtaacacttttcgctcccccttaaagatcttaagctttgtcgtcctcgtcca

SEQ ID NO: 150808 - DNA, 1342 bp, Zea Mays
cgcaaacgaccacgccgtccgtctctttctaccctcggcccctccttgctttcctccaccgccgcctcgacgtcccccggcgagccgaccgccgcagccacccctgcgccagcccgctgcatctgcttctcccgttccgtcgcgtcgcctcccctcagtgcgcggacgccgcgaggagaccatggcggcgaccgcggatccgagggcgaagccgccgcccgcggcgtcgcaccacctcaagccgtgggcgccacagccgcgccctcgcgcacgccgcgtgcctcccctcccaggcccggtagtgaccgggggaggcggcgcgcgcgatcggcgccgctcctcctcctcatcctcctcctcgtcgtcgcaccgacgtctcagcgccgacgcgggcaccgtgcagatggagctgccttgcgacggtcagataaaagatccccgtgccaagctcatgggccacctccgccctctgccgcccccgcccccgcccccgccgccgcctaagccgcaaccccggccgccgggacccgagccggcagcgccgcttccgcagccgacgccgtctcagccggaggaggctgcggcggccaggccctggaacctgcgtgaccggaagtgccgccgaccaacggcacgcggggcggcagcggctgcggcagcggcactcgacgcgtcgcacgcgcgggacgccgccggggcgggggcggagaaggcgcggctgcccgtgcccctggagcgcgcgccgttcgccgtggcgctgacggcggaggaggtggaggacgacgtgtacgctctgaccggcgcccggccgcggcggcgtccccggaagcgtcctcgcgtcgtgcagcggcagctcgatgtaaggccaattccccatactgcccctcgtgctccacctataaccacttcatgttgcacgagaaagaaaaaaacgtagcattattctatctcgtcatcgaatatatataatcagttcttgttcggaagaacacaacgctccgatagatccagctaatctcgttctggctattgtgtcccgtggtgcaggcgctgttccctgggctgtggctgaccgagatcaccgccgacgcctacaaggtgccggacgagtagcaagccgccgaagccccgccgctgtctgctccagcgtccggccggccagctagtcgttcgccgttctaccattgatgggtcgccagaaacattaagcataatcttgtcgtctgtaagtaggcttagtcgtctcgatttgatggtaggtgcttgtgcccgctcgccatgtcccatcgcttgtaacacttttcgctcccccttaaagatcttaagctttgtcgtcctcgtc

SEQ ID NO: 150809 - DNA, 1615 bp, Zea Mays
gtctgcgagccgactagtcccggcacccgactccccactcctgaccggagtagccagctcccagacattgacgagacataaacccacttgcccacgcgcacggcaagccggcaaggccacgcgagaaattccatctcgagcagagcgcagcaacacgtgcgcggaggtcacagctccgatcgacaagccggccaagcagccacacatgcctcctcacatggcggcgatctcgcaccggatcgcaggatccggcccgcgcgtcgccgttgtggcgccgcctcgcccgcgggggcgcgctgccgtggtcgcgggtgctgcggcgaagggcgcacatcgggagcggacgctggagggcgcgagtgacgacctgagggccgccgcggctcagtgtctggactgggctcccgcgcggcgtcgggtgcgggccgccttcgcgcccgtgctccccaccctcgaccactgccttttcaagatggctcacaatgaaatccagatggaagagaattacgagaccaattcaaagggcgttgaaatattctggaagagttggctgccaagagagggcactgcaactaaggctgcacttttcttctgccatggatatggggatacctgcactttcttttttgaagggattgctaagaggatagcagctgctggttatgcagtttatgctatggattatcctggttttggcatgtcatatggtctccatggctatattgcaagctttgatggaatggtggaccatgtcattgaacagtatgcacgaataagaggcatgaaagaagtgtgtgagctgccacactttctcttggggcagtcaatgggaggtgcagttgccctgaaagtacacttgaagcaacaacaagaatgggatggtgtgcttcttgtcgcacctatgtgcaagatttcagaagatgtaacaccacctgcacctgtattgaaggcactgagcatattgtcatgtcttcttcctgaggcgaagttatttccgcagaaagatataggagatttggcatttagagatccaaggaaaaggaaagtagctgagtacaatgccatctcatattctgaccaaatgagattaagaacagcagttgaacttttaaaagccacgaaggacattgaatcacagttggaaaagatctcctctccattgctgattcttcacggagccgcagacatggtaaccgatcctcaggtcagcaaattcctttatgagaaagccagcacgaaggacaagaccctcaagctctatgaaggcagctaccattcaatcttagagggagaaccagatgaccggatttcaactgccattaacgacatcatttcatggctagattcacactgttaaatacccctttgtctatagcctctcatgtcctcatccattgttttggatttatagttccttattagagtaccatgggtctctagtgctttaaattttgccatggtgtgcagagataagtatctctcgaattaattagttgtgcttgctatcttgacactgttggttttatgttaattgcggacaccgcattcaatagcttggatcctgtcaacaagtatcagcattaccaggtccgattatcaaacaaaacaaaatgac

SEQ ID NO: 150810 - DNA, 2125 bp, Zea Mays
gtctgcgagccgactagtcccggcacccgactccccactcctgaccggagtagccagctcccagacattgacgagacataaacccacttgcccacgcgcacggcaagccggcaaggccacgcgagaaattccatctcgagcagagcgcagcaacacgtgcgcggaggtcacagctccgatcgacaagccggccaagcagccacacatgcctcctcacatggcggcgatctcgcaccggatcgcaggatccggcccgcgcgtcgccgttgtggcgccgcctcgcccgcgggggcgcgctgccgtggtcgcgggtgctgcggcgaagggcgcacatcgggagcggacgctggagggcgcgagtgacgacctgagggccgccgcggctcagtgtctggactgggctcccgcgcggcgtcgggtgcgggccgccttcgcgcccgtgctccccaccctcgaccactgccttttcaagatggctcacaatgaaatccagatggaagagaattacgagaccaattcaaagggcgttgaaatattctggaagagttggctgccaagagagggcactgcaactaaggctgcacttttcttctgccatggatatggggatacctgcactttcttttttgaagggattgctaagaggatagcagctgctggttatgcagtttatgctatggattatcctggttttggcatgtcatatggtctccatggctatattgcaagctttgatggaatggtggaccatgtcattgaacagtatgcacgaataagaggcatgaaagaagtgtgtgagctgccacactttctcttggggcagtcaatgggaggtgcagttgccctgaaagtacacttgaagcaacaacaagaatgggatggtgtgcttcttgtcgcacctatgtgcaaggtatttctcaaactcccaattaccatcagattacgtcatcacacaatcacatccttttggttgtgttagtataaggtgtgtatatgtttcactgtccactaactatccaatcatgacttgtgctagtgcacaatagtggattgtagttcacagttgacagtaggtggaaatatagtgcttggtgaaatttgggagccactggtcaagaaatgacttcttatggatatgtttgcaaaacaattttattcatagttactgataactgctaagtccatgccaaatttatttatttttcttgcaatctagcatatttccagttttacttcatggtagggcaactaacctgaagaatgcatgaagaaatttgggagccactggtcaagaaaggacttcatagtaactggtgttggaatctcccttggaagtcttttttcatgacttcttatgggtatatttttgtctcatctttcttgttcagtgattttataagactggcttctctttggcaagatttcagaagatgtaacaccacctgcacctgtattgaaggcactgagcatattgtcatgtcttcttcctgaggcgaagttatttccgcagaaagatataggagatttggcatttagagatccaaggaaaaggaaagtagctgagtacaatgccatctcatattctgaccaaatgagattaagaacagcagttgaacttttaaaagccacgaaggacattgaatcacagttggaaaagatctcctctccattgctgattcttcacggagccgcagacatggtaaccgatcctcaggtcagcaaattcctttatgagaaagccagcacgaaggacaagaccctcaagctctatgaaggcagctaccattcaatcttagagggagaaccagatgaccggatttcaactgccattaacgacatcatttcatggctagattcacactgttaaatacccctttgtctatagcctctcatgtcctcatccattgttttggatttatagttccttattagagtaccatgggtctctagtgctttaaattttgccatggtgtgcagagataagtatctctcgaattaattagttgtgcttgctatcttgacactgttggttttatgttaattgcggacaccgcattcaatagcttggatcctgtcaacaagtatcagcattaccaggtccgattatcaaacaaaacaaaatgac

SEQ ID NO: 150811 - DNA, 1792 bp, Zea Mays
gtctgcgagccgactagtcccggcacccgactccccactcctgaccggagtagccagctcccagacattgacgagacataaacccacttgcccacgcgcacggcaagccggcaaggccacgcgagaaattccatctcgagcagagcgcagcaacacgtgcgcggaggtcacagctccgatcgacaagccggccaagcagccacacatgcctcctcacatggcggcgatctcgcaccggatcgcaggatccggcccgcgcgtcgccgttgtggcgccgcctcgcccgcgggggcgcgctgccgtggtcgcgggtgctgcggcgaagggcgcacatcgggagcggacgctggagggcgcgagtgacgacctgagggccgccgcggctcagtgtctggactgggctcccgcgcggcgtcgggtgcgggccgccttcgcgcccgtgctccccaccctcgaccactgccttttcaagatggctcacaatgaaatccagatggaagagaattacgagaccaattcaaagggcgttgaaatattctggaagagttggctgccaagagagggcactgcaactaaggctgcacttttcttctgccatggatatggggatacctgcactttcttttttgaagggattgctaagaggatagcagctgctggttatgcagtttatgctatggattatcctggttttggcatgtcatatggtctccatggctatattgcaagctttgatggaatggtggaccatgtcattgaacagtatgcacgaataagaggcatgaaagaagtgtgtgagctgccacactttctcttggggcagtcaatgggaggtgcagttgccctgaaagtacacttgaagcaacaacaagaatgggatggtgtgcttcttgtcgcacctatgtgcaagggcaactaacctgaagaatgcatgaagaaatttgggagccactggtcaagaaaggacttcatagtaactggtgttggaatctcccttggaagtcttttttcatgacttcttatgggtatatttttgtctcatctttcttgttcagtgattttataagactggcttctctttggcaagatttcagaagatgtaacaccacctgcacctgtattgaaggcactgagcatattgtcatgtcttcttcctgaggcgaagttatttccgcagaaagatataggagatttggcatttagagatccaaggaaaaggaaagtagctgagtacaatgccatctcatattctgaccaaatgagattaagaacagcagttgaacttttaaaagccacgaaggacattgaatcacagttggaaaagatctcctctccattgctgattcttcacggagccgcagacatggtaaccgatcctcaggtcagcaaattcctttatgagaaagccagcacgaaggacaagaccctcaagctctatgaaggcagctaccattcaatcttagagggagaaccagatgaccggatttcaactgccattaacgacatcatttcatggctagattcacactgttaaatacccctttgtctatagcctctcatgtcctcatccattgttttggatttatagttccttattagagtaccatgggtctctagtgctttaaattttgccatggtgtgcagagataagtatctctcgaattaattagttgtgcttgctatcttgacactgttggttttatgttaattgcggacaccgcattcaatagcttggatcctgtcaacaagtatcagcattaccaggtccgattatcaaacaaaacaaaatgac

SEQ ID NO: 150812 - DNA, 546 bp, Zea Mays
atgccgcctccctccagatccgccgcttccctgcccctgctcgtcgattcggctctactacccaccacgccgtccctgtgtcagtctaggtttacccctcttgctcctgtgtcagtctcagttcctagctctgcatctcaaggcagcaacattttcaagaccaggattgaagatgcaaacaacgttgatgcaggtagcagatttacaggaaacttttggggccttgatatcgattacctaatgtttgttgggattgctttcattggatttttctttgttggatcggtcactaccttggcgtatttaggccccagagaatcgatttttcaggttatatctgatttgactcaaggtagggtacacagtttacaagattacattttcattacaagatgcttgattgcaaccaatattttcatttctttggtgcttgtgtcgaagtatcgccttgcaaagtatataccagactctcatgctgaaggtttcaaggacgacaagaaagttcgagtgattccctctcgaacatggattatgtaccgtaagtga

SEQ ID NO: 150813 - DNA, 4579 bp, Zea Mays
gatatgaataattttttaaaagaatcatccgacagtttatttaaataattatctaaatatagacatcttcttctgttcctgtgttatcgttagacaaagatagaaaaagtaaataacttttcagagtgcaaataagatatagaaaatctattggatgcgagacctacctagccaaccgcttcaaatcaaagttcaaacctacaacaagcagtaaaataaccacacagacgagacggcaacacacacattgagagctctaccgagcgaaagagacccaggaaaagccaacgggacgccaaatccattcctcctccctcgtccacaggccgtgagggccgaacccgaagccagccgaggaagccaggcgacaggcgacgccaagtcgagaagagcctaggtggtcgctcgcgggctgcgagggagagccgtggcggagtcgccgtcgtcgcccacggaggaggacacggccgccgccgccgcagtggcatggcgacgccgacgcccatgcctggaggcgaggggacgctcgcagcggtgatgccgcggtccccgtctccgacgccggcggaggcggggacctcggcgaccgagacgcccgtgctgatattcctttactttcacaaggcgatccgcgcggagctcgaggcgctgcacggcgccgccgtgctcctggccaccgagcgcaccggcgatgtagagatgctcgccaagcgctgccgcttcttcttcaacatttacaaacaccactgcgacgccgaggatgcggtcatttttccagcactcgatatccgagtaaagaatgttgcagggacctattccttagagcataaaggagaaagcgatctttttagccagttatttgatctcctgcaattggacatacataatgatgatggtcttcgtagggagcttgcgtcatgcacaggcgcgatacagacatgtctcagccaacatatgtccaaggaggaagaacaggtctttccattgcttacaaagaaattttcgtgtgaagaacaagctgatttagtgtggcaattcctatgcaacattcctgtcaatatggtggcagagttccttccatggctttcaacttctgtcacatctgatgagcaccaagatatccgtaactgcttatgcaaagtagttcctgatgagaaacttctccaacaggttgtattcacatggatggaagggaaagcaacaagagaagtggcagagagcattgctgctggtatttcagcaagaaataatagtgttgaggatgtcccagaccaagggaagattcatatttgtttacatcacaattctaaacttgggagtaaaaactgtggagaatctaatggtcctcaggctgacaagcatcctatagatgatattttatactggcacaatgctattcgtatggagttacgtgatataaaagaggagacaagaagggtgcagcaatctggggatttttctgatatatcagccttcaatgagaggcttcagttcattgcagatgtatgcatctaccacagtatcgctgaggatcaggttgtttttcctgcagtcgatagtgagctgtcctttgtgcaggagcatgctgaagaagaatgcaggtttaacaattttaggtgtttaattcagcaaatccaaatagcaggagccgaatcaactgcattggacttctactcaaaactgtgttcacatgctgataaaatattggaggcaatcgaaaaacacttctgcaatgaagaaaccaaggtgcttcctcaagctaggatgctcttctctcttgagaagcaaagggaactttcatacaaaagtttgtgtgttatgccattgaaattattggaacgtgttttgccgtggttggtgtcgaagctgagtgatgttcaggcaacttcatttcttcagaatatacgcttggcagcatcaccatctgaaactgcactggtcactcttatctctggttgggcatgcaaaggccgggataaatccaaagatggagaatatttatgcttaacatcaggtgcggcgagatgtctatcagatgatgtagatgatctgggaaaatgccgatcattctgtccatgtgcttcacccaacagctcagatctttctctgcagctacatactgagaatgattctaggccaggcaagcgaggaaaagatgcagtatctttttctcatactaatggaatctactgctctcaaactgctgacattgaagcaattccatgtagcaaaaaaccatgttgtattcctggtttgagagtagagagtagcaatcttggtattggttccttggcttctgcaaagtcttttcactctttatcatacaattcaactgctccttcactatattcgagcctcttttcatgggagacagatacatcattgtcttgttcggacagcatttcaaggccaatcgatacaatattcaaatttcataaggcaattcgcaaggatttagaatacttagatgttgaatctggcaagctcattgatggcaacgagtcctgccttcgccaattcattggaaggttccgtttgttatggggtctttacagggctcacagcaatgctgaggatgaaattgtgtttccagcattggaatccagagaaacattacacaatgtgagccattcatatactcttgaccacaagcaggaagaacagttgtttgaagatatctcaaatgttctctttcaactttcacaactacatgatagccagggccatgcccagactgaagttaatgaagtaaagaaaagctgtttccattcatctaatgatgtcgattttgctagaaagtataatgaacttgccacaaaacttcagggcatgtgcaagtctatccgggtcgccttgactaatcatgtccatagagaagaacttgaattatggccgttgtttgataaacatttttctgtggaggagcaagataaacttgtaggtcgtataattggttcaacaggtgctgaggttctccaatctatgttaccctgggttacatcagttctcactcaagaggagcagaacaaaatgcttgatatgtggaagcaagctacaaaaaatacaatgtttggggaatggctaaacgagtggtggaagggagctggaacagcatctgattcttcagcagaggcgtcctctgctccagaagatagtcatttacaagataagcttgaacaaaatgaccagatgttcaagcctggctggaaggacatatttcgaatgaatcagagtgaacttgaggctgaggtgcgaaaggtttcacgagattctacacttgacccaaggcggaaggcgtatctaattcaaaatctcatgacaagccgctggatagctgcacagcagaagttaccagaaccaaattctgaagaatgtaatcacgatgccagtatacctggatgtgcaccttcataccgagaccaggagaaacaaatttatggttgtgaacactacaaacggaactgcaaacttgttgctgcatgctgcaacaagctcttcacatgcaggttctgccatgataaagttagtgaccatacgatggaaaggaaagcaacacaggagatgatgtgcatggtatgcctaaagattcaacctgttggttcgttctgccaaaccccatcttgcaacagactatcgatggcaaagtactactgtaacatctgtaaattttttgatgatgaaaggactgtgtaccactgtccgttttgtaatttgtgtcgtcttgggaaaggtcttggtgttgatttcttccattgcatgaaatgcaactgctgccttggaatgaaattaactgagcacaaatgtcgggaaaaagggctagagacaaattgtccaatatgctgtgacttcctatttacatcaagtgccgcagtcagagccctcccttgtggccacttcatgcattcagcttgctttcaggcatacacttgtagtcactacacttgccctatctgctgcaaatccttgggagatatggcggtttattttggcatgcttgatgccttgttggcggctgaagagcttccggaggaataccgtgatcggtgtcaggatatactttgcaatgactgtgagaggaaaggtagatgtcgatttcattggttataccacaaatgcggctcctgtgggtcgtacaacacccgagttatcaagactgccacagcagattgctctacaccaaactagttggagggaacatttgtgcttaattagtcactgtattctttgtttctctttgtacatatcttctagagagaaggaaaaagagaagttgtgtagcatagttataccataatttcattcgtagccatttcagttttgtaagtgtagcagtttacaatttactaggtctagtgcgttatactgacaaaattgacggttctgatggaagaacataacctgaggaaattggcttgttagaagtactcgtgagcatgttctgcaatttggcggccacttagactatcttcaattatatcttctatattccttctctatatccctcttttatggactcttaaaagatttctttctttatatctatctcttctatacgttaattaacttacaagagatatat

SEQ ID NO: 150814 - DNA, 725 bp, Zea Mays
atggaggccgcaagcaatcaggagccggggagatgcggcggcgacgacgacgaggcgaagaggagggaggcagagcttgcgtcaagcaggctcctcgacccggggttcaagccctccaaactatcccaggaccggctcgacaagtttaaggaattacacaagaaacggttacagataactgaaaagccgaagtataaaagaaaaccgaaaggaaccactgagagaagtatcaaagtaaccagcaattataaattcactgataaggatgcatctgctgatagttctccaagagatgtgcatcatatgtcatcagttacaggaattcaaggggatcctgcatcaggcctgtcctcgaggaacaaaaggaaactacattgggggcttgacattaaagaacgatgggaaagaaaggcaaacatgtaaaaatatctgaagatccaacaacaaaagcatatccacaccgcactcatttgaaatttgaaagctgagggacaaaacaaagcggccgaccttttccacggatcatcatgttgctggtaaaggtttgtcagctagcagaactgatcagtaagctagtatctaatttttcagtgttttgtctaacgttttctccagacgtttggttgggactttgctctgttgtattgtccgatccaaacttgcaaagttcaagtgcgatgataatttgtttattgctgtgtgatatagtttgggtttgtttgtcc

SEQ ID NO: 150815 - DNA, 2409 bp, Zea Mays
gcagccatgccttccctaagccacctcgaccgcggcctcctcctcctcctcccactcctcgtactcgccgcggccgccgcgtcgcacggcgacgacgacgacgacgcgtcgtacgccgtctccgcgtgccggtcgcggccgtacctctgcggcggcgtgaacatcagctacccgttctacctagccagcgacaccgaggccgtcccggccctggccggcgagtcctactgcggctacccgggcctcgccgtcagctgcggcggcgagcccgtgctgaggctcggagacgtcagctacgcggtcttgcgcatcgactacgccaaccaggtcgtctcgctcgcctacgcggacgctgccgcgggcgacgacggcagatgccccgtggtggaccacaacgtgaccatcccgcaggacgccccggcccggctgtccctcctccacagcgtcgtcgactacctcctcttcttcgtcggctgctccttcggcccgggcccgggcccggaggccgccgtccccaggccgccgaagccgcggtccatcaagcccgtcacctgcggagacggagacctgggcggcgccggcacggccgcggccgcctccatgacgttcgtgctcccgcgcagcgaggtgcctcccggcgactggtcgagcgcgtgccggcaggtcttcgaggcgccggtgctcagggactccgtcccgtccgacgcccaggacccgctgtggaggagcggcggctacggcagcgccctccgcgcggggttccagctgggctgggaccgcagctccggcccgtgcggccaatgcgagcagtccagcggcggcatgtgcgggtacagccgcggcggcgagttcctgggctgcctctgcgccgacggccgcgtgcgcgacggcggctgcagtacgatatcagctgacccctcctccgctctgtctttgtccgagtcaaaaaggaaagcaagaattcttgctggtgccctgggtggtggtgctgctgcgctgcttgttggtgctgccatatttttgttcgtcatcatgcgcaagaggaagcagaagaagaaagtgatcaactcgtcttcgaagctcctcaagtacagcggctctggtgggaccccgcgttcgcgggttggtgacatggagtccggcagcatcgaggacccgccaacgcaccacttcacctacgaggagctcgaggaggcgaccaaccgcttcgacgaaagcagagaactcggcgatggcggcttcggcaccgtctacaaagggtacctcagggacgggcgcgtggtggcggtgaagcggctgtacaacaacgggtaccggcgcgtggagcagttccagaacgaggcggccatcctgtcggggctgcgccaccccaacctcgtcatgttctacggctgcacgtccagccacagccgcgagctccttctggtgtacgagttcgtggccaacggcacggtcgccgaccacctgcacgggcagcgggcccccgagcgcgccctctcgtggccgctccgcctcagcgtcgccgtggagtccgccgcggcgctcacctacctgcacgccatcgagccgcccgtcgtgcaccgcgacgtcaagaccaccaacatcctcctggacgccgactaccacgtcaaggtcgccgacttcggcctctcccgcctcttccccctcgacgtcacgcacgtctccaccgctccgcagggcacgccagggtatgttgatccagagtaccaccagtgctaccagctgacggacaagagcgacgtgtacagcttcggggtggtcctggtggagctcatctcgtccaagccggccgtcgacatcacccggcaccgcagcgagatcaacctggccagcatggccatcagcaagatccagaagtgccagctggaggagctcgtcgacctcggcctgggctacgacaccgacccggccaccaggaagatgatgacgatggtcgcggagctggccttccgctgcctgcagcagaacggcgagatgcgcccgccgatcaaggaggtgctcgaggtgctcaggaacatccagggcgagtgtctgacgtcggggaaggatggggacaagagcaaggacgggcccttctctcccaccacggttcacgctccgtgggacagcaggtccacgacgcccaacaccagcagggactaggatagttagtgcttgaggactgagaccggccgaggtttaattcgtgtctgtattgctgctgtgtgactgctaggcatgccatctgttttcaggcttcgtagttagttcctggtgatgtaaatatttgttttgttggtgctgtcaggacagagggaatgcacatacatgtgtaagagtggcgaatggtattatacatatatatacacgggtacttactgaataaatagatagatgtcgcttgtgact

SEQ ID NO: 150816 - DNA, 2460 bp, Zea Mays
gctagctaacaaagcagctagatgaagggtgaacccagccaacctcgtcttctccccgccatggctgctcacctaccacgcctccccgtcctcctcctcgtcctcctggctgcccatgtcgtctccacctccgcccatgccgagcctcctcttccgagcccttacaacacctccgcccatggcgagcctcctcttccgagcacttacaacccatccatgtgctcggaatcgttccggtgtggcggcgtcgagatccgctacccgttctatcttgccaacgcaaccgccgactacagcgggaactactactcctgcggctacaccgacttgagcgtttcctgcgaactcgaggtcgaggggccgtcgacgacctggacccctaccatccgtctcggcggcgacaactacaccgtcaagaacatctactatgactatcataccatctcactggcggacagagatgtgctcggaggcggcggctgccccgtcgtccgccacaacgtcagcttcgacgagacgtggctgcacaacgccagcgccttcgacaacctcaccttcttcttcggatgccactgggggccacgcgatacactgcctgaatttgccggcaacaacatcagctgcgccgggttcagtactccaactgtcagtggaggctccttcgtgttcaagcctgaagatcttgacgaacaagaggagcaggagttggcttcacactgcgacgaggttttctccgtgccagtgggaagcgatgctctgcgggcgaccgacaccttcagcctcacagggtacgggtacggcgacctgcttaggcaggggttcgagttggaatggaatcggacatcggaggatcagtgtggccagtgcgagggatcgggctcgggctcgggctcgggctcgggcggatggtgcgcctacagccagaagagagaattcctgggctgcttgtgcagcggagggaaggtgggcaacccgttctgcaaaccatcgaagtcaaaaaggaaagcaagaattcttgctggtgccctgggtggtggtgctgctgcgctgcttgttggtgctgccatatttttgttcgtcatcatgcgcaagaggaagcagaagaagaaagtgatcaactcgtcttcgaagctcctcaagtacagcggctctggtgggaccccgcgttcgcgggttggtgacatggagtccggcagcatcgaggacccgccaacgcaccacttcacctacgaggagctcgaggaggcgaccaaccgcttcgacgaaagcagagaactcggcgatggcggcttcggcaccgtctacaaagggtacctcagggacgggcgcgtggtggcggtgaagcggctgtacaacaacgggtaccggcgcgtggagcagttccagaacgaggcggccatcctgtcggggctgcgccaccccaacctcgtcatgttctacggctgcacgtccagccacagccgcgagctccttctggtgtacgagttcgtggccaacggcacggtcgccgaccacctgcacgggcagcgggcccccgagcgcgccctctcgtggccgctccgcctcagcgtcgccgtggagtccgccgcggcgctcacctacctgcacgccatcgagccgcccgtcgtgcaccgcgacgtcaagaccaccaacatcctcctggacgccgactaccacgtcaaggtcgccgacttcggcctctcccgcctcttccccctcgacgtcacgcacgtctccaccgctccgcagggcacgccagggtatgttgatccagagtaccaccagtgctaccagctgacggacaagagcgacgtgtacagcttcggggtggtcctggtggagctcatctcgtccaagccggccgtcgacatcacccggcaccgcagcgagatcaacctggccagcatggccatcagcaagatccagaagtgccagctggaggagctcgtcgacctcggcctgggctacgacaccgacccggccaccaggaagatgatgacgatggtcgcggagctggccttccgctgcctgcagcagaacggcgagatgcgcccgccgatcaaggaggtgctcgaggtgctcaggaacatccagggcgagtgtctgacgtcggggaaggatggggacaagagcaaggacgggcccttctctcccaccacggttcacgctccgtgggacagcaggtccacgacgcccaacaccagcagggactaggatagttagtgcttgaggactgagaccggccgaggtttaattcgtgtctgtattgctgctgtgtgactgctaggcatgccatctgttttcaggcttcgtagttagttcctggtgatgtaaatatttgttttgttggtgctgtcaggacagagggaatgcacatacatgtgtaagagtggcgaatggtattatacatatatatacacgggtacttactgaataaatagatagatgtcgcttgtgact

SEQ ID NO: 150817 - DNA, 1654 bp, Zea Mays
tcacacgcgatggctcctctgctcctgctcctgctcctcttccccgtccagctccagctcctgctcctcctagccgtagccgacgccgtccccggtctctgcgccagagccacatgcgccggccatgtcatccagtacccgttctggctcaactcctcggcgcccgactgcggccaccgccacgggatcggccttgtctgcgagggcaactcgacgctgaccctcccctacatgtcccacagatacgtagtgtccagcatcgactacaagacgcgtaccgtgctggtctcggacgccgacatcggcgacgagtacgacgcggccggctgcccgcgtgtccgggtgaacctcaccatcgacaccgcctggctgcggcccgcggcctccgacgccaacatcaccttcctgtacgactgcaagaagagcatcaccctgccctccgccgtggaactgagtgggtgccattggcaacagcagcagcagcaacaggattattgccgtaggtcgtacgtgctgccggacggcgggatcacgggcgcggaggcgcaccagtacgggtgcgaggacgtggtggtggcgccggtgctggacgcgcacaggagggagatcctgggcgcgcccccggcgaacggatccctccgccgggtgctgcagggcgggttcgagctgaactacgacacccactccgagctgtgcgaccggtgcggggcctccggcgggtggtgcggctaccgacgcgacgaggcgcccgccgccggcgccggcggcgggctgacgttcgcctgcttctgcgacggcggcccgacgaccacgggcctgtgcggtgccgaatctagctgtggggagaatctggctgtgtagggaatttaagtatcattaggattacgtgcgaaagaagataaaattgtccatggggctcaggatctataaagtgacggattactactattgcgacgactcaaccgattatatgtttatattgatttttaatggtttttactcaaacgaattttatagaagctggctgaaaagctgagtgtttggtagttcgtaacagcttttggtggccagaaactgcaaaaagtcaaaacaaacaggggctttgtgttcagtctcagtagtttgtagttcgcggtgcgccgcgccgcgctcagttgttgcctggactggagtgtggaaaattccccagtccgagtcaaaaccaggagcggggcccgaacagcaaatggacaagcggacacggcatagcggacaagccttcgcctgctctgccttcagccattcacccattcaggaaaacgaccgacgtctgacgggactggagcacgcgcgtcattcggatcggaacatatctttcagaaggaaataaaaaaatctcgactggaaacttggaaggtccgcaaggtcggtttcatttcatggcagcggaagaaactgtagggtcttcagtctattggtcctcgaccccgtgttggatggatctccgaccaaccgttacctgttacgtttggtttggtagtactgagagtgagacctcggcatgtagatatttctatatataaataatcgtaatagtgttgagacgttattatagacatgggttatttaattatctatcttggtcgtcatcaatgttaaatgctcatgaatattc

SEQ ID NO: 150818 - DNA, 1263 bp, Zea Mays
atgtatgtgaaattggaggaggtggtccatacagaggtggagcatatgcaggaggggcatacggaggtactgagaaagaagtttgacttccatccgcagcaggtggaggggcatacagacgtaccgaggaaaaagcttgaattctggcttgggaagttggaggttgaccatatgaaggcggcgagatcaaaaaggaatgaaggacctattgttggtgctgttgttgccgttgcattcctgtgtctagtcattctcacatgcttcttggcttgtagacatggttcgctgcccttcaaatcgaagaacaaaccagggacaaggattgagtccttcctacagaagaacgagagtagtatacatccgaaaagatacacctacgcggacgtgaaaagaatgacaaaatccttcgctgtgaagctaggccaaggtgggtttggtgctgtatacaaaggcagcctccacggccgacaggtagcagtcaagatgctgaaggacacccaaggtgacggcgaggaattcatgaacgaggtggctagcatcagcaggacttctcatgtcaacgtcgtgacacttctagggttttgcttgcaagggtcgaaaagagcactgatctacgagtacatgcccaatggttcgctcgaaaggtatgccttcaccggtgacatgaacagtgagaatttgctaagctgggaaagactatttgacatagcgattggcacggccagagggctcgaatacctacaccggggatgcaacactcggatcgtgcattttgacatcaagccacacaacatcctgttagaccaggatttctgccctaagatctctgactttggactggccaagctatgtctgaacaaagagagcgctatctccattgttggcgcaagagggacgatagggtatatcgccccggaggtctactcaaagcaatttggaacgataagcagcaagtctgatgtctatagctatgggatgatggtccttgagatggttggagcaagggacaggaatacaagcgcagatagtgaccatagcagccaatatttccctcagtggctttatgaacatttggacgactattgtgttggtgcttccgagattaatggtgagaccacagagctcgtgaggaagatgatagttgtaggtctgtggtgcatacaagtgattccgactgatcggccaacaatgacgagagtcgtcgagatgttggaagggagcacaagtaatctagagttgccacccagagttctcttgagctga

SEQ ID NO: 150819 - DNA, 1133 bp, Zea Mays
taacaacgcagcttgacgagggtgaacccagctccacacctcgtctaccacgtcttctcctcgccatggctgctcacctaccacgcctccccgtcctcctcctcgtcctcctcgctgcccatgtcgtctccacctccacccgtgccgagcctcttcttcccagcacttacaacgtctccatgtgctcggaatcgttctggtgcggcggcgtcgagatccgctacccgttctatcttgccaacgcaaccgccgactacagcgggagctactactcctgcggctacaccgacttgagcgtttcctgcgaactcgaggtcgaggggccgccgacgacctggacccctaccatccgtctcggcggcgacaactacaccgtcaagaacatcttgtacgactatcataccatctcactggcggacagcgatgtgctcggaggcggcgagtgccccgtcgtccgccacaacgtcagcttcgacgagacgtggctgcacaacgccagcgccttcaacaacctcaccttcttcttcggatgccactgggggccacgcgatacactgcctgaatttgccggctataacatcagctgcgacgggttcagtactccaactatcagcggtggaggctccttcgtgttcaagactgaagatcttgacgaacaagaggagcaggatttcgcttcacactgcgacgaggttttctccgtgccagtgggaagcgaggctctgcgggcgaccgacaccttcagcctctcaaggtacgggtacggcgagctgcttaggcaggggttcgagttggaatggaatcggacatcggaggatcagtgtggccagtgcgagggatcgagctccggcggacggtgcgcctacaaccagaagagagaattcctgggctgcttgtgcagcggagggaaggcgggcaacccgttctgcaaaccctcaagtaaagtcctgaaccgagcctcccttatttttttttcattttttgcaatcaccagagagcacgcatcggttgcgtcagtagcttgcaacctcgtagctagccccgcagtgtcccctgtgtgcgagtaccgcgctgctccagcttgcctcctgctaacgcctaacggtgaatgcttcatgcttgacatgatctag

SEQ ID NO: 150820 - DNA, 710 bp, Zea Mays
gtggcctcccactgcacccagtccactcgcagtcgcagctagtccggtccccggtccgacctatcccagtgacaccatctatcgtcggtcggggacgatgaggccggccgcgctcttcctcgccgcggtgctggccagcgtcgtcctcctcctcgccgccggccgcgccgcgggcgacttctcggccctggcgccgtgcgatgtgacgcagctgaccccctgcgcgagcgcgttcgcggggaaggcgtcgcccacggccgcctgctgcgccaagctcctgtcccacgggcccggctgcctgtgccggtacaaggacgacgccagcctgaagcgcctcgtcgacgccaggcacaagcgcagggtgttcaccgcgtgcaaggtgcccgtcccgagttgctagccgtactcctagtcctccaagctcatccgtcggccgtcggcgcaagcagccacgcacggcgaagaaataagatggacggaggagagaggggaattgttcgccgtggtctgtggtgtccggccaaggatttggctggttagatttgttcgcttcttcactgtctcgcacaaaaaaccagctcgtgggaggtagtgtgtttgtgttggattgcgttagttcgaagttcgaactcatgtcgccaattttccatgcattgcgaaataaaaatcaccacaccatcgtcgctaaagaaaacataccgacgtcatgc

SEQ ID NO: 150821 - DNA, 2089 bp, Zea Mays
atgtcatccgaggcggtgaaggtgacaatgctagaatcgatgttccgcagacggaagcgtgaggagcagtgggctgtcaagaagaagaaggccatgcccgagaagaagaagtccatcgagagacgcaagctcatattcagtcgtgcaaagcggtgtattccggggtcaatcggactacagtgctgttggaggaagggaaccggacaaatcaccccgtcgtctcgtcccgtagtcactcgcagagtcgcagtcgcagcccctgcgcccaccgggatcgtgatggagagctgggtccgcgcggtggtggaggccatccactcctctcgctcccagacagtcatctacctcgccggcggtgcatcccaggcgctcggttggctcctctccgtgcccggcgcttcgggcaccgtcctcgaggtcgtcgtgccctactctagggcctccatggcgcagctccttggcaagatgcccctgcaattcactagcaagcaggctgcagaggacatggcactggccgcatacaatcgagcactcaagctttctggaccaggtctgcaagttatgggtgttggatttactgggtcactggcgagctcacgtccaaaacatggtgaccacaggttttacgtgtcaacatggacacataattgtctcaggacatcacatgttaccttgtcgaagggtttacggagtagggaggaagaagacaaggtttcaagctactttttgcttaaggcaatagcagatacctgcagagtttctgcaaccattcagtcagacattcacaaatctgaaattccagaagaaatcatggaacaatttgatgaagatcaagaactccagcaagttattaatgggcaagtttgcatgaaagtatataattttgctgctccggcggaaagtaacttgaacagaaaaataattctgcctggttcgttcaaccccttgcacgatggtcaccttagattgctagaagctgcagtaagcatgtgtgatgatgggcttccattctttgagatatcagcaattaatgctgataaacctccactatctattgcagaaattaagaggcgtgttgagcaatttagaaaagcagggaagaatgtgattatatctaaccagccatacttctataagaaagcagaacttttcccaggaagcgcttttataattggtgcagacactgcagcaaggcttgttaaccctaagtactatggaggagattacaacagaatgctggagatacttctcgaatgtaagagcatagggactacttttcttgttggtggtcgaaagattgaaggagatttcaaggtccttgagaacttagacattccagaagagctgagagaaatgttcatttctattccggaggaaaagtttcgcatagatatttcatctactgaaataagaaagagccaagggctctgatgtatcaagtggtcgtattctacagcagatttgggatgattctccacgactatagaaggtacatttggatgctagcagtcaagtctgaattctccaagcttacttttttcacatttgtggggttgtattcacgcattctattgcagattatgataggtccattcatgcatccttgcaaaggaactgttgatgtattctcagggagaatattttatttaacttttgtcttgactgggccccttggtattttgttcagcaaattggaatcaatcctcttgtagaacctcttgatgtcttcactaccccttgcggctaggtggtcaacctctgtctcatatctttggtacaacgctggcaaagtgtgggcgcagagaaatcctgtggatgaaatataagaattgttaaatgtatgtcataactgctttatatattgtcttgccttgttataaaagtcacaattttctgcgctactcaccaagatatagaagacttgtgaagctgtaagaacttacaacctctgacactattagcagtgacaagaccaccttagaatcagaaacagaacattgttagcgcaagactacaacatcgtagatttccaagaactctattagattgttgaatagcatcaaagtaatggcatagccgttcagtgctt

SEQ ID NO: 150822 - DNA, 1470 bp, Zea Mays
atggcagaggttctgattggtagccttatgattgggaattgcagtgacaggttgtgtgtccgtgtctcccgtatgtgggaattttatgatcctcaggatgagtcgaagctcctccacgctgatatggtcctcatcgatgaggagttctaccaaatgctctcttgtcactctatattgttatgtaaaatagatgtcattggcgcggtcaccatgatctcggatgtcgcaaccattcgtacaaagatgcgccagactcaaacagcaaagagatccatcactatacaaaatgagagctgtactccccttgaggttgtgctgtggggtgagcaggcaacctccttcccggctgatcagattagtattgccggccaggactcactccagattattatctttgtgatcaggaaagcaaataggatgtacaagcctgttgacaacgatatcatgatcggtttcacaaaatggacgacaatcgaggcgcttattgaagtgccaccggcttttccagagattgtttactccctcactccctttgaccagcttacaacccttgtggatattagggagtatttcatagatgtcattggcgcggtcaccatgatctcggatgtcgcaaccattcgtacaaagatgcgccagactcaaacagcaaagagatccatcactatacaaaatgagagctgtactccccttgaggttgtgctgtggggtgagcaggcaacctccttcccggctgatcagattagtattgccggccaggactcactccagattattatctttgttggtactcttgctagatcctatgctggttccagaggcaacaagccttgcagccagaaagttgagtggttggtaacagttaccgttcttaagattgatcaactatggtggtacgagtcctgtagaaagtgcctcaagaaaacaaagtctcatggtgatgcttataaatgctcggactctggttgtggccatgttggtccgcctaatccaaggtcgccttacaaactttatgcacttcgatatagcgtgcaaggtcgccaacgccactatcaaaaggtgggtcctcagccaccaggcaggttgcgaggaagatatcgggaggctcagctgataaaactggtgatggcgatgacttggcttccggcattgctaattctaggcttttgttctctcggtggatgcaaccgatccttttttgttcccatgggtgctgttatgaccccaatgattggctggtctcctctcgattatatgctgcttgtgctagagctcagggttttcctgatccttgagggctgtgcggggatacctggcctctcagaattgtccagtttcttggtgtctgtccaccgggttcttgagtttacttggggatctgtacctttgacagcttcattggggaattcctgcggcttggggggttcttgcggttgtgttgagtggcctttctggaagtgcacgtattga

SEQ ID NO: 150823 - DNA, 635 bp, Zea Mays
ttctttttgttttattctatatgtatatatgcaagtggaatcttttccatgttctgctgtcttgatgagctctacccgaaccacagaggccgtgcatgtcccggagggcgaccgtgcaggagcagatatcctcgcccttcatggactcgccgccgccgcacctcgacgcccccttcttcggggccgatctgatcccctccggccgcctccgtcggatgcgcgggtaccgctactcccccggaggcctcgaggaagagataatgatgtttcagacaagagttttactgggaggaatgaacatgtacgatcgctaccaggattggcgccttgatgtagataacatgacatacgaggagttggtcgagcttggagacagaattggatacgtcaacacagggctacgtgaggacgagattgctcgcagccttaggaaggccaagcacccatccttcggttccttgcgattcgcagcagaagtggaaaggaaatgcactatttgccaagaagaatttcagtcaaatgaagagatgggaaggctagtctgtggccatagctaccatgtgttgtgcatcaagcagtggctctctcagaagaacacttgcccggtttgcaaaactgccgtcagcaagaattga

SEQ ID NO: 150824 - DNA, 267 bp, Zea Mays
gaaatatggactgttagctacttagctttatgccctggaatcacctccgcatggaaccacttagcccaccgctaaccaacaaaatggaccacattctttcctgccttagagaatggacctgtatcaatccttatctaaaccatatatggcttctccttcctagaacatattctcccaaacacaccaaggataccaccttaggatgagccaccacccgtctcatacgtgcaaccgctcacgcgagcacgcctcctaagctcctcctcc

SEQ ID NO: 150825 - DNA, 569 bp, Zea Mays
gccgcaccccgccccgcatcccgcccgcaatcagcgcctctgccaccgtagcccttccttcgccgcagcacttccagaaatctccatcccgaaacctccacgcacaccccgcgccgtccccactatagcagtccacagccgtctgtcggcgccatgatcccgaaacctctgccctggatcgccacgcccggctctctccgcgtccgccctctccatggagtcgtgcccccgcctggcctcgtgcgagcgacccctcccctggtgcaccgtgcccccgctcgccctccccttccatcagcgatatacccacgtgacgcggtgatggtggatagaagtggggcagcgcggtctctctcccaaacgcgcatgagaagaccaggtggaacatatgcaagcagaggcgacgagaagaccccatgaatccagatcccgaacgcgcacgagaagaccccatgaatccagatcgggggtttgcatctacatgggcgtgtactccgcaccgctcccctccggccccgaccgttgtgcgctcgctgtagccggggtcgacctcaaccgcgacgacgatg

SEQ ID NO: 150826 - DNA, 108 bp, Zea Mays
caaattctgaagaaggcggccaagttagcgagcgaagcggaggcccgtcgccgggaggtttgattcatttatgctttctaagggctttcagaggtctcaatatgatag

SEQ ID NO: 150827 - DNA, 216 bp, Zea Mays
tgttgcccactgcccaatcatcacgctcacatcgtcgcgcgtctgtgcgaccatacgctccacgcgatcgtcgttcgccatctcgccaatccagccctccaagattccagggcgctggacgccactgttccagcctccaggcacgcacggtcgagcaatcaggtttcatgttattctgtgtccgtcgttcttatttctcaacttgtgaagtgctaa

SEQ ID NO: 150828 - DNA, 851 bp, Zea Mays
cactcaccaagcacacccaacgtacatttaaggagaacagcacaagaagacaagaagcacctaaacggaagtgaataattaattaaccatgtaaaaccatgtcctcacacgtttaagttgtttacatttcctcataaatgaatttgtaccaattcaaacaagcttgttagcaagtacgagtagcatttgtgttagaaaaatacaagaaaaaagatctcttaagttctcaacttttgcttgatcttgtgtgttagactgttagtgttcatatggcgcatcccaaatattcctgtcctgtaattgaacacagacagcccaaatactccttctgtaattgaacacaagaatatgtttagttgatggtctggtcatggagctcaaatttggttcaacatgaattatgatactgactgtgtactctagatatttatgtttattttttgcaaatttgtttgttcatttcagacatggatgcacccgattttccctgccctcttctatgcctgtgaaagagtcataaggaaatttcatgagaacgactaccattcaggtattgtgagcaatttatctgggagatgtgctctctattcacatgaagaagcctcggggtttcaagtactaaagtggaatgcatcttttttttgtaaaataccaagtcttgcctttcgactggtatcattttattaattattgcacacatattcgagaagtaatttatctgtggttcttgcttacagttttcccatatatacaggcaccccttctctataactctggcaccaggagataactacttgactgtgcatatccgcgcgctgggtgaccgggcatccaaactttcgattctctga

SEQ ID NO: 150829 - DNA, 234 bp, Zea Mays
atgtcttcctgccttattttatccggattctttgagaaagagacatggatgcacccgattttccctgccctcttctatgcctgtgaaagagtcataaggaaatttcatgagaacgactaccattcaggtattgtgaggcaccccttctctataactctggcaccaggagataactacttgactgtgcatatccgcgcgctgggtgaccgggcatccaaactttcgattctctga

SEQ ID NO: 150830 - DNA, 2198 bp, Zea Mays
tcaacaacacatgagagtgagtttttctaccactggtcacagccaccgtctccctccttccccaacctcgccgctatcaggtggtggatgcagcagcgcggccgctccttcaacagccgctctcggagcttctcccgcgcccgcgtcgccatcgagggatcttaatctcacagccatccctcggtcatttcgtttgaactcggttctgaaattctgactgacgaacgcacgcaacgacctaccgtgatggacgccgccgccgccgccgccgttgtttctcttaacgggaagatgggggccgaggagaggaaggcgcagaagagctactgggaggagcattccaagaacctcaccgtcgaggccatgatgctggactcccgcgccgctgatctcgacaaggaggagcgccctgaggtcctgtctttgcttccttcatatgaaggaaaatctgtactagagcttggtgctggaataggccgtttcactggagaactcgctaaaacagctgggaatgttcttgctctggattttattgaaagtgcaattaaaaagaatgaaagcattaatggtcactacaagaatgcatcctttatgtgtgctgatgtgacatcccaggacctagtgcttcaagctaactccatcgatctgatattttcaaattggttattgatgtatctttcagatgaagaggttgaacagctagttcagagaatggtaaaatggttgaaggttggtggctatatcttctttagggaatcttgcttccatcaatctggagattcaaaaaggaaagttaatccgacacactatagggaaccaagtttttatactaaggtgagaaggcacactgtcctactgctcttcccttttgcttgtcgcttatatcagatattcaggtttgccagtaaattcatctattgcatgatatgtttcttcttatttaatattttcaataccatcttctttgaaataattaattaattgattgtttattccataaataggttttcaaagaatgccatacctttgatcaagatgggaattctttcgaactttctctggttacttgcaagtgtattggtgcttatgttaaaaacaagaaaaaccaaaaccagatatgttggctatggcaaaaggtccattctacagaagataaaggatttcaaagatttttggacaatgtgcagtacaaagccagtggaatattacgttacgagcgcatttttggagaaggttatgtgagcactggtggagttgagactacaaaagaatttgtggacaagctggatctcaaacctggacataaggtgcttgatgttggatgtggaattgggggaggtgacttttatatggccgaaaaatatgatgctcatgttgttggtattgatctttccataaacatggtatcatttgcacttgagcgtgccattgggcgcagttgctcagtggagtttgaagttgctgattgcactacgaagacatacccagacaacacatttgatgtcatatacagccgtgatactatccttcacatacatgacaaaccctctttgttcaaaagttttttcaagtggctgaagcctgggggcaaggtccttatcagtgactactgcaggagtcctgggaaaccatcagaggaatttgcagcgtacattaagcagagaggttatgacctacatgctgtggaggcttatggacagatgttgaagagtgctggttttcgtgatgtcattgctgaggatcgaactgatcagttccttggtgttttagataaggagttagctgaatttgaaaagaacaaggacgatttcctgtctgacttcacccaggaggactacgatgatatcgtgaacggttggaaggcaaaactgcagaggagttctgctggtgaacagaggtgggggctgttcatcgccaccaaatgatgatgcagatgtgagatgtgcgtggacgtgaaaataaagcatccttttactataattgatgtcgcattagttattctgaacccaggtagcctgggtcagtacctactaccctgtttatcataggacgtggagagaactcgtccagttttacattcccgtcactgctttgccggagtgctgtggcaatccataaaatctaataaagtaacaataagctgtctgcaactgcaaagtatgtgcccatgtggtcttaattgctatggttgtgtgatg

SEQ ID NO: 150831 - DNA, 1988 bp, Zea Mays
tcaacaacacatgagagtgagtttttctaccactggtcacagccaccgtctccctccttccccaacctcgccgctatcaggtggtggatgcagcagcgcggccgctccttcaacagccgctctcggagcttctcccgcgcccgcgtcgccatcgagggatcttaatctcacagccatccctcggtcatttcgtttgaactcggttctgaaattctgactgacgaacgcacgcaacgacctaccgtgatggacgccgccgccgccgccgccgttgtttctcttaacgggaagatgggggccgaggagaggaaggcgcagaagagctactgggaggagcattccaagaacctcaccgtcgaggccatgatgctggactcccgcgccgctgatctcgacaaggaggagcgccctgaggtcctgtctttgcttccttcatatgaaggaaaatctgtactagagcttggtgctggaataggccgtttcactggagaactcgctaaaacagctgggaatgttcttgctctggattttattgaaagtgcaattaaaaagaatgaaagcattaatggtcactacaagaatgcatcctttatgtgtgctgatgtgacatcccaggacctagtgcttcaagctaactccatcgatctgatattttcaaattggttattgatgtatctttcagatgaagaggttgaacagctagttcagagaatggtaaaatggttgaaggttggtggctatatcttctttagggaatcttgcttccatcaatctggagattcaaaaaggaaagttaatccgacacactatagggaaccaagtttttatactaaggttttcaaagaatgccatacctttgatcaagatgggaattctttcgaactttctctggttacttgcaagtgtattggtgcttatgttaaaaacaagaaaaaccaaaaccagatatgttggctatggcaaaaggtccattctacagaagataaaggatttcaaagatttttggacaatgtgcagtacaaagccagtggaatattacgttacgagcgcatttttggagaaggttatgtgagcactggtggagttgagactacaaaagaatttgtggacaagctggatctcaaacctggacataaggtgcttgatgttggatgtggaattgggggaggtgacttttatatggccgaaaaatatgatgctcatgttgttggtattgatctttccataaacatggtatcatttgcacttgagcgtgccattgggcgcagttgctcagtggagtttgaagttgctgattgcactacgaagacatacccagacaacacatttgatgtcatatacagccgtgatactatccttcacatacatgacaaaccctctttgttcaaaagttttttcaagtggctgaagcctgggggcaaggtccttatcagtgactactgcaggagtcctgggaaaccatcagaggaatttgcagcgtacattaagcagagaggttatgacctacatgctgtggaggcttatggacagatgttgaagagtgctggttttcgtgatgtcattgctgaggatcgaactgatcagttccttggtgttttagataaggagttagctgaatttgaaaagaacaaggacgatttcctgtctgacttcacccaggaggactacgatgatatcgtgaacggttggaaggcaaaactgcagaggagttctgctggtgaacagaggtgggggctgttcatcgccaccaaatgatgatgcagatgtgagatgtgcgtggacgtgaaaataaagcatccttttactataattgatgtcgcattagttattctgaacccaggtagcctgggtcagtacctactaccctgtttatcataggacgtggagagaactcgtccagttttacattcccgtcactgctttgccggagtgctgtggcaatccataaaatctaataaagtaacaataagctgtctgcaactgcaaag

SEQ ID NO: 150832 - DNA, 3356 bp, Zea Mays
cagtccacaagcgcgcgcagattccagcacgcgcgcgccagcaagctccaccaccaccagtccaccgccaccatggacgcgacggctagcagagccggcggcggcgacctgaacggcaaagaaaatgaggaggacaagaagggcgcagcgccggccaagaaggtgtcgctgctcggcatgttcaggtacgccgaccgcctggacctgctgctcatagcggtgggcacggtgggggccctgaccaacggcgtggcggaccccctcatgaccgtcctcttcggcaacgccatcgactccttcggcgacagcacctcgcaggacatcgtccgcagcgtgagaaaggtcgttatgaatttcgtatacttgggcatcggaacggctgttgtctcatttcttcaggtgtcgtgttggacgacggcaggagaacggcagtcggctcgtatccgttctttgtaccttaacgcggtcttgaggcaagacattgcctacttcgacacagagttgacaacaggccaagcggtttccaggatgtccagcgataccctcgtgattcaggatgctcttggcgagaaggcgggaaagcttatacagctctcgtcgacctttttcagtggttttataatagcgttcacaagaggctggctcctcaccctcgtcatgctaacatcgctaccgctaatcgcagtcgccggcatagtttcttctcacttcctaacaaacatttctagcaagaagctggcatcttacggagatgctggggacaccgttgaacagaccatcggagctataagaacggtagtttcctttaacggagagaacaaggccattgcagcgtacaagagcttgataaagaaggcctacaggactgacgttttggaaggcctgatcaacggtttcggcatgggatctgtcttctgcatcctgttctctagctatggcctagcgttctggtacggcgggaagctagtcgttgacaaaggatacactggtgggaagatcatcacggttctgttcgctgtgttgactggtgcaatgtctttaggcggcgcaacgccctccgtgtcttcaatcgctcagggtcaatctgcggcgtacagactgttcgaaacgattgggaggaagccggagatagattcgggtgacaccagcggtgtggttttagaagacatcaagggtgacgttgagctgaaagacgttcgctttcgctaccctgcgaggccggagcagctgatactagacgggttgacgttgcgagtaggcagtgggacaacaatggccatggtcggagagagtgggagtggcaagtcgaccgtcatcagccttgttgagcggttctacgatccacatggtggtgaggttctgatagatggcgtcaacatcaagaacctaaggcttagttggatcagagagaagatcagcctggtcagtcaggaaccactgctcttcatgacctccattaaagacaacataatgtatggtaagggagacgcgacagtagaagaggtcaggagggcagccgagcttgcaaacgcagcgaacttcatcgacaagttgccggatggctatgatactatggttgggcagcgtggcacgcagctctctggaggacagaagcaaaggatcgcgattgcaagagccatccttaaagaccccaagatactcctgctcgacgaagcgacgagcgcgttggacgtggagtctgagcgggtagttcaggaggcgctgaacaggataatggtggaaaggaccacgcttgtcgttgcccatcgcctgagcaccgtaaggaacgttgactgcatcacagtactccgtcaagggaaaatagttgaacaaggccctcacgacgtattggtgaaggatcccaacggggcatactctcagctcatcaggctacaagaaacgcgtgctgacgaaaggcgcaagacagcagactctgggtctggggtcccagatcactccagatcaaagagcaccagcctgtcgcagtcgctcgccaggcggtcactactgaacaaagactccttcggtagcagcagcagcaacagatactccttcaagaaccccctaggattagcggtcgatttacacgaggacaggagtaccataggcggggagaaaacggaggagctctccgacgttgtggtggtaccaaagaaagcacccatcggacggctcttgaagctcagcgtgccagaagcgccggtccttctgctaggctccgtggcagcgtcggtgcatggcgtcgtcttcccgctgtttggtttgctcatgtcgggcatcataaaatcgtttttcgagccgccggataagctgcgagaggacagcagcttctgggcgctgatagccgtcgctctgggcgtcacgtgcttggtcgtggtcccagcgcagtacttcctgttcgcggtcgccgggggcaagctgatcgagcgcatccgtgccctgtcgttccagagcatcgtgcgccaggagatctcttggttcgacaacgcctccaattccagtggagcgcttggtacgaggctctcggtcgacgcgctaaacgtccggcgcctagcaggagacaacctggcccttataatgcagtccatagctacactggtaactgggtttgccatagctttcgcggcagactggagacttgccctgatcatcacgtgcgtgattcctctggtgggtgcgcagggttacgcccaggtgaagttcttgaagggattcagcgaagatgctaaggagatgtacgaggatgcaagccaagtggcgactgatgctgtcggcagtatcagaaccgtggcgtcgttctgcgcagagaaaagagtggtcgcagcgtacagcgacaagtgtgaggctctgaggaagcagggcatccgaagcggagtcgtcggagggcttggttacggcttctcgttcttgatgttgttcttcacgtatggcctttgcttctacgtcggtgcgcagtttgtgcgccaggggaaaactacctttccagatgttttcaaggttttcttcgcgttagttctggcagctattggagtctcgcaagcgagtgcgctggcttctgatgcgaccaaagcaagggactctgctatttccatcttcagcgttctggacagggagtccaaaattgactcgagcagcggcgacgggatgacgctggaggttgtcagtggcaacatcgatttcagcaacgtcagcttcaagtacccactgcgtcctgacgtccagatattcagcgacttcaccttgcgcattccatctggaaaggtacagttagcccctgcagccatttaccatcttgtggaatggaaatgattggacgcaatgtttcccttcttttttcttctttttgtctgcagaca

SEQ ID NO: 150833 - DNA, 202 bp, Zea Mays
attgggtcggttaagacctaccaatagtgcaaccaccgaggatacgcgaggggccattataccagtgtggtggaccttacccataaaaatacctataaaattttaatatcaaagtgaagatatggtccacataccagatattaaactgataataacaaatattatccctttatcatagagataaaaggccgagaaatatatg

SEQ ID NO: 150834 - DNA, 1884 bp, Zea Mays
tttggaacacccttgcccgcatacagatacatccaacctagccctagccgttagcggaatatactaaccaggacacgcataattgcatacgttcattcatgacataataactagataacacatgacgcatagcttaaccgatagaacaaacataacggagcacaagacaagcgaataaatctaacgagtctcgtctccagaactctagattaggactgtagctaatgaaagttcgtcaaggctacccactgttccaacaacagcaccagtgctcaggacatcatgtcattgtcatgacgtaacattcttaagaaggcaatgacagaaagtatctctcagctccttcctcgacacgtacaaaaaacgagtaagcgtgacccgagtgcagcttcaggcttctgcttctgctgccttcgaagagttctcgggcgcctttagcggctcgtccggtgctttgcttgccctgtgaaactccaccgcgtccttgaattcctccctggtggctgtgtccttgaacttgagagcaaacgtggcaaggctgctcggcgactccccaatgctgttcatacaggcaaacgtcacgcccttcttgtccatgtccttgagcgacatgtcgttgtagaggctcgcgttcaggaccagacggtagttgccctttgcccgcatgacgagccgggctctctcgccgccggaggaggatacagggacgttcagcttcagttcaccttttcctctttctttccagccaccatctaggtactcatacaaggcagaatcggcagtaaatacagccttctcgttttcttcgccggtttcgacagggccttctgccatagcaaatttcttgggtgtttctgctgaggtagcaagcactgtggcggaactcccgttgctggcagcaccaagactaaaggaagggaacgaagaaccatcagctttcagcccgaacaggggaccagtacttgggccatctttagaggctgagccaaacgagaatgacgtgcttgaaaatccagttccagtcagactggtgaaagcattttggccacttgacagattcgtaaacgagaaaagggatgttgctgatgatgtctgccctttgttatcagcgtctttctgatgtgattcacctccatctttctgctcagatttatccttgctaattttgccagcatctctctgctcctcagacaagcaatccttggtctccgattcacctccacctttcttctcagtatcatccttgctaactgtaccattatttccagcttcatctgccccttccttttcttcagcatctccctctttcgttttgccctgaacttcagatgacatgcagctaccttcgttgggttttccagctaccactttgtctccaccagattcagcctctgtgccttctgccttgtcactggttccaacaggttgaggtggtgcttcagttgtggcaccggagtcagtatttacaccagagcctgcattcttgtctggcacagacaaagtatttttcccagtaccattgcatccctcgtcacctttaacatctgaaggctggacctgtgggacaggggcgcatgtttgaacactagaatcagtgggggcaaatctaattgcagagaaaggattagaaggagctgatgatgtttgctggcgccgaacctttacaatgatccgggttgccataacttcctcagtagctttcttaaatgtacccatctcttgctctggttcgtcatcatcaggctcaggattatccttattgatttgggtacctgcaaccctcttcctagagcctggggtttgttcctcatcggccatcttccaagttgatagcccctaaaacaaacttagaaacagtaaaaagaaagacccatgagccacaaa

SEQ ID NO: 150835 - DNA, 327 bp, Zea Mays
atgcttggcaatgtcaagaaggtagcaagtatagatttacataccttgaaaagttcaatctcaaacctatcatatggactggctcaattgataaggttttttttgggaaggaccttacctgaaagtgcttgcgcatatcgatataccaaggagacttccatgttgatggagattcgagtcctctttcgatacctggggtatcatccaatccaatcacaagtgtgcatatatctgttgttcctatacttggtaataatagcccagtcatgtgctttggagtccacaaaaacgaaattcctcctgctgctgctggaggtgcacccctga

SEQ ID NO: 150836 - DNA, 807 bp, Zea Mays
atgcggaagccggcggtgcagcagcgtggcgcgggggcgataaggacgctcaagcggggtgcgtggacgccggaggaggacgagctgctggcgcgggccgtggcgaaggacggggaggggcggtggcgcacgctgccgcggcgggcggggctgcttcgctgcggcaagagctgcaggctccgctggatgaactacctcaggccggacatcaagcgcgggcctatcgccgccgacgaggaggacctcatcctccgcctccaccgcctgctcggaaaccggtggtcgctgatcgctgggcgtctgcctggccgcacggacaacgaggtcaagaactactggaactcgcacctcagcaagaagctcgtcgcgcggggcatcgacccgcgcacgcacacgcctctgcccgcagcagctgcgagcctgcactcgcactcccaccgcgccgacgacgactcaccagcaggagccgccggttcgtctgccgacaagacgccgccgccactggtggaagtcgagccatcggttgcgccgccgccagcgcagccgaactcatctttcggcgacggaagcagcggcgacttcgcggggggcatgatgggtctaggctccgagggcttcgatggagtcggtgatccgttctgtgcaccagctcctggcggcttccacttgggctgccccgtcgtggacgacgccaccttctcctcgttcctcgactcgctgatgaacgaggagcgcatgcgcatcgccgattacattggagatcacagggatgctgatggtgggaacgaccagggtggagcttattag

SEQ ID NO: 150837 - DNA, 597 bp, Zea Mays
taagaacagttttaagtgtcattaacggtgcaatctactacactaggattttaaacatggtgaacagatcggccgacagacgctatgtagatgtgtccagccaagggaacttctatttgatgtgggagcttggataggtctggtagaaccaccaattacctggtccttagtctacatgcctttgttgttctgtttgtatggacctttgtctctatgtgtagccattttggcaaccccacatcagggtggtggcatgtagattctgaacatggggtggagagcggacattggactttggttgttgttgcgcggtggtgggctcttccttagtataggaacagtcatataactgaagactttgaggaggtgcaggtgcagagccgatggtttggaatccttgacgtgggctaccgctcataggaggaggcttgggctgcttgtggcagcaacatgttgcacaagaccacaaacaagggaacagctaggtgcacgacaaggttgtcgccgccaacctctactctgtcaagttccttgatggcaacaaagaatttgtgctaggcaaagacggcgtgttgcttcggggtcttggctgaacga

SEQ ID NO: 150838 - DNA, 279 bp, Zea Mays
atggcgtgtgttaaaatgccggttgttatgctcattaatcggcttattttcgcctttatcgatctgtctgtctatgggctcttaggttggtactacgtctctagaaccctcaggctgctgtgggaggatttcatcacagttgacggttttgtcatgctacctcaggtcatgtggttaacgtttgttcccttcatccacaatagcttactgcatggcataatttctggttctttggatgttgctgatgttgcgatggtttcaaagcagccaacgtattag

SEQ ID NO: 150839 - DNA, 2254 bp, Zea Mays
cactaatgtattcacctattttgataccacaataagttcgttaccgcgctgtgctccatcatattcatgaccacctgaaccatcagcaagggcagaagcacatgggaaaactatcattattaagtcaataccaatcttcacagcagttagagaaagtcagcgataccttctgggtcttcccacaaccaatcttgcgcacacactaatccttgaaccgttaaagggtccatagtactgagatactgatttggttcggtgtcaacgaggaatgggatgggatcaatcctgtgttgacctcgtcccttattttttgagggattgtatcatccactatttttaaagaatattccttgatcctgactctggacctccaaaccaaacataggtcaagttagaatgatctcactccatccctcttcatccttcctcattcatccatccaaacactatcttaatgtaccggcttcactgtccaaagggatgatggatacagcgatggctaaaatatcacgagccatttgcgcaagtacaggatacttgttggctgcaaaggacttccaccatccaaggacatcaaaattatcattatttccttctttttgaggttagaacttggcgagcaggtcactgatttcaaataagatggacagacacctagttagaacgttcgaaacaaatacagaaatcgaaagagcaattggctacaaaacagaggcctaaggacataatgttactgctgtgatacaaaatattacagtatgttgctctgatttttgctctcagtttactcggcgcttcagttgttccctgagttgatttgtgcagtgtcatcagacagcttgtctgattcaaacttggcacctgatctagacagacacttccggcgaacctggtatcagtcttcctcgtgcttccttttagaactggagtgatgctccctccgatgcttgtgtgacctcctgtgttcctcatcagagtgttcctcgtcagagtagcggtgatcatctctatgcctatgccttgatttggaactccaacgttcatgctcatgctcatcttccgaagagctacaatggtgtctatgatgtctggattccctgtccttggagtgactcttgttcttatgtttgtgaacatccttgctctggtctcttgaatgctctgggcgatgcttcttccttgagtgcttatagctatcctcagattcatctttttcctcgtcggattcttggtgtttctttctatacttccgcactctgttctgttcatcatcagagtctttactatgttttgtcaagtttggcccctcatggtcaaacagaacagagctactaccttcacgttccttagccacagattgcagatcaagtccagaggcattcatatcaggaatggccttggcagcttcactagttgggttcgatgctgcagctaaatcattcatcttgttgtctccactcttaatgattgcagcaaacatcttcgcacggcgaagcctatcagctttcagcttctgttcctttgtcatggtagcttccaaagaacctgcctctttggaagctgctgcagcagcagcttttgcaatagtgtttgcaatccaatcatcatcaatgattccaaaaccttccctttggggctgtccactacttgtaagtgaagcatcaacatcactatttgaaatgtgtttggacagtgcatttcggtcctgtaaagatgagaaacttccaaagctggaagaaggatcattactaacatgggtgcgaacattgtccttggttcctttcatggtgttaagtgagtcatttgcagcacccagtcctcgagtagctgccattactatagcagcagcttcatctgcagtaactttccgagtcttgaccccacaaacaggatggaatatacccttcccttgtttgtcatacagctgcttctctgatggcccagatgagcttctatcagaagcactggattccatgctataattgatgtctttgcgctccattgagcaccttctgtcggcgcgttcacgagagcttctgtcagcgcgctcacaggagcttctgtcggcgcgctcacgagagtttctgcccctccggtcagaagaacctcttctgtccttgttattaggacttctaccatgtgaattggactgcaaaatcaataaaagaaatagaaacaaaccataattaaatttttccaatggatcgtaggaaaaaaggataacattgactaagtaaagaagctagtgtaatgc

SEQ ID NO: 150840 - DNA, 288 bp, Zea Mays
atggccctcccggtcccttgcccacctctcgcttccccgcgccccagcaaactgccgtgctcgccccagccggtgaaaggccgtcgaggaccagcagcagcaagcaagatggcctcgtatggggcccgcgaacctgcacccaggggcgccatggccgcctggagaccacgcgggctggacgcggacgcggacgcggagggaggagttgacggttacgaggaatctaaaatatgtttggttgaaataactgtgaactgtggattttataagagcattgatattttgtaa

SEQ ID NO: 150841 - DNA, 1521 bp, Zea Mays
agacgcataaatctctcctcgacaggcacacaaacacgccatcacgattcccattccctgcactgcaattcctcacagactgaccgaatcccaaccgtggccatgacgacgaagcagctgaggcgggtgcgcacgctgggccgcggcgcgtcgggcgccgtggtgtggctggcctccgacgaggcctcgggcgagctggtggcggtgaagtcggcgcgcgcagcgggtgccgcggcgcagctgcggcgcgagggccgcgtcctgcggggcctctcgtcgccgcacatcgtgccgtgcgtcggcgcccgcgcggcggcgggcggcgagtaccagctcctcctggagttcgcgcccggcgggtcgctcgccgacgcggccgccaggggagggggccggctggcggagcgcgacatccgcgcctacgcgggggacgtggcgcgcgcgctggcgtacctgcacgggcggtcgctggtgcacggggacgtcaaggcccggaacgtggtggtcggcggcgacggccgcgccaggctgaccgacttcgggtgcgcgcgccccgccgccgccgggtcggcgcgcccgttcgggggcaccccggcgttcatggcccccgaggtggcgcgcggggagggccagggccccgccgccgacgtctgggcgctcgggtgcaccgtcgtcgagctggccacgggccgcgcgccgtggggcgacgccgacggcctcctcgccgcggtccaccggatcgggtacacggacgacgtgccggaggcgcccgcgtggatgtcggcggacgccagggacttcctggcgcgctgcttcgagaggcgcgccgccgcccgccccacggccgcgcagctcctggcgcacccgttcgtcgccgacctcgacgcgcggccgaagcggcaggaggaggggctcccgtcccccaagagcacgctgcagcaggacgcgttctgggactcggacaccgacgacgaagcggacgaggtggcgacgggcgcggccgagaggatcggggcgctggcgtgcgccgcctccgcgctgcccgactgggactccgacctccaggacggatggatcgacctccagcacgaccgcccgggaaccgccggcgccccgcaggcagcgacgacggaggcggccgccgccgtcgcggactgcttcgtctgggcggagctgccagatgcagaggtggagcaactcgtcgccaccgccgcagatgccagcagcagcggccatggccacctacgtcgtctcccgcgcattgcaggagtggtagctgtagctggtgccacgaccaccattgagcagggcagctacttgcctatgcattcaggcgtccacgaaaagaagaaaaatccacgcccgttcgatcacggtgacgacgggatagaaaatgcgggatcccaccgcgcttgtaacatgaacagagcaataacaatgaaacgaatttcgtttaaaaaaaattccttctggttcgttggcacacaccgtactacactacacatgatgcccaaggcctaa

SEQ ID NO: 150842 - DNA, 112 bp, Zea Mays
ccaaacaacaacaaaactgggacagaacggctctgttctacttggctcttcaaccaaacactacctaaaagggcatgaactacacgcactcggtgcggatcatcaaaccctg

SEQ ID NO: 150843 - DNA, 849 bp, Zea Mays
atggcggccatgttccgccagccgttaggaacagaaatcccgattggtacggggaggaaggataccggatcggatcacggggaaagagggaagatgaatcaacaagaagctcctataggagttggagagtttctacgagattttggtgttccagtggtcctgtggcgactacttcaagaagttggatataccgaagcacccaagtaccagtggtcacgcactgttcttagaggacaaccatggtatgaggtagtagtgtgtattccagaacgtgctagaaaaccatcttggccatattggatgttccatgccgaaggaatgactccttgggagggtgctcaggcccgattaatggaaagcattcctattgggcaggattctgttgaatcggcatctgctcgagttttgatggccgtgctagagttgcaacttactcgagggcacagtcgtcaaaagtgtgcttgtactcaagcacaagaacgacttgaggaaacaaaggttcaagcggaacaggttattagactagagcatcaggtgacagaacttcagatgcaacaccaagctgatcagaatcgcattaaggtgcttgagcatcagctaactaatgctcattttaaattaaaaattttgagtcagcaacaagaagaaatttgtctgtatgctgttgctgttagagaagaccttaaggaaaccatgagcttcataagccatcaggatcaggcgatcaaagaattgaatcgtgctcatcccatggaatttcaagtagcacaacggcttgtcaaccatctgcagcaatcagtgcataggctcaatgctgtttttcatcctactcctgcatcggtggactaa

SEQ ID NO: 150844 - DNA, 400 bp, Zea Mays
ggccgttttgttgcgctgttgtgcacgcggttgtagggagggcgtattgtggcggctacgagggaccgatgttcctgtgtggcggtgacaacgacaccgtggagccaaggcaatgtcagcaagctgatttttcagattggaatctatggttctttttaaagattgaatatgttctagcatcttaaaaagatttgtcagaatgtaaacatttgttctgaggtcatttaggtctcaaacaaaattttttggacttatttcgttggagggaattggacatctcgagatctaaatgtgtataaaagatccaaatgtgtatagaacatatttttttgggtatcaaatatgattgtgtgcaaagcacgaacattttactataacaatgaaacacacttgtacataa

SEQ ID NO: 150845 - DNA, 758 bp, Zea Mays
tattgtgaggtaataatatttttctcagccatgttagttacatccaagaattgggctgtttactaagtttcttgtttttttgttgtaccagaagtgaaatcctagattaatacatggaggtcatgaaacaattaatagaaaatgctacttttttgtactaacatttgtttctcttgtgagcaggccttgtatgagacattgattcggcaggatgagctgcttgcatatattgaccaacaacagacagccaaattttgtcggcagaagttctgtttctaagtactggagtacctgccacctattttcgtctctttggagatcgcatgcagctattgtggacccagtatacttgcaaatgttttcatatttgttgcagtgtaaagaaatgcaatttttagaaatacataggattgaggagcatggtagcttgtcttgagatcgtgttttagcgacaaaaacagaaaagcttgataccttgtacgcattttcaaccagatgcaggcgtaatctttccccagtatttggtgcaaggctccagtatttggtttgcttgtattatactatctctattctcgaatatttgtcatctgctagtttatttttaaactaaaacacgacaaataaaaagaacggagggagtatatgtctttgtttggggatgtaaatagagtggaactgtattttagaaaagaaagtgtttgatgaggctgtgagcagacgaaaaaaaagttcgttacatgtatgagtgtattggaaaa

SEQ ID NO: 150846 - DNA, 2359 bp, Zea Mays
atgaagggaaagcagaagcttcttttccccttcctccaaaaaaggcatcaaaattctttgctaaaaaaggcttcaaaattctccgcttagggaaaaaaacttgattaggagcaatccatcgtttctttactcctcgatcgagagccccattcgttaggggttagggtcgtagcgagggctctgaaattggaatcccaacagaggaattacacccgctttgggacttcggagaagggaatgtcggcaaccatcgaccggctcgcgacaccgagtcatgagggtcgtgcacacagtgacgaaaagcgagagtgcaattctgatgaagagaactcagaaggagaaagaaagcccaaaaaggattccttcaagaagagagcagttactacagggtatagatttaggcattccttaaggagaaagagtaaaacaaagaatgataaccatatagcctcaatagaagacataagagatgttcaagagctggagattgttgaaaggtttcgccagtgtttacttgatgatggtctgttgccagaacatcacgatgattatcacacgatgttgaggttcctgaaagcaagaaaatttaatattgacaaagcaaaacatatgtggtcagagatgcttagatggaggaaggaatttggtgctgacaatatagaggaatttgactacactgaattagatgaagttgtgaagtactatccgcagttttaccatggtgtggacaaagatggaagacccgtttacatagaactaattgggaaagttgataccaacaaactagtgcagatcacaactattgaccgctatttaaaatatcatgtcaaggagttcgagagatgtctccagatgaggtttccagcttgttctattgctgcgaaaaggcacatagactcgtctactacgatattggatgtgaaaggcgtgagcctaaagaacttcacaaaagatgcaagagagctaattatgcggttgcagaagatcaacaatgacaactatccagagaccttatatcaactgtacatcataaatgctggccaaggattcaagatattatggggtacaataaaatcatttcttgatccagaaaccgcttcaaaaattcatgtccttggaaacaagtaccaaactaaattacttgaaataatcgatggcagtgaactcccagaatttcttggtggcaagtgcaggtgtgaagaatatggaggttgtccaaaatcagacaaaggcccttggaaggaccctgaaattttcaagagggttatcaatggtgaggcaaactatggtcgacaagttcttgctgtatcaagcataaatcagaaggaagttggttgtactgaacacacaactgagcaggaaaaaggcaatgatgcctctgctaaatctatttctcaggtggaagatgtttcttcttcaacggctttagtggatcccatcataagccctaatttgacccatgtggatgagttaaaatttcaaggacatgcttcctcatctgatgctcctcccattataggggatagcatccctgctgctggcaaggtcatggatgcatgctccaatccaagaaacagctcgacaccttccagctcaggttctttctctttgagaaatataccggcaacattgggaggacttaaaactcgaattgttgcatggtcaacattcgtaatcctgaccttgtcagcattcctctgttctgtgctgagcatagtgaccaaaaggctctcaaaccaggccatcacatgtgaccactatagtgctgacttccatcaaggatatatgggaaatggcacccttacatccgtattgacacggcttggtgagctggaggagaaggtacaagcacttgaagcaaagccaccccaagtgccatttgaaaaggaggaattgttacatactgctgtttaccgcgtggatgtgttggaagctgaactaatttctatgaagaaggccttgtatgagacattgattcggcaggatgagctgcttgcatatattgaccaacaacagacagccaaattttgtcggcagaagttctgtttctaagtactggagtacctgccacctattttcgtctctttggagatcgcatgcagctattgtggacccagtatacttgcaaatgttttcatatttgttgcagtgtaaagaaatgcaatttttagaaatacataggattgaggagcatggtagcttgtcttgagatcgtgttttagcgacaaaaacagaaaagcttgataccttgtacgcattttcaaccagatgcaggcgtaatctttccccagtatttggtgcaaggctccagtatttggtttgcttgtattatactatctctattctcgaatatttgtca

SEQ ID NO: 150847 - DNA, 1508 bp, Zea Mays
cactgcactctctctctctctctgtctctctgctcggcttgcttcaaacccacttgatcgttgcgtcgtctcccggggcccgggccgacccttagccagctccccgtacgtgcgcagttctcggcacgctaccccatatatccccccagccgctctccacagatagagacgcacacgggcagtgacacgcgcgcataccgacggacttggtagctgctcaccagctatccagatcattggctcattgctgcttccattccattcccccttccctcggcatcggccgcgcccgcccgtgtcgggcggaggcggacgcgcgcgggaatgggacgccacgcggcctccggcggcggcgtgcagcagaagctgcgcaagggcctctggtcgcccgaggaagacgagaagctctacaaccacatcattcgctacggggtcgggtgctggagctccgtgcccaagctcgcagggctgcagagatgcggcaagagctgccggcttcggtggatcaactacctacgccccgacctgaagcggggcagcttctcgcagcaggaggaggacgcgatcgtcggcctccaccagatcctggggaacaggtggtcgcagatcgcgtcgcacttgccgggccggacggacaacgagatcaagaacttctggaacagctgcctcaagaagaagctgcgtcagcgcggcatcgacaccagcacccacaagcccgcggtctccgccagcgtgccggcggcatcggagcagccggtgtcgcaggaccgcaagccgttggccgcagccgccgctgatggcggctccgacatgaagcaccagcaggtgttcgacccgttcccgctgaccgacagcttcggcggcggcttcggcgccgcactgtacggccacacgggcggcaagcaggacgcggccgcgttcgtggactacagcagcgtgctggacgtgtcggagaacctgggctacggcggcgagagctccagcaacagcagcaactggaactgcgcgccggaggtgcacaacaatgcgctcgacggcgacgcgccgctgcactgggcctccgagagcaaggccacgcccttcgccggctacggcggcgaggagcaatcactcctcgggcacaggttctcggtgccctgccacggccagcaggagcagagccctccgcgttttgacttcgacatcggccggggcgccgtggtcggcgagttcagcctcgagttcttctgaaggtccagcttgggaatttcagcaatctagataccgcgtagcgcgtatatatatactgtgtattaaaggcatttcacacggaacaacaattgagagatcgtgcttcgttaatttcctctagtcgaccttactccttaacaatgtcttgcgtttcttttgtttttttatgttttatgtatgtctaaaataaaggcatagacatatatatgtaaacacggtgtagtgtaatagctatacattaaggccttgtttggataaagagggattggagtggattg

SEQ ID NO: 150848 - DNA, 130 bp, Zea Mays
ttaattttttgtttgtttgaagaaaaaaaaagggttcgattcgtatcgagagaaggacagcctgaattaggtggagtggtggtgtgtgggacggaattaattagtgcacggttcggttagcgaactttgc

SEQ ID NO: 150849 - DNA, 299 bp, Zea Mays
ggttgggagtactctactgatgggaaatgtgaaaaaaatgtcatcaacaaagatgctcaacgtgcgcatccagtcattgccatgcttttgagcaggaaggaatggtctggatttggcctggggatgacccaccaaaggctacaatcccttctcttctgcctccttcaggatttacagttcatgcagagatagtgatggaactgccagttgaacatgtactactcctagataacctcttggaccttgctcatgctccttttacacacacatccacctttgccaagggctagagtgttcca

SEQ ID NO: 150850 - DNA, 2665 bp, Zea Mays
ctttcgcaacaacacaatttttgggacatgaatgacatccatttatagtcttttcatgccattgtctctcttgtttatctcaaggtcattccaaatttgaaaggaccaagcaatgttccaatacattattgctctgattcttgtcgccattttggtggtgtctatgaacaagtctgttgatgcccgcatggtccaccccattgtcacccctgaggccatcagcccctctctcgcctccaacgatggtcgtcgcctgatcggcaccaccggccacgatgaactcgtagcgttatgccaacagatgcactacaagacattatgcaccacgatgacgacgctgcccggggtgatgacaccagagcagttattggacgcatctctgcggattacagcggtgaaggcggcgatgacggagatgaagctagaccaggcaataaagtcaagcagtgcccagggtaacgcgatgatgtcatcacttgagacgtgtaaggagagctatgcgtcgctggtggactccatcaataccacgcggaacacgctcaagagcggcggtagcaatgcagacatcatgtcggagctatccgcggcggccaccttctccactgactgcgaggacaccttcgatgagcggccagagctcaaatcgcccatacctggggcgcagcgccacgttagccgcctcgtcagcaactgcctcgacctagcagccaccatcatggaccagccctagacgcctatgcgtgcattgacgcggtgcaaacatggtacatacatgtatgtttaattaatttatgtttatctttgctgtgttcattgctctattgtacatttgccatggggatctacaatgcgtttataataggcttatatttatgtttactataatcactttcaacatgtttggtgtttttaggtctaaaatgcaattgtagctgaagatcatctaggtatgtatagttaacccagagagaataggatttttataagaattaaagtatcttcaagattatttcttacttcattctctaaattattatttaaatagtcatttaaataaaaattgatctctatatttttgcttttgaatagattttatatggctcctctttggttggacttttcaacatgctttggtttctaaaaagtcaaaagccaataaaaggaatttgttctcactcaaagccagagccaaaatccatttttgagtggttcaaatttcataacagcctcctcctgctttcacatgatgtggagttaggaaagtctacaaaatcagtcacctatcactagttatgaaagataccaattcattttttccaccgagcgactcaacttcatcctccatcttatgaatgagaacatcactagcgggaggtccatgcatggacctgccccagcatgggcataaccccaatgcatagccctgccctggtataggtgtggctcaggtagtggccctggtgcggtcgtggcacatggcccttacctaacctcacaaccctatgcaacccctcgggcgagtagctttgacacaagtgatagaatccagatctacagaggatacaaatagaccataaacattcatttcaatgtcatgaaataactagagcaatgttaattagtataagaggtgatgtagaatcagataccttctctagctctatttcacaacaagcaatccccttaaataattctagtaactctcaagcacacaatttagcaactattaaattttactagacatatattaagaggtctaaatacaactagtaacaaaaaaactcctcgcaaacacaaggttgacttgtcccttgtggttggggttgatgatgagtgattgtcaacggatagcactctggttagtcagtggactgaccagagtgtgagattatgcttgtggaaccatgttggtctgcttgtggtgtgcagggtggagcaccgagacaatggtcgacggctgaggacagaggtgaaggtcatacaggctcgtgttgatcgaccaggagcggtgaagggtgattttttgggtcttgactgatggaccagagcaatcgggtgaccagtcatggtgggtgacacttgagacacgcactcgtgcgaggacatggtggagtggactgtgttgccggcatggtcgaggactagcgagacacacgtcttgtcgtggtggacgcacacgtggtgcgggactcacaatgggtttggtggtttgggcctcaaaactacctagggtatggatggcaggtgttgctgagtttgggcctcaaaacttggttgtagcgattctggaggtaaccggtggtggcacatggcatcacagtgaaaggtgcgtccaggcgaagcaacttcgtgtggagagcgtggtcatcggatcaaaaacctaggagttgtttcatttcgcccccggtggagtgggtaggctctatgtaaatagggtgagtttaggaagtgtaaataaccatctataaatagagaggcatgttgtttagttcagtatcacttggttgtcatttgttttggtttagggttttagtacacatatttcctatctctagacatctctagcttttagacaagaatccacaacaattttgtacttcgactgtgtttgtgctcttcaagtttaatccgaggaagggtcgtcggtacggcccacaggttttgg

SEQ ID NO: 150851 - DNA, 797 bp, Zea Mays
ttgtctctcttgtttatctcaaggtcattccaaatttgaaaggaccaagcaatgttccaatacattattgctctgattcttgtcgccattttggtggtgtctatgaacaagtctgttgatgcccgcatggtccaccccattgtcacccctgaggccatcagcccctctctcgcctccaacgatggtcgtcgcctgatcggcaccaccggccacgatgaactcgtagcgttatgccaacagatgcactacaagacattatgcaccacgatgacgacgctgcccggggtgatgacaccagagcagttattggacgcatctctgcggattacagcggtgaaggcggcgatgacggagatgaagctagaccaggcaataaagtcaagcagtgcccagggtaacgcgatgatgtcatcacttgagacgtgtaaggagagctatgcgtcgctggtggactccatcaataccacgcggaacacgctcaagagcggcggtagcaatgcagacatcatgtcggagctatccgcggcggccaccttctccactgactgcgaggacaccttcgatgagcggccagagctcaaatcgcccatacctggggcgcagcgccacgttagccgcctcgtcagcaactgcctcgacctagcagccaccatcatggaccagccctagacgcctatgcgtgcattgacgcggtgcaaacatggtacatacatgtatgtttaattaatttatgtttatctttgctgtgttcattgctctattgtacatttgccatggggatctacaatgcgtttata

SEQ ID NO: 150852 - DNA, 456 bp, Zea Mays
atggcttccttcgtcgccgctacgcaccaccacggcagtcacctggccgccggcttcccctactccgcgcgagcaggcaggagcgttggccgcagcggcgtcaccatctccattagagcccagaccaaagaagatgacatgttgcgttacaagttggatcgtatccctttcttagaagagaaggtgagaaaggtaagggagaatgggaagatcatatgcctggatattaatcagctgatgttatctcaagagaatagatttgcgttcaccatggaggtggctgaagaagctaatgcctatcttgagaagaacaggcatgaatatgggttaaagaagcctatactgcatgttctcagtgatcgcatgaatgaatctgggttttctcggcctgagggttacctttatccttatcctatcaagcctggcccttatttcattaaagaggaaggaaactga

SEQ ID NO: 150853 - DNA, 1224 bp, Zea Mays
aactaccaattttctcgctcagacatacagaattacagagtcgaagtgcgctgtggcctgtggactctcccctccccaactccggcgaagggagcagaaacgttggcgtgttggttgggtggcgtcggcatggacgaggcaacgaagaagaatgtggaggctacggtgctggagatcctccggggctccgatatggagtccgtgacggagtacaaggtccgcgccgctgccagcgaccgcctcggcatcgacctctccatacccgaccgcaagctcttcgtccgcggcgtcgttgaggaatacctactttcactctcctccaaggaggaggcgaaggcggaggaggagggcgtcactggcagggagagcaagggcaaggaacacgaagaggaggacgaagaggatgacgatgaggaggaggatgaaggtaagggtggcgggaagagagagtacgatgaccaaggtgaccttatcctgtgccgcctttcgagcaagaggagggtgactttatcggagtttaagggcaggtcgttggtgtccatccgcgagttctacgtgaaggacggcaaggagatgccctccgccaaaggtatcagtatgactttggagcagtgggaagcattttgcaatgctgtacctgcaatagaggatgccatcaaaaagcttgaagattcagactgaactggttttaagagcctcttcttatgcccgtgtcaaatgaaaaagcctgggaagcatttcgcaatgctgtatctgcaatagatgatgcatgaaaaagcttgaagattcagacagaactggtttaggagcctcttattttgcctgtatcaaataaaaaagcctatttctgacccttaacgagggccatatatgtgtcttgcaagagctaagttctgtaaaagatttctacatgtaccatgtgtaggagttaggatagagtgatagacgtactgctgcatacagttcggaatatttgctagtaacaagtaatctaccattaggtggcctggagttcacatgctatgctatgtgatgatcggggatgtgtcctagcaatagcaagctcatgaagttgtttctcccccctttttttttctgtgtattagggttagtttgacaacctcatttcctcagggatttctattttctcaaggagattttttttttaaaaaaatagagttgccaaactagcctttacatgtttatgtgatagcgatttttttt

SEQ ID NO: 150854 - DNA, 759 bp, Zea Mays
aactaccaattttctcgctcagacatacagaattacagagtcgaagtgcgctgtggcctgtggactctcccctccccaactccggcgaagggagcagaaacgttggcgtgttggttgggtggcgtcggcatggacgaggcaacgaagaagaatgtggaggctacggtgctggagatcctccggggctccgatatggagtccgtgacggagtacaaggtccgcgccgctgccagcgaccgcctcggcatcgacctctccatacccgaccgcaagctcttcgtccgcggcgtcgttgaggaatacctactttcactctcctccaaggaggaggcgaaggcggaggaggagggcgtcactggcagggagagcaagggcaaggaacacgaagaggaggacgaagaggatgacgatgaggaggaggatgaaggtaagggtggcgggaagagagagtacgatgaccaaggtgaccttatcctgtgccgcctttcgagcaagaggagggtgactttatcggagtttaagggcaggtcgttggtgtccatccgcgagttctacgtgaaggacggcaaggagatgccctccgccaaaggctatgccagtcctgtattttcatgcatcttcagaagtctttttagcgcagttattgtcttaccactggtgtctagctgtatcagtatgactttggagcagtgggaagcattttgcaatgctgtacctgcaatagaggatgccatcaaaaagcttgaagattcagactga

SEQ ID NO: 150855 - DNA, 691 bp, Zea Mays
acagaccacttgtcaggcttgaagcccttgtgcaggacgccggagaatttccccttgctcttgtgcatctccgcccccgccgcgcggcacggacctgtgtcttccggcctgattcgaatccagccaaatccaaaccgggcgcgacaccaaatacctgccaacctccacctaggcggggaggggggactcccttttgtcgctgcggcggtggattggaatatggaaagattcgggctctcacgcacgcgggagggcgcaggctgccgctgccgcctgctgccaaggggaacagaacagggggaaggaagcaggaggagactttttgccgaaggaagcaattgtatcgctttttggttggaaggggtggaatccgtgcgggcgatgcagggcagcgggaggatcggccttcctcgccgcttcgcttgcgcgttgtcggttgggccgctgcccgctggcatggtggtggattgaccttgaccggtggccttcgacgacgggttcgaggcgctcggcttgtgggacgtgacccttcggtgcaaacacggcttgcgtgattgcatatttgcgtaaattgcgtttgcgttgacgccggccatgtaataaatctccctttgctacatggtaaaatgtcctattttctgtaaaaacaaaatcgattcttgtaaaaccatgtatgacatctataaaaatt

SEQ ID NO: 150856 - DNA, 1755 bp, Zea Mays
gtttatttactcttcctccctccgcatcctcctcgcgtcgcattcccccgtttccgcccatgcgtgtccgcctcctcgcatccgccgtcgtctcgcacctcccccgcgccccaatctggtccgggcggagttagggatgaggacacaaggggaggggcatgtggaggaggccacggggttcgaggtgggcatcgtggtgcccaggctctcccgcgccgccgcggcgggggccaccgacaactgcgtggcgcgtctggtgcgggagctcgagggcgccgggctgctcgtcgagcgcgtccgcggcgtctccgctgagttcatcaagctagccgcaccaatggggaccctggggagagctgctgctgagatgcatatgaagaagctaacctacatcgggatggagcttcagtttcaatcggaccaggttgcagcattcgttaggcagacagacggttccctgttcagctggagagaacgctattcctgcttccgctacttgatatatggcattgtgaacaagacaaactctgaagtagtccttaaatttgatgataaggagttccattggaagcaaagtgagtccttattaacaaggctggaagctgaaggagttgtaaagctagtattccctttgcatgatgaaattaaaaggaagcaactcctgagaaattgggcgcttaattggcttgacttcacatggcagcctatcgatgagatttactcctattttggaacaaagattgcaacatactttgcgttcctaggaatgtatgcgcgatggcttttcttcccagctgtttttggactggcaactcaactcatagattttggatcattgcagtggttggttcttcctggtttctttatctttgttatttcttgggctgtcctctttctgcaattttggaaacggaagaattcagcacttcttgcaagatggggtattcattgttcactatctgaatacaaaaacctggacaacgtcagcttcttgagtgattctcttactgttgaggaaaaggagtttggtgttgtgtctgtggttgtggagaaaagaaagtttcaaaggaacgaatggttcggtgtcctccttagaataaggaacaatgctatcattgtgctggctatcatttgtcttcagctgccatttgagttggcctatgctcatctatatgaaattgcagaaactgaggttatgaggtatttgttaactgcagtatatcttgttgcaattcaatattacaccagaattggtggcaaggtgtctgttaatttgataaagtatgaaaacaaccaaggagaagagtctagttccgctagtttagtttataaggcctttggcctttactttatgcagtcatatattgggttattttaccatgcttctttgcatcgtgatatactggccctccggcgagtcctcatccagcgtctcattgtgtaccaggtattagaaaatctaattgagaattccattccttacctcaagtacagttacaaaaagtacatagctgttcacaagaaaaagcgtgggaaagaatcgacagtgggtaggtcagtccggttatcaacaagagtggagaaagagtatttaaaaccctcttatactgcaagcattggagcagaactcgaagatggtttatttgatgactttctggagctgactcttcagtttggaatgatcatgatgtttgcctgtgcatttccattgattttctgctttgcagctctggtttgtgctctttcaaaaaatca

SEQ ID NO: 150857 - DNA, 1763 bp, Zea Mays
cagcagcacgtggtctgaaatccagcgcggcgggggcgctgcccagcccagggcacgttggtcacgtgcgccgacgatgatgccacggcccggagacaaggaacggatcgaaggcagcgcaacgaacaggaccatatacacagacgacgcagcgcagacgttgcgcgcggcgcggacgccacccccgccacaatcccgccccctcccccagtgcccgtccggcctcttgtccgtcgccgatggccgcgcccgcgccgaggccagcgcgcgcagccaccctcgccctgctcgccctcgtcgccgcgtggctcggggcctccgcgggcgcgggcagcgacgacgtgctgcgccgggcgcagcgcgatgagttcgcggcgtggatggccggcgtccggcgggccatccacgagcggcccgagctggcgttcgaggagcacgagacgagcgcgctggtccggagggagctcgacgccatgggcgtcgcgtacaggcacccggtcgccgggacgggcgtcgtcgcggccgtcggcaccgggggtccgccgttcgtcgcgctgcgcgccgacatggacgcgctcccgctgcaggaagtggagtgggaccacaagagcaaggagacccggaagatgcacgcctgcggccacgacgcccacaccgcgatgctgctcggcgccgccaggatcctccatgagcgccgccacgacctgcagggcacagtagtcctccttttccagccgggagaggaggtcggcattggcgccaagaagatggtggaggcgggcgccgtggagaacgtcgaggccatattcgggttccacgtcaccgtaatgctccctaccggcgtggtgggctctagggccggcccgttgctggccgggtgcgggttcttcgaggcggtgatcaccggggccggtggccacgccgccaccccccacaacatcgtcgaccccgtggtggcagcctccagcgtcgtcctcagcttgcagagcctcgtctcgcgggaggcggacccgctggactcgcaggtggtaacagtgacgaggttccagggcggcggcgcgttcaacgtgatcccggactccgtggcgatcggcggcacgtttcggtgcttctccagcgatggcttcatgcggctgaagcgtcgcatcgaggaggtgatcgtttcgcaatccgcggtgcaccgatgcgccgcgtccgtggacttcggcgccggtgggagccccctgctgcccccgaccgtgaacgccgcctcgctgcacgcgcacttcgaggccgtcgccgccgagacggtgggcgcgagcgccgtccgggccgccatggcgccgtgcatgggtagcgaggactttgcgtccttctcggaggccgtcccagcctcgcacttctactttgttgggatacggaacgaggggatcggggccgtgcacgccgcacactccccgcacttcctcgtcgacgacgacgcgcttccgtacggcgccgcaatgcacgccaacctcgccatcgggtacctgcggaaccgcgcggcagccaacgacgggcccgtcgtcgccccccacgacgagctttaggttcactgcagctttttcacgagcgacctacgattgtgcggcggcttgcagtcacacacgtcgggatcccatcgttggactgatcttgccgtccaatgcgcataacgattgcgtggctgagtggctctgatcacgaaacaagtgaaactgcacgcatttaattctaaggggcataacaaaatcaaataattataa

SEQ ID NO: 150858 - DNA, 1766 bp, Zea Mays
cagcagcacgtggtctgaaatccagcgcggcgggggcgctgcccagcccagggcacgttggtcacgtgcgccgacgatgatgccacggcccggagacaaggaacggatcgaaggcagcgcaacgaacaggaccatatacacagacgacgcagcgcagacgttgcgcgcggcgcggacgccacccccgccacaatcccgccccctcccccagtgcccgtccggcctcttgtccgtcgccgatggccgcgcccgcgccgaggccagcgcgcgcagccaccctcgccctgctcgccctcgtcgccgcgtggctcggggcctccgcgggcgcgggcagcgacgacgtgctgcgccgggcgcagcgcgatgagttcgcggcgtggatggccggcgtccggcgggccatccacgagcggcccgagctggcgttcgaggagcacgagacgagcgcgctggtccggagggagctcgacgccatgggcgtcgcgtacaggcacccggtcgccgggacgggcgtcgtcgcggccgtcggcaccgggggtccgccgttcgtcgcgctgcgcgccgacatggacgcgctcccgctgcaggaggaagtggagtgggaccacaagagcaaggagacccggaagatgcacgcctgcggccacgacgcccacaccgcgatgctgctcggcgccgccaggatcctccatgagcgccgccacgacctgcagggcacagtagtcctccttttccagccgggagaggaggtcggcattggcgccaagaagatggtggaggcgggcgccgtggagaacgtcgaggccatattcgggttccacgtcaccgtaatgctccctaccggcgtggtgggctctagggccggcccgttgctggccgggtgcgggttcttcgaggcggtgatcaccggggccggtggccacgccgccaccccccacaacatcgtcgaccccgtggtggcagcctccagcgtcgtcctcagcttgcagagcctcgtctcgcgggaggcggacccgctggactcgcaggtggtaacagtgacgaggttccagggcggcggcgcgttcaacgtgatcccggactccgtggcgatcggcggcacgtttcggtgcttctccagcgatggcttcatgcggctgaagcgtcgcatcgaggaggtgatcgtttcgcaatccgcggtgcaccgatgcgccgcgtccgtggacttcggcgccggtgggagccccctgctgcccccgaccgtgaacgccgcctcgctgcacgcgcacttcgaggccgtcgccgccgagacggtgggcgcgagcgccgtccgggccgccatggcgccgtgcatgggtagcgaggactttgcgtccttctcggaggccgtcccagcctcgcacttctactttgttgggatacggaacgaggggatcggggccgtgcacgccgcacactccccgcacttcctcgtcgacgacgacgcgcttccgtacggcgccgcaatgcacgccaacctcgccatcgggtacctgcggaaccgcgcggcagccaacgacgggcccgtcgtcgccccccacgacgagctttaggttcactgcagctttttcacgagcgacctacgattgtgcggcggcttgcagtcacacacgtcgggatcccatcgttggactgatcttgccgtccaatgcgcataacgattgcgtggctgagtggctctgatcacgaaacaagtgaaactgcacgcatttaattctaaggggcataacaaaatcaaataattataa

SEQ ID NO: 150859 - DNA, 778 bp, Zea Mays
attattgtccgtcgtatagcagctacaatgtcgcctctccatcgttcactgcatccccttcctcctctcccctcccgttttcgaggccccgttttcttctctctcacactagatggaggggctctatgcgcagacgcctgttgcctggcatcccccgcccccgctccagctgctctccggaagattccaaagtcactgttggcttcctcgctacgctggtcttggcgatgacagaggcagcgtccgcccacttttcccctcgcgcggccacgacggatggtagtcggatccgattgatcgacctggaagaatctccaccgtcctgctttaccgagcgagatgctcggatcctgcagcgaagggagagagtgcatcgccgccgccatccgtgtccgccagtgcttcatctccgaagcgtcgtctgaaggggatacatcgatgatcgatcgacacccagatctctcatacactgtctgcttctttggacctacaagttttgaggtgtttgtattttatggttcacacaacatgcaaagtggattggactaaggttctgaggatgcaactatggttgagcaaaaaactcgtaatccaaactcggaatacccaaatttcgtttggtaatttcgggtagcaacttataaagtacgaacttaatttaggtaattcaggtactcgaattttcatgtgtcatatactcatatcatttttaattaataatgtgcatgacttgtgattgtagattgactgttttatgtccatgtatatcattattcaa

SEQ ID NO: 150860 - DNA, 705 bp, Zea Mays
tttttatcgggttcaacactccaggggatacttcctaatgctggtcttaagttctacatatatgaagggcctaaggttcattacccagaagattacagaagttctgtaacaatgaagctgtcatgtgtgctgctctgtttatttggacagactctgacataccattagatgttgtcaggaggcagatgcaggttcaaaatcagcaacaacatgaacaatttggtgccccacgaataacgggcacattacagggtcttgtgtccattaaacaaacacagggttggaaacaattatttgctggcttgagcctcaattacatcaaggtggtgccttcagtggccattggtttcaccgcatatgacaccatgaagcatttgctgaagatacctccaagagagaagaataaggtctgagcatggtcctgcttgaaattttggccgctcaattctgcagctagcagaaaagcactgcttctttctaaggcatgggagtgccgtatgaagcttacaatagaatgaagcagcctcgcccgcaattctgttacctagtactaattgcgttgtgtcacgtgatagcttatgtacctgacatattctttcattctaattttcctcattcatctaccttttgagtttcgactgtacattttatccaccgtgtggaatggtggtactgagttaacatgtgatacgaatacagaacctt

SEQ ID NO: 150861 - DNA, 455 bp, Zea Mays
tttttatcgggttcaacactccaggggatacttcctaatgctggtcttaagttctacatatatgaagggcctaaggttcattacccagaagattacagaagttctgtaacaatgaagctgtcatgtgtgctgctctgtttatttggacagactctgacataccattagatgttgtcaggaggcagatgcaggttcaaaatcagcaacaacatgaacaatttggtgccccacgaataacgggcacattacagggtcttgtgtccattaaacaaacacagggttggaaacaattatttgctggcttgagcctcaattacatcaaggtggtgccttcagtggccattggtttcaccgcatatgacaccatgaagcatttgctgaagatacctccaagagagaagaataagctagcagaaaagcactgcttctttctaaggcatgggagtgccgtatga

SEQ ID NO: 150862 - DNA, 972 bp, Zea Mays
ccgaaaaactcgaccgcaagcgtgtgtacgcacggaccgcccgcccacgcacgggcatggcagcctccgcctccgcctccccctcatcctccacaaaccctaggtagcacgggagtccctcgccgccggatccccgagaccctgcaagccgcgccgattctgtgctgtgtgctccacggctagatttctgggtgtgaaagagcgcgtttttttaacagttcttagctagggagattttgggaagggagagtgctggaataatggagccgaggatcgggaacaagttccggcttgggcgcaagatcgggagcggctctttcggggagatctacctcggcaccaatatccagacgaacgaggaggttgcgattaagctggaaaatgtgaagacaaagcatcctcagttgctctacgaatcaaagatttataggattctgcaaggaggaactggaataccgaatgtcagatggtttggtgtagaaggagactacaatgtcttggttatggatttacttggaccaagccttgaggatctatttaatttctgcagcaggaaattatctctgaagaccgtgcttatgctcgcagatcagatgataaatcgagtagaatttgttcattccaagtcttttctgcatcgagatattaagccagataatttcctcatgggtcttggcagacgagctaatcaggtgagtggcaataccatctttagcatgtccttgcaatttatttttttcagtttttgttgagtttattaaccactttatgttttgttctgttttttcatccaggtctacgttattgactttggccttgctaaaaaatacagggatacctcaacgcatcagcacatcccatacaggcatagaaaagaataatctaatcattcctgagttgtatatgctttgtgttcattcctgtagtaagcatgtttagtgttctaattagctcaagttacttcccatttat

SEQ ID NO: 150863 - DNA, 556 bp, Zea Mays
gctagggagattttgggaagggagagtgctggaataatggagccgaggatcgggaacaagttccggcttgggcgcaagatcgggagcggctctttcggggagatctacctcggcaccaatatccagacgaacgaggaggttgcgattaagctggaaaatgtgaagacaaagcatcctcagttgctctacgaatcaaagatttataggattctgcaaggaggaactggaataccgaatgtcagatggtttggtgtagaaggagactacaatgtcttggttatggatttacttggaccaagccttgaggatctatttaatttctgcagcaggaaattatctctgaagaccgtgcttatgctcgcagatcagatgataaatcgagtagaatttgttcattccaagtcttttctgcatcgagatattaagccagataatttcctcatgggtcttggcagacgagctaatcaggtctacgttattgactttggccttgctaaaaaatacagggatacctcaacgcatcagcacatcccatacaggcatagaaaagaataat

SEQ ID NO: 150864 - DNA, 921 bp, Zea Mays
atggcaagcagcagcaggagtgaagaaatcgaagtggttgatgctgaagcaaatttagagcagcagcaagatgacaagcaacaagatggagctgtcgagccagagaacttgacagaaggagcaagtgcacaacaacacggaaacaaacgaacaagatctgtggcaaattcatctacagatcaatcgcaaccaaactctcgcaagtccaaggtatggaaagacttcacgattatttcacgagaaggtgaatctgaagtggctgagtgcaagcactgtaagaaaaaatttgctgctaacactcagaatggaacatcttctatgctgaggcatgttaaaacaaaacatcccactactagagctgaaatgggcaattatttcttaaaaactgaaaaggatgatgatgggtcagttgcacttaaaaattataaggtggatttgcctgctgttagaactggaataactatgtttctgcttggaggtgcacatccatttacagtagtggaagaacacgacttcaaaaatatgcttagtttagcttgtcctcagtacaagcatgttggccgtcacactataaaaagggatgtcatggatatgtttcaaaaagaaagaaaagaagtcattgatgccctcactaatagtcctggcagagttagtttcacttctgataattggaaatctgattgccaaaaattcaattacatttgcatcactggccattacatagatgataagtggaaattgcataagagaatcatatggttcaagaaattgaatccgccacttgatggagtgtcaattgctgatgaacgtcacttgctagcacaagcgcacaaggagcagacactaccacaattggagatgaagagaggtctgattctgaatgaaatgaagctaaacagaaggtcagaactcatgaagtga

SEQ ID NO: 150865 - DNA, 2526 bp, Zea Mays
gagagctgacatattgttttgatagaagtaatttaagcttccattgctaccattacacctgtgcaggatcagctctaccacctgcgcatccacctgacgctcctgcatttagaaagcccaaggctttggcaccagcgcctagtcaatcgctgctacctccaccaacaaattcatactgcacggcaccctgctcagatcctctgaccaatagtcctccaggaatgacatgcctctgtgtgttgccaataaaagttgagcttcgctttggtatagcattgtacacgttctttacacttgttcctgaacttgcacaagatattgcatctggagtgttcatgaatcaaagtcaagttcgtgttatgggggcaaatgctgcacctgatgaccctgaaaagacaatcgtctttattgatcttgtgccactgggaccaaaatttgacaatgcgacagcatttttagtatttgaaaggttttgtaataagcaggtcatcataaaccctatggattttggaaagtatgacgtattgtatgttctttaccaaggtctccctccgtcaccaccagcagcaagcatgaacaatggtcttagcaatgttaatgatccaagtttacatccgcttgctgccgatgtggtaaatcataaggaaagaaaaggcaggggcataattataattattattctatcaagtgcttttgcttttattttatgtgctggagctgcactggtggtttatttcaagcttagaaaccgcagccatttaactgaagcatcacctgtgccaacaaaacctgcaggtcctggttctgcaatgttggggaacaggctagaaagcagacctatttcggcatcaccatccttcagctcaagtttggtggcatataaaggaactgccaaaacgtttaatctggttgagatggagagagccacactaggatttgatgagtccagaattattggggagggtggttttgggcgtgtctatgaaggtattcttgaggatggagagcgggttgctatcaaggttttaaaacgggacgatcagcaaggtacccgggagtttttggctgaggttgagatgcttagccgattgcatcacaggaacttggttaagctgataggtatatgcacagaggggcatagccgatgtttggtatatgagcttgttccaaatggcagtgtggaatctcacttgcatggatcagataagggagccgctcggtttgactgggacgctaggctcaaaatcgcactaggtgcagcacgtggacttgcatatttgcatgaagattcaagcccacgtgtcatacaccgcgatttcaagtccagcaacatcttactggaacatgacttcaccccaaaggtgtcggacttcggcttagcaaggacagctctgggtgagggaaacgagcatatttcaactcgtgttatgggaacttttgggtacgttgcacctgaatatgcaatgactggccatcttctggtaaagagtgatgtttacagctacggcgtagttctccttgagctccttacagggatgaaaccggtggatatgttaaggcctcctgggcaggagaacttggtggcatgggctggttcgcttctgacaagcagggatggtctggaatcgatcgtagatccttcactcgggagcagcattccgttcgacagcatcgcaagagtagcagccattgcttctatgtgtgtccagcctgaggtggaccagcgcccgttcatgggcgaagtagtccaagctctaaagctggtgtgcgacgaaggcagcgagttcaacggatccacgagctttagccaagatctgcgtatccaggatgttgaggctatgagtagagcgagtggggatgtagacttcgttgacccaacgctatctgccgagctgttcacctcatcagcgcgttatgatgctatggatgcctctggttctttccgaagatactcgagttcaggtcctctgagagtagggagagctggactggacaaagagagggggctgtcaacaggcagctcaagtgagcacgttgggctacaaaggtttagaattgattcagaatagtcagcctgcatcctgcaagcagcttatcatgattgggagtgcagaactagacttcttcggaagcttaaactagacttcgcacagattttttgtacagttctagagatgtgtagatgcctttaggaaaaagaggtgtacacaagcgagtttttcagctttaatcccccacggtccgtaataggttttgccgttgcagcacgttcaaggcgctcgtgcacgcactgtcaccattttttgagttcaatgggggaaaaaaccctatcctgattggccgcaacctttgcatttatccgttgctttgcccgtacactgtcgctgatctgggcttgttattcgttaatgtcgggcaacgaaagatggttctgtggtcactacgaaaggggcagctgaatagttttggtgtacaggcaaggcattgttacaaacgaaatgagctcacaacacaagcataaaaaaa

SEQ ID NO: 150866 - DNA, 371 bp, Zea Mays
gagagctgacatattgttttgatagaagtaatttaagcttccattgctaccattacacctgtgcaggatcagctctaccacctgcgcatccacctgacgctcctgcatttagaaagcccaaggctttggcaccagcgcctagtcaatcgctgctacctccaccaacaaattcatgtatgctgagtatacttttgtgccatttgtgttcataaattcaaaaaaaacctactaattgcttagctttggtccatccatcttctttttggttttgctagactgcacggcaccctgctcagatcctctgaccaatagtcctccaggaatgacatgcctctgtgtgttgccaataaaagttgagcttcgctttggta

SEQ ID NO: 150867 - DNA, 557 bp, Zea Mays
gttcccccagtgtcattgacttcaccgcctttgcctgcaattgggcgacgaatgcaaagtccagcagcttctccagaaacagcagttcatccagctaaacatggcaaggatcatggaactccagtttcagcaccttcaaatgttagtcatcaccatgcgatgcctgcgaataatacacatggaaaaactcatggaactccagttttggcaccagaaaagagaaggcatcaccacttgcctgcaaataattcatatgtgaaaggacctgctgtttctccctcaaagtctcccatcatccacaggaaaggacatggtgttccagttgctgcacctccaaaagaacactggagctatttaccacctgcaaatcgtagacaccacaaaggttctcgtcctgctccacgtaaaagtaacaatacttctgcaccaagccatgtatatcctggtagtcctgcacctgcacctgaacgtttgctcatcaaaggaaagggcaaggaaatttctgctcatgctccacgccatcccaatcattaccattcgcatcataattctccaag

SEQ ID NO: 150868 - DNA, 1255 bp, Zea Mays
taaaatacctggcgcctgatcacggaaagggacggcaacaaatcgccgtgcgccagcggccagcgcacagccgagctccagagaggaggcggagctgcgggggacggggggagacggaggaggtcccggcgtcccgcgcctccccgattggacaacttaatgacccctagtccctagtagcaagtcggctttgtgcgcgcgtgctctgctgcccacccggccgccccatttgtttactgggtgtctgggtccagtccccgccccgaatcttttccctcctcccgcaccccaggccgcagcagcagcaccggcgcaccgccacccactcgccccgcctccgtgcccgcgcaactcgcgcctgcagcgtgtgggagatgtgatcggagcccggccgtcggttcgagtgttttcttctgcctctgggctgtggcgcggggaggaggcaagctggcggtgagatgggtcggtgcggaggaggaagcggagcaggagcaggagggggagctttgggcggctgtgctctcctcaccgccgccttggttatctcaacgctcgtgatccagggcgctggaggatctaagcaatctcatgcacctgctgttgctcgcaaggttcttctatccataacgaattggcacccacacaattacttggatgatgtacttcatccatcacaagtacaagatcaaaggctcgaacgtttaggtctgtaaccacaaaactgaatacttaatgtcttgcagtgttcacttttattatatattgtgatgggtgtttctgaggtagacacaattgtctatattgtttctttgttaggattaaccgcaaaaaacacacctgcatgaactgctatttgttgtacatgttaatagatggtaggatactaggatcaatatgcaacccatcaatcaaccagacaaccatggagtaaaacatggatgacttttcctcttttttatctgcctggaatggctacacgcttctaatacgttacgcttctagtaagttgtcttccacagatgaacctgtttcaccacctacacaatcagtactgactgcagtggaacctggtgctcttgaccatttttatcaacaatcaaagagaaaaaaaagtcccaatctatgcagagcccagagctgattgtcgaggagtttattgagctctgtctgcatcttaacctttagaatcagtttggtatgagtatgatggtttcttatttttactttattcacaggccaagatgccccatcattt

SEQ ID NO: 150869 - DNA, 550 bp, Zea Mays
gatgcgcctctgttccatccctctcccgtcgtcgcgcctgtggtctttctccttccgtgtcgcgcctccctccgcgacgcccgcgggccgcatccctcccgcagtgaaggtgcccacggtcagatccctgcggctggcgccgccatggatgccgagcaggccatcactgtatcaattgcagcaaaattccattgaaagtattcaaagacaagaaaaagacttgacagcttaagcacatgatgttgggaacagaaccagctacctgattgcgggcacgggcaacctctgtttctgacacctgggatgcaagtcttctaaactccgccattattaaccgtgacaagtcttgcagggtgtcaggctgcaattgatttcacaaattgtaagaaacattgtagcaatcaatatctccgtcatatccatgcaacgttcagctgatggcatagatgaatggtcactagaaactttgatgtaactctgtgctgtgcaaatacaagtaattgtctgagtagtttattgttccatataatatattaactagacaatgact

SEQ ID NO: 150870 - DNA, 1872 bp, Zea Mays
cataacatgattcatctgacttatgtttctgtaggttgttcatctgacttatgatgacctatgatttatctgacttattgctttgcttgaaagaaattttaaaaatcatccgaaattcgcctcatgaaactgactcggctgaagtaccatgcacaggaagctttctcgtaccatcactgcaatcgtcgaccccacatggcagcgaaacggaaacggacgcgacacgctgcaacgttcgggagtaccagcgacgaacccaatcccaatccctatcttccgagatttgtctgcgcccctgcggcgcgcatggcgccacgactgaccgtggccttgggcggcgctcgggcatgagtacatggcgctcggtggcctcgcgtcgcgttactcacccaccggcaccgcgccacggccgcgttcgtctcaacaggagccgatggccactctcgcgccacggccacatatcctcctcggcttgacaaggccgcagcccatagcgcttcgtgcctgcgccgccttctcccgctcccgccacgcgccagtcccaccgcgggccgcgcagccgcggcgcgtcttcctcggccttggcgctgccttcatcgaccaggccacccgcatggcctccggcggcacctcgtcccgctctttcgttgccggagcgcggccgaggcaaggcgtttccccagtcgagcagattctcaagaatgtcgagtggccagatgagttccctttcaagcctgaggacttcagccgcttcgacgaatcatcagatactctgttctactcggttccacgttttgtcactcacattgatgaccaagcaatccaagctctcacagagtactattctgaagttcttcctccaagtaatactcctggggtggccattctggacatgtgcagcagctgggtcagccattatcctcccggttacagacaagagaagatcgtggggatgggtatgaatgaagatgaactgaaaaagaactcggtactgactcagtatgtcgtgcaagacctcaatgtgaacccaaagcttcctttcgaagataacacttttgatgttatcaccaatgtggttagtgtagattaccttacaaagccaatagatgtttttaaggagatgcgacgaatactcaagccaagcggccttgccataatgagcttttcaaaccggtgcttttggacaaaagctatatctatatggacctcaactggtgatgctgatcatgcatggatagttggtgcttacttccattatgttggaggttttgaacctccccaggcacttgatatatctcctaatccaggacgaactgacccaatgtatgttgtatgctcgagaaagaaaatagggtaactaaacaatatatttggcaagtgtgcatatatatttgcagtgctatcaagaaacaaatagaaggaaaaatacaagaagcaagttgtttggccctgatcgcaggacctattggtgagctgatgtttccgtgagtaatgtaacgacagaaaaaagaagcaactactacataaactatttatagaagcggcagattcacttcataggttgtagcaactgtctttactaaaagtgtgtttggtttgaggaatgaagtgatccatcttcttctcactcctcacttttttatttggtttgtgtaatagaatgagttgatccatcaccactccattcctcgtaagataataattagtatatacatgaggggtgggttgattccaccaaaattgatagaatgaacttatgatgcatcacctcataaagcatagagtgactgcacaaaccaaacacaccataagggtatgtagaaatgatttattaaaataatggtatttattaaataatactacatccgtatt

SEQ ID NO: 150871 - DNA, 1853 bp, Zea Mays
cataacatgattcatctgacttatgtttctgtaggttgttcatctgacttatgatgacctatgatttatctgacttattgctttgcttgaaagaaattttaaaaatcatccgaaattcgcctcatgaaactgactcggctgaagtaccatgcacaggaagctttctcgtaccatcactgcaatcgtcgaccccacatggcagcgaaacggaaacggacgcgacacgctgcaacgttcgggagtaccagcgacgaacccaatcccaatccctatcttccgagatttgtctgcgcccctgcggcgcgcatggcgccacgactgaccgtggccttgggcggcgctcgggcatgagtacatggcgctcggtggcctcgcgtcgcgttactcacccaccggcaccgcgccacggccgcgttcgtctcaacaggagccgatggccactctcgcgccacggccacatatcctcctcggcttgacaaggccgcagcccatagcgcttcgtgcctgcgccgccttctcccgctcccgccacgcgccagtcccaccgcgggccgcgcagccgcggcgcgtcttcctcggccttggcgctgccttcatcgaccaggccacccgcatggcctccggcggcacctcgtcccgctctttcgttgccggagcgcggccgaggcaaggcgtttccccagtcgagcagattctcaagaatgtcgagtggccagatgagttccctttcaagcctgaggacttcagccgcttcgacgaatcatcagatactctgttctactcggttccacgttttgtcactcacattgatgaccaagcaatccaagctctcacagagtactattctgaagttcttcctccaagtaatactcctggggtggccattctggacatgtgcagcagctgggtcagccattatcctcccggttacagacaagagaagatcgtggggatgggtatgaatgaagatgaactgaaaaagaactcggtactgactcagtatgtcgtgcaagacctcaatgtgaacccaaagcttcctttcgaagataacacttttgatgttatcaccaatgtggttagtgtagattaccttacaaagccaatagatgtttttaaggagatgcgacgaatactcaagccaagcggccttgccataatgagcttttcaaaccggtgcttttggacaaaagctatatctatatggacctcaactggtgatgctgatcatgcatggatagttggtgcttacttccattatgttggaggttttgaacctccccaggcacttgatatatctcctaatccaggacgaactgacccaatgtatgttgtatgctcgagaaagaaaatagggtaactaaacaatatatttggcaagtgctatcaagaaacaaatagaaggaaaaatacaagaagcaagttgtttggccctgatcgcaggacctattggtgagctgatgtttccgtgagtaatgtaacgacagaaaaaagaagcaactactacataaactatttatagaagcggcagattcacttcataggttgtagcaactgtctttactaaaagtgtgtttggtttgaggaatgaagtgatccatcttcttctcactcctcacttttttatttggtttgtgtaatagaatgagttgatccatcaccactccattcctcgtaagataataattagtatatacatgaggggtgggttgattccaccaaaattgatagaatgaacttatgatgcatcacctcataaagcatagagtgactgcacaaaccaaacacaccataagggtatgtagaaatgatttattaaaataatggtatttattaaataatactacatccgtatt

SEQ ID NO: 150872 - DNA, 1824 bp, Zea Mays
cataacatgattcatctgacttatgtttctgtaggttgttcatctgacttatgatgacctatgatttatctgacttattgctttgcttgaaagaaattttaaaaatcatccgaaattcgcctcatgaaactgactcggctgaagtaccatgcacaggaagctttctcgtaccatcactgcaatcgtcgaccccacatggcagcgaaacggaaacggacgcgacacgctgcaacgttcgggagtaccagcgacgaacccaatcccaatccctatcttccgagatttgtctgcgcccctgcggcgcgcatggcgccacgactgaccgtggccttgggcggcgctcgggcatgagtacatggcgctcggtggcctcgcgtcgcgttactcacccaccggcaccgcgccacggccgcgttcgtctcaacaggagccgatggccactctcgcgccacggccacatatcctcctcggcttgacaaggccgcagcccatagcgcttcgtgcctgcgccgccttctcccgctcccgccacgcgccagtcccaccgcgggccgcgcagccgcggcgcgtcttcctcggccttggcgctgccttcatcgaccaggccacccgcatggcctccggcggcacctcgtcccgctctttcgttgccggagcgcggccgaggcaaggcgtttccccagtcgagcagattctcaagaatgtcgagtggccagatgagttccctttcaagcctgaggacttcagccgcttcgacgaatcatcagatactctgttctactcggttccacgttttgtcactcacattgatgaccaagcaatccaagctctcacagagtactattctgaagttcttcctccaagtaatactcctggggtggccattctggacatgtgcagcagctgggtcagccattatcctcccggttacagacaagagaagatcgtggggatgggtatgaatgaagatgaactgaaaaagaactcggtactgactcagtatgtcgtgcaagacctcaatgtgaacccaaagcttcctttcgaagataacacttttgatgttatcaccaatgtggttagtgtagattaccttacaaagccaatagatgtttttaaggagatgcgacgaatactcaagccaagcggccttgccataatgagctatatctatatggacctcaactggtgatgctgatcatgcatggatagttggtgcttacttccattatgttggaggttttgaacctccccaggcacttgatatatctcctaatccaggacgaactgacccaatgtatgttgtatgctcgagaaagaaaatagggtaactaaacaatatatttggcaagtgctatcaagaaacaaatagaaggaaaaatacaagaagcaagttgtttggccctgatcgcaggacctattggtgagctgatgtttccgtgagtaatgtaacgacagaaaaaagaagcaactactacataaactatttatagaagcggcagattcacttcataggttgtagcaactgtctttactaaaagtgtgtttggtttgaggaatgaagtgatccatcttcttctcactcctcacttttttatttggtttgtgtaatagaatgagttgatccatcaccactccattcctcgtaagataataattagtatatacatgaggggtgggttgattccaccaaaattgatagaatgaacttatgatgcatcacctcataaagcatagagtgactgcacaaaccaaacacaccataagggtatgtagaaatgatttattaaaataatggtatttattaaataatactacatccgtatt

SEQ ID NO: 150873 - DNA, 707 bp, Zea Mays
aagagattatacgttgtactgcaaagtgttacttctttattagcatcgtgaattggagcgcaaagattgtttacattatctgatagtagcacttctttgctagtaggttagtgtagattaccttacaaagccaatagatgtttttaaggagatgcgacgaatactcaagccaagcggccttgccataatgagcttttcaaaccggtgcttttggacaaaagctatatctatatggacctcaactggtgatgctgatcatgcatggatagttggtgcttacttccattatgttggaggttttgaacctccccaggcacttgatatatctcctaatccaggacgaactgacccaatgtatgttgtatgctcgagaaagaaaatagggtaactaaacaatatatttggcaaggtttgtccctcctttctctttgttgattctattgtttgatgaaattttattcaacaatttctctagtgtgcatatatatttgcagtgctatcaagaaacaaatagaaggaaaaatacaagaagcaagttgtttggccctgatcgcaggacctattggtgagctgatgtttccgtgagtaatgtaacgacagaaaaaagaagcaactactacataaactatttatagaagcggcagattcacttcataggttgtagcaactgtctttactaaaagtgtgtttggtttgaggaatgaagt

SEQ ID NO: 150874 - DNA, 821 bp, Zea Mays
cataacatgattcatctgacttatgtttctgtaggttgttcatctgacttatgatgacctatgatttatctgacttattgctttgcttgaaagaaattttaaaaatcatccgaaattcgcctcatgaaactgactcggctgaagtaccatgcacaggaagctttctcgtaccatcactgcaatcgtcgaccccacatggcagcgaaacggaaacggacgcgacacgctgcaacgttcgggagtaccagcgacgaacccaatcccaatccctatcttccgagatttgtctgcgcccctgcggcgcgcatggcgccacgactgaccgtggccttgggcggcgctcgggcatgagtacatggcgctcggtggcctcgcgtcgcgttactcacccaccggcaccgcgccacggccgcgttcgtctcaacaggagccgatggccactctcgcgccacggccacatatcctcctcggcttgacaaggccgcagcccatagcgcttcgtgcctgcgccgccttctcccgctcccgccacgcgccagtcccaccgcgggccgcgcagccgcggcgcgtcttcctcggccttggcgctgccttcatcgaccaggccacccgcatggcctccggcggcacctcgtcccgctctttcgttgccggagcgcggccgaggcaaggcgtttccccagtcgagcaggttttcatgctctaccttttagaaaatatcgctgcaaagctgtagtgttttcttgtttttggacctggttaatggagaaagattgtagattctcaagaatgtcgagtggccagatgagttccctttcaag

SEQ ID NO: 150875 - DNA, 277 bp, Zea Mays
aataatgtttcactacaaggccatatacatggtgtcatggtgacaacttgtaacattgtgccatttatgatgcacacgatcgacgaactgcaaaatcggctgagatgccatatcatcactacgaaatcagcaaatgagcaaccaaaactatgcccctccgcgacccactttcctcatcctctacatttaatgccatcatctacagcttacgtgtccaatggatgacacacatacggatataccatggtgatcaaacacacaccggtacaccaaatcg

SEQ ID NO: 150876 - DNA, 255 bp, Zea Mays
tcagtcgtcacagcgttgcatctgatgtaacgctcagttcagttttgcagagttacccttttacacataaacaacacgcgtacccaatcatatactactaaacatacaaaatgaggacgccatttatttggatgtacagcaatggcgtcaaccaggggatctctgagttccacgcaggggatgatggttttgaccgcggcagtttttctgcccggatctcacatctgaggcccggattttgggtagggaaacgag

SEQ ID NO: 150877 - DNA, 1933 bp, Zea Mays
atggaatcggactctgccgatcgtggggaggcatcccgccaccgctcaaagagggagcgaccgcccgacccagagggtgatgcctgccccgacgtcggcaggcgaagggtggccgccgggcccggagtggacgccggtgctaatgttcctgacttgggcgaccaaaaggagtttgaacatggagaaaaactgcaaagaataccaaaacagaaatatcaggtatgttttttattctttttaaagccttcccataaccagcagccccaagacgatcagcagtggctagtcacttgtatttcacaatatcttggattttctgggagcaaacctgttgcagctctccttatataccaatgtcttctccattggaaatcatttgaagccatgaagacgggtgtctttgatagcattttgcatgctataaactcagccacagaggttcaaaatgacatgagaacattggcgtattggttgtccaacttatctacattaacagttttccttcaacggtcattcaaaactactaggaccacaatctcaactccacaaaggagaagattttcgtccgagaggatgtttggaaatcaaacttcaaatgctgggcttgcttatctcagtggtcaatcagttggatctgctggattgctccaagttgaagcaaagtatcctgctttgctattcaaacagcagctcgtggatttaattgaaaaggtttatggcatgataagtgacagcgtgaagaaggaactaaaccctttgcttgaattgtgtatacaggatccacaaacttctcagtcaagtattgcaaaaggtaatcttaatggcatgggtcaacagaaccaactcacacattggctgggcatagtgaaaatcctcactagctacttggatgtactaagggaaaatcacgttccctcaattctggtgcataaacttttcactcaaatgttctcacttattgatgttcaattatttaaccgattacttttgcggcgtgagtgctgttcttttagtaacggggaatatatcagagctggactagctgaactaaaacattggtccgacaatgctacaagagagtttgcaggttcagcgtgggaggcattgaggcatattagacaagctgttgatttcctggtgatttctcttaagccaatgaggacattaagagagatacgcactgatgtgtgccctgccctcagtatacaacagctagagcgaatagttagtatgtactgggatgatgtgaatggtacaaacactatttcagcagagtttacatcaagcttgaaatctgccatacgtgatgaatccaatatggccacaaatttctctatactgctagatgatgattccagtatacctttttcacttgatgatattacaaagacattgccggtcattgagctggctgatgacgactttctgccatttgtccatgaaaacccaagctttgcgtttttattgcaaagaggggagtagtcttttttttttgtcaccattgtgacttcacctacctgtggataagtcaggattcctgctaggatgtacagtacgcgtgattctttttgtaccaggtagcaaggcatcaaagattagatgctaggtgagcttataggcttctggtttctattgatttgtttgttggttgtatatttgtattcaggttttccttgccattttttctacttgtagccgttttttgggcttgtatactaggtggtaagggcagaagaccctgccctgtaagcatagttacacaaggtcttgctgtaggtatggaagctgtacatgtgttgtaacggattataaaagggggaaagtagtgcgtagtgatggctttgtggttggtgtgttgcttacctttgatcaatgatcatgtattggttcgtcatatattgtttattgtactgcacaccattccattgtagat

SEQ ID NO: 150878 - DNA, 1391 bp, Zea Mays
aggtttgttgctttatttcctgacttagagcaatttcttgacccttatgcagagctggtccacatggattcaagattcagggaatgttggttcctcctgcttaggcaattcgggctgcaagttttggcaccgcaatcatctaatataaatttcatggaatggtggcatgaagcaaatgaagctattcagggtcccttcagagatggcctaaactctcttattgtgctaggtgcttgggccttatggaatcatagaaaaacacatgcatctttgatggttttgctccggaagttgtcacaatttctggatccgataggtggtaaatttctgcattttaggcattactctgataattcaaagtctccttttctgtatcggtgcagactagaagggactgtaagtgaatatgaggcccttttgctaacagaaagacaacaaaatgaagcagctaatgctgcagttgctgaatctcaagcaagaagtgaagcattggtaagcaagctcgaagatgctgtgaaacaaaatgatctcctccatgaagctgctcaaagatttgaagaagctacaaaaaatttggaatcttcactaacatttgagaagcaacggcatcaggcaaatttgatagaattagatgaagcgcgagaaaagattgaagaacttcaaagagaagttggggacactgatgaaaaatccaccctgcttcagactagtatacaaagccttgaagaaaggttaggagagaaggatgctctattgacaacagaaaggctagaaagtgaagcaactaagaaatcgctcaatgaatctgaggatagaaacaaggacttactaatgaaaattgaagttgctgagaaagacattgctcacttccaagaaactgtccaaagaaatgaagaaaatatggcagcactggaaacttcgttgagatctgaaaggcagcaaaaggatgcaatcatgaaacaactagctgaatctcagggtgaaataggagagctgcaaaggaagcttgaagatgctgatgccagaaatgggcttcttcaagattctttgcagagactcgaagaaagtacagcagataaagattctttattggctacagaaagacatgaaaacagtgaaaccaagaaggaattagctggttctcagaaaaagattgcggaattgctaactgaagtgcaagataccggtgcatatattgcagaacttgagggctcggttaggagactcgaaggaaacttgacagtaactgaagcttcattgctaactgaaaaggaacagaatgcttccaccttaaaattacttacagaagcacaattgagaatcgaagaattaataaaaaagcttgaaggttcaaatagaaaatctgatagtcttctggatacaataacaag

SEQ ID NO: 150879 - DNA, 2517 bp, Zea Mays
ccaccacctcgtctctctcctcctgtcgtgcccgcggtcgcgtccccttcaccaccaccccacccgcctccgcgtcgcttgtgctgctgccaccgccgtgagcctccaccacgggcgccacgcgttcccgggggcggatcgcgctgccgcaaaggcgatcggcgagtgacccaggggaggagatcgcccgtcggcgccgcagctgccgccgcagaccgagccgcgtttcctcccgtccggttccatcgcagctcctgtctgggccagtccgttgaggcagggcggggcggctcgatcgcccgcagatgaatcatggcttcaatgttaaacattgtcataggttctcatgtatgggtggaagataaagacttgtcctgggttgatggtgaggtattccgaattgatggtcaaaatgcccatgttcacacaaccaaggggaagacggtcattgcaaatatctcaaatattcatcctaaagacacagaagcaccacctgatggggtggatgacatgacaaggttatcatacttgcatgagcctggtgttttagataacctggctgtcagatatgcgaaaaatatcatttatacctacactggtaacattctgattgcaataaatccattccaaaggctacctagtctggttgatgcccttactatggaaaaatacaaaggtgcaaatcttggtgacctagatcctcatgtatttgcaatagctgacgccgcttacaggcaaatgataaatgaaggaaagagtaactccgttttggtcagtggtgaaagtggtgctggtaagactgaaactacgaaattgttgatgagatatcttgcatttctgggtgggcgatccggaacaggagagaggacagttgaacaacaagttttagaatctaatccagtccttgaagcctttgggaatgcaaaaactgttcggaacaacaactcaagtcgatttggtaaatttgttgaaatccagtttgacaagagtggtaagatatctggtgctgccattagaacttacttgcttgagagatctcgggtttgccaaattaatagtccagagaggaactaccattgcttttacttcctatgtgcagctccatcggaggatcttaagaagtataagctcggggacccatcgtcctttcactatctcaaccagtcagcttgcattcaagttgatggaatcaatgacgctgaggagtaccttgcaacaagaaatgcaatggatactgttggaatcactgatcaagaacaggaagctatattccgtgttgttgctgctgtgcttcatcttggaaacataaattttgcaaaagggagagaggtagattcatccataataaaggatgacaaatctagattccatcttaagacagcaggagagctcttgatgtgtgattgtgagaagttagagaatgccttgataaaaagggaaattaatacacccgaaggagtgattaccacaacagttggtccaaattctgctactattagccgggatggtttagcaaagcagatatactctcgattatttgagtggcttgtaaacagaataaatgcatcaataggacaagacccagactctaacaaactgattggagtacttgatatatatggttttgaaagttttaaaaccaacagttttgaacaactgtgcatcaattttaccaatgaaaaactccagcaacattttaatcagaatgtcttcaaaatggaacaagaggaatacacaagggagcaaattaattggagttacatagagtttgttgacaatcaagatgtacttgacctgattgaaaagaaaccaggtggcattattgcacttcttgatgaagcctgcatgtttccaaagtccacacacgagacattgtctcagaagctgtatgaaaagttcaagacccacaaaagatttaccaaaccaaagctttctcgtactgcatttacaattcaacattatgctggggatgtaacatatcaatctgatcaattcctggacaagaacaaggactacgtggttgcagagcatcaagaattacttaatggttctaagtgctcttttgtatcaggattatttccaccagcaacagaagagaacacaaaatcatcaaaatcatcaattgcaactcgctttaagatgcaacttcacgagctcatggagactttaagctctacagagccacattatattagatgtataaaaccaaatagtgtccttaagcctggcatttttgagaataccaatgttctacagcagcttcgatgctctggtgttcttgaagccattagaatcagctgtgctggttatcccacaaggaaacaatttcatgattttctacatcgcttttgtgttcttgctcctgaaattttgaaagagaaaaatgatgaaaaagtctcatgtcaaaagattttggacaaaatgggactacagggttatcaggtgaaaaacacttcacttaccaatctcctcaacatgtattggaagagagtatttagatttcctaattggtggtag

SEQ ID NO: 150880 - DNA, 946 bp, Zea Mays
caggaagatatccggagcgtgccaaattctgtacatcacaacaatgagatagagtcagattctccacctcacgtctgtgagatagaaagtgtgaaaagcaaccaagaaggataccaatcttcggatggtagtgctttccccaagacaagatctgagcgaagtattgaccaatgggtatttgcaaagtcaaaatctgaggaaagcatggattagtggtctgaaataccttcagatgttgaatccttcagcgaaggtaaaaggtatctcagtagcgaggagctgagttacgttgatagtgccaacgttgttgtcatggacaaatacatggattcactcctctctgaccagaggaaccttccctacgctagctcctcggtgcgccaggattcagtcagacgaaaacctgcttcgtccgccgattacagccgccgacctccacagccaactccacctgcatcgttgtcaaagaaggaatcgtgggatgtcattgaagattcggagttcgatatacttgacagttagtaattgatacctttgcgatctcaaggctgtttatccttctattttcttccatgtttccccacacttcacctggtttgtaaatgtggacgtgcaggtggcgtcagtgatagtgggaaaggactaatgttctttttaccaatatataataacagtgcgtgcatataaatcttctgagctcgcaagctgtgagcctcccaagttaaaagtgtttatatgttggcatcactgtttgtttcagatatttttctagcgctttgatgtgatcatcaggtataacaaatgcatattcttagtaaaacgatagaccattttttccagggaccttcggtgtgtggagattagatgtcagaaaaattgatagcgaactaagggatacatgcacatactgctcatgatgaataggcattgttgtgttattcctaat

SEQ ID NO: 150881 - DNA, 3804 bp, Zea Mays
atgtcgtctcgttttccccacgtcggcggcggcgaccgccgcagggacgacgcgggtgacgccgccctcgcccgcgacatcgtcacgctccacaaggcgctctccctcgacccctccgcccgccgccgccgctccctgccgctcccatccccgtcccccgccgccaccgagcagcagcgccacaagccccggctcaagccctccttctcctcctcctcgtcgcgcaagctcctgccgcccaccgccagctcctccgcttccacttcctcgtcctcatcctcatcttcgtcttccttctggaagaagtccctgaccgccatctcgcacctgggccgccgccgcgtcgactgcgcgttcgcgctgcacgtgcactccgtcgacggcctccccgccgcgctcgatgggtccgcggtctccgtccacttccgccggatgtccgtgtccgcctccacccgccccgtcgcggccgccctcggcgccgccgcgttcgaggaggcgctcacgctgcgctccccggtctacttctcccgcggcgccaaggccgtcgtcaagtacgagccccgcgcctttgctgtctccgtcgccgcctccactctcgacctcggtaagcacgaggtcgacctcacccgccttctcccgctctcgttcgacgatctcgaggacggcggcgactccggcttcgggaagtggagcaccagcttccggctgtccggccccgcccgcggcgcgcggcttaacgtaaccttctcttgctcgctcctcgcgggcggcggcgccagcgagcagcacatgggcggggaagtggcggggctgcggcgcgggtcgatggcgcggccagtgtcagtgcaagcgccgacgcctttgcccgcgcggagcagggacgtgagggttctccacgaggtgctgcccagcttgaggtctgccaggccggtgccttcttctgttgctgacggggttcctgatgcgaggaaggaggagctggcagcaccggactgcacggaagaggggtctccggaggcaaagcactgcacatcggtagaggttaaaaagggggactcggtgcatccagatggcgattggggcacggtggagttcaatgttgtggagcatggagttgaggttgcttcagatgacccgcaaaggctcaaacatgtggaaaccagcaatgcggctggccaggaggaggattcagggttcaaaattgacgaagagggatcgttcaagcctttgcaagtaagtggtgatgtcgctgaagatcagactgttggagtgaaaactgaggtggtggccgtcagtgacgttgctgttcaaagggagaacatggaagacaaacaggatggaatagtcaaagctgcttcactgcctaccgctgctcttgaagcagagggtcagtttggagcagatgccgaactggaggacctggaatgtattttgaacgagctctcagttgctgagccggaggaatttgaatcaccagttgtagaagataagcattctcggcgattgagctgcacaggggtgactgatagttacatgtctgccagtaggaagggcagatcacgcagcatggatgcttcaacagattctgttgctaatgaattcctggatatgcttggaatagagcatagcccagttgggcaaccctcagatagtgattccgagtcgccaagagaacggctttggaagcagtttgaaaaggaagccctagcatctggcaatgctattcttggcttggactttgacgatggaattgaaggacctatttgtggtaatgttgtggaggattttgatctctctgcaatgatacatgaggctgagctcgagcttcagaatggaagccaacccattgataccaaatttcgagctaagtcgctggaagacgaagaaactgaggccttaatgcgtcaatttggtctaaacgagaagtccttccaatcttctccacctgaaagtagaagtggatttggtagcccaattagcctcccacctgagcagcccctggagctaccgccattggctgaaggtttaggcccatttattcagaccaaagatggaggatttctgcgatcaatgaacccagccctgttcaaaaatgcaaagaacaactgcagcttggttatgcaggcttcttctccgattgtactgccagcggagatgggatctgggattatggatgtattgcatggtctggcatcagttggaattgagaagttatcaatgcaggcaaacaagcttatgcccttggaagatgttaatggtaaaatgatgcagcagattgcctgggaggctgctccagctctggagtctgctgaaagatatgatgcattggactatcatggcatcgatgctttggtaggagggggtggaaatgctccttctggtaagaagacaggtagatgtgctgatctttcatccttgggtggggagaatgcttcggaatatgtttcacttgaggaccttgcaccattagctatggaaaagattgaagccctgtccattgagggtttgaggatacagtctggcatgtcagaagaagatgcaccctccaatatcagtgcgaagcctattggggaattttcatctctgcaaggaaagtgtgcagagaatacctggtcccttggtttagagggaactgcaggtttgcagcttatggatgttaagcaaagcggagaagttgatggattaatgggcttgtcaatcactctagatgaatggatgaggcttgattctggggtagtggacgaagaagaacagtacagtgaccggacatcgaagatacttgctgctcaccatgcaaaatccatggggttagttgctgaaaaccggaatggagatagaaagagcaggagatctggtagatggggcttgttagggaataacttcacggtcgctctcatggttcaactgcgtgacccactacgtaactacgagccagtgggcacaccaatgttcgcgttaattcaagttgaaagggtttttgtacccccgaagcccaaaatctacagtaccgtctcagacaaaggcaacagcgagcaggatgacgaggaacccaaggccgaagaggttccagacaaggcattggtcacggaagagaaggctgaggaattagaggatcccgttccccaattcaaggttacagaagtgcatgtcgccggtttcaagagcgagcctgagaagacgaaaccatggggcaatcaaacgcagcagcagtccggctctagatggttgctcgcagctggcatgggcaagggaaacaagcatcctctgatgaaatccaaagctgtcgtgaagccaaccaaagaggcagctggccaggcaggagacaccctctggagcatctcttcacgtgttcatggagccgggaccaggtggtccgagctagcaggaaacaagagccattcacggaacccaaatatcatgcttcaaaaggacaagaggtttcggtgatggcttggtgtttcggtagttagcacggggaaggttggtctatctcgttagaagggtacttatctgcaattggacctcactgggaatgttcagcggatttgtgaaatcatgtacattgagttctcttgcctaggatcagtagttttttatacgctgcatagtttgtgttcggtgttccttccgaattctagtgagaaactggtgtccctccctcttgtcaccattattggcttagagcggcttctgcctctgaaggtgcagcactgtcttcttttgcaggctgccatagctatcatacatatcttgttatcttgctaatcattcgtccatagtttttagtgccatcttattatatat

SEQ ID NO: 150882 - DNA, 800 bp, Zea Mays
tatagcattttatctcttataacggtttgtagtatcttgacaacattacttgacatattcatcattaattcttttcaggctagcccatcagatcctaaaacttttcccttcatcttactcggtaacaagattgatgtagatggtggaaaaagcagagtggtttctgataagaaagcaatggagtggtgtgcttctaaaggcaatatcccttattttgaaacttctgcaaaagaggactacaatgttgacaatgctttcctgactgttgccaagcttgctctagagcatgagcgcgatcaggacatttacttccagagtgttgcggatcctgtccctgagactgagcagagaagcggatgtgcatgctagtagttagtcatcatccttgtcccttccagatcttgcttattgattgcggcatactttttctgcgatgccgagcaggcattctttccatttttcgcaatgtacactaatgttccaaccgtccaacactgttcttctatccagctgtatgatagttactgagcatggtttttttttttgtacgcggtctactgatttggtggccagccaattcttggtttgggcaataagaatacactggtttagacttttcaggatgtggccggtgaaatgccaaactcgtagcctcaattgctgtattcgtgcgtgcggctgtaacttgttggcgtccaatgcgttgagctgctggtgaaggcttatcgatgttccttggccatgcacgtttgtaattgtctatctgcctctgcatctgcaatgtggcaattgcttgtgaa

SEQ ID NO: 150883 - DNA, 305 bp, Zea Mays
ccacccacccaaactcctcgtgcgcctcgtggattcgtgggtcgcgactcgcgaccagacgacaaacgtcgagaggggccgatcgtgatcgagcagcgatgtcgacgtcgcggagcggacactgctcaaggtcatcgtccttggcgacagggtcagccaattgctccctcccccctccccctccccctccccgaacccagcttcccgttgctcctccggatccttccgcatgtggattcccggatcgctgttgtgatttccaggaagattggcgggtcgggaagacgtcgctgatgaaccagtat

SEQ ID NO: 150884 - DNA, 1601 bp, Zea Mays
ccgagccgaacgggcgtgcgccatgcgcatgcgaccctgacgagcaacgacaaccacagagcccaaccgggaggaggatcggtaccagctcacggcggcgtcagcaccacacgccgccgccgccgcccacccccttcccgacaggcacgcttcttgcgcctcttgtgggatgctactacggataacgtacgcccaacccacgccttcggcggcggcccagttgaggctccctgggccgcgtttacgccgacgccgcgtcgctgcttccgcggcggacggcgccggcaattcaagctctccgctccattgcgacccttcgccccacgcgtacctcctgggtccgggcgtcgaacccagtggctcactctcactgagtacatatccaattacagagaagggaaagcagaggtcttgggtcggtccaagtgggcagtactaccgtgagctgccttgccccagctgtaggggtagaggttacactccatgcaaggagtgtggaatagatagatcaagtttggactgccctatgtgcaatggcaaggggattcaaacttgtctacaatgtagtggagagtgtgtgatatggcaagaatctgttgatgaacagccatgggagaaagttcggtcaagggatgaactgagactgcgttatggctttgaattgttgaacccgtcagcattaaagtattttcagtgactattactgatgtctgaagggattacatgatatggttcttatacacggcaaattgaaatatatccttttggattcctgtgcatacttgtgttctagaaaaatattcctgtgcacacattgtcatgtattctttttgtatttgcagttctcccttgaaagtaaaagaagatgacgaagttgacaagttagagataaatatcaacaaccccaaaagatcaaagcgtacttatgcatctacttcaccggaagttgccaagaagattagccggtctttaagaagtctaaatgctcaaacaggattgtttactaagcacatgaagattatacaccaagacccagaattgcgtgctcaaagagttgctgcaatcaagagaacaaaaggaactgatgttgcaagaaagcgtgcttctgaaattcagaaggcattcttcagtgatcctgagaaccggctcaagagaagcattgccatgaaaggggtgaaattttactgcagcaaatgtgggcaagaaggacatagaagcttttattgccctactttgagggaaggttcaaccagggtgcggttcaggtgccggttgtgtggcagagaagggcataatagtcgaacatgtggaaaaccaaagtccgagaaggagcacaaacaacgacctcaccactgcagccgatgtggtgaaaagggacataaccggcgcaactgccccacatccactgatttgggtagtgatgcttcaggctatgtggttaacaaagttaatggctctaattcagctgtttatcaatgtagtatatgcttagaaaaggggcataacagacgaacatgcccgaaaagaaaggctaccttactaaaatgaaaagtgtgagtaaaattaaaagaaaggctatcttttatgcctgtgttttttct

SEQ ID NO: 150885 - DNA, 498 bp, Zea Mays
cttgttttagttttcatcaaatttatttagacttgacatttgatgagcaacgttgcaacctgatgctctgcaggggtgaaattttactgcagcaaatgtgggcaagaaggacatagaagcttttattgccctactttgagggaaggttcaaccagggtgcggttcaggtgccggttgtgtggcagagaagggcataatagtcgaacatgtggaaaaccaaagtccgagaaggagcacaaacaacgacctcaccactgcagccgatgtggtgaaaagggacataaccggcgcaactgccccacatccactgatttgggtagtgatgcttcaggctatgtggttaacaaagttaatggctctaattcagctgtttatcaatgtagtatatgcttagaaaaggggcataacagacgaacatgcccgaaaagaaaggctaccttactaaaatgaaaagtgtgagtaaaattaaaagaaaggctatcttttatgcctgtgttt

SEQ ID NO: 150886 - DNA, 1431 bp, Zea Mays
cgaacgggcgtgcgccatgcgcatgcgaccctgacgagcaacgacaaccacagagcccaaccgggaggaggatcggtaccagctcacggcggcgtcagcaccacacgccgccgccgccgcccacccccttcccgacaggcacgcttcttgcgcctcttgtgggatgctactacggataacgtacgcccaacccacgccttcggcggcggcccagttgaggctccctgggccgcgtttacgccgacgccgcgtcgctgcttccgcggcggacggcgccggcaattcaagctctccgctccattgcgacccttcgccccacgcgtacctcctgggtccgggcgtcgaacccagtggctcactctcactgagtacatatccaattacagagaagggaaagcagaggtcttgggtcggtccaagtgggcagtactaccgtgagctgccttgccccagctgtaggggtagaggttacactccatgcaaggagtgtggaatagatagatcaagtttggactgccctatgtgcaatggcaaggggattcaaacttgtctacaatgtagtggagagtgtgtgatatggcaagaatctgttgatgaacagccatgggagaaagttcggtcaagttctcccttgaaagtaaaagaagatgacgaagttgacaagttagagataaatatcaacaaccccaaaagatcaaagcgtacttatgcatctacttcaccggaagttgccaagaagattagccggtctttaagaagtctaaatgctcaaacaggattgtttactaagcacatgaagattatacaccaagacccagaattgcgtgctcaaagagttgctgcaatcaagagaacaaaaggaactgatgttgcaagaaagcgtgcttctgaaattcagaaggcattcttcagtgatcctgagaaccggctcaagagaagcattgccatgaaaggttaatgctatatcttaccttgaactcagaagacacatatcaaaattaatcaggggtgaaattttactgcagcaaatgtgggcaagaaggacatagaagcttttattgccctactttgagggaaggttcaaccagggtgcggttcaggtgccggttgtgtggcagagaagggcataatagtcgaacatgtggaaaaccaaagtccgagaaggagcacaaacaacgacctcaccactgcagccgatgtggtgaaaagggacataaccggcgcaactgccccacatccactgatttgggtagtgatgcttcaggctatgtggttaacaaagttaatggctctaattcagctgtttatcaatgtagtatatgcttagaaaaggggcataacagacgaacatgcccgaaaagaaaggctaccttactaaaatgaaaagtgtgagtaaaattaaaagaaaggctatcttttatgcctgtgttt

SEQ ID NO: 150887 - DNA, 1907 bp, Zea Mays
aagtctcaagcacgagacggccagagaaccagattccgttcccctgaacccgatcgagatggagtcggaagctgacagagccgcggcaccggcgccggcgccggcagttgccgcggagaccagcgacgacgccatccaggaggagtctccagccacggccccttcctcagacggaaagcccggatcaggggcggcggcggccccggcgccggaggtggaggtgcagctgttccggcgcgggcgtccggtggcagtgttccggtcgcagctgggcgggtatacgcaggaccagctggaggtgggcgacgtcctggagcagcacggcctcaagtccgtcttcgccttcgaccctgccgcccgcaaacgcggcgtcgccatccgcttcaaccctcgcaacggccgctccctcctcccctacgcccctggttccacgatcttcctagacggcgagcccaaggattctttgctgaagcccatcacgaagatggtgattggggtcgccgctatgactgtggtagctgcagtcctattgaaggaggccaagatgcccgagtggcttcagtcatccaagctgggcgccgtgagcttcccaccatgggtgctggcttgcatggtcatcgtgttcatgaggctccggaagagaaccatggatgcaatgaagaagtttggctgggtctcatgaggagtacatatccaattacagagaagggaaagcagaggtcttgggtcggtccaagtgggcagtactaccgtgagctgccttgccccagctgtaggggtagaggttacactccatgcaaggagtgtggaatagatagatcaagtttggactgccctatgtgcaatggcaaggggattcaaacttgtctacaatgtagtggagagtgtgtgatatggcaagaatctgttgatgaacagccatgggagaaagttcggtcaagggatgaactgagactgcgttatggctttgaattgttgaacccgtcagcattaaagtattttcagtgactattactgatgtctgaagggattacatgatatggttcttatacacggcaaattgaaatatatccttttggattcctgtgcatacttgtgttctagaaaaatattcctgtgcacacattgtcatgtattctttttgtatttgcagttctcccttgaaagtaaaagaagatgacgaagttgacaagttagagataaatatcaacaaccccaaaagatcaaagcgtacttatgcatctacttcaccggaagttgccaagaagattagccggtctttaagaagtctaaatgctcaaacaggattgtttactaagcacatgaagattatacaccaagacccagaattgcgtgctcaaagagttgctgcaatcaagagaacaaaaggaactgatgttgcaagaaagcgtgcttctgaaattcagaaggcattcttcagtgatcctgagaaccggctcaagagaagcattgccatgaaaggggtgaaattttactgcagcaaatgtgggcaagaaggacatagaagcttttattgccctactttgagggaaggttcaaccagggtgcggttcaggtgccggttgtgtggcagagaagggcataatagtcgaacatgtggaaaaccaaagtccgagaaggagcacaaacaacgacctcaccactgcagccgatgtggtgaaaagggacataaccggcgcaactgccccacatccactgatttgggtagtgatgcttcaggctatgtggttaacaaagttaatggctctaattcagctgtttatcaatgtagtatatgcttagaaaaggggcataacagacgaacatgcccgaaaagaaaggctaccttactaaaatgaaaagtgtgagtaaaattaaaagaaaggctatcttttatgcctgtgttt

SEQ ID NO: 150888 - DNA, 892 bp, Zea Mays
aagtctcaagcacgagacggccagagaaccagattccgttcccctgaacccgatcgagatggagtcggaagctgacagagccgcggcaccggcgccggcgccggcagttgccgcggagaccagcgacgacgccatccaggaggagtctccagccacggccccttcctcagacggaaagcccggatcaggggcggcggcggccccggcgccggaggtggaggtgcagctgttccggcgcgggcgtccggtggcagtgttccggtcgcagctgggcgggtatacgcaggaccagctggaggtgggcgacgtcctggagcagcacggcctcaagtccgtcttcgccttcgaccctgccgcccgcaaacgcggcgtcgccatccgcttcaaccctcgcaacggccgctccctcctcccctacgcccctggttccacgatcttcctagacggcgagcccaaggattctttgctgaagcccatcacgaagatggtgattggggtcgccgctatgactgtggtagctgcagtcctattgaaggaggccaagatgcccgagtggcttcagtcatccaagctgggcgccgtgagcttcccaccatgggtgctggcttgcatggtcatcgtgttcatgaggctccggaagagaaccatggatgcaatgaagaagtttggctgggtctcatgaggtattattgatttacttcagatttgtgccgatgggttaggatttactactcctattccaaagttatcttggctttttttagtttatagctttgctatgcatttagatatctaagtgcatagcaaaagctacgagtaaaatgcaaattttagactttgtacgttgatgtgaagatgttatatgcaatataggttcctcgagtccgctttg

SEQ ID NO: 150889 - DNA, 1311 bp, Zea Mays
aagtctcaagcacgagacggccagagaaccagattccgttcccctgaacccgatcgagatggagtcggaagctgacagagccgcggcaccggcgccggcgccggcagttgccgcggagaccagcgacgacgccatccaggaggagtctccagccacggccccttcctcagacggaaagcccggatcaggggcggcggcggccccggcgccggaggtggaggtgcagctgttccggcgcgggcgtccggtggcagtgttccggtcgcagctgggcgggtatacgcaggaccagctggaggtgggcgacgtcctggagcagcacggcctcaagtccgtcttcgccttcgaccctgccgcccgcaaacgcggcgtcgccatccgcttcaaccctcgcaacggccgctccctcctcccctacgcccctggttccacgatcttcctagacggcgagcccaaggtaatcttagaagcagcgctcacaaacaccaccacgcatcaatttcgcctcaccctactcgttccttgtcgcctatacagttagagcatgttcaagagactattaaatgtctcgtcaagctaaattttagctatttaatagtaaaataacttttagctatttaagctatccgacttttaaattagttctttcgctgctaaatttaactagccatctaactagcaaaactagatattgaagtgagatactagagtgtaatctttataaaaagttaaatagagagtcaaataaagatctaaaaataaagagtctcttggagatactttagtatatggcaaaaggccaattttctcccccatatcatgcgtttgtatctttgatgatggtctaggattctttgctgaagcccatcacgaagatggtgattggggtcgccgctatgactgtggtagctgcagtcctattgaaggaggccaagatgcccgagtggcttcagtcatccaagctgggcgccgtgagcttcccaccatgggtgctggcttgcatggtcatcgtgttcatgaggctccggaagagaaccatggatgcaatgaagaagtttggctgggtctcatgaggtagcaacacttttacctttattttgaggaaaatctgagtatacttaaaaggcagatgcagaggcacaaccgcacaagttgttgccatcaaaactctgttgctctaaaaactcaagttaattgaattgtaataattgcagtccatatgccaataggaggtgaaaaatttgttctcagggtgaatgtgtgatataaatttctgtgcatctcttataaattattggcacagttgtcaac

SEQ ID NO: 150890 - DNA, 904 bp, Zea Mays
aagtctcaagcacgagacggccagagaaccagattccgttcccctgaacccgatcgagatggagtcggaagctgacagagccgcggcaccggcgccggcgccggcagttgccgcggagaccagcgacgacgccatccaggaggagtctccagccacggccccttcctcagacggaaagcccggatcaggggcggcggcggccccggcgccggaggtggaggtgcagctgttccggcgcgggcgtccggtggcagtgttccggtcgcagctgggcgggtatacgcaggaccagctggaggtgggcgacgtcctggagcagcacggcctcaagtccgtcttcgccttcgaccctgccgcccgcaaacgcggcgtcgccatccgcttcaaccctcgcaacggccgctccctcctcccctacgcccctggttccacgatcttcctagacggcgagcccaaggattctttgctgaagcccatcacgaagatggtgattggggtcgccgctatgactgtggtagctgcagtcctattgaaggaggccaagatgcccgagtggcttcagtcatccaagctgggcgccgtgagcttcccaccatgggtgctggcttgcatggtcatcgtgttcatgaggctccggaagagaaccatggatgcaatgaagaagtttggctgggtctcatgaggtagcaacacttttacctttattttgaggaaaatctgagtatacttaaaaggcagatgcagaggcacaaccgcacaagttgttgccatcaaaactctgttgctctaaaaactcaagttaattgaattgtaataattgcagtccatatgccaataggaggtgaaaaatttgttctcagggtgaatgtgtgatataaatttctgtgcatctcttataaattat

SEQ ID NO: 150891 - DNA, 2168 bp, Zea Mays
tttttttaatttaattttagctaggcgtgggatgcacgtgggaatgagaataggctttgtgggatagagaatgagaaagatacgtgatagccgggaatggaaatgtgaatggaaatgtgaatgggctttgcagggagggggaatggacggtccagataaatcgtagcggaaattgtagtctactatactttcgagttttgcaaaaaaaaaaaaaatcctcagcccgtctcctttccaaatttttcacccggcgtctgctcgcctgcgagacgccgcgaccgcgatcaccctctcgggtttctcggacgcgccgccatcgccactccgccactcgcgggttcgttggatcgacgccaccgtcacctcgcgccgcccagaggaggacgcctgcttctcccccgacgccgacgacccccgccaccgtcttccgcgccaacgccgccgtcgccatcacctcgcgtcgcgccatacgcccaggtctccgccgacgctgtcacacgccaggagctcgagtcttcgtcggtccctttgccagatcttcatcgtgcccttcaccagcgacgagcacccaacaggtaatcatacacatgatttgtttgccactactttttagatgcacaagatcctatgctgtacatgccaatggttaccttctcctttatgtttttctcttgttcttagacaatatatgtgctttctgaagtgtcttttggaactagacactatttcccaatagcaaatctcgaatactgatgcctgacaatgatgcaacttaaaacctgtagactactcctgctgtttcttattgccaataagcacaagcacacttgagaaccggccatcaccatggagatgagactctttatcgcccttcagtgcgtgcagtgcgccaccatgcaggtgaagcagcagaagaagagcagcaacaagtgggtgtgtgtggtgtgcaaccagcgtcagtctgtgcttcatgtccatgccaggggctatcgtgctgctgatctccgccgcttcgtccaggacaccaaccttgcccgtggccgccgggagttcgcaccgttggccgagcccgacgtggacagggatctggcggcagttgaggagggagatgtgttccctatcgagaagagtcagacggaatggtccgagtatctggacgatccaggggagacaggtaaaggttgtggtggccttggcgcagatgcttcagatggagaatcggatgaaggaattgaggtgataactgaactgcctcagaaaagacctaaagttaggcctcgcaaagcccaatcagatgtagtaggaaagagaaccaagctgtcaacacatcccactttatgtaataagaggcagcagatcaagcaaggatcaaatccccactgtgcaactactactgctgaagcacaaggatcaaaatggaccaagtatttggacacgagccgttttggtgggaggaaatgcttcgatacctctggtctgcactggactgaacatgatgaatctgccactactgaggctactactgacgtagtggtggatgatgagaatcacagggtgcatccacggaatgtcacaagctcagtgtgaggtggctgagcacttgagctgaggaaaattcttgtttctgttctgcatcaactagagtcacctgaccatgtggcacagcacagagaagagccgaagacgtacagcatggatcacaggagcagtacaccttgatgactgactgttgtctgttggtacctataatcctgtgacaggtctgaacaaccgagtgattgattgatgtctccggcttccctgcagccaaaatgacgaatgggttaccctgcttgaatcctttgccactgcgcttgcgtgctactactattccatgcaaaacaacgtgttcggaaccaaaattaaagttccgaacatcgctgtgatgaatgggtgaatcgtcacctttttctttgaaatagcaactgtatgctcgaagaacagctgtgctggtccagctatctgggtaccgtactccctaccccgattgaactgtatttgggtcaaagtaatgggggagatactctttccatgctaggatataaggtgtaactacctttaattctaagatcaagaaatatatttaattctctttatcaataaagtattgttatgagcgtgcttatatt

SEQ ID NO: 150892 - DNA, 1581 bp, Zea Mays
atggacccgtgcccgttcgtgcgggtgctggtcggcaacctggcgctgaagatgccggcatcaggggggaaggaacttggtgccactgccactaaccgcgagcgcaggtcgctgttgctgcggcaggagaacttgcacgggctgcttcatgctccccttaacctggagctgcttcatgctccccttaacctggagcacctgcgggctgtactcggtctcgccgtcgaactcgaagacgaacctcgggtcaggctcgcccaggacggtcgccgctggctcatatccttgccgggtgtgccagagttcgctgagcgcgcggaggcggtgggagtagtcggcgacggcgaggaagcaccgcgctgactgccacaccgtcaggatctgcggcagccggtgcagcgtctgcagcctaagcgcgtccgcctgcaatgtaacccatgtacgccgcaagaagagacggtgtagagacgagtgcgccagacggcgtctgcgcaggcgaacgactactcctgctgtttcttattgccaataagcacaagcacacttgagaaccggccatcaccatggagatgagactctttatcgcccttcagtgcgtgcagtgcgccaccatgcaggtgaagcagcagaagaagagcagcaacaagtgggtgtgtgtggtgtgcaaccagcgtcagtctgtgcttcatgtccatgccaggggctatcgtgctgctgatctccgccgcttcgtccaggacaccaaccttgcccgtggccgccgggagttcgcaccgttggccgagcccgacgtggacagggatctggcggcagttgaggagggagatgtgttccctatcgagaagagtcagacggaatggtccgagtatctggacgatccaggggagacaggtaaaggttgtggtggccttggcgcagatgcttcagatggagaatcggatgaaggaattgaggtgataactgaactgcctcagaaaagacctaaagttaggcctcgcaaagcccaatcagatgtagtaggaaagagaaccaagctgtcaacacatcccactttatgtaataagaggcagcagatcaagcaaggatcaaatccccactgtgcaactactactgctgaagcacaaggatcaaaatggaccaagtatttggacacgagccgttttggtgggaggaaatgcttcgatacctctggtctgcactggactgaacatgatgaatctgccactactgaggctactactgacgtagtggtggatgatgaggtgcaccctgatttcatctgatctcatgttggtttgaaatgccaaatgctttgtgttttggtagtgtgtagtttggtagccataaattgtgctgctggcaattcacattgtcaagacaaaggatgtgcagtacttggtacccgagggaagaagactgttgttcccaagatgttatccagtatgatgggcaattcatagtaaaagcaccgtgctagtcaaaatcagcccaagactattgggttgttttatctctgatcaaaacacgagtatagtcaaactcggtcctctaatcaaatctggctaccgaaacatttttttc

SEQ ID NO: 150893 - DNA, 1724 bp, Zea Mays
tttttttaatttaattttagctaggcgtgggatgcacgtgggaatgagaataggctttgtgggatagagaatgagaaagatacgtgatagccgggaatggaaatgtgaatggaaatgtgaatgggctttgcagggagggggaatggacggtccagataaatcgtagcggaaattgtagtctactatactttcgagttttgcaaaaaaaaaaaaaatcctcagcccgtctcctttccaaatttttcacccggcgtctgctcgcctgcgagacgccgcgaccgcgatcaccctctcgggtttctcggacgcgccgccatcgccactccgccactcgcgggttcgttggatcgacgccaccgtcacctcgcgccgcccagaggaggacgcctgcttctcccccgacgccgacgacccccgccaccgtcttccgcgccaacgccgccgtcgccatcacctcgcgtcgcgccatacgcccaggtctccgccgacgctgtcacacgccaggagctcgagtcttcgtcggtccctttgccagatcttcatcgtgcccttcaccagcgacgagcacccaacaggtaatcatacacatgatttgtttgccactactttttagatgcacaagatcctatgctgtacatgccaatgactactcctgctgtttcttattgccaataagcacaagcacacttgagaaccggccatcaccatggagatgagactctttatcgcccttcagtgcgtgcagtgcgccaccatgcaggtgaagcagcagaagaagagcagcaacaagtgggtgtgtgtggtgtgcaaccagcgtcagtctgtgcttcatgtccatgccaggggctatcgtgctgctgatctccgccgcttcgtccaggacaccaaccttgcccgtggccgccgggagttcgcaccgttggccgagcccgacgtggacagggatctggcggcagttgaggagggagatgtgttccctatcgagaagagtcagacggaatggtccgagtatctggacgatccaggggagacaggtaaaggttgtggtggccttggcgcagatgcttcagatggagaatcggatgaaggaattgaggtgataactgaactgcctcagaaaagacctaaagttaggcctcgcaaagcccaatcagatgtagtaggaaagagaaccaagctgtcaacacatcccactttatgtaataagaggcagcagatcaagcaaggatcaaatccccactgtgcaactactactgctgaagcacaaggatcaaaatggaccaagtatttggacacgagccgttttggtgggaggaaatgcttcgatacctctggtctgcactggactgaacatgatgaatctgccactactgaggctactactgacgtagtggtggatgatgaggtgcaccctgatttcatctgatctcatgttggtttgaaatgccaaatgctttgtgttttggtagtgtgtagtttggtagccataaattgtgctgctggcaattcacattgtcaagacaaaggatgtgcagtacttggtacccgagggaagaagactgttgttcccaagatgttatccagtatgatgggcaattcatagtaaaagcaccgtgctagtcaaaatcagcccaagactattgggttgttttatctctgatcaaaacacgagtatagtcaaactcggtcctctaatcaaatctggctaccgaaacatttttttc

SEQ ID NO: 150894 - DNA, 1654 bp, Zea Mays
tttttttaatttaattttagctaggcgtgggatgcacgtgggaatgagaataggctttgtgggatagagaatgagaaagatacgtgatagccgggaatggaaatgtgaatggaaatgtgaatgggctttgcagggagggggaatggacggtccagataaatcgtagcggaaattgtagtctactatactttcgagttttgcaaaaaaaaaaaaaatcctcagcccgtctcctttccaaatttttcacccggcgtctgctcgcctgcgagacgccgcgaccgcgatcaccctctcgggtttctcggacgcgccgccatcgccactccgccactcgcgggttcgttggatcgacgccaccgtcacctcgcgccgcccagaggaggacgcctgcttctcccccgacgccgacgacccccgccaccgtcttccgcgccaacgccgccgtcgccatcacctcgcgtcgcgccatacgcccaggtctccgccgacgctgtcacacgccaggagctcgagtcttcgtcggtccctttgccagatcttcatcgtgcccttcaccagcgacgagcacccaacagactactcctgctgtttcttattgccaataagcacaagcacacttgagaaccggccatcaccatggagatgagactctttatcgcccttcagtgcgtgcagtgcgccaccatgcaggtgaagcagcagaagaagagcagcaacaagtgggtgtgtgtggtgtgcaaccagcgtcagtctgtgcttcatgtccatgccaggggctatcgtgctgctgatctccgccgcttcgtccaggacaccaaccttgcccgtggccgccgggagttcgcaccgttggccgagcccgacgtggacagggatctggcggcagttgaggagggagatgtgttccctatcgagaagagtcagacggaatggtccgagtatctggacgatccaggggagacaggtaaaggttgtggtggccttggcgcagatgcttcagatggagaatcggatgaaggaattgaggtgataactgaactgcctcagaaaagacctaaagttaggcctcgcaaagcccaatcagatgtagtaggaaagagaaccaagctgtcaacacatcccactttatgtaataagaggcagcagatcaagcaaggatcaaatccccactgtgcaactactactgctgaagcacaaggatcaaaatggaccaagtatttggacacgagccgttttggtgggaggaaatgcttcgatacctctggtctgcactggactgaacatgatgaatctgccactactgaggctactactgacgtagtggtggatgatgaggtgcaccctgatttcatctgatctcatgttggtttgaaatgccaaatgctttgtgttttggtagtgtgtagtttggtagccataaattgtgctgctggcaattcacattgtcaagacaaaggatgtgcagtacttggtacccgagggaagaagactgttgttcccaagatgttatccagtatgatgggcaattcatagtaaaagcaccgtgctagtcaaaatcagcccaagactattgggttgttttatctctgatcaaaacacgagtatagtcaaactcggtcctctaatcaaatctggctaccgaaacatttttttc

SEQ ID NO: 150895 - DNA, 4073 bp, Zea Mays
gcactcaccatctcctccccacctctccctccctcccgtaccatctcgtcggctcctcccccgtcgccgtcccgcttctttaatggttttataaggtagcgcgctagctcatggaatctccggggctggtgctggtcgctgtagtggcactcttcgtcgtcgtcgtggcggccaccgcctccgacggcgacgatgcccagctgctggagcagttcaaggaggccgtgcctagccaggccccggacctgcgcgggtggagcgccagcgatggcgcctgcaggttcccaggcgccggctgcaggggcggtcgcctcacgtcgctgtcgctcgccgccgtcccgctcaatgccgacttccgggccgtcgcggccaccctgctgcagctgagcagcctcgagacgctcagcctgcgcggcaccaacgtcagcggcgcgctggccgccgcgccgaggtgcggggccaagctgcagtcgctcgacctgtcagggaatgccggcctgcggggcaccgtcgccgacgtcgaggcgctggccgcttcctgcaccggccttagcgctctgaacctctccggcggttcggtcggtgggccgaggtctgccggcgctgtcgcttcttccggatttggccggctagacgctctcgacttgtccgacaacaagatctccggcgatggcgacctccggtggatggtgggcgccggcgtcggcgcggtccgccgtctggacctctccgggaacaagatctctcggctcccagagctcaccaactgctctgggcttgagtacctcgacctctccggcaacctcatcgcgggcgaggtagccggcgggattctcgctgactgccgtggcctgagaacgctcaacctctcaggcaaccacctggtcggcccgttcccgccggacgtcgccgccctcaccgctctcaccgcgctaaacctgtcaaacaacaacttctccagcgagctccccgccgacgcttacaacgaactacggcagctcaaggtgctgtccctctccttcaaccacttcaacggcaccattccggactccttggcagcgctgccggagctcgacgtgctggacctcagctccaacaccttctccggcaccatcccttcgtccatctgccaaggccccaactccagcctccgcatgctgtacctccagaacaactacctctccggcgccatcccggagtcaatctccaactgcaccaagctcgaatctctcgacctcagcctcaacaacatcaacggcacccttcccgcatccctcggaaaactccgggagctccgggacctcattctgtggcagaacttgttggagggcgagattccggcgtccctggaaaatttggtcaggctcgagcatctcatcctcgactacaacgggctcaccggtggcatcccgcgggaactctccaagtgcaaggagctgaactggatatccttggcgagcaaccagctgtctggtccgatcccggcttggcttgggcagctcagcaacttggccatcttgaagctgagcaacaattccttctcggggccaataccggctgagcttggcaactgccagagcttggtctggctggacttgaacagtaaccagcttaaagggtcaataccggcggaactggcaaaacagtctgggaagatgaacgtcggccttgtccttgggcggccatatgtgtatcttcgaaatgacgagctgagcagcgagtgccatggcaaggggagcttgctagagttcaccagcattcggcctgaagagctcagccggatgccaagcaagaagctgtgcaacttcactcgggtgtacatggggagcacagagtataccttcaataagaatggatccatgatatttctggatttgtcatttaatcaactcgactcggagatcccaaaggagcttgggaacatgtactacctcatgatcatgaatcttgggcacaacttactgtctggcgtcatcccaccagaactagctggtgccaagaagcttgcggtacttgacctgtcacacaaccagttacaagggcctattcccaactccttctcaacgttgtccttgtcggagatcaacctttcaaataatcagctgaatggttcaattccagagctgggttcgctgttcacattcccgaggatttcatatgagaataactctggtctttgtggcttcccactgttgccatgtgggcacaatgctggctcaagttcttcaggtgaccatcgatcccaccggacccaggcttcgctcgcaggtagtgttgctatgggactcttgttctcgctgttctgtatagttggtattgtcatcatagccattgagtgcaagaagcggaagcagatcaatgaagaggcaagtacctcccgtgacatatacattgatagccggtcacattctgggacaatgaattccaattggagactctctggtactaatgctctcagcgtcaacctcgctgcatttgagaagcgactgcagaagctaacttttaatgatcttattgtggcaacgaatggcttccacaatgatagccaaatcgggtctggtggttttggggatgtctataaggcccagctcaaggatggaaaggttgttgcaatcaagaagcttatacatgtgagtggccaaggtgaccgggagtttacagcagaaatggagaccatcgggaggatcaaacaccgcaatcttgttccgctccttggctactgcaagtgtggcgaggagcggctgttggtttatgattacatgaggtttggcagcttggaagacgtgttgcatgaccgaaaaaagatcgggatcaagctaaattgggcagcaaggaaaaagatcgccattggggctgcaaggggattggcatacctccaccacaactgtataccgcacatcatacaccgagacatgaagtcaagcaatgtgcttatcgatgagcagttagaggcaagggtatccgatttcggtatggcaaggatgatgagcgtggtggatacccacctgagcgtgtccactctcgccggcactccaggctacgtgccgccagagtactaccagagcttcagatgcactaccaagggcgatgtgtatagctatggcgttgtattgctcgagctgctcactgggaaaccgcctacagattcaaccgacttcggcgaggacaacaatctcgtaggatgggtcaaacaacactcaaagtcgaagctggcagatctgtttgaccctgtactactggtggaggatccggccttggagctcgagctactagagcacctgaaaatcgcctgtgcgtgcttggatgaccgaccatccaagcgcccgacgatgcttaaagtcatggcgatgttcaaggagatgcaggccagttcggctgtggactcgaagacctcagcatgcacggtcgccgtggatgatgcgtgttttggcgacgtggagatgacgaccctgaaagaagacaaggaggagaaggactagagcaaggcccaccgacacgcgagaagctgcccttggttcctgcccagggccgagcggcagctacacggtcagtcagatctcagatgcaaaaaaacaaaatcaaaaaaacgcccgtaggaatcagttggtcaggacaccattcgaagcatcttcttgagcttagcattcccttctgacggtacaagacagaagtttttttttcccttgtagcttcgcaaagctgaagatgttatgtacctatgggagtaggtcgattttcttttcttttcttttaatccttaatcatctcttctcgtcacactttagtaagagctgtgtatgtacatatataaatggtggtttttcctcggtgccaaatccattttcgtttcattccttgtttgtcaaattttaccttgcttttgaccaacgatgttgcaaatcataccatgaatgtagatagaatacatggttgcaggtgcagcaagcatgatggaaatggggcgtccaaatctgagatgcaggcagtgtgaggcaccaagggatgagggggaggaagtgcaagagtacactggactggtcaagcaagatgaacagcaaaaggcaaccaagggg

SEQ ID NO: 150896 - DNA, 814 bp, Zea Mays
ctaggccgcaggcggcatggcaaggacgccaggggcagatcaggcggggagctgggcgctgccgagcatcggccgccgcggcggcggcgtttccggcgacctcctcccggcgttcggcgagctctcccctaccggcggtaacagcaacaccatcaacccttacgactgccgctacaggtggtggcagagtttcctgatcggtccggtgctctactcggcgtggtcgtcgccgttcgagctggccctcgacagggcggccaccacgccggttgtcgtcgcgagcctggtcatggacgcgttcttcgccgccgacatcgccgtctccttcttcgtcgcctacttcgacagatccgccaatctcttcgtcgacgaccgcaggaagatcgccaccaggtacctcaagcggccgtcgttcgcgatggacgtggcctcgacgatcccgttcaacgtgatctaccagctggtgagcggcaggagcactgggtggttcaggtacctcaaccttctccgcctgtggagactgcagcgcgtcagcaagctctttgcgaggtacgtacgcgcgccacgccatgcatgcctcgctcgatctccatgcatatgcgtgcagttatactccttcatgttcctgcaggttggagaaggacatacgattcgactatttctacaccaggctcatcaagctatgcggcgtgacgttgctggcgctgcactcctcggcgtgcatcttcctgtggatggcgttccaccacggcgacagggagcacacctggctcggcagccaggtgcgcgacttcgcggacggcagcgtctgggt

SEQ ID NO: 150897 - DNA, 4785 bp, Zea Mays
atggactccctggatccgccctgccgcctacccccgccgcacaactccaccgcgccctcgtccccgtctccggcgtcggttgcggggcctaggccggcggcagtgaggtccgggagcgagacccccacgacggcagtgaggtctgggagcgagacccccacggcgtccccgtccccgtctgcgtccccgtccccatccacgcccgggacgcccacggccgcggtcgcgtctcccccgccgcacaactccaccgcggcgagccagagcgatgttcctcaccagcagccggggcaacgtcgtcccatgtgcgccgtatgcacgaagcccctccgcctctgcctctgcggccgcctccgctccccgcctgtggacaacgccgtcggagtcaccgttctgcagcacgcgatggaggcccaccacccgctcaactccacgcgcgtggcacgcctcggcctccgaaacctcgtcgtcgctcaggtcaccgacgtcaaccaccgtgcctgcttcatcctcaccatgcttgatgctggcggcggcgcggcggcttcgggtcctgcaggcggtcctgtagttggtgaagacttgaattcgtccatctgcagcacacgcccaaccacagctgttagttggagttcggacattcggacgcgacgcagagcacgggaatggcgtggtcggtggtggaactggaacggaagcggctacccagctgggcgcggtgatggaggcgttgtcccagccgatgtgcgccacgtgcttcatgtcggtcggcttcctgatctgcatctccggctccttcacatcagctacacccgtgcaacacacaagattgtggattatgatgtgacgataccaagctcacctattttggttggagttgggagttttagatatgaggagcagagggtgatcgaggtgcaaattaggatgtggcagcaaggggaccctaacttttggacaattaggcccttgtctgatatgatggttcgagctgccacacatgatgtctgcttccttctcaatatctatgagaaaacgatggaaaagttaagcaaagagaggctaagaaagcgtttaggacttgaagaggctacaaagaacaaaggttttgaccttggtaacggaggaaagacacaaaatgtttcagtaccgactgttgaaggtgtagctagaggaactagctatggatgggtggatggaggtttgcggggtacaaatcttggtgctggtgtgattgatcctacaaacgtacactcagataatcttttgcacgtctggtctatgcccagcacagcaaatgttagccagcaagaagcgcctcggcctctagagaaagtcaaccttttggcagcaagaaatgaaagggaaagttttcaaattgctttacgcccaaaggtttcatgggcaacttcaggtattgcagggtctgtgctgatacaatgcaccgatctctgctcctcctcaggagacagatatgaaaattcaagcttacccgaggatcgcattggtgaattggtgaaagaaactttggctgcagtaggactaaaggttgttccgactgagtacaaatatctgtcaaagaaaatattgccaacaaatcagggttctgtcacggagtattttctttccattcgcccaactgagagggcctggccagcggtgtactttctgtatgatctctcaccaattacattcaccatcaaagaggaaagaaggaacttccttcattttataactcgtctttgtgcagttcttggtggcacatttgccatgacaggaccgcatcttagcagggagaaggataatgaggaggaagaaagtgatagagatggtttcttccgcagattactcagggatagcaaagaggaggacatggaactgacaccaagctcagatggtttgttgaagcgactttttcgtgataaggaggacaggcaaggtgaggatgatgagaaggattttttcgcaggatgttcaaggataagaacgaggagaggagagatagtaatcatgcaagacatgggaatgaggaaagactgggcaagagtgtggaagatgatgacagagaaggtttcttccgcaaaattttcaaagataagaatgaggagaggaaagatgaagggcatcaaaagccagatgagagagaaaaggcaactctttaaggagaaaaacgatgagaaaaaggaaggcagcacaccaagcaagaaagaggaagatgataaaggccataaaaatgcagatgatgataatttctttcgcaggcttttcaaggataagaatgaagaaaagaaagggattgttcatgacaggaatgaagatgacaagtgtgaggaaggtgataaagaaaacttcttccgcaaattatttaaggataaacttgaggagaggagaactgagggacctgataaaaatgatgattatggtaagggaagtagtggtatcgaagaggaagataatccagagtttttgtcattccgtaggttgtttagagtgcacccagaagatcctaagagtgggcacatagaaagcagtcaatctaacaatctttctgaggggagcctaggatcagaaagcttttttaagaggctattccgtgatagagaccgctcacttgaagattctgagatttttgggtcaaaaatggcaaaagaggcaaggatctggtctcataaacaccctggtactacaggaatcaatgagaagcaaagtgggaaaccaccattaccaattaatgcagtagcagagcttcgaaaaggttcttactatgcttcgttggaacttgttcaggctttatgtgatacatcttatggcctggtagacatatttcctattgaggatcgagtatgctttccgatgggaaagggcatatatcgagtggttcatatacctgaagacgagtctgttcttctgaattctagggagaaagctccttaccttatatgtgttgaagttttaaaagcagaagctcctagccactctaaaggatcatcagatgggcacaaattatcaaaagatgggataccattggctaatggagatgtgcaactaccaaaaccacctccatgggcctatcctttgtggagcagacacgaaacacaaaactatgaaacagacataatgttgaagtctacttctcaggttattgaccaagcaatggctcaactctgggagactaaagggttcctgatcgggccggtgctctactcggcgtggtcgtcgccgttcgagctggccctcgacagggcggccaccacgccggttgtcgtcgcgagcctggtcatggacgcgttcttcgccgccgatatcgccgtctccttcttcgtcgcttacttcgacagatccgccaatctcttcgtcgacgaccgcaggaagatagccaccaggtacctcaagcggccgtcgttcgcgatggacgtggcctcgacgatcccgttcaacgtgatctaccagctggtgagcggcaggagcactgggtggttcaggtacctcaaccttctccgcctgtggagactgcagcgcgtcagcaagctctttgcgaggttccaccacggcgacagggagcacacctggctcggcagccaggtgcgcgacttcgcggacggcagcgtctgggtcaactacacctacgccgtgtactggtccatcaccacgctcgccaccgtcgggtacggcgacctgcacgccgtgaaccccggcgagatggtgttcgccacctgctacatgctcttcaacatcagcctcacctcctacatcatcggcaacaccaccaacctcgtcgtccacgccgcaaccaacacattcaagatgagggacatggtgcggcgggtctcgacgttcgggagcgtcaaccggctgccgccggagctgagggagcagatgatggcgagcgcgcagctcaggttcagcacagcggaggtgatccagcagcagctgctgtccgacctgcccacggcgctccggtcccgggtcgcgcaccacctcttcagggacgcggtccagcgctgctacctgtttcagggagtctccaacgacctcgtcgtgcggctggtttcggagatgagggcagagtatttcccaccccaggcggacatcatcctccagaaggtgaccaccaccgcctgctacatcatcgtctccggctcagcgcttgtgatgaagatagggccgcatggcatggcaggggaaatgggcgtcattctgggcgtcccgcagccgttctccgttcgtagcaggaggctcacgcaggccttgtgcatcagcaacagccatctcctggggatactccgttccaacaccgcagatgccaacaccgtatgcgccaattttgttaagcaactcaaatctctcaaggaactgcaggttgcagaggatgcgccgtttttcgaggagacattttccaaaacaaacatggatgagcttcagatcggctccatctttcagcagctgcttaacgacggcgacgctgccaggaggattccaaggcagaatcagaaagccagcttcggcaccgagcaacacgaagagaccgctccctgcatgttgccgcgtcgacaaggcggactacgagtggtcattcatgatcgctttcccagcgatggcgcggagaagaaccggggccttgcagcgggaaagcttatcctccttccggattcgctgcaagagctgatgaaagtagccgaggtgaagtttgggaaggcagcgaggagggtgctcaccgtcgagggcgccgaggtcgacgacgttgcggtgctgagggatggtgaccacctggtgttgtgttcctag

SEQ ID NO: 150898 - DNA, 248 bp, Zea Mays
taacagcagccaaaatgaagctcaacaaatcacgaaaattggccccgccgttgcaccgattggccaaacctaaccggtgctgggacgacctctcctttcagcaaaaacatgaacgagaggcatttcctttttttcttcttccctttcctctgcttttccccccttcactctcccagtagaccctacgttgaaggcacaagaagaatattgcgggcaatatcatactactactttgccgcggcagcaat

SEQ ID NO: 150899 - DNA, 1450 bp, Zea Mays
cccgccggcccgaccgcgaaccaaaccagaagctgggcgccacgcgtggtttggcgaatctactccaccgagagaaggcgagaacccaacagcaccgaggctggctcgctacgctattcttagagcatctctgtaatattccctcggcatcttccccttcccgccccgacgcccggtatataaaggccgcctccaccgcggctccctagccatcgatccagtgcaaacaagctcgctcgcaagcgcaacccacccacgtctacggtctaccacacgaagcatcgtagccagccagccagctaaacccacaccacacatggccgggatcgtggtggtgttcgacttcgacaagacgatcatcgacgtggacagcgacaactgggtggtggacagcctcggcctcaccgacctgttcgagcgcctcctccccaccacgccctggaacacgctcatggacacgatgatgggggagctgcacgcgcggggcaggacgctggccgaggtgaccgaggcgctcagggcggcgcccatcgacccgcgcgtgcccgccgccgtcagggccgcgcacgcgctcggctgcgacctgcgcgtgctcagcgacgccaacgccttcttcatccacaccgtcctggaccaccacggcctgctcgcctgcttctcccaggtcaacaccaaccccagccgcgtcgacgcccacggccgactccgcatcgggccctgccacgacccgcgcgcggcgccgcacggctgcggcgtcggcacctgcccgcccaacatgtgcaagggcctcgtgctggaccgcatcctccgcgaggccgaggccgaggccgagaccgcatcctccgcgaagccgcgcgtcatctacctgggcgacggccgcggcgactactgcccggcgctgcggctggcgcgcacagacttcgtgatgccccgcaggggttaccccgtctgggacctcatctgcgaggaccccgcgcgcctgcaggcggaggtgcacccctggaccgacggcgccgagctggaggagacgctgctgcgcctcgtgcggagggcggtcgtggaggacgccgcgctgccgccgccgccgccgccgccgctcgactgcaagctcgagtccatgcccgtcgccgcgcaggacggtatgcccatcgtgccgctgggcgtcaagaactgatactgtctctggttcagaattgaggtcgccggttagagctccaacaaattccgggcgaggcacggcgtaccgttagtagcgtttcactaattttgtgcgtctgtggtgtatccgtcctgatcgagtctgttgctgctgaattggttacgactcgttgtatcttactaaaaaaggtaaagttaataatggattagacatggtactatttgtttcttggtttcgaattaaagctagctattcagactacagcatcctgcaatcgaaatatgcagagac

SEQ ID NO: 150900 - DNA, 630 bp, Zea Mays
agccatcgatccagtgcaaacaagctcgctcgcaagcgcaacccacccacgtctacggtctaccacacgaagcatcgtagccagccagccagctaaacccacaccacacatggccgggatcgtggtggtgttcgacttcgacaagacgatcatcgacgtggacagcgacaactgggtggtggacagcctcggcctcaccgacctgttcgagcgcctcctccccaccacgccctggaacacgctcatggacacgatgatgggggagctgcacgcgcggggcaggacgctggccgaggtgaccgaggcgctcagggcggcgcccatcgacccgcgcgtgcccgccgccgccgctcgactgcaagctcgagtccatgcccgtcgccgcgcaggacggtatgcccatcgtgccgctgggcgtcaagaactgatactgtctctggttcagaattgaggtcgccggttagagctccaacaaattccgggcgaggcacggcgtaccgttagtagcgtttcactaattttgtgcgtctgtggtgtatccgtcctgatcgagtctgttgctgctgaattggttacgactcgttgtatcttactaaaaaaggtaaagttaataatggattagacatggta

SEQ ID NO: 150901 - DNA, 1236 bp, Zea Mays
tgagccaaagaaacagtttttactagagtaaaaagtagtaacacagttcatctgcttcgaaaattacagagcgaactttgagcatatctttctggacaccacaccagcatgtccacggttcacctcactggaacaagagcatacagctaacacatccacgcacatacacagaaaacgcaacagcagtataacaacagtagcaagacgagctctttttttttctagcttgcgggctcaaatgatgtagtccgaccactgctgtatgaaggaggtgtggtccatggactcccccggcatcacctcctcgcccttcttcccgccgatcagcctggcggggttccccacggcggtgctcctgggcggcacgtcgatgagcacgacggacccggcgccgaccttggcgccggcgccgatcctgacgtttccgaggacggtcgcgccggcgccgatgagcacgccgtccccgatcttggggtgccggtcgcccaccgccttgccggtgccgcccagcgtcacgtggtggagtatggagacgttgtcgcccacgacggccgtctccccgacgacgacgcccgtggcgtggtcgagcaggatgcccctgccgacggtggcggccgggtggatgtccacggcgaagacctcggcgacgcgggactggagcgccagcgccagcgcgcgccggccctgcgcccacagcacgtgcgccacgcggtgcgcctgcacggccaggaaccccttgtagttgaggaggcagtgcgcgaagcccgcgcaggccgggtcccgcgaccgcgcggcgatcaggtcggccaccgccgccgcgcggacggacgggtgctccgcgagcgacgccacgaagaggtcgtagaggagcgtcgacagcagcgtggaggagcacagcttgttggccaggtggaaggccagggaccggtccagggacgcgtgcgacagcaccgtcgcgtagaggaaggaggccagcgccggctccgcgtccgcgtcgcgccgcgcctccgccttgatctgggaccagacccacgactcgtcaccgtccgactcgggcggcgggtacgacggcacgatgtctgcttggagtgccgccggcggggtgctgtggcgcacccgctggggctgggctgatggctcggtgcgcagaagctgcccggccgtcatcttcgagtcgccgtcggggcctatgtggccggccggtggggtgtgcgggcggtgtggctcgcacagcgc

SEQ ID NO: 150902 - DNA, 651 bp, Zea Mays
tgtttcctatccgtgtgtttggttggagagaaactgcatccacaaatcctcaaagcacattttgtttgtttcacttctctgcataaccaggctgagcgggtgcaagaaacaacagcgagccaggcccgctagaaacggacgctcggcgcgtacgcgcgcgtgcaggcgcggtgcagccacgcccgtacggtatgtgtttctattctgcatccaccatttatcttttctctttcctatgtgttcgcaaggcctcctccttcaagctgaaggccgagccgtgctgtggcctgtggtggtgttggccgtgggagcagcgacgacattcgcattgagtagcccgcccaaggtcttctgcccgtcccggcctccaccgaccgtcgcaagggcaaaggccatatctcctcttctatgctgctctcagactccacctttggtattgctcctagctaaggtatttatctagactgagtcatcatagtcatcctgtggactacagtcagtcatcccaaaatgttaggcaaattcaatgtcaagacgctttcaagtttgccaaaatgatatagtggatgctgtctgctttcgtaatcaattttagcttgagtattatatttcaatgtttgttcagaaaagtgaaaagatatttaagcacac

SEQ ID NO: 150903 - DNA, 732 bp, Zea Mays
tgaatggacaaatggagacgaaggcatatcatatcttctcaacgaacgatcataaacggtggaacttgacagagaaagaaggaatggcagcaccatgttgcacatcctgtctaacgcaatactgtgttatcatgtcagtgcaagctgcttcgatttccaaaccagagtgaactcttaagcaaccaaaccatgtcaaggttagggacatacgtctgattctgactatttcaatgccacgagtccacaacaagacaagatagctagcactgcggacaaatagaaagtggaggaagaggggatcttgctttgcttggctgctgccaaacgaaggcggagtgtctgggctgtccaaagatgcgcgttacgcgacagcggagcagcgtgtggacgaccagcgcgggcgcccggcgcgtaggatgggggggaggagatcaggtggggaggcacggaccggcgccgcacgtgagatctgcgcgcagccctgtggcgccggcgccggcgccggccttgcgggcaagctcaagcgctaggaccgcgaggctgggatggagatcttccgatcccgccagcacccggcgccgcgaccaccacccgaccgccagcgccggcgcacggcggcagccgacgttgacgaagctcccggacatcgtggagaaagcagagacgaaggcttgtttggaaatgggggagaactagacccgaccgagagggatttgggcccttggttggacc

SEQ ID NO: 150904 - DNA, 1684 bp, Zea Mays
ttccataagcaccagcgttcgcaatggagacgctcgtgcctggggtcctcgcagacctcgtctgtcgagccatatccttcaccgtggataggtgttgccaccagcggcgcaagcgctgtgcagaggacaccacacaacggctgcaccacgtgcttctacgagtccagaccgtcgtcgaggaggccgaccggcggtgcgtcaccaaccgtgcgatgctccggcagcttcagctgatgagggaaggcgtgtacagaggctactacctgctcagcgccttcaagcgccaaggcgttaacgttgtgaaggacacggcgcaagatcgcgagctcggccgtcatggccactcgtccctcgccctgtcccagttcaatccggcgaagcgcttgtgtactctctccgcctggacgacgacgaggacgaacatggcgttgcaagacacggcacgcgagggggaggcggagctgcaagaggtgctcactgtcctagagcgcatggccagcgacatgaaggagctcgtcgtgttcctgagctgctaccctcccacgcgccgcgaacctcacagcgggcacctgcggttgaagaaccgcatgttcggccgtgagtcagagcaggagaggatcataggcttcctgctggaaccagagcctgcacgcgcggaatatttgggcgtgctcccagtgataggccgagcaagaatcggcaagagcaccctcgtcgaacacgtctgcttggacgagagggtgcgcagccatttctccttgatcgtattcctcgccgaaagcgacaccaaggacggcaaacaatctcctcatctgggagacgacaacgccataatcaaacaccaggatctcggttcggcaggaaaatcactggttgtgattgagctggccggcgacgtggatgagagcacctggtggagaagaacgctgcccgcactgagagcacgacgaatcgcgccggtgagtaaagtaatcgttacaagccgatcggagaagattgcaggttttggaacgacacaggctcttgagcttaaacctttgccccgagaagcctactggtacttcttcaagacgatcgcgtttgggagcaccgatgccatggatgagccggagctggaatccatatgcatggagatggtggacctgttgaacggatcattcatagcggccaatttgtttggtggctatcttagagccaacccttgtcctcggttttggcagaaggttctcaaaggccacagaaactatacgagtatgcacctgcatctctttggcgagtatcaatctgatcgactagcgaatggtcgcccagtatacatgtggagattacccaagactgatgatatgctaattgcttacgattattaccaagcgtgctcagcccagcagcatgatctgcccaagtttaccatagaagaggtgcaaatcggaagcacgagacctcgaggggactttcaagccgtcgcatggagatcaaacataccaccatactacagctatttgttgagttgtggggtgcaagcatcgtcgtcgctgacccgtacaccacgcaggaacaagcaaatccagcatctgcaggcatgacgattgaattgtataataaatttttatagttttatgccgtattctattatggctctgtacgtatatgtttttatctattcagtatgttgcattagcacaca

SEQ ID NO: 150905 - DNA, 406 bp, Zea Mays
gtcgcttgtcaagaaaggtttaattctttatcccaaagaataatcgttgaaaagtttggggcaacttatggcaatattatacagatttgaacctctgatccaggccaacatgtacattctagcaaattagcgcactacttggtaccgtgaacattcacacgtatacagggcttctagaatgttcccatacgtgcatgcgaagaacatcttgttggtcactcagatttgacatggattaatccaactttcagggtcttggcaatgcatcatctgttcgggtatagtatagtatatagtagatcgatgccaagattgaatatgcacctgcaaacacaaactaagatttcagtctttgcagcaaagtttcagacatacgatgtatactaactccggtcaagacaagctt

SEQ ID NO: 150906 - DNA, 1463 bp, Zea Mays
ccaacggcatctccaagcccactatataaacaaccgcttcgcccacccctagggttttccgtgccgccacccagccccttaaccctcgttcctctagccgtctcgcgcagccacagcctccatttctcctccgacggcggtgcggctagctcaaccatggcggactccaaggccacctcggcggtcaccctccgcactcgcaagttcatgaccaaccgcctgctggcccgcaaacaatttgtgcttgaggttatccaccccggccgcgccaacgtctccaaggcggagttgaaggagaggcttgccaagatgtacgaggtgaaggaccccaacaccatcttcgtcttcaagttccgcacccacttcggtggaggcaagtccactggcttcggcctcatctacgataacctcgagtctgccaagaagttcgagcccaaataccgcctcatcaggaatggtcttgctactaaggttgagaagtcccgcaagcaaatgaaagagcggaagaacagggccaagaagatccgtggtgtcaagaagaccaaggctggtgacgccaagaagaagtaaacagtcatttatatttctgtattactgtcctgaactctgggtggtcgtctagttgcaatgtcataattatggtcgtgttaggttttgttccgcactcagcagtaagtgaagttttgtaattcctggatgtgaacctacccggattggctgtagcatgttgtgagatgagaaggctattttgtcatgcagttgtgtcatttgcaagccaatccattttgtcatgcagttgtcatttgctcacctctgatccatatcagctttgatcgtgctgcatttgcgccagtgaacagtgattgctcatgaactagttttgggttgcagttcggtagttgtttggacctttgttttcaaggctagtctatttttcttacatttgtgaatgccttaatggcatgatgttatcagttgttggaacaagtatttgttaatgtcgatggtgcacacacgatagttacacgccattatgggtacattatcatccagagtaagaggagcgcattgaattactgtccgatcattctgggtatatgatcatcaagaggagcacaatgagcaactgtctggtgccgacgtcagttcctgttcttgatggcgctcttgaccatgttcccgggcatggaggacgatggcgtgacggccttccggatcttgaagaggttccacgccgtccccacggcgtggccggccgtcgcgaacgcgtcttgggttgcctctcctgcgttctcgccgtacctgaatcggccgcatgaaacaatcttctacccaaatttcgttttttttaaccgacattcgagtgttcttacctcctggacactgcaccagcgacgacattcgaagttgcagcgagtgacttcttctcggcgttctctaccgcatccattactttgtctgtc

SEQ ID NO: 150907 - DNA, 1745 bp, Zea Mays
atataaacaaccgcttcgcccacccctagggttttccgtgccgccacccagccccttaaccctcgttcctctagccgtctcgcgcagccacagcctccatttctcctccgacggcggtgcggctagctcaaccatggcggactccaaggccacctcggcggtcaccctccgcactcgcaagttcatgaccaaccgcctgctggcccgcaaacaatttgtgcttgaggttatccaccccggccgcgccaacgtctccaaggcggagttgaaggagaggcttgccaagatgtacgaggtgaaggaccccaacaccatcttcgtcttcaagttccgcacccacttcggtggaggcaagtccactggcttcggcctcatctacgataacctcgagtctgccaagaagttcgagcccaaataccgcctcatcagggtatgttgtcgcctggcccttgctttcgttacctgtagctatgatgttataaacgcttgattatatatacgatgttataaacgcttgattatataagtttgatagttggacagtaaaatgcctgattactgattaagtaccgctggcatcatatgtgtcgctgttgctaatgtcttggtaaatggtaaactcttttgttctgtcacttcgtttttttgtgggagcaaggagcatcattgcacctgtgaaactagagattggatgtggctagcactgcttctctgtaaatggtttcacattgatatgcgtgtgacgctaattgtttgtaaatggtacctgcgattgagatcatggtagtagaaaccgatggacatgcaatctctatgctgaaattacagtttttgctgtagcgtgccttccattcttgttgtaagctgagaaacagttttcactacacaatcttgtcattataatatttacatttacgtcacaataggtcaactccagatacttgtctatatatcatgatgcaatatagtttcaacattgaacaagaactggtcgtgatatacgtcctcgttggcagctcttttcctttgccgatcttattagtactaatgcatcattactttactggaaggacatgtcatgattggtttgtaagttctgattgacgtgaacctgatggatgctcactatactgccgctactgaggctattcatctgcttgaatttttgtgtttgtattgccagaatggtcttgctactaaggttgagaagtcccgcaagcaaatgaaagagcggaagaacagggccaagaagatccgtggtgtcaagaagaccaaggctggtgacgccaagaagaagtaaacagtcatttatatttctgtattactgtcctgaactctgggtggtcgtctagttgcaatgtcataattatggtcgtgttaggttttgttccgcactcagcagtaagtgaagttttgtaattcctggatgtgaacctacccggattggctgtagcatgttgtgagatgagaaggctattttgtcatgcagttgtgtcatttgcaagccaatccattttgtcatgcagttgtcatttgctcacctctgatccatatcagctttgatcgtgctgcatttgcgccagtgaacagtgattgctcatgaactagttttgggttgcagttcggtagttgtttggacctttgttttcaaggctagtctatttttcttacatttgtgaatgccttaatggcatgatgttatcagttgttggaacaagtatttgttaatgtcgatggtgcacaca

SEQ ID NO: 150908 - DNA, 1086 bp, Zea Mays
atataaacaaccgcttcgcccacccctagggttttccgtgccgccacccagccccttaaccctcgttcctctagccgtctcgcgcagccacagcctccatttctcctccgacggcggtgcggctagctcaaccatggcggactccaaggccacctcggcggtcaccctccgcactcgcaagttcatgaccaaccgcctgctggcccgcaaacaatttgtgcttgaggttatccaccccggccgcgccaacgtctccaaggtgagatatcggccccggtactgtgtgcgcggctcatatggcgggagcttctggcctggatctcagggttgttctgcttgttctctttgtgtaggcggagttgaaggagaggcttgccaagatgtacgaggtgaaggaccccaacaccatcttcgtcttcaagttccgcacccacttcggtggaggcaagtccactggcttcggcctcatctacgataacctcgagtctgccaagaagttcgagcccaaataccgcctcatcaggaatggtcttgctactaaggttgagaagtcccgcaagcaaatgaaagagcggaagaacagggccaagaagatccgtggtgtcaagaagaccaaggctggtgacgccaagaagaagtaaacagtcatttatatttctgtattactgtcctgaactctgggtggtcgtctagttgcaatgtcataattatggtcgtgttaggttttgttccgcactcagcagtaagtgaagttttgtaattcctggatgtgaacctacccggattggctgtagcatgttgtgagatgagaaggctattttgtcatgcagttgtgtcatttgcaagccaatccattttgtcatgcagttgtcatttgctcacctctgatccatatcagctttgatcgtgctgcatttgcgccagtgaacagtgattgctcatgaactagttttgggttgcagttcggtagttgtttggacctttgttttcaaggctagtctatttttcttacatttgtgaatgccttaatggcatgatgttatcagttgttggaacaagtatttgttaatgtcgatggtgcacaca

SEQ ID NO: 150909 - DNA, 1536 bp, Zea Mays
gggttttccgtgccgccacccagccccttaaccctcgttcctctagccgtctcgcgcagccacagcctccatttctcctccgacggcggtgcggctagctcaaccatggcggactccaaggccacctcggcggtcaccctccgcactcgcaagttcatgaccaaccgcctgctggcccgcaaacaatttgtgcttgaggttatccaccccggccgcgccaacgtctccaaggcggagttgaaggagaggcttgccaagatgtacgaggtgaaggaccccaacaccatcttcgtcttcaagttccgcacccacttcggtggaggcaagtccactggcttcggcctcatctacgataacctcgagtctgccaagaagttcgagcccaaataccgcctcatcagggtatgttgtcgcctggcccttgctttcgttacctgtagctatgatgttataaacgcttgattatatatacgatgttataaacgcttgattatataagtttgatagttggacagtaaaatgcctgattactgattaagtaccgctggcatcatatgtgtcgctgttgctaatgtcttggtaaatggtaaactcttttgttctgtcacttcgtttttttgtgggagcaaggagcatcattgcacctgtgaaactagagattggatgtggctagcactgcttctctgtaaatggtttcacattgatatgcgtgtgacgctaattgtttgtaaatggtacctgcgattgagatcatggtagtagaaaccgatggacatgcaatctctatgctgaaattacagtttttgctgtagcgtgccttccattcttgttgtaagctgagaaacagttttcactacacaatcttgtcattataatatttacatttacgtcacaataggtcaactccagatacttgtctatatatcatgatgcaatatagtttcaacattgaacaagaactggtcgtgatatacgtcctcgttggcagctcttttcctttgccgatcttattagtactaatgcatcattactttactggaaggacatgtcatgattggtttgtaagttctgattgacgtgaacctgatggatgctcactatactgccgctactgaggctattcatctgcttgaatttttgtgtttgtattgccagaatggtcttgctactaaggttgagaagtcccgcaagcaaatgaaagagcggaagaacagggccaagaagatccgtggtgtcaagaaggtgagctatctactgacatgcagtcctcttgtgaagtttatattacttactgtgccacgtgtgtaatacatgctttacgtcttttacagaccaaggctggtgacgccaagaagaagtaaacagtcatttatatttctgtattactgtcctgaactctgggtggtcgtctagttgcaatgtcataattatggtcgtgttaggttttgttccgcactcagcagtaagtgaagttttgtaattcctggatgtgaacctacccggattggctgtagcatgttgtgagatgagaaggct

SEQ ID NO: 150910 - DNA, 1143 bp, Zea Mays
attttataggacgatgattatacctgctatgttgtatgatgcagaatgttggcctaaaaaaagacatgtttaatagacaagtgttgcggaaatgtgtgcgttgcgttgggtttgtggccgtataagaaagtaatgagtttggaacgatgatatatgtggtatggtaagggtagtgccaattgaagaaaagaggtcgagatggtttggatatatccaatgaagtcctctagaggcaccaatgcattttggattctaaggtgtgatagcaatgaaaagtgggacaggagaagactgaaattgatatgggacgatacaataaaaggagacttgaatggacagaatatagcacaaaaattagtttgaacaagagtgcatgtaaaacaagatatccacgtgtctaaatcttgtggttttctgttgggtttgaactctaaactatccaacttgcgataaaaagcttcgttgttgtggataagatgtctagcgtggaataaatagtttgttggacacgagaagtgattccatccaggggaaatcagtgtgcccatatttcatgcattgtggaaagtgcaaaaaatattgtattgtattccttctaatgtgagtgtgcatttgtattgtttttgtttcttgcaactattacgcaaatatccagggtctcggaaaggatggcagcggtatcaaggaaccagtccaggcaaaatccgtggacgtcagggctggactaggaagtcagcagcggaaggctgatccaatcctggaggccaaagccggagacagctacaaaaccatcatccagaagaaggccatggcaagattcaaggagatgtcctagctagaccttttttttttgtatattcggttgtcgtattttgtcgtccgtatacttttttttttacaatctgtgcactgttttgcttgtgttttttttcttcacaaacctagccactgaattgtgatttattatcctcaaaggggcaccgtgtttatcttattattactatgtagttcgagacctggatgctttttttttcatgtgtgttggggttttcatttgcacgacgaatgtgcccgatcagttgctttgccacacatgatgtggcggtactgcctctacatcttatcgtggcacaggttgttttt

SEQ ID NO: 150911 - DNA, 3649 bp, Zea Mays
actcgcgactccgcccgcctgcccagcgatagcgccatagcggcgaccggcgagctccaatatcacgcggatcggcggcggcgcccttgccccggagccccgcggcggcgcggccctgtccccgttccccgccccggcggtaggcagccccgtctcctgtcgagcgctcccaccaccccagccccggcgcccccgctcccagcccgaccgctgtatccgcggcgaccggcgtcccgaacggacgcggcccgagcgcctggctcacagaaaatctgcacacaaaactacaaaagtttaaggtcaccaagaaccttgcaggataacacaagtgctggattttggaaatggaccatgggctttatgctccacaacatggatgggagaacaacagtgcatcaaatgggtatggtgcaatcaatgagccagattttaggtctggtggatcctacaatggtaggagatctgtggatgaaggttttcctagagattcatatgggaggggtgcatactgtcaggatacacatgatagaaatatgtatgcaccaccgccatctgttggtggaatatggtctcagcctcgaaggaatcatgatgaggaatatgcaactgcaagagatcacagaagtcgccctgattttggtgttgataggagcaaaaggattggaagcagagaaagtgcggagtttcatggtgagtttgaagaccggtaccacagttctaaccaaagcagagatgacagctatgagagagatcatgaatatggtcattatgattatgattcggaccatgagagaggcaggagagatagtagctggaaaagacgcgattcatgcgagagcaaacgtgaaagaagtggattaagtcgtgaaagagaggaaagtccatacatgcgccatagccgttctcgatcacatggacgtgatgaccgatcaagatcatggtctagatcaagatctcctcgtgcgagaagtcatggtcggaaccaaagagatggcctgtatgatgataatcgatttgacagaagaagggaatatgattgggatgataggaggcatggtgattcagtggccccatctgccactgttgttgtcaagggactgtctatgaagactaatgatgatgacctatatcagattctttctcagtggggccctctacgcagtgtacgtgtgatcaaggaacggaattctggcatgtctcgtggatttgcttttattgacttctccactgtggaagctgcctgtagaatgatggaagctactggaaagagtggtctccaaattgatggcaggaatgtgttctttcagtacagtagtaaaccaaccggtgtaatgggtgggtcttctcctggacaagaaaatcttacaaggcctacttatgggccccgcactgttgctgcactctgtgactggatttgttctatatgcggatgtatgaatttcgcccgcaggacctcctgttttcagtgcaatgaacctcgtgctgaggatgctctaccagctgatgcgacaggttcctctccacactttgggagaaagggatctgaactaggtccaactcatgttttagttgttcgtggcttagatgaaaatgctgatgaggaaatgcttcggtacgaatttgctaagcacgcaccattaaaggacatccgccttgttcgggataagtttactcatgtgtctagaggttttgccttcgttcatttccattcggtggaagatgctacgaaagctctggaagctacaaatgggattacactcgagaaaaacggtcaggttttgcgtgtagcatatgctaaaagtacacatggacctgcatcagggggctcacagtcaaacagccttgctgcagctgccattgaggctgcatcatttgctcaacagtatgatgccataggttgggctccaaaagagtacaatcctgatgacaaacagaacagtaactttgaatctcaaaaagacgatggcagtggcacagcacagtcgggatttgtttgggatgaaaaatctggttactactatgattctgcatctggattctattatgacggaacaactggcctttactatgacagcaactctggagtttggtattcgtacgatcaacagactcaacagtatgtcccttgtactgaccagagcaatactaaggcagccggggagacgtccagtgaaaacatgatctcagatagtatttgtgggaaaaaggttgtgatctctgcgcctgctgccacaattaaacaaaacaagaaaacatcactccctgatgctgttcaagctgctgcaaatgcagccctggctgcagaaaagagagaaaaggagaaggcaaaagagattaagttggcctcaaaaagtagtctcatagctaataagaagaagatgaacaatgtcctagccatgtggaagcaaaggaatcaagaagggcaggccgcacggattgtcattgatgacaaagaaccaccaaattctgatgatagatttaatcattcacatagtggaactggtttctcttcgaaaagcaagccaaattttgaatttgaaaatgctatggataattctgttcgccaaggaattgcatcgacccaaatgttggattctgatgtaaagcctagacctgtcagtaacagcttaggtactacagttatgggtgtcataagaggttctactagaggagtgatcaagtcggatactacgtttcatgcattatctgatgccgggagcactgattcccgcaccactataatcacaagatcaaatgggttaatgacaagtcctgtggaacttgtaactcctgcaccctacaaaactgatgtgtctgccttagtctctaatacttcatcgggagtttctgggagtggtaaacgtcggttttctgaggcaccagggcaatcccagtacagggatcgagctgcagaaagacggaatctgtatggatcatctcttcgcactgatgctgttggattggattcaactggtcactatccgtcccgaaagggtccaagtgagatagggtcgatgccatttcctcctggcgtgggtgaacgttctaatggtgaaattggcaacaacgaaaactatgaagttattaccgctgatagcgcaatcgacgaaagcaatgtgggtaaccgtattctacgcaacatgggttggcaagagggactgggtctcggaaaggatggcagcggtatcaaggaaccagtccaggcaaaatccgtggacgtcagggctggactaggaagtcagcagcggaaggctgatccaatcctggaggccaaagccggagacagctacaaaaccatcatccagaagaaggccatggcaagattcaaggagatgtcctagctagaccttttttttttgtatattcggttgtcgtattttgtcgtccgtatacttttttttttacaatctgtgcactgttttgcttgtgttttttttcttcacaaacctagccactgaattgtgatttattatcctcaaaggggcaccgtgtttatcttattattactatgtagttcgagacctggatgctttttttttcatgtgtgttggggttttcatttgcacgacgaatgtgcccgatcagttgctttgccacacatgatgtggcggtactgcctctacatcttatcgtggcacaggttgttttt

SEQ ID NO: 150912 - DNA, 1410 bp, Zea Mays
cagattttttttgttattctcatcattatcattttgctgaagcatcattgtcagtattagtgttggtataaggctgacttggtatttctgggagtctttttgttaccataggaatatgtccttgaccaacatacagttcaggaatcttattttttgttttgtttgtaagctttttattgattttctggaaattacctgttgtcaagctggtcactatccgtcccgaaagggtccaagtgagatagggtcgatgccatttcctcctggcgtgggtgaacgttctaatggtgaaattggcaacaacgaaaactatgaagttattaccgctgatagcgcaatcgacgaaagcaatgtgggtaaccgtattctacgcaacatgggttggcaagagggactggtaagttcatgtcccacatatttctcagtttgagatgctctcaggcttgatagcattttccatgagtgtttatgcctcttctttatttctcttgctaatgcaattgcatctgactttgcaatctaatttatgtaagttttttatgagaaaaaggtaaatatgcctatttgtaataaggcagttgtatcaaatttattttaatgcagctctctggttttaaccggagtactttggagcttggtacgctattagtatgttagcaaatcttaagcttgtcttgttgatctctttacagaaataattaatgaagtatacctctgtgtcttgacttgattctgagtccatgtgcttcctttgtgtctagactctacaatgtaggaatcagaagtcactgacatacttagtctgagtgagaagatgcctagtttttagcctaagtgagaagatgtctagtttttaggtgcgtgcctgtagggaaacatcgctttgagaacaaagtggtggaaactgaaaggaaagacgacagaagccttcaaggaaagggtcatcaaagagggcactcggaagaagacaaacaataattgggagaagatggcaacctgcattcggaaggtggctttaaaggtgcgtggagcaagtgagcaaccaaagggagtggaggcgaagctaaagttttttggtggtggaatgaggaagtctaaagggacctattaaggagaagaaagcatgctatagacgtttgtaccatgacaggagtggacaacatagagaagtataaggtagtaaaaaagactcgtggcaaagggtagggcgtacgaggatttttatcaaacgtgaaggaaggagggtgaaaggagaggacatatattgggattgttagggttcatgagaggaagacaagggacttcaaccaagttgagtgtattaaggacaaaacagagtaccttttcatggagtatgaggtcatatgtagatggtgagggtattttaacaaagtatttaatggggacaat

SEQ ID NO: 150913 - DNA, 4174 bp, Zea Mays
actcgcgactccgcccgcctgcccagcgatagcgccatagcggcgaccggcgagctccaatatcacgcggatcggcggcggcgcccttgccccggagccccgcggcggcgcggccctgtccccgttccccgccccggcggtaggcagccccgtctcctgtcgagcgctcccaccaccccagccccggcgcccccgctcccagcccgaccgctgtatccgcggcgaccggcgtcccgaacggacgcggcccgagcgcctggctcacagaaaatctgcacacaaaactacaaaagtttaaggtcaccaagaaccttgcaggataacacaagtgctggattttggaaatggaccatgggctttatgctccacaacatggatgggagaacaacagtgcatcaaatgggtatggtgcaatcaatgagccagattttaggtctggtggatcctacaatggtaggagatctgtggatgaaggttttcctagagattcatatgggaggggtgcatactgtcaggatacacatgatagaaatatgtatgcaccaccgccatctgttggtggaatatggtctcagcctcgaaggaatcatgatgaggaatatgcaactgcaagagatcacagaagtcgccctgattttggtgttgataggagcaaaaggattggaagcagagaaagtgcggagtttcatggtgagtttgaagaccggtaccacagttctaaccaaagcagagatgacagctatgagagagatcatgaatatggtcattatgattatgattcggaccatgagagaggcaggagagatagtagctggaaaagacgcgattcatgcgagagcaaacgtgaaagaagtggattaagtcgtgaaagagaggaaagtccatacatgcgccatagccgttctcgatcacatggacgtgatgaccgatcaagatcatggtctagatcaagatctcctcgtgcgagaagtcatggtcggaaccaaagagatggcctgtatgatgataatcgatttgacagaagaagggaatatgattgggatgataggaggcatggtgattcagtggccccatctgccactgttgttgtcaagggactgtctatgaagactaatgatgatgacctatatcagattctttctcagtggggccctctacgcagtgtacgtgtgatcaaggaacggaattctggcatgtctcgtggatttgcttttattgacttctccactgtggaagctgcctgtagaatgatggaagctactggaaagagtggtctccaaattgatggcaggaatgtgttctttcagtacagtagtaaaccaaccggtgtaatgggtgggtcttctcctggacaagaaaatcttacaaggcctacttatgggccccgcactgttgctgcactctgtgactggatttgttctatatgcggatgtatgaatttcgcccgcaggacctcctgttttcagtgcaatgaacctcgtgctgaggatgctctaccagctgatgcgacaggttcctctccacactttgggagaaagggatctgaactaggtccaactcatgttttagttgttcgtggcttagatgaaaatgctgatgaggaaatgcttcggtacgaatttgctaagcacgcaccattaaaggacatccgccttgttcgggataagtttactcatgtgtctagaggttttgccttcgttcatttccattcggtggaagatgctacgaaagctctggaagctacaaatgggattacactcgagaaaaacggtcaggttttgcgtgtagcatatgctaaaagtacacatggacctgcatcagggggctcacagtcaaacagccttgctgcagctgccattgaggctgcatcatttgctcaacagtatgatgccataggttgggctccaaaagagtacaatcctgatgacaaacagaacagtaactttgaatctcaaaaagacgatggcagtggcacagcacagtcgggatttgtttgggatgaaaaatctggttactactatgattctgcatctggattctattatgacggaacaactggcctttactatgacagcaactctggagtttggtattcgtacgatcaacagactcaacagtatgtcccttgtactgaccagagcaatactaaggcagccggggagacgtccagtgaaaacatgatctcagatagtatttgtgggaaaaaggttgtgatctctgcgcctgctgccacaattaaacaaaacaagaaaacatcactccctgatgctgttcaagctgctgcaaatgcagccctggctgcagaaaagagagaaaaggagaaggcaaaagagattaagttggcctcaaaaagtagtctcatagctaataagaagaagatgaacaatgtcctagccatgtggaagcaaaggaatcaagaagggcaggccgcacggattgtcattgatgacaaagaaccaccaaattctgatgatagatttaatcattcacatagtggaactggtttctcttcgaaaagcaagccaaattttgaatttgaaaatgctatggataattctgttcgccaaggaattgcatcgacccaaatgttggattctgatgtaaagcctagacctgtcagtaacagcttaggtactacagttatgggtgtcataagaggttctactagaggagtgatcaagtcggatactacgtttcatgcattatctgatgccgggagcactgattcccgcaccactataatcacaagatcaaatgggttaatgacaagtcctgtggaacttgtaactcctgcaccctacaaaactgatgtgtctgccttagtctctaatacttcatcgggagtttctgggagtggtaaacgtcggttttctgaggcaccagggcaatcccagtacagggatcgagctgcagaaagacggaatctgtatggatcatctcttcgcactgatgctgttggattggattcaactggtcactatccgtcccgaaagggtccaagtgagatagggtcgatgccatttcctcctggcgtgggtgaacgttctaatggtgaaattggcaacaacgaaaactatgaagttattaccgctgatagcgcaatcgacgaaagcaatgtgggtaaccgtattctacgcaacatgggttggcaagagggactggtaagttcatgtcccacatatttctcagtttgagatgctctcaggcttgatagcattttccatgagtgtttatgcctcttctttatttctcttgctaatgcaattgcatctgactttgcaatctaatttatgtaagttttttatgagaaaaaggtaaatatgcctatttgtaataaggcagttgtatcaaatttattttaatgcagctctctggttttaaccggagtactttggagcttggtacgctattagtatgttagcaaatcttaagcttgtcttgttgatctctttacagaaataattaatgaagtatacctctgtgtcttgacttgattctgagtccatgtgcttcctttgtgtctagactctacaatgtaggaatcagaagtcactgacatacttagtctgagtgagaagatgcctagtttttagcctaagtgagaagatgtctagtttttaggtgcgtgcctgtagggaaacatcgctttgagaacaaagtggtggaaactgaaaggaaagacgacagaagccttcaaggaaagggtcatcaaagagggcactcggaagaagacaaacaataattgggagaagatggcaacctgcattcggaaggtggctttaaaggtgcgtggagcaagtgagcaaccaaagggagtggaggcgaagctaaagttttttggtggtggaatgaggaagtctaaagggacctattaaggagaagaaagcatgctatagacgtttgtaccatgacaggagtggacaacatagagaagtataaggtagtaaaaaagactcgtggcaaagggtagggcgtacgaggatttttatcaaacgtgaaggaaggagggtgaaaggagaggacatatattgggattgttagggttcatgagaggaagacaagggacttcaaccaagttgagtgtattaaggacaaaacagagtaccttttcatggagtatgaggtcatatgtagatggtgagggtattttaacaaagtatttaatggggacaat

SEQ ID NO: 150914 - DNA, 4826 bp, Zea Mays
atggaggacgcggtgtcagggctgcgatcttccaactccgccacctccttcgtcgccgcgccggtgtacgacgacgacgtgttcagctcttcggcgacctcgcagcacaacgccagcatcctaggacggcgccagcatctcagtcgcagcgcgcggctgcagcgccgaccgctacagcacctgaccgtcgaccccgtcagcgccgtccatggcagcgacgactctgagttgtcccacagtgaggtcgacagggtccttgcgaccgtcgtgctctccaacccgcgcgagaaggtccatgacgggctcgtcggcgtgacggagttcgcgcatcgtcctctcgccgtctacgacagctacgtcgagcacgacctctacagcttcatcccgctgctcttctacaccgagcaagccaaagaggagcaggtacccgtcgacacgcccaccaggtgttcgatgagagtcctcaactgcagaacctttcctcgacaagggcttcaaggacatccgtccagcctggtgtgtccactcgtgcgtcgccacgatggcaggttccacctctggttcgaaccctccgtgctggtcgcaccgcacaccaggggccgcgctgagcagatgacgctttcctacgacgctgatgccgaagctgacgactactacaatgcgcccgatgtcgagatcatggtgtccaacttcggctccacctccaccctcagctacctcgagcctgatctcatgctacccacgcggtacaggaacattctagcgggcatgctggagaaggccgtctacgaggaaggccatgacctgttcggtgtgctgtatgaatcccgatcgcttgttggaaccattggtagtatcgacttcagttttgaggagaatgatgaattagttgatcgaaaagaaactgtcgtcacctctcagttgcaggaagagatgggcagcaaggaacataccacgggtcagtttcagacactggacaagcccattgcagataacagcagtgcagcggtcgaattcagcaacaggaattgctgggtctcattgattcaaggttcttcggtgtacacgccatatcctagcaatcgagtggagcagggactggttgcaacactacagtccgatgaagatggatgtgaccaacaaagggatggtgagtccctaccagggagcgacaatttgtttgcaagagctgctatcgtcttttcccactggtggagtagtgcagctgctgatgatttcagaggacaacaactcagccgactggtcaatttggctccacgagtgcagcagtctccaggttgtcttcgttgtctggtcttggggctcatggaagagccgaggaggcctcgattcttcaaggtcctcgttgtcgacttcgcgcgacgaatagagatacctcaaggcttcctctgccattttccagaggggagagacaggaagcccggcaccacagcggtggcgtctgctaaagtcgtcctcaccaatgccgagggtagtagtatctggccggttgcgctagagtcgaccgacggccgcgtgtttctcaccacggggtggccaaagttcgtggaggacaaccgtttggggaagggcgagatccttatcttcaagtaccacgggagaatgcgtttcgtggtctcgatttttggcgtggatgccgtcgagaaggcaggtcgctggtctgcaaggagtggcgcccaggccgcggagaagggcacagctggtttccttgactcacatgaagtagtttgctccaaagattacttggagacgtacttgtcagaggagacaatggaggatgataaggctaaagcagtagcggaagtaatgaagactttgcgtgttgacaaattgacagtagacttattctgtgctatactctgtttgtgtgaatggaaagtcgaggcagctgcagaatattttaatttttgtaggggcaaaccacaaatcccggaaaaatctctgaagcagaaatttgtttttcagtttgactttgtaaagggacaactacaacgcttcttccctgaagattatgattctgagaaaatcaagaagaacaatattgagtcacctaatttgtctgatcaaccactacaacgtgaccttatagtggcgccggtgaaacgaaggctagttgatgaatttaaatcttgtgacttgtctcaccgacagaagagaaaagttaagttgcagggaaactcactgcaaactcagacaccaagaagatcaccacgattggtaaacgtgaacaatacttgtaataagaacaaaaaagtgtcgaaaggaagagccaaagtgctgaaaacaccaccagatgcaacagatcaggtgaaggatagagcacataaatcatgtttgcttgatgagaaactagataatgccttgaaagctgttcatgaagaagcgacaggttccttatctcaggatctcaggaaactggattccccacggtgtgaggttggcttaagtaaagagcatggacatgatcaaggagatactggaaaaatgttggatgaagtcagtgatgtagaaaacagtaaagaacatgtgggaagcgatgctatggggaattctgaatcatatatgagtacatactgtgtagagccattgccaaccaactctaggttgacagcatattcaagaataaatgagctatcatttacatggaagcactcacaacatgccagttcccttgagaaagttttacttgacattcaaagagataacttcgtgaacaccattgcacgcatccagaaaatcgtccgggatgatccttcagatgtgcttagtgcagatgtaattgaagccactgtacagatagaaattcttaaatggggtttatgccttcaggacaagtgcgcccacaagatagtaaatacaatgttggattatgctaaaaaggtcaaggggagacacaatttcaatactgagatgaggaaggaagagttctctgcaaagctgcaggatctcctgaagtggcagcttaaagaactagaatttaaatacacttccttggaatcagattacaagaaagcaatggctgatgctagcaattttttctcgacatttgaagagcacaggaaaaagttgcatgccattaaggacggtatcaaggacctgcagcaggcctgtatgactaaggacgatgaaatgcaaaaattggcacttcaagtcgctgagcatgcgaccgcatatcagaagtctataatggaaaaggttagggtcaagatggctctgaagagccatgagcagactcttggttacataaaagagcagctagcctctgcggaatctggatcaattgatgtaggggcattggttaagatagagatggataatatgagtagggagattgaactctccaagcaaaatcttctaaatatcaacttcaagaaagagtaaagaaggtgtaagtgtttgcttgaaaaccagattaggaatgctgcttatgtgctataataacctagctatcatatcaattactgcgggagtttgattagatatagggggtgtttgaatgcactagaattaatagttagccgctaaaattagttgagacatccaaacaccctagctaatagttcaactattagctatttttagtaaattagttaatagttacataattatttgttagctagctaatcccactaataatttttagccagctaactattagttttagtggattcaaacaccccataatagtttacatgacatacaaaggttatagaatgccccttgttgttcatgagctgcgggtaagagccacggcccatgggtaaaagccactcccaggaacgcaattgactctacattcttgattgtgtttagtcgatgtgccaccacaattgtggtcctccctgacattattcgatcaagagcctagcaattgctctgactgtgcatcaagcacacttgttgcttcatcaagtagtagtattgagggattccggattattgcccttgcaattgcgattctttgcttctgccccctgagagctgtataccgtgctctccacaatcagtattttttatggagtcattactgtaggtgaactatgtacatgttacatgtacatacggtatatgtttacagttgttgcagccagttctgcacctgttcagctagcaatggcttcaatctatggcagattagtatcatttctctcctaaacatgtctttgcacgcggctattgttggcgggatattttcaaatatctagctgttccggtattttcatatgcaccaagtcatggttatgatgacctctattttccaaggatttgccaattgaagcctcattcatcgcatcgcaaggagtcgatcagaggtgcggggtggcgtgactccaattatctgccaacatcttcgtacgaagctgcaccgcaagaacaagtggacagttttctcctccctttgtcggatgcaattttcacatgtgaacaattcaagatccatgttctttctccttagcagtgacctagtattcagtccagcttccaatagaagccagaagaacactttttgttttggttgacatttcgatgcccacaaccacatgtatgcggggtgtgctagctcttctgcaatcatgtgtttatatgtttttgtgacgaaaatttcagatttccctagatatatgaccatgtgttagtttgaccaatggttggttgtccttgcaaatgggtaatgaggagttggtattgtgggaaagctgtcacggacatgggtgtgtagaacatttgttgagggtgttcaatagcctttgcttgtaatattgttatttccttatgaatggcatacgacaacagttctgaataca

SEQ ID NO: 150915 - DNA, 656 bp, Zea Mays
atggcgtcgtcgtcttctctagcgatcagaagcgtcctaggctgcctgatcctcgtggccctagccgtgtgcggcctgccgtccctaggctcggccatgggcgtgccccagcggcagccaaaccccatcaacttcaccatcggggtggagggcgtcgtctggtgcaagagctgccggtaccgcggctacgtcgagtccagggacgcgtcgccactccggaacgcctcggcgctgctgcggtgccggcatggccgccgggcgctgtccgtgtggagcgccacgaacgcgcacggctacttcctggtccagacgggggcgcaggcggcgcccttcacgagcaggaactgcaaggtgtacgtgccgcggtcgccggtgcgcggctgccgcgtggccgtcagccccggccgcaacaaggggtctccgctcaagttccgcaggttcgtcacgcgcaccgacgggctgcaggcgcgctactcggccggcagcttcacgttcgcgccgcaggaccgctccaagtgtgactgatgaccgcgaacggccctctaatagagacttccaaagggctcgatcgcccgcatcccgtcagggatggggctgtaaattacagtataattaataataagcaaggtcatgaagccgatgtgccttttgtgctt

SEQ ID NO: 150916 - DNA, 1349 bp, Zea Mays
ccctccaatttttaaggggtttgagtttcgaaactagttcggaaacttattccagtttagaagccacaaaatagagaggattgaacgagctaaaatcatttttcatatttaggctcccatactaacccataaataaaaaaaataccgctactgctaatcaactcgacgcggactacagtctctctccatcttctcccccatgccggaagctcaacaaaaacaggcaatgggcaacgcataggcatagcttggctcgcacggtgtcgctggctcccctccccttccctccccactgttacatccagcgagctgttcacggccgtgccgagctcagtgaggcagcgtttgcgagtccgggacgaggggagcggcgggcgacatggggaggggccgcagcgagataaagcggatcgagaaccccacgcagcggcagtccaccttctacaagcgcagggacggcctcttcaagaaggctagggagctctccgttctgtgcgacgtggacctgctgctgctcctcttctccacctccggcaagctctaccactacctctcgcccaccgtcccctccgtcaaggacctggtcgagaggtacgaggccacgacgcacaccaaggtctggaccgacatccgccaggagcggcgcgcggagctggagaaggcggagcagatgtgcgagctgatggagaaggagctgcgggtcatgacggtggacgacggggagcagtacacggtgccgtcgctggagctgctggaacacagcctggaggcggccgtgcgcaaggtgcgctccgagaaggaccgcaagatcggcggcgagatcaactacctcgagaacattatcagaggacgccacgaggagcgctacgggttgtgcaacaagcttgcgcactctcaggcatcgaacaacgagggaggaggagggtcgaccccaccaagcagcggcctggaactcaaactgggtacgccgacatggattcaccagaccactgttttcagtacgtaacctgaatctttctttctgcaaacgagtgcaggtctcaactgacgctggctggctggaaagctcgaggactatgctctgttccttgggtactgtactctgtaggttttggttgagtggttgttgtcagcagttgtccttagatcaaacaagtctcgagtttgatgtgttaatgtactccattattcaggtgggatcaagtacctttgctgctccgattgaagtatattgtttttgttggccgcagaaaaaaaagggctacttttgacaactccatttttacagagattcctattttcataagagaaaatgaaaaaaaataaaatcctttggaaaaaaaataaaa

SEQ ID NO: 150917 - DNA, 1252 bp, Zea Mays
ccctccaatttttaaggggtttgagtttcgaaactagttcggaaacttattccagtttagaagccacaaaatagagaggattgaacgagctaaaatcatttttcatatttaggctcccatactaacccataaataaaaaaaataccgctactgctaatcaactcgacgcggactacagtctctctccatcttctcccccatgccggaagctcaacaaaaacaggcaatgggcaacgcataggcatagcttggctcgcacggtgtcgctggctcccctccccttccctccccactgttacatccagcgagctgttcacggccgtgccgagctcagtgaggcagcgtttgcgagtccgggacgaggggagcggcgggcgacatggggaggggccgcagcgagataaagcggatcgagaaccccacgcagcggcagtccaccttctacaagcgcagggacggcctcttcaagaaggctagggagctctccgttctgtgcgacgtggacctgctgctgctcctcttctccacctccggcaagctctaccactacctctcgcccaccgtcccctccgtcaaggacctggtcgagaggtacgaggccacgacgcacaccaaggtctggaccgacatccgccaggagcggcgcgcggagctggagaaggcggagcagatgtgcgagctgatggagaaggagctgcgggtcatgacggtggacgacggggagcagtacacggtgccgtcgctggagctgctggaacacagcctggaggcggccgtgcgcaaggtgcgctccgagaaggaccgcaagatcggcggcgagatcaactacctcgagaacattatcagaggacgccacgaggagcgctacgggttgtgcaacaagcttgcgcactctcaggcatcgaacaacgagggaggaggagggtcgaccccaccaagcagcggcctggaactcaaactgggtctcaactgacgctggctggctggaaagctcgaggactatgctctgttccttgggtactgtactctgtaggttttggttgagtggttgttgtcagcagttgtccttagatcaaacaagtctcgagtttgatgtgttaatgtactccattattcaggtgggatcaagtacctttgctgctccgattgaagtatattgtttttgttggccgcagaaaaaaaagggctacttttgacaactccatttttacagagattcctattttcataagagaaaatgaaaaaaaataaa

SEQ ID NO: 150918 - DNA, 1231 bp, Zea Mays
ccctccaatttttaaggggtttgagtttcgaaactagttcggaaacttattccagtttagaagccacaaaatagagaggattgaacgagctaaaatcatttttcatatttaggctcccatactaacccataaataaaaaaaataccgctactgctaatcaactcgacgcggactacagtctctctccatcttctcccccatgccggaagctcaacaaaaacaggcaatgggcaacgcataggcatagcttggctcgcacggtgtcgctggctcccctccccttccctccccactgttacatccagcgagctgttcacggccgtgccgagctcagtgaggcagcgtttgcgagtccgggacgaggggagcggcgggcgacatggggaggggccgcagcgagataaagcggatcgagaaccccacgcagcggcagtccaccttctacaagcgcagggacggcctcttcaagaaggctagggagctctccgttctgtgcgacgtggacctgctgctgctcctcttctccacctccggcaagctctaccactacctctcgcccaccgtcccctccgtcaaggacctggtcgagaggtacgaggccacgacgcacaccaaggagcggcgcgcggagctggagaaggcggagcagatgtgcgagctgatggagaaggagctgcgggtcatgacggtggacgacggggagcagtacacggtgccgtcgctggagctgctggaacacagcctggaggcggccgtgcgcaaggtgcgctccgagaaggaccgcaagatcggcggcgagatcaactacctcgagaacattatcagaggacgccacgaggagcgctacgggttgtgcaacaagcttgcgcactctcaggcatcgaacaacgagggaggaggagggtcgaccccaccaagcagcggcctggaactcaaactgggtctcaactgacgctggctggctggaaagctcgaggactatgctctgttccttgggtactgtactctgtaggttttggttgagtggttgttgtcagcagttgtccttagatcaaacaagtctcgagtttgatgtgttaatgtactccattattcaggtgggatcaagtacctttgctgctccgattgaagtatattgtttttgttggccgcagaaaaaaaagggctacttttgacaactccatttttacagagattcctattttcataagagaaaatgaaaaaaaataaa

SEQ ID NO: 150919 - DNA, 874 bp, Zea Mays
gcacgagaacctctttgtccattccacctcccagactcctccagacagcagagcaaccccgaaccgcgcgctgagcgggagcgagtccatcggccgcaatggcgagcgcggaggagctgtgcgagcgcgaggtgctgtggcctgagacggcccacgacgagggagacggcgacgacgcgacgcccagctgcagctcgtcgccgcccgtggcgccgcggtccagaacgccggctccggctccgcgaccgcgaggcggcgtccctgggagcgagaggccgacgacgacgacgcgtgcgggctcgcggccggtggacatccagaggcccgcgagctcggccaggcgccgtggccacgaggacggggaccgcgaccgcgactggagcgccgcgacgatggtgccgcctcacgtgctggtgtcgcggcggcggcaggaggcgccgtgcgcgctgctgcggccgggcgcgcgcgagctcagccacctgcgcgactccgtgctgcgcgtcaccggcttcatcgaaggctgaccatcgtcccctcctctgtttcgcgcacatgcagcagtgttcattcaagcaggactcgtcgactagtcgtctcgtcaccattcaccgttttttttttgggtctttgtagttgtatgatcggcggcgttgcctgtttcgttcgttcgtttcgttcgttcgttcgttttcctgttggtccatgatcacgttgcacctccacttgtaaagggagatgtctgaattcgctacttgcttgatcctccactccacccacttgcattttgggcggaaaacatgtacgtgttcttcgatctgaaaagtccagtctgaatgtctggaagggttaaactcgaggaaaacgtgcagattat

SEQ ID NO: 150920 - DNA, 451 bp, Zea Mays
gtccgcccagcgagcgagcgagcaatcaggcaggcaggcctggtcgcgcgctagctgctcccgctcccgcgccctataaatatatctcgccccacgccgagcgccggacggagaaaggtttgggcaaaaccatcacgcatactctactctactgtagctagctaccaagcgggaaaacatgtcacagaacgcggcgtgggcgcaggccgagcgccggccgctcacggaccccatcgagatcccggccgccacctcggccgcgcgggtcgccgaccgagagacggacgccggcggcgaggcagcggcgcccccgcacgtgctgctggcgcggcgcggggcggcggcggcggcggcctcggtgtgctccggccagggccgcacgctcaagggccgggacctgcgccgcgtgcgcgactccgtcctgcggatgaccggcttcatcgagacctag

SEQ ID NO: 150921 - DNA, 804 bp, Zea Mays
cgaaacaaacaacgggggaaggagatcaagaaacgtacgtcaggccgagcttgtcgccatctggtggcgagccgtcgacaacggatcatgggtgtcctcggtacccttgctagaaatctggacgccctcgttgggccaggggtgatgctgctttatcctctctacgcgtccatgcgcgccatcgagagcccttcttccctggacgaccagcagtggctcacctactgggtcctgtactcgctgatcaccctcttcgagctctcaagctggaaagtcctgcagtggtttcccctgtggccgtacatgaagctgctcttgtgctgctggctggtgctgcccgtcttcaacggcgcggcctacatctacgaggcgcacgtccggcgctacttcaagatgggcacctacgtgagccccagctacggcgagcgccagcgccgggtgctgcagatgatgagcctcgacgcgcgcaagtccgtcgagcgcttcatcgacacgcacgggcccgacgcgctcgacaggatcatccgagccgctgaagaggaagccaagagggagaaacctgaattgttccgggtggaaaccgaagcaagtctcccatcggttgggtagtcacttgtgcagaaatcgtatcgtatgcgtgtgtgtggttgatcattacgtcgggcttgcccagcagttggagaagagatgcccggcgcccatgagagcatgcatgcatatatgactttgaaagaagccgcgaatttggtgtacttgttaatgaaaatttggcttggacctgtgaaatccgtatcagctaaaata

SEQ ID NO: 150922 - DNA, 2547 bp, Zea Mays
aatggttcgactaataatcctacaaatactggctatgaattggtgaaaactcccacagggcccaaagatgatatctttggagatctccctctcctggaattagaaagctccaagactatgtttcgcactggtgttcatgaacttccaactgttattgaggaatcattaataacaaatcaaaccgaagcagattctataccagaagcggtacccttgaagttgatagatgcatctgacattactgctcagacaccatctcctcttgaagacttggtgaaaagtgaagctactgagccaccatgtatctcccacaatgatgtggcagggagtcacccttccactgttgagattgatggtcttccaaatcatatgaacatcaatatggtgaaaccaggtcttggtgatatgcaattgaaatttactgacgtgtctgctttaggttctcattctgttctcaggtcaaaacgtggttctggtaaccctatgcagggttgttttgatgtgaacaaaaactgttctcaggaaatgaaaaaacatggtacaaattctattagcagtccacctgccatgagaaccagacctgaagagactaaatttaaagatgcaccagttaaaggcaagaagagtactgatatcactggtgcagtggttacactacctacgcttgccaaccaactttcctatcaagctagtgtgttgccctctgcagtatcacatacagttttcagcataagagttgattcaaatgacttgtcttcattgagaagtatgcctgccgaggaatgcatcccaactaccagacctggtaacttcagaactaatgtgtgccatggaagtagggaacatgtggatccatatgcggcacaatctactgataaccagggtagctcacactcaaaacttcacccaatttgcagtcctgctaacattggaatggcttttatgaagctaccgggccttgaaagaatggagatctcaaactgcaatgcaaggataggtgaaaacaggtttagtaatgcagagtcaatgaacacagtaagatgtcagaaacaacagttgttgagtggcatgacctatgtaatggaaggtcagaaacagattggtctaagcagctctcaagttgggaaaccaggtctggatggttatgggggccaaggtgatcatcatctgcagcaacccacagttcgtttgatgggtaagaccgtctcagtgtgctcacatggcaaggatcataatgtatggaccatggataaagtcagtcctgacaatgttgccattgaaacaagccgcctatccaatagcacgtcagggcaaaatactactttcagtggccttcataaccaaaggccagaaccaataagtagtgttccaatagtgaaagattgcacttggaattttggtaatcagtttgttcgtcaagctgaactcaataaggcagctataggcagttccaactctcagaccaggcatcttgagctacatcaaccacctcatttgataagcattcctcagaatcaacagtctcatttgtggacacctgcagcacacatgagtaggaaagatcagtgttttgtgggtccagcagcgaaccaatcttctctggttccaaaatcactgctaaatgcaagcatgcaggaaaagtatcagaaatccactttgttgtcttacgatgatcctagttctatgcctattcgccaaccctaccagacacctggtgtaaagtcatcttctggatctgtcatatccttttttgagtatggtgcgaataattctttgtccagaagctcttctcctggactgactctttctcttacaactggtttggctaatgactctatttcagcaggcagagcagcttgtgcaggcagccttacaaatgcagatggtaggaaagctgctagctttgccgaaccaataggcaatagatcagtttatgcagataatgtttcacagcaacctgcgaggccaataagcaacagaacagcttatgcgacagataatgtttcacaacaacctgcaaagagacaagttgttacagatagacatgattttatgtctatgggcccaaacattgtgaaccattcacctggctggtcacttagtgatgcagttggtcctcaggtacttgattttagtaaaagagtagcaagagatgctgttcaaacgtcaagaaatgaaagcaacaatccaagggccagttccggtccagttctgcctattgaaacatggtctaggcctggcgtggttgcaggggctaataacatgttgaagccaggtcaaaacctgaacgatcattccaaactgctatactccacgaaatttcctgttgatagtgctatcaattcagttgtattatagcggaaagcaagaataataataataaggcgtccttgttgaagatagatctggagtttttcaggattcaaacagtcaggcacaggacacttgtaagaggtctacgtttctgaacatgttagtttagcaattgatagattgctttattcttgtaatttccccggtcaaatgtgcaaggttatttgattgttt

SEQ ID NO: 150923 - DNA, 862 bp, Zea Mays
catctctcgccggctgagaagcagctgtgccccgggtgcgaggaagccaggatggccaagcccgctcccgctgagccattctccatacggggttacgccatgaggatgcgagctgtcgacgcggccgagtgctacccgttcgtcggtggctgccgcagcgatgtggagggggaatcaccgccgcggttccgtccgatggacccgaagccgctgtcacggtggtggaagcacgaactcgcggcggggcaggcccgacttttggctggcgccaagggcggagaggctgcggcatccggcggtgggctgcggaaggggaccaagaggaagggctctcgctcgagttccacgggcgagagggccaggaaacggcgacacgtgcttcaatttaggtcctttctgacgaaaaaggtatggctttgcttcatgggtgcatgtgctttagcttggtggactggtagggttttagacttgtagggtgagccacaagcacgttgtactgaacaatcaacaatgtgcaagaaatctggtcctgtaggcatcaaagttgtatgccgtgtactgaacaatgcgcagatagtggcatagtgcaatgcagggtttgattttttttgaatttcctgccgtaggattttgttcttgatcaattaatgctagtggggggagtgttaccatctttaaacattgagcctattaatgaataatgattccccctccctccctgctgagtgctgaggacggcagtacaatctgccaaatcatgttctagaacactgatgagttgtaaaccatatttcaacttatctgaactaaaatactctccaccagctaagcacttccaggaagaaatcatgttctcattatt

SEQ ID NO: 150924 - DNA, 1191 bp, Zea Mays
ggtttaaacgtaaatatttctcgaaaatagaactgaaaaaaaaatcgggcataattctcgcgtcgtttcctgtgacctgtgtgggctggtggcaatcacctacttttgcttggccatctgacatctgtgaggtttagttgcatgcgagatgccacgttcttcatctaggcggcacgtgttggacggctggctggctcatgagccgcgagcccgacaatataaagccacgttcattcccgcagagcccgtcacgcagtttctcgcgccatctgaagtcagctggggcgacgaagaaatgtcctctagcgatcaaaacccagctgccacacccgcgtcgtcgggccccgccgagccctcgccgccgggcaggccaacggcggtgtcctcgcgtgtcctcgacatgggcgcgcagctggcgcaggcgctgaagccggtgcggcagatgaagcagcacgcgtgcagcttcgcgctgtacgcccacgacttgcaccgccaggtggaggtccaccacttcgtcgcccggctcaaccaggacgtcctccagtgcgccgtctacgactccgacaagccctcggcccgcctcatcggcgtggagtacatcgtctccgacaccatcttcgagggcctggccccggacgagcagaggctgtggcactcgcacgcgtacgaggtgaaggccgggctgtggaccgacgtcggcgtgccggaggcgctgcagagctcggagatggcgagcctcgcaaggacgtacggcaagttctggtgcacctggcaggcggaccgcggcgacgcgctgcccctcggcgcgccggcgctcatggtgtcgccgcaggccgccgagcccggccgcgtgcgcggcgagctggtgcgcggccgtgacgagaggtacgggatcgacagctcggcaggggggctcaaggcggcgagggtggagatggacgagccggagtggatcaacccgaacgccgactactggcggctgcacggcaaggggttcgcggtagacgtcgtcccggccgagatgaagcgacacgcgcccttcccgtgagctgccggtcttcttgttgtgacacgtccgtaaggagcataaagatcgttcttgtatccagaggcgtattttgaagaagaagaaaaagagcttgtgttgcgtgcctgctgttgcttctctgtttgcagctgcagtctaaaaag

SEQ ID NO: 150925 - DNA, 1050 bp, Zea Mays
ggtttaaacgtaaatatttctcgaaaatagaactgaaaaaaaaatcgggcataattctcgcgtcgtttcctgtgacctgtgtgggctggtggcaatcacctacttttgcttggccatctgacatctgtgaggtttagttgcatgcgagatgccacgttcttcatctaggcggcacgtgttggacggctggctggctcatgagccgcgagcccgacaatataaagccacgttcattcccgcagagcccgtcacgcagtttctcgcgccatctgaagtcagctggggcgacgaagaaatgtcctctagcgatcaaaacccagctgccacacccgcgtcgtcgggccccgccgagccctcgccgccgggcaggccaacggcggtgtcctcgcgtgtcctcgacatgggcgcgcagctggcgcaggcgctgaagccggtgcggcagatgaagcagcacgcgtgcagcttcgcgctgtacgcccacgacttgcaccgccaggtggaggtccaccacttcgtcgcccggctcaaccaggacgtcctccagtgcgccgtctacgactccgacaagccctcggcccgcctcatcggtacgcgccgccgccgccgccgcgcgcccgttattacaggattattacagctgcgtgactgcgttccgtcccctcacgtacgcaggcgtggagtacatcgtctccgacaccatcttcgagggcctggccccggacgagcagaggctgtggcactcgcacgcgtacgaggtgaaggccgggctgtggaccgacgtcggcgtgccggaggcgctgcagagctcggagatggcgagcctcgcaaggacgtacggcaagttctggtgcacctggcaggcggaccgcggcgacgcgctgcccctcggcgcgccggcgctcatggtgtcgccgcaggccgccgagcccggccgcgtgcgcggcgagctggtgcgcggccgtgacgagaggtacgggatcgacagctcggcaggggggctcaaggcggcgagggtggagatggacgagccggagtggatcaacccgaacg

SEQ ID NO: 150926 - DNA, 1690 bp, Zea Mays
caaaaatagtgaggagtgagaagatgatggactagcttattcctcaaaccaaacacatcattagtgatcggtgagtattgctaacaattgatatcaaaggcaatcattcctcgaccgaaagcatccatggtgtctccttcactagtcgatactcaactcatccaagcgctggagcaccaaacatgggttatcctcgccgagctcgatgccggtgctctagagtctcaggcggtggactccgatcagcaccgcgatgaattctcatcagccctccgcgcagacgtcgaggcacatctcttggcggacgacgcggatctcttggatcggatttactgggaggcctctacgggtagatccagggactccgttcgccccacacctgcgcggattccaggtggtgccgcctctcgacatgacatggccttcgaagactgtgacatcaatgaacagctcgccggagcctgtggctgcctcgacaacctcaccaccacgtcctgtgcccgaggaggtggacgtggttcctgcatcgcccaccaagtgtttgattaattgcttcagctgcaactgtggctctgtgttgcatgatgacattaagattggagctcaaaagtctatgagcgctataggtagagaaaataaggaagtttgatttgagttgaaaacacatggttccaagaggaatggtgaaagggaaatgtgcccttgggtcatttctaagtattttggtgattgagtgccaacacaagtggtcatgtgttaatctatgtcaaataatggacaaagtgcaaatcaagagtaaaggtatgtttctaagacttagtacactgtttttaagactaatgtattgtgtctaagtgctagaaacaggaaaagaccaatttggaaaagacttggctgggcagccaagactctgtgcagtctgggtgcaccggacaatgtccggtgcgccaggctggctctggcgaactggctgctctcgggtttcgtcggtggcgtacggctataaatcaccagactgtccggtggtgcaccggactgtccggtgagccaacagtcggtcgggccaacggtcggccgcgtaatccgcgcgcgacgcgtggcaaagccaacggtcagaagggggcaccggacagtgtccggtgcgccaacgactctgaatctccaacggtcggctgcaccagaataggaaagaaatccgcaccggacagtgtccggcggtgcaccggactgtcaggtgcaccaggcgacagaaggcaagaattgccttcctggaatgctctcaacgactcctagctgccttggggctataaaagggacccctaggcgcatggaggagtacatcaagcattctctaagcattcctaagcaccaagactccaattccgcgcatttgattctttgtgatagcaactagagctccatttgagtagaaaactctttgggttgtgttgtgagctcgagttgtgacttgtgtgcgtgttgtgctctgattttgtgtcttgtgtgcgttgctcatcccatccttacttctgtgcttctttgtgaacatcaaattgtaagggcgagaggctccaagttgtggagattcctcgcaagcgggatatagtaaagtgaaagcaaaacaccgtggtattcaagtgggtctttggaccgcttgaaaggggttgagtgcaaccctcgtccgttggga

SEQ ID NO: 150927 - DNA, 423 bp, Zea Mays
atggtgtctccttcactagtcgatactcaactcatccaagcgctggagcaccaaacatgggttatcctcgccgagctcgatgccggtgctctagagtctcaggcggtggactccgatcagcaccgcgatgaattctcatcagccctccgcgcagacgtcgaggcacatctcttggcggacgacgcggatctcttggatcggatttactgggaggcctctacgggtagatccagggactccgttcgccccacacctgcgcggattccaggtggtgccgcctctcgacatgacatggccttcgaagactgtgacatcaatgaacagctcgccggagcctgtggctgcctcgacaacctcaccaccacgtcctgtgcccgaggaggtggacgtggttcctgcatcgcccaccaagtgtttgattaa

SEQ ID NO: 150928 - DNA, 3135 bp, Zea Mays
gcgccgtgccgccccgcaatggcggcgcccgaccgtgccggtgccggtgccgggggccacctccgcggccacgcgcacctcaccaactgcatccacctccgccaccaccacgggcacgcgcacgggggagcgggggcgggaggcgcgtcgtcgtcgggctggcggcggagccccgcatccgtggcgtctgcgacgctgatgcgcgaccttctcgcgctgcagcgctcgcgatcgctccgggacccgtccacgcgccgctccgtcgagtcgtccagggtggcggccgaccccgacgccggctccggggatgacgtcgatctccccgccaagtcccgccgcagcgccggggcgctcaaggcgctcctggaccagctcgccgagaacccccacccgcatccgaaacccggccgacgcccgccccgccgcttcaaacgccgggccggccgccgcgccaccgctgtcagtaagcctccagaccgcgcggccgcgctctccgtcaactccagctcccaggaggccgtctgcggcaacaagtacttgttccatggaggcggcgatgacgacgatggcgcggaggagctgcagcagcatttgccgcaggacttgcgcaacgtctgtggcattccatggaactggtcgcgtctgcaccaccgcggcaagtctatcatcgacatggccggccgcagcctttcgtgcggcctttctgactccaggtcggcggcggggcgaaagtctgaggctggcgccgcgtcaggtggccacgtcaatgcctcgcgtccccttttccccgctaaatccgagaggctggcctcgtcgaccagttcggactcggacgcgctgccgctgcttgttggggctgcgacctccggtgcgcgcaaccacattggcgccatttctggaagctactctggagagcttgggattttctctaaccagaccagccagatggactccgacctgctctctgagtctcagtcagggcagaagtcacaggcctcgcagcatggccgtggtcgtcaccgtagcctgacgcagaaattcgcaccaaagacgttcaaggacgttgttgggcagagcttggtggtgcaggcgctgtccaacgccatcctaaggaggaagattgggttggtgtatgtgttctatgggccacacggcacgggcaagacttcatgcgcgcgtgtcttcgccaaggcgctcaattgcctctcctctgagcaccccaggccctgtgactcgtgcacggtgtgcatcgcccacaatcttggcaagagcaggagcctgatggagattgggcctgttggcaacatcgacatagatggcattgtggacgtccttgataatgtgatgctttcaccagcaccatcacactacagggtgtttatatttgatgactgtgatactctgccagctgacacttggagtgctatctctaaagttgtggaccgggcgccccgccgtgttgtgtttatccttgtcagtccaaaccttgaacttcctcatatcatcctgtcgagatgccagaagttcttttttccaaagcatagggagtccgacattgtcaatacattgcagtggatttgcaccagcgagagtctagatgttgataaagatgcactgaagctaattgcatcccgttccgatggatctttgagggatgctgagatgactcttgatcaactcagtttgctgggacaaaggatttccttgactcttgtccaagaattagttggcctggtgtctgatgataaactggttgatttgcttgatttggcactatctgccgacacggtgaagacagtgaagacactacgagacatcacagaaaccggtgttgagcctttagcactgatgtctcagcttgccacaataattactgatattcttgctggttcctatgcatttaatcgagaaaggcccaagagaaagttcttcaaacgtcctaccttgtctaaggaagatatgggaaaactacgtcaggccttgaaaatactatctgaaactgaaaagcagttgagggtttctagtgacaagacaacctggcttacagctgctctgcttcagcttgctcctgataaacagtacttgctgcctagttcatcaactagtacaagtttgaaccatggtttgctggttggttcctttcctgataggggtatagggaggtcgtcagcagttgagcataaatgtaacctggcaggcacgtcttatggggaaggaactgttgaacacacagaaaatggtcatgtgttatcaaccagttctgtcaaaggaaatgagggaactaaaaacagaaaagcggacaatgaaatgatctggcaagctgtgcttgagagtatccaatcagatacattgagaaaaatgatggctaaagaggccaggctaaactctgtcagcctaggaacagcaccaacagtgcaactaatatttagttcacgtatcaataagttcaaagccgaaaactacagagctcagattctgcaggcatttgagtctgttcttcattctgcaataatacttgaaatccgatatgaatcaaagaatgacacaaaagcaggtcacgttccatcaatgtttccttaccctgagaatgactcctccaatgtgacactgaggtcctttactaaacatagtccgctctcgtctagaggtgagaatctaattacgaggcttaaaaaggatagtgctgtgaagggagctaactctagtaagactacatggatgcaatctgatccccacatattaacagaaggtgaaataattgaagttggaccttctcacatgcattggcatgctcaaacaaatagtggtgttcttgacataaatggaagaaaaaaggagaatgtatgggaggaagaagcttcatcatcaccaaaccaagagagtgtaacaaatcaaaaaggaagaaatgggaacagacagcgtcaacagaacagcatagtaaaaggaaaggtatctcttgctcatgttattgggagggcagaagcttgttctcaacaaggaggctggtctagacgaaaagctatatcgattgctcaaaagctagagcaagaaaatttgagattggagcctaaatcgagtctactttgttggagaacctcaaggactcgtcggaaggtaatctttcatatttgtatt

SEQ ID NO: 150929 - DNA, 2252 bp, Zea Mays
tcaggcactccggcttgccatttccttcccatctcttgccggcccgggcacggtcagacggtcaccatccgcccgtgcggtggctcggcgcttcccgcgcccgcatcgaagccacccacaccatccacgcgtccctctccggctctccctctcatataccgccccttgcctccgcttcgcccgcccgcccgttgccgtagcttccgtccggaaccgccgcggccggcacgcacccacccgctggcctgacccgctccggcgcatgcggcgagacgccgtcgccgccgcgcccacggcggccggcgcctcgccgccgatccctgccaccgtcctcccgacggatgctgttgtcatcgatgtcgagggagagccgcttccggcggaggcccccgggctggggtgccggatctgccacctcggccctgaggacgatgagtcagcggtgccaggttccgaggtgatgctgctaggctgcggctgcaaggacgagctcggcgccgcgcaccagcaatgcgccgaggcgtggtttaggatcaagggcgataggtatctctcgctccatcctgtcctggaccctgttgctcgctagctttggtatatgcagtgatctggggttgggatgcgggataggtgtttgcgctaattccctaacgagtgctgcaagcctgcaacggtacaggggctgtaggggcgttgtgacttcacctacggtgaatagtgatgacttaactcgttgtaatttgtaaaggactattttgatctgaatattctagggctataccagtttctcagggaaactctagaattcacacggggcagccggaacaatataatgcagtttttactgcaaccctacactaacactagtatgccttttgtgcatcgactatttatttatatctgaagccgcagattcaaatatcgagcattcaagtatactgacgaaagcaaaaaaaaaattgtttttttttggggtgggggtggagaattgatggcgtagatgaagcaaagaactttattcgtgcgctttgtttgctgggcttgtacttttcagtttttgcatcggtgatctgtgactgccttaaggctttatgtcactctcttgtgcaagctgcttgccttttcacatgacactgttataagaccaactgattcagcaaggttttcgtagtttgcagctagcagcactttgctttattgctttatttattatcttcatgctttcacaatatcttattgatgtgtcgttgaatctctggaacttgtgagttgtgacaagtgacctaaagaattttaaagcttcagttgccatgcaggcgctgtgaaatatgtggttcagatgccaaaaacatcaccgggttggaagtgaaaaaattcatggagcagtggcatggccgaagagtggcacacgcacaaactactgaggagagggaaagccattgttggagacagcagcccttctgtaatttcttgttagcaagtttactgattgttttcatgctgccctggtttctccgtgtaaatttattctgattctgctgccactattgggccatgtagattcacagcttgttaacttggttaccctcctaaggatggaatgcgtagataattgttggcacaaccacaacacagctcctcaaatatatatttttgaagaagttcccttttgatatacttatgcttaatctcctggatgcttataaccaactcaaagactactttgacttgaacacttgacgacaggaactcaaactggaaagtgcagggtcgatggctgcttggtagaagaacaattccagaagtatggggcacccagtttgacggtctggcatctcagccatttgggattcagaaatctttactattaattatattgctgtgatccttttgtcaatcagcttctttgccggttaactattttgttctgtgtatacgaggatataagcttaaatccgatgagatgcatgagttcagaggaattttcatgtagtttggcagagaataaggtctcacaaatgcattatatttatgtttggcccaatgaagcagccctttgaactgctctgtttacctttattatgagcctggtacatatttctcgaagacctcttgtacttctctttgcttatatgactcttcagtcatcattgctgccatgagagaggttattgtgttctgaaaatgaagagtgatgtgactaggatatatccaaatgtcactctctcccttaccagagatttaggactctg

SEQ ID NO: 150930 - DNA, 846 bp, Zea Mays
cggtcaccatccgcccgtgcggtggctcggcgcttcccgcgcccgcatcgaagccacccacaccatccacgcgtccctctccggctctccctctcatataccgccccttgcctccgcttcgcccgcccgcccgttgccgtagcttccgtccggaaccgccgcggccggcacgcacccacccgctggcctgacccgctccggcgcatgcggcgagacgccgtcgccgccgcgcccacggcggccggcgcctcgccgccgatccctgccaccgtcctcccgacggatgctgttgtcatcgatgtcgagggagagccgcttccggcggaggcccccgggctggggtgccggatctgccacctcggccctgaggacgatgagtcagcggtgccaggttccgaggtgatgctgctaggctgcggctgcaaggacgagctcggcgccgcgcaccagcaatgcgccgaggcgtggtttaggatcaagggcgataggcgctgtgaaatatgtggttcagatgccaaaaacatcaccgggttggaagtgaaaaaattcatggagcagtggcatggccgaagagtggcacacgcacaaactactgaggagagggaaagccattgttggagacagcagcccttctgtaatttcttgttagcaagtttactgattgttttcatgctgccctggtttctccgtgtaaatttattctgattctgctgccactattgggccatgtagattcacagcttgttaacttggttaccctcctaaggatggaatgcgtagataattgttggcacaaccacaacacagctcctcaaatatatatttttgaagaagttcccttttgat

SEQ ID NO: 150931 - DNA, 842 bp, Zea Mays
cggtcaccatccgcccgtgcggtggctcggcgcttcccgcgcccgcatcgaagccacccacaccatccacgcgtccctctccggctctccctctcatataccgccccttgcctccgcttcgcccgcccgcccgttgccgtagcttccgtccggaaccgccgcggccggcacgcacccacccgctggcctgacccgctccggcgcatgcggcgagacgccgtcgccgccgcgcccacggcggccggcgcctcgccgccgatccctgccaccgtcctcccgacggatgctgttgtcatcgatgtcgagggagagccgcttccggcggaggcccccgggctggggtgccggatctgccacctcggccctgaggacgatgagtcagcggtgccaggttccgaggtgatgctgctaggctgcggctgcaaggacgagctcggcgccgcgcaccagcaatgcgccgaggcgtggtttaggatcaagggcgatagttgccatgcaggcgctgtgaaatatgtggttcagatgccaaaaacatcaccgggttggaagtgaaaaaattcatggagcagtggcatggccgaagagtggcacacgcacaaactactgaggagagggaaagccattgttggagacagcagcccttctgtaatttcttgttagcaagtttactgattgttttcatgctgccctggtttctccgtgtaaatttattctgattctgctgccactattgggccatgtagattcacagcttgttaacttggttaccctcctaaggatggaatgcgtagataattgttggcacaaccacaacacagctcctcaaatatatatttttgaag

SEQ ID NO: 150932 - DNA, 639 bp, Zea Mays
ctgctccttcggccgaccgcgcgtccttctccctctgtgagctagcgcgcccagctcctattctccatgccgagtttcttcttctacagctcgccccagcccggagctctccctgactgcgcgctctgtttctccttgccgagcgccgctcgcccagccgcgaacgcccatggcgcccagcccagtcgatctctctccgcgcgcgttcctgtttctccgtcgccttgttgctcgcccgtctgcgcgcccttcgtccatggtcgccgtccgccgtcgatcccctcacgcaggccgcgagctgtctgttcgccgtagtcgagccgttctcaattgctcgccgtcgaagctcccctgttggctgcatcctgctcgcctttgcgtcgcgcgcatagcttctgttgttctcgcgcgcgcgaagctctttgctcgtcaacgctccagctttagctcgttgcgcgccctgctccctgttgtcgcgagctccagcccggatttcgctttgtcgcccagctcggcactgctcctccctgtgtacatctcacatgactgtctgctctagctcgccgtagtccctgcgcgcgtcgagctttcgtgtggagctctctgctcacgcgcagctcgctctttctttgttgccgc

SEQ ID NO: 150933 - DNA, 1145 bp, Zea Mays
gagacaaacgctacattccgccacctcctctcccaaaggctcgccctccccggctccccctcgtatcttcgccgtcggcgatcaaaatggcggtgcccatgtccgccatcgagtccgcgtggcagctcctgatcgccaacttcaccgagttccagctcgccaccgtcatcaccttcctgctccacgagaccgtcttctttctctctggccttccctccctcctcttcgagcgcttcggactcttcgccaaatacaagatccagaagaggagcaacacctctgcttaccaaaacagatgtgtcttgcgtcttattctgtaccatgtctctgtgaacctgcctgtcatgattttgtcgtaccctgccttcaaattcatgggtcttaggagctctcttcctctaccacattggacggttgttgtatctcaagttcttttctactttgtccttgaggattttatattctactgggggcacagggcactgcatacgaaatggctatacaaacatgttcacagcgtccaccacgagtacgccacaccctttggtttaacttccgaatatgcccacccagctgaaattttgttcctgggattcgccacagttgttggtcctgctcttactggccctcatctgttcaccctgtggctgtggatggtgttgagggtattggagactgttgaagctcacagcggctatcacttcccatggagcccatcaaatttcctgccactgtacggtggctcggacttccatgactaccatcaccgagtgctgtacacaaagtcagggaactatgcctcgacatttgtttacatggactggttgttccggacggacaatggttatcgcaaggcaaagagaccattgaggagcaagaagtgaagaagaagaagaatctgtaaagtgttgaagctgctcatcaacaggactggcgatagagttgcgcctcagcatggaaggagagaaaatggacgcagtcagttattgcctcattgcctgacgaccgatactataggctcctgagatgttgatttctctgtgttttctatgatcaagaacgaggtcctggcgaccttggtctgtcatgaactgaatttgataaaaaaaattgtcatattttctcgggggttttgatctgcgttt

SEQ ID NO: 150934 - DNA, 1115 bp, Zea Mays
gagacaaacgctacattccgccacctcctctcccaaaggctcgccctccccggctccccctcgtatcttcgccgtcggcgatcaaaatggcggtgcccatgtccgccatcgagtccgcgtggcagctcctgatcgccaacttcaccgagttccagctcgccaccgtcatcaccttcctgctccacgagaccgtcttctttctctctggccttccctccctcctcttcgagcgcttcggactcttcgccaaatacaagatccagaggagcaacacctctgcttaccaaaacagatgtgtcttgcgtcttattctgtaccatgtctctgtgaacctgcctgtcatgattttgtcgtaccctgccttcaaattcatgggtcttaggagctctcttcctctaccacattggacggttgttgtatctcaagttcttttctactttgtccttgaggattttatattctactgggggcacagggcactgcatacgaaatggctatacaaacatgttcacagcgtccaccacgagtacgccacaccctttggtttaacttccgaatatgcccacccagctgaaattttgttcctgggattcgccacagttgttggtcctgctcttactggccctcatctgttcaccctgtggctgtggatggtgttgagggtattggagactgttgaagctcacagcggctatcacttcccatggagcccatcaaatttcctgccactgtacggtggctcggacttccatgactaccatcaccgagtgctgtacacaaagtcagggaactatgcctcgacatttgtttacatggactggttgttccggacggacaatggttatcgcaaggcaaagagaccattgaggagcaagaagtgaagaagaagaagaatctgtaaagtgttgaagctgctcatcaacaggactggcgatagagttgcgcctcagcatggaaggagagaaaatggacgcagtcagttattgcctcattgcctgacgaccgatactataggctcctgagatgttgatttctctgtgttttctatgatcaagaacgaggtcctggcgaccttggtctgtcatgaactgaatttgataaaaaaaattgtcata

SEQ ID NO: 150935 - DNA, 1088 bp, Zea Mays
gagacaaacgctacattccgccacctcctctcccaaaggctcgccctccccggctccccctcgtatcttcgccgtcggcgatcaaaatggcggtgcccatgtccgccatcgagtccgcgtggcagctcgccaccgtcatcaccttcctgctccacgagaccgtcttctttctctctggccttccctccctcctcttcgagcgcttcggactcttcgccaaatacaagatccagaagaggagcaacacctctgcttaccaaaacagatgtgtcttgcgtcttattctgtaccatgtctctgtgaacctgcctgtcatgattttgtcgtaccctgccttcaaattcatgggtcttaggagctctcttcctctaccacattggacggttgttgtatctcaagttcttttctactttgtccttgaggattttatattctactgggggcacagggcactgcatacgaaatggctatacaaacatgttcacagcgtccaccacgagtacgccacaccctttggtttaacttccgaatatgcccacccagctgaaattttgttcctgggattcgccacagttgttggtcctgctcttactggccctcatctgttcaccctgtggctgtggatggtgttgagggtattggagactgttgaagctcacagcggctatcacttcccatggagcccatcaaatttcctgccactgtacggtggctcggacttccatgactaccatcaccgagtgctgtacacaaagtcagggaactatgcctcgacatttgtttacatggactggttgttccggacggacaatggttatcgcaaggcaaagagaccattgaggagcaagaagtgaagaagaagaagaatctgtaaagtgttgaagctgctcatcaacaggactggcgatagagttgcgcctcagcatggaaggagagaaaatggacgcagtcagttattgcctcattgcctgacgaccgatactataggctcctgagatgttgatttctctgtgttttctatgatcaagaacgaggtcctggcgaccttggtctgtcatgaactgaatttgataaaaaaaattgtcata

SEQ ID NO: 150936 - DNA, 516 bp, Zea Mays
gggtggacggggctgagcgtcgtcgtcgcgggccgcttgtttgtcgtctctaagtacaagaggatgaaggtcaaggtgtacgccccagagacgaactcatggctcatgggacacggtcggtggcgcctcgatgccccaacgcatcatgatgcccttctcggtcagctgcaccaagagcaggatcgttgtcgtcgggcgaggccggatccatgttgcgattggccttgtgtgggaggagcccgctttcggtcctggtagcagggggccagcctacttcgtccgctagcaggatgtggatgctccataggagttcagcgtcctgacgccttcgagctgccagattctgcatgcttgaaatggctcgttgagcggtcgactgttggaactgcctcctgcccctgctttgatgagatgcgcgattgctgtgtcctgcatagtaggattttttccagtccctgataatccggagagagctggagatgtaaagaaataagtcgacacatttcaaaccggaga

SEQ ID NO: 150937 - DNA, 1000 bp, Zea Mays
aattaaaaaatataaatggaaaaatttcatatgaaaaaaaggcccaacagcagcagccttttactactgctcagctcagacctttccaaactcgcgacccagcgtccatacacacagcagcctttttgttctccccgcgagcgctctctttctctatcgactggcgacgactccgccaccgccgccgctctacgcgagacgcccaggtcttcgccaacgacgagcatccgggttagagaggaagaaattgcaaccgaaacaatggcggcagattccggcgctcgcagacaaccaagcttcaccaaggtcgaccagctgcgccctggaacccacggccacaacctcatcctcaaggttgttgactccaagatggtcgtccagagaggccgcgagggagggccccagggaagacagatgaggattgcggagtgcttggttggtgatgaaaccggcatcattgtcttcactgcaagaaacgatcaagtggatgtaattaggcctggaacaactgttgaactgaggaacgcaaagatcgacatgttcaagggttcgatgcggcttgcagtggacaagtggggaattgtgaaagctgctgaaagctcagctgagtggacagtcaaggaggacaacaacctgtccttaattgagtttgagctggtgaccgtgacggagtgaaaaccgccattgcttaggagtattgttggtttgctgtgttgttgaacctaatcatcatcgccaatcaataaggactcgtggttgatgttctcggcatcggagttgcgtattgctgtaccgttgcttgcttactgtgcgttgtggctacttttgactgctatcgaataataataaattggtgtcatgaagtggaaaatgccatgcgatgatggctactttctgcagcagcgcctgttgttccatgggacgtgatctctttaatcttgcgtcccgtttggatcattggaattgaattccattctaataataataatttagacatata

SEQ ID NO: 150938 - DNA, 994 bp, Zea Mays
aattaaaaaatataaatggaaaaatttcatatgaaaaaaaggcccaacagcagcagccttttactactgctcagctcagacctttccaaactcgcgacccagcgtccatacacacagcagcctttttgttctccccgcgagcgctctctttctctatcgactggcgacgactccgccaccgccgccgctctacgcgagacgcccaggtcttcgccaacgacgagcatccgagaggaagaaattgcaaccgaaacaatggcggcagattccggcgctcgcagacaaccaagcttcaccaaggtcgaccagctgcgccctggaacccacggccacaacctcatcctcaaggttgttgactccaagatggtcgtccagagaggccgcgagggagggccccagggaagacagatgaggattgcggagtgcttggttggtgatgaaaccggcatcattgtcttcactgcaagaaacgatcaagtggatgtaattaggcctggaacaactgttgaactgaggaacgcaaagatcgacatgttcaagggttcgatgcggcttgcagtggacaagtggggaattgtgaaagctgctgaaagctcagctgagtggacagtcaaggaggacaacaacctgtccttaattgagtttgagctggtgaccgtgacggagtgaaaaccgccattgcttaggagtattgttggtttgctgtgttgttgaacctaatcatcatcgccaatcaataaggactcgtggttgatgttctcggcatcggagttgcgtattgctgtaccgttgcttgcttactgtgcgttgtggctacttttgactgctatcgaataataataaattggtgtcatgaagtggaaaatgccatgcgatgatggctactttctgcagcagcgcctgttgttccatgggacgtgatctctttaatcttgcgtcccgtttggatcattggaattgaattccattctaataataataatttagacatata

SEQ ID NO: 150939 - DNA, 1038 bp, Zea Mays
aattaaaaaatataaatggaaaaatttcatatgaaaaaaaggcccaacagcagcagccttttactactgctcagctcagacctttccaaactcgcgacccagcgtccatacacacagcagcctttttgttctccccgcgagcgctctctttctctatcgactggcgacgactccgccaccgccgccgctctacgcgagacgcccaggtcttcgccaacgacgagcatccgtttatatacaattgcaaaccccagattacgagctacagggttagagaggaagaaattgcaaccgaaacaatggcggcagattccggcgctcgcagacaaccaagcttcaccaaggtcgaccagctgcgccctggaacccacggccacaacctcatcctcaaggttgttgactccaagatggtcgtccagagaggccgcgagggagggccccagggaagacagatgaggattgcggagtgcttggttggtgatgaaaccggcatcattgtcttcactgcaagaaacgatcaagtggatgtaattaggcctggaacaactgttgaactgaggaacgcaaagatcgacatgttcaagggttcgatgcggcttgcagtggacaagtggggaattgtgaaagctgctgaaagctcagctgagtggacagtcaaggaggacaacaacctgtccttaattgagtttgagctggtgaccgtgacggagtgaaaaccgccattgcttaggagtattgttggtttgctgtgttgttgaacctaatcatcatcgccaatcaataaggactcgtggttgatgttctcggcatcggagttgcgtattgctgtaccgttgcttgcttactgtgcgttgtggctacttttgactgctatcgaataataataaattggtgtcatgaagtggaaaatgccatgcgatgatggctactttctgcagcagcgcctgttgttccatgggacgtgatctctttaatcttgcgtcccgtttggatcattggaattgaattccattctaataataataatttagacatata

SEQ ID NO: 150940 - DNA, 746 bp, Zea Mays
aattaaaaaatataaatggaaaaatttcatatgaaaaaaaggcccaacagcagcagccttttactactgctcagctcagacctttccaaactcgcgacccagcgtccatacacacagcagcctttttgttctccccgcgagcgctctctttctctatcgactggcgacgactccgccaccgccgccgctctacgcgagacgcccaggtcttcgccaacgacgagcatccgtggatgtaattaggcctggaacaactgttgaactgaggaacgcaaagatcgacatgttcaagggttcgatgcggcttgcagtggacaagtggggaattgtgaaagctgctgaaagctcagctgagtggacagtcaaggaggacaacaacctgtccttaattgagtttgagctggtgaccgtgacggagtgaaaaccgccattgcttaggagtattgttggtttgctgtgttgttgaacctaatcatcatcgccaatcaataaggactcgtggttgatgttctcggcatcggagttgcgtattgctgtaccgttgcttgcttactgtgcgttgtggctacttttgactgctatcgaataataataaattggtgtcatgaagtggaaaatgccatgcgatgatggctactttctgcagcagcgcctgttgttccatgggacgtgatctctttaatcttgcgtcccgtttggatcattggaattgaattccattctaataataataatttagacatata

SEQ ID NO: 150941 - DNA, 1030 bp, Zea Mays
aattaaaaaatataaatggaaaaatttcatatgaaaaaaaggcccaacagcagcagccttttactactgctcagctcagacctttccaaactcgcgacccagcgtccatacacacagcagcctttttgttctccccgcgagcgctctctttctctatcgactggcgacgactccgccaccgccgccgctctacgcgagacgcccaggtcttcgccaacgacgagcatccgggttagagaggaagaaattgcaaccgaaacaatggcggcagattccggcgctcgcagacaaccaagcttcaccaaggtcgaccagctgcgccctggaacccacggccacaacctcatcctcaaggttgttgactccaagatggtcgtccagagaggccgcgagggagggccccagggaagacagatgaggattgcggagtgcttggttggtgatgaaaccggcatcattgtcttcactgcaagaaacgatcaaggttctcccaactctttccccatcccctcacaatatcttacactcaatctaacagcatatcactctttgtgtatacgcctagtactaatccagtcaatttaacaacatattactgttttgtatgtgcgactagtactaaattttctagtcttgtggttcattcatctcagcgtcacctattctgtctgatgtggttgcgttgtgtataaccttaattttccatgccttcggttatattctccttagttaagttataaagtccataattctccttagttaacttataatgttcataatctttatttgctggtacagatctagcgtaagttgaattcatcatctgttgcatgttctgttctgttttcctatgctgatagcagtaaccatatcaacccaaccttgcttctaatctgatcaaacattattggttcctattataggaaggaatcatatgaaatgctaagatatatgtcatgttctttaccattaccattcaatagttgcatttgttcagttctaggcatgtattccgcttttctttaacaac

SEQ ID NO: 150942 - DNA, 2232 bp, Zea Mays
atatgtgcatgttctttcgctcgatgaagagttttctcagctggttccgtccgcccggatgttataacgcctagctatatatagagagaatcatacatgatgataatgaagggatgccaatgcatacccggtgccggtactgatgttataacgcccggttgtatcttgttgagattgagacgaactaaactgaaattcggaattaagcgataactagatttgattttttgcatccatccaaacaggaagggaagcgataactatcagtagttccattcctttccttccctttccctcctattagttacaagtactaatggcgcacggcagcgcggaagcggcgacgacgttgcagttgcagaggaggaggagagccgagcggccgagccgaggaggaggattccgatgggcgatggacacgggattgggctggaccgctgtagtaaatagtagttgtagaaatttcagccactggcccagcccatccgtagcaggcgtcagcgcaactcaggcaaacaacggaacggaaaccccggccgtcactgcgccagagctggagacagagatcatggtgcgggcatgggggcggcggacggcgctgcctccgctcctcatccttggcctcctccgcctgcactactcctcgctggtcgtcgcccaagaaggacaagaaaaagaccctgctactttgttcgcacaagcctcagggatgatggacctgaggaagtatgatggggcgcttggcctgctaaatgctgtgttggaaattgacccaaatcattctgaggcttataggcagcgtgcatccgtgcttcggcataaatgcagatacgaggaagctgagagggactataacaaacacctggagctaagtcctgggtctgcttcagtggtgaaggaattatcccagcttctgcaggctcaaaattcattacaatctgcttatggccaattcgattctggagacttctcaaaagtcgtggaatacatcaacaaaattgtgctggttttttctccaggttgcttaaaggcaaagcttctcaaggctaaagcattgctagcactgaaagactactcaagtgttatttcagagaccggattcattctaaaggaagatgaagacaacttggatgcactgctattacgtggtcgtgcctactattaccttgctgatcatgatgtggcctccaggcactaccagaaagggcttcgtcttgatccagagcattccgaattgaagaaagcatatttcgggttaaaaaatcttttgaagaagaccaagagtgcagaagataatgctgccaagggtaagctacgtgtgtctgttgaggactacaaggcagctctagcaatggatccagaccatactgcttataatgtacatctttatcttgggctgtgtaaaactctggttagacttgggagaagtaaggaggcaatcagcacttgtacggaagcactgatcatagacagtgaacttgttgatgcgcttacacagagaggtgaagctaaacttctctcagaagattgggaaggagcagttcaggatttaaaagaggccgcccagaaatctccacaggacatgggtatccgtgaagcacttatgagagctgaaaagcagcttaagttgagcaaaagaaaagactggtataaaatccttggtgtttcaaagacagcatcagctgcggagataaaacgcgcctacaaaaagctggcgttgcagtggcatccagataaaaacgtggataaccgggagaaagcagaaaacatgtttcgagaaattgctgctgcttatgaggtgcttggtgatgaagacaaacgtgtaaggtatgaccgtggagaggatgtggaggagatgaatatgggaggcgggggtggcttcaatccttttgggggaggcggccagcagtacacgtttcaatacgacggtggcttccccggcggcggcttccctggaggtggcggctttcagttcaactttggataaactgtgccatgcaccatgacattttcttggcactggaattgttttaggaattcttaacggcagctggtagctattcttaggcaggctgagactgttctactatgttacataataatgacaagtgttacgattttttccttcatcatttgtttcctgcttacatacacacgcacacattgtctctctgatacatcagttgaatgtaagaatggaaataaagttactttttttttcttggggaggat

SEQ ID NO: 150943 - DNA, 1445 bp, Zea Mays
accagtcatccgagatcgatcgctcagctagctagcattagcaagatgcattcgcagcacctatacccactaccacaccggcgtttgagcaacacgatgataggctacctgaacctggtgacgctggtggcatccatccccatcatcggtgcagggctgtggctggcccatggctctgcggcggtgacatgcgaatccgcactgcagacgccgctcctagccatcgggttcatcgtcctcctcatctccctggcgggcttcatcggcgcatgctaccatgtgacatgggcgctgtggctctacctcctggccatgctgctgctcgtcctcgccctgctcgggatcacagtctttggcctggcagtcacggccggcggcggcggcggcaggcaagtgcccggcaggccctaccgggagttccggatcacagattactcggcttggctccagaggcatgtcgaggtcgatcgctactggcgggcagcgctcgcatgcgtggtcgggtcaagagcctgccccaggatagccgcctggactcccctggactacctccagcataatctcacgccgatacagtctggatgctgcaagccaccgacatcatgcacatacaacgagcaaggcatacccatcgctgcgccggcgcaagacgaggaggactgctaccggtggaacaatgcccccagcgtcctgtgctaccagtgcgactcgtgcaaagccggagtgctggagcaggtgcgccgagactggcacaccatcaccatcctcaatgtcatcgtccttgttctactcatagccatctactcctgtggctgctgtgctttccgcaatgctcgccgtgccgactacacatacggtggcatgtcgtccaagaccaatccacgatgggattacttctggtcaaggtggtggaatggccatagagagcagctgtattaattagtgatgctataggctagtagtatgtttaagtgataactaggtgtatgcccgtgcgttgctacggagtcaagatataatggtaaaatacattgagatgtgaagtattatgatgccctctactctctatataaatccatggtgaagagggacctccgcacctgtcttcacagtgaaaccatgtgaagctctggcagctcccgcatgaaaagaaaggcaggattcagtttctcaatgtcgacggttgacgcctttctgtatcgtgtcctccaatgtttcattgttcactgcactctgcacagagtggacctattggaagagattactgcaccatagtcaatggacagtagagcactgtggatttctaagcaggacatcatgatttccacctgggcaaacaatgacacagtggagccaccaaagcccagaatcctgaaatacacaatatggaaggaatttaagatctttacagaaccagaggaaacgaagagtaataagctgacttt

SEQ ID NO: 150944 - DNA, 1128 bp, Zea Mays
accagtcatccgagatcgatcgctcagctagctagcattagcaagatgcattcgcagcacctatacccactaccacaccggcgtttgagcaacacgatgataggctacctgaacctggtgacgctggtggcatccatccccatcatcggtgcagggctgtggctggcccatggctctgcggcggtgacatgcgaatccgcactgcagacgccgctcctagccatcgggttcatcgtcctcctcatctccctggcgggcttcatcggcgcatgctaccatgtgacatgggcgctgtggctctacctcctggccatgctgctgctcgtcctcgccctgctcgggatcacagtctttggcctggcagtcacggccggcggcggcggcggcaggcaagtgcccggcaggccctaccgggagttccggatcacagattactcggcttggctccagaggcatgtcgaggtcgatcgctactggcgggcagcgctcgcatgcgtggtcgggtcaagagcctgccccaggatagccgcctggactcccctggactacctccagcataatctcacgccgatacagtctggatgctgcaagccaccgacatcatgcacatacaacgagcaaggcatacccatcgctgcgccggcgcaagacgaggaggactgctaccggtggaacaatgcccccagcgtcctgtgctaccagtgcgactcgtgcaaagccggagtgctggagcaggtgcgccgagactggcacaccatcaccatcctcaatgtcatcgtccttgttctactcatagccatctactcctgtggctgctgtgctttccgcaatgctcgccgtgccgactacacatacggtggcatgtcgtccaagaccaatccacgatgggattacttctggtaataatgaggaggagtatgtgtttaagggatcgatgtgcatgtatcaacatttttctgagttgtggttttggtgcatgcaggtcaaggtggtggaatggccatagagagcagctgtattaattagtgatgctataggctagtagtatgtttaagtgataactaggtgtatgcccgtgcgttgctacggagtcaagatataatggtaaaatacattgagatgtgaagt

SEQ ID NO: 150945 - DNA, 107 bp, Zea Mays
ttttttttttctatctacattcattcaaatgataataaatataaacatacatgcaaactacattcatatgttacttaatgaatgtgtaattagtctaggacagaggg

SEQ ID NO: 150946 - DNA, 397 bp, Zea Mays
tttccaaatcgatgcaaggtcaacatccatgcaacggtttactcctggtttcaacaaagagacgttgctgcatctggagattacagtcagtcaggtaaacattgcattgcataacggcattatactacattacacagctgagcaagtacatcacatgactgaatggatttgtcttgtccggcttcgctattgctactactaacttgcccaaaaaaactaaaagagagagagagagagagagagatagaggatggattaatttttcaagatagagagatagattgactgatgagtcaagcgatagattgattgatgagagtctagctagacctatcactacagtactactgatggatgacctaggaggaagaggaagatagggataggaagcaggggg

SEQ ID NO: 150947 - DNA, 486 bp, Zea Mays
atatatagagggattggggatgaaatttgtgattttttgcaatttttttcgaattttttggactccaaacggtcaaaaacggctagttacaacggctagcacacgtggaccaatcagatcgcgacacgtggaccaatcagatcgcgccacgtcgctctcgcccgcgctctcgccccgcgctctcgccccgccagtgcctcgcctccctctcgcctccctctcgcccgcctctcgcccgggcgggcgctccagcgcgggcgagagcgaggcgatatcgtccgctctcgccgggcgccagcgccatcgcccggcgccggcctctcgcccgcctatcgcctgcgcgcgggcggcagcggcctcttctcgcccgcactggcaccagcctaaggaaagcaaacatccatcacgcatcccatagctaagggaatactgccacatgtatacaagtcgtcacgattgagacctgcgcagtagaattttttttta

SEQ ID NO: 150948 - DNA, 2525 bp, Zea Mays
cctctgttctctcgcatgataatcatcatgccaagaaaagattggtgccactagattggatcttggacaaggaggaggaagagaaggaggaggaggaggaggaagagatgctgcagcgggcagcgagcaatgcatattcatggtggtgggcaagccacatccgcagcaaacagtcaaaatggctcgacaaccacctccaagatatggaacacagggtgaagtgcatgctcttgctccttggggaggaggctgattccttctcgaagagggcagagatgtactacaagaggcgacctgaggtgatcactcaggtggaagaagtataccgtgcatacaaggctctggctgaccggtatgacatcatgtcaggggagctacacaaagcaaaccacaccattgccactgcctttcctgaccaagtccagtatgcaatgctggaagaggaggaggacaacatcccaaaggcgttcaccccagtggatccacgcaaaatccacaagtcaactgtcgatgggttgatgatgaagaagaataagaagaatcctgggcggtccatggacgatggaggagaaaagaccactcctctggtggcagtcagtaaggagaatgcacgggaagagatcagcaggctacagaaagctatactggtcatgcagactgagaaagaatttatcaaaagctcctacgagagtggcatcgcaaagtactgggaccttgagaaggagatcaacgacatgcaggaacaggcttgccacttccaagataagtttgatgaaagcgccgtgatcgaggatgacgaggccagagccctgatgacagcgactgccctcaagtcctgtgaagacactatcgtcaggctgcaggagcagcgcaaggcatctgcgcagcgcgcggtgggagaatcggaaagggtcagggttctaagagacaagttcgaggctataatgaacaagcatggcagatctctaccagctgtttctctggaggaggagagaaacactcgaaagaaccactgcccggaggagacgatggaaagtgtccatgtcaaacaagaagttgcggtagacatagtagctgacaagatcaaggaacactttgagaggggctgcgacatctccatcgcacaagtcacagagaggatcgatgaagtcgtcaacacggtcgttgacttggagctcatggtttcatcacaaacctctcagatagaccggctttgtcaggaaaacaaggagctggagagttccctgcaaagcctggaggatggatcagcagatgaactgaccgagaagcttatcaggcaagcagaagaggagcttgtcagggctcaggctctcgaaagctccttccacaaagacgagagcacaatccgttccaatttcgtagaagcgataagcaggttccatgacgtgtcggagttgctgctatcgccagtttgcgattctgcacacacgtcccatgacgtgccggagtcgtctatggaggagattgctgaacaaccccatgcagaggcagacaatgcactcgtggcagccaaaagtgaatcatcatcatgcatggagatggagcaacagctcgacgttgcccaagacaaaatttcatgtgacgatcatgggacctcactgcttgaggacgccaagagaaagcttgcagagatggagcaaaagaaccaggattgcctgaatgaaatccgggcactccgagaacaaatcacgagctgctcctgctctcgccggggtcacaggaggagaccttccatttcaagtgacgcctccattagcctgctcaagggcccgacgctgtcgaccatcgctgagaacgcctcacctctccaagacaagttcagaagggacatagacacgctcttggacaacaacctggagctgctgatgaagttcagctcgtcgctacagcgggtgcaggagttccagagcaagcacgacggcttgcagcacctcatcaaggaccaagacggcggcaagcaggacgggacgacggagaagcagctgagggccttcaagacggagctgcaggtgtggtcggagcagaacgcgatgctgcggggggagctgcagtgcaggttcgcgtcgctgtgcgacatacaggaggagatcacggcggcgctggacgaccaataccaggccgccaagttccagggggagatcctcaacatgcagcaggagaacaacagggtgtcggacgagctgcaggcggggctggaccacatcaagggtctccatgcggaggtggagcaggcgctggccaagctgcacaagagcgtcagcctgccgccacagcaagcaggggacgacggcggcggcgactccagctcgcctgcccatggtggcagcagtagcaacctggggctcgtaccttccaacaagtccaatgttccgttgcagtcgttcctcttcccggccaagcccaccccggccaagcccaagaagacgtctctgctggcccgtgtcacgccagtgctcccgaagcagccggtggacatgaggtttctggccaagctgccaaggtag

SEQ ID NO: 150949 - DNA, 2528 bp, Zea Mays
ttatagtatttgcgagccaactccagggaagagaagcgagatttatttattttttgtcgtttttgactatgtggtgcaccaaataaatgaaacacgcttggctggtggtattacgacctatacttatgatgatgcccagcgccccagccccttgcttcccttcttgcatttgctgatgctcctgaagccttctacatatccgtgaagcatggcgttgaaggtgccggaggaaaagctatatcagcagcattattgcagtctgctcattacgatcagttgaatgtgcttctggacaaggttataacgaaacttgatggaactgcctgcacatttccaggattgacaatgagttttcttatatgattcaagtaacgaagtcatgcaagtgttttagcagcattatagattaatgtgatgatactgatgtcacacttagagccaggctttgctaggcagctttgcgttcacttcttcactcacagatttcatcatataggcaccatggctatatttggttagttgagttgctcctttcaaaaaacttgaagaaatagatggttctatatggtctaaaatccaaaagcttctagaggaaattggagttgccggtagccaagacctatcatgttcagaagtctctctgcctgtttgtatgctttgtggacttctaaagtcaaagcacaatttcattaggttgggattcctgtatgtgctggacaaatttcttatgcgttgcaaactattattggatgacagtgatatgcaagaccacacaacttctgatcatagcaagaattgtcttgataaagcttttgcagttatagatattatgaatagttctttgttacttgtggttcaggacaatgagacggaccatatcaacatcttaaaggtaaattccttattgtcttaaaatttcggtgcacatatcaagcatacatacaagtcagcatcatttacgtatggtatcagttgccttacaagttaaaggtgacttaagttttcaaaaaagtggatcggctacacccttctttcttttagtgttaaaaaacatatttgggttagtcctctttctgttcagtaggttttactgcatgcaacaatcgttcaatcacaaaggattttatgataaagttcgatgaattaggcttttcaagtttcaatgttcttaatctcagaattcaaaagtaattaataatgtacatactattactttcctttattattgattaaaaattagaaaagattgtttggaatcggttgaatttcttcaaatcggtttattattctggacctcctacataatgaggtactgaaatttacaccgatagcctaaaattgattatctgtgattcacaccttcctctttcagatgtgtgatatgctgttccctcaattatgcctgagaattccatccacaaatgcgatgcatgtcaggggccttcagtcccttggtcaactttttggttgtacatccaagaacatcgataatcatttggatgcccttgcatcacaccaaagtgttggaaacaagaatctttgccagagtgagacattgcaagatatgggcatggatcaatctggtcaacccactttattctgcgaagcatcaatggcaacactactgagaggacttgcaatagctcccattcagcttagcccgtgtaccaacttctttatttttctggccattgatacagcctgaaggggcagccagcgatgacattgcattgggtattgctgttggtagcacaggaagaggcaaccttcctggttctacatcagatattcgagcagcgcttcttttacttttgattggtaaatgcacagctgatcaggaggcactaaaggaggtagaaggcaatggggttcttcaggggccttctggatgacacagattcaagggtagcatatactattctgctgcttttcttttgaagagaatgatgacagaggaactagagatctaccaacggatgcttgaaagcctcatctcaaaagctcaacagatgctatgcgtgtgtttggttgcaggtcctgtggtagcctggcttactacatgccttcccgcatggagatggttgagcatacatgcatcgatgcaagttacgtatttgtgaaagtcttttacctgcatgcagggatacgcgtgaaatggccgtacgtgatgggccatgctcacatgagcccggctacacggacaggcatccaatcaccacctatgtgaatgatgtaaattatcgatgggggcatgtacatgcctctgaatttgtttgtttattctttgttagactagtcactgtccaagagagtcactgtggataatcctgtgttatggacagagacacaattctacaattttgtattgctgaaccattcattgagatcttgcatttgcatgtatggtaactgaccaaaggcgtgtatgtttgtaattgctgattttttttttgcaatttagccctttttcgaaacaattttacgtttggatctctaaatgatataatgttatttttggaccctttatt

SEQ ID NO: 150950 - DNA, 1327 bp, Zea Mays
ggagaagcgcttctgggtggcctccttcctcgtcgtatgggcagcagcgctgcagggccacatgatgtggatgcagcgccaggacaccttcaagcacaagtttggtatcgaccaagcagacggacccgatgctcaggattcctcatcttcgtcttcgtcttcctcttcttaatgtgtgatatgctgttccctcaattatgcctgagaattccatccacaaatgcgatgcatgtcaggggccttcagtcccttggtcaactttttggttgtacatccaagaacatcgataatcatttggatgcccttgcatcacaccaaagtgttggaaacaagaatctttgccagagtgagacattgcaagatatgggcatggatcaatctggtcaacccactttattctgcgaagcatcaatggcaacactactgagaggacttgcaatagctcccattcagcttagcccgtgtaccaacttctttatttttctggccattgatacagcctgaaggggcagccagcgatgacattgcattgggtattgctgttggtagcacaggaagaggcaaccttcctggttctacatcagatattcgagcagcgcttcttttacttttgattggtaaatgcacagctgatcaggaggcactaaaggaggtagaaggcaatggggttcttcaggggccttctggatgacacagattcaagggtagcatatactattctgctgcttttcttttgaagagaatgatgacagaggaactagagatctaccaacggatgcttgaaagcctcatctcaaaagctcaacagatgctatgcgtgtgtttggttgcaggtcctgtggtagcctggcttactacatgccttcccgcatggagatggttgagcatacatgcatcgatgcaagttacgtatttgtgaaagtcttttacctgcatgcagggatacgcgtgaaatggccgtacgtgatgggccatgctcacatgagcccggctacacggacaggcatccaatcaccacctatgtgaatgatgtaaattatcgatgggggcatgtacatgcctctgaatttgtttgtttattctttgttagactagtcactgtccaagagagtcactgtggataatcctgtgttatggacagagacacaattctacaattttgtattgctgaaccattcattgagatcttgcatttgcatgtatggtaactgaccaaaggcgtgtatgtttgtaattgctgattttttttttgcaatttagccctttttcgaaacaattttacgtttggatctctaaatgatataatgttatttttggaccctttatt

SEQ ID NO: 150951 - DNA, 816 bp, Zea Mays
ggagaagcgcttctgggtggcctccttcctcgtcgtatgggcagcagcgctgcagggccacatgatgtggatgcagcgccaggacaccttcaagcacaagtttggtatcgaccaagcagacggacccgatgctcaggattcctcatcttcgtcttcgtcttcctcttcttagtcagttaccttgtatcgtctgaagcggtttgttcggaacaaatgagacatccatcctttaataaagcgggcgggagagaaggcagatgacaagacaagtgcagtgtgtgtaaccactaccaggcgttcctttgatgaatgtcatttttcttctctttagtcctgaataaattctgataccatatcttttgggtgtgggatgcaaaactctgctagcttatcattgccacaaactcatgtatttgagttgtgttttatagattgaagtgcactttccagcaggtttcatagactggacagtggactgccgttggttgtctctcggtgagtgtggaacccactttcatcacaatccttaagcacatccatccctacaggatcagtcagcctgactattccataactcctgaaatatttgagaaacaagtggggcgatttcatatttcattctacaagtgtagtgtgcctgaatattacctggaaccagcaggtaggaccaaaagcaattaagaacaaaggaaccacagatggatgccaggcacaaggcactttatgtacaagtgtagtagctattagcaaaggacacttgcctggttggatctgtgggtgcgaccacaaatgcacagtctctggtagcatgaccta

SEQ ID NO: 150952 - DNA, 525 bp, Zea Mays
ggagaagcgcttctgggtggcctccttcctcgtcgtatgggcagcagcgctgcagggccacatgatgtggatgcagcgccaggacaccttcaagcacaagtttggtatcgaccaagcagacggacccgatgctcaggattcctcatcttcgtcttcgtcttcctcttcttagtaggtccatccccttgcttctgcttgtgatgtaatgtactcgtagctgggtagttcagttcagcaagtaacaatatcctatacagcacaacacccatcagtgagctttcgctatactgtatctgtctattcctcaaataaatcatgtcagttttttttggtttcctccatcatcaatattaactcgtaatttcagttcatatatttacatataggtatattaactagtggtgtgtaattgtacaacaacagtaggttggctggcaccagtagcatctttttttttggatgatgagaattcactcgaaatatgttgcaatgtaccttttcaactggatggaacactatactact

SEQ ID NO: 150953 - DNA, 1126 bp, Zea Mays
cctgcctgcacgttaatcaatcctgtggcctggcctggcctatatatacacaccatactagcatgcgtaatatatatgcgttataacagcagagcagaggtcaacaagacgagacaagagaatgcctgtgagcaggatcgccgtgggtgctccgggcgagctgtcccaccccgacaccgccaaggccgccgtcgccgagttcatctccatgctcatcttcgtcttcgccggctcaggatcgggcatggccttcagtaagctcacggacggcggcgccaccactcccgccggcctcatcgccgcgtctctggcgcacgccctcgccctcttcgtggccgtctccgtgggtgccaacatctccggcggccacgtgaaccctgccgtgaccttcggcgcctttgtgggcggcaacatcagcctcctcaaggccctggtctactgggtggcccagctcctgggctccgtcgtcgcctgcctcctcctcaagatcgccacgggcggcgcggccattggcgccttctcgctgtcggcgggcgtcggcgccatgaacgccgtggtgctggagatggtcatgaccttcggcctcgtgtatacggtgtacgccacggccgtggaccccaagaagggcgacctcggcgtcatcgcgcccatcgccatcggcttcatcgtcggcgccaacatcctggcggggggcgccttcgacggcgcctccatgaaccccgccgtctccttcggcccggccgtcgtcaccggcgtctgggagaaccactgggtgtactgggtcggcccactcgcaggcgcggccatcgcggcgctcgtctacgacatcatcttcatcgggcagcgcccacaccagcagctgccaaccacggcagcagactactgatgaccatcatcatcatgcactgaataattaagaccagaccactcaatatatatacatatgaagaataacatgccaaatctcatctcctagctagcaacttgattctccatatatttcttaaatacaaactaaactcgattgagtatagcttggtatgaaaccacatgtgtgtgatgttattttgtccttgtggtaatttgtacatctctatctctatcatattaaagcatcaatttcgac

SEQ ID NO: 150954 - DNA, 1528 bp, Zea Mays
caagaagaggcaccgacggacgcatcgcgtgcccttctcccctcccctcgtgcgttgacaaaaaagaaagtgaagtgaagaatcaaccaacaatggccggcggaatccaccgaccacaatgctgattttgtttgagccatctggactggactggaccctataaaaaacagatcagatctcccccaccctcgcttccccagcctgcaggttgtcgtcgccctcttcctcctccttcgctgttgctgttgctgttgcttccgcttccgccgccgccgccgcggaaatcaaactaatctgatcgagaccacaccgttccagagagatcccccaaacaaaaaaagagcacgggatcgaaatggagctcgacggcaagtacagcaaggaccagagcctcaaatgcgaatgcctcctcttcgacctcgatgacacactatacccgttcaactccggcattgctgccgacataaagaagaacatccaagactatatggtgcacaagctcggcgttgacgaggccataagcttggacctatgcgtcctcctctacaagcagtacggaaccaccatggctggcttgagggctgttgggtaccagtttgattacgatgactaccacagctttgttcatgggaggttgtcttatgacaaaatcaagcctgatcctgtgcttaggaacatcctcctcagcttacccattcgcaaacttgtgttcacaaacggtgacagaacacatgcttcaagggccctcaagaggcttggcattgaggattgtttcgaaggagtcgtgtgctttgagacactgaacccgacatctcctcctcctcctgtcccagctcaggaacttgaaatctttgatctaatgaagcatctggctcatccacagcccgcggtgcagctaccaaaatcacctatcctatgcaaaccgtcaagggaggccatgctgcaggctctcaaggtcgcctccattaatccacagacaactatattgttcgatgacagcttcaggaacattgaagctgcaaagcaaattggaatgtgtactgtcctggttggaacatctgagcggaaaaagggtgctgaccatgccttggaaagcctccacaacatgaaggaagcactgccggagctgtgggaggaagctgagaaggatgaagatgtgaggaattcgagcaaagccggaatcgagacatctgtgatcgcgtaatcttttttgttccttggttacaaatgtagccccttctgttttccttggaggacaacacgaggtggtggtgtatgaaaaaagaggagacctcctcaaggggtgggggggactgactgatactacgaccactgatgttacaccccgtaaactattactatccaataagaatgttttcttcttcaactatctaggatggtcattttgttggtgtttagttaaagcagctatccaatatttttttggatccaaatgtgtatgtcctcgctacttggttcttcatgcttatgaatgtggagtgatgatgtcctgttgtccttggattca

SEQ ID NO: 150955 - DNA, 772 bp, Zea Mays
gctagtagtcgcgccagcagacgagcatggagacgcagcgccggacgatgtagaagcgcgcgcggtgctccttcaccgcctccacgcacttcttggacagccgcgacgacgacgacgacgacgacgacgacgactccgctgggcaggcggcggcgcctgcttagctgcctgtggctgctgcagtactggtgcctgctgcagtactcctgctgctgctcacgctggccgagtagctccggctgagcacgctccccgcggcggcgtccatggcgtgcggcctgccggatctgctccgccccttcttggacagcctccacctgtcgtccccggccccggctgacgaggacgaatccatccggatgccggccggctggtgtatctatgtatggctgtgtcggcggcaaactctctctgcctctgcctctgcctgcctgagttggtgagggaatgtgcagtggctgcctgctgcctagatttatatagagagaagagagaagagactcaaggactgagagctagcgcttcctcatccctgccctctcacgctcggtggcctcagtcactagctggatcgagtgactcagctactcaagaataacaatggaatgcaatgcaatgcaatggaatggagaggtacgtagaaactccacaccagcagagatggagatgaggaacaagagtaggaggaattgatgaaattgctggttggagtacctgcacgtgatgatgggaggggaaaaaaaggaaaggggaatgagctgagggaagatgg

SEQ ID NO: 150956 - DNA, 636 bp, Zea Mays
gttgtacaggtagtggtacgcctggccgctgaccatgggcaccatgccgacggcgacgccgtgcaccggtgtgggtgcgaagatgtggtcggacggggacggaccctgcccccgcatccgcttcacgtacaaccggtacttctgcaggtggctggccacgttctcccgcgtcagaccttccacgttcatcagctccatgatggtcttgggcaccgccttcttgatccccaggtgcgccaccacgtccacgaaccgcttgtgcagctgcggcgtccaaaccagccggggccgtctgttgctgttcgtggtagtcgccgccgccgagtccgccccttcgccccccctcgcctcctggtggccgtggggggaggaggaggtgcccggcgacgacggcggcgcgcgccgcagccgcgccaccgtggcttcggacgctcggtgcaggtccagcagggtgcgcccgggctccggcgggatgcggaacgccgcggccagccccggcggcaccagcggctgcgagagcggggtcagctcgtcggcgccagggagccccgactcccactccatcacgcgctcgtcctcgtcgctgccgtagcacaccatgtggagctcgtagtcgtccaccgcctcctcgcccat

SEQ ID NO: 150957 - DNA, 1713 bp, Zea Mays
ctgatgacctcttttttttacatacccaaatacacaatgactggtgggtcctcctccattttccccacctactacttcctctgctcgcggctcgccttcgtcggatcggatccacagcaagcagcaacagcctgcagccggcagtcctcgcctccgcctcctccaccctgaccgtcaacagaggaagacgaggatgtcgggatccaaggtgtacaccctcgaggaggtggctaagcacaacaccaaggacgactgctggctcgtcatcggcggcaaggtgtacaatgtgaccaagtttctggaggatcaccctggaggcgatgatgttctgctgtcttccactgccaaggatgctaccgatgatttcgaagatgtggggcacagcagcactgcccgtgcaatgatggacgagtacttagtgggtgagattgatgcagccacgatacccaccaaggtgaagtacacgccccccaagcagccgcactacaaccaggacaagacccaggagttcgtcatcaagatcctccagtttttggtccccctcgcaatactgggtctggccgtcgctgtaaggatgtacaccaagtcggaatctgcctagtctcttgtcatcaacgcttcaaacatcattcacaaactgaataagttagtgttgaaatgctgcaaagatcattaattctgaaacttgagtctttgctgtcgtgtgagacgtacgtctattagtataaaatcacttctatttttccttctttccttggaatgttttgatttaccttgttgttgtttgggtttggctaagctttttaacgttcaaaaatttatattacaatagtggcacgatccacatgatgaaacacagcgtatgtgcataaaaaaacagtaatccacaggatgaaacacatgtgtgattgttattgtttgggttgagtcgtatggactaactaggtcatgagatgtgcaacatgtctcttggcttgtggtacgtaggtgtgaagtctagaggtgatggctgacagagaaggtgagggtaaaggtcttgcaggctcgtgtggatgaactaggagcggtgaaagatgagtgatgggacttgactgagagactggagaagccaggtggttaactgttgtgactgacacctagggacaccaatatatgcaacgacatgacataacaaaacatgttgtcgatatagtcgaggactaacatgacacgtgtccagggtcagggagacacgtatgaaatacgctacctgcaacgatttggtggttgggcctcaatcacccaacaactattttatgggtttgaccttaaaattcacccaacaactattttatgggtttgaccttaaaattcggcggctcagttctagagggaatcagcggcaccacatggagtcatcatggaggttgcgtctcaaatctgtgaaggaagcatggctatcatagcatcggattaagagttagatcattatacccctgattaagtagtttagctctaaatatcagcatgttgggaatgtaaaaatcccctctatataaataagaggtgggctaccctccaactagccatctctctggcctttattttgcatttagttttttatctttcattgttagggagattctcaaatgttttagagaaaaaatttgcatctgcgtatttttagatacaagaaccgtgaccctaaccaaggcgtttccatctgagttctta

SEQ ID NO: 150958 - DNA, 851 bp, Zea Mays
ctgatgacctcttttttttacatacccaaatacacaatgactggtgggtcctcctccattttccccacctactacttcctctgctcgcggctcgccttcgtcggatcggatccacagcaagcagcaacagcctgcagccggcagtcctcgcctccgcctcctccaccctgaccgtcaacagaggaagacgaggatgtcgggatccaaggtgtacaccctcgaggaggtggctaagcacaacaccaaggacgactgctggctcgtcatcggcggcaaggtgtacaatgtgaccaagtttctggaggatcaccctggaggcgatgatgttctgctgtcttccactgccaaggatgctaccgatgatttcgaagatgtggggcacagcagcactgcccgtgcaatgatggacgagtacttagtgggtgagattgatgcagccacgatacccaccaaggtgaagtacacgccccccaagcagccgcactacaaccaggacaagacccaggagttcgtcatcaagatcctccagtttttggtccccctcgcaatactgggtctggccgtcgctgtaaggatgtacaccaagtcggaatctgcctagtctcttgtcatcaacgcttcaaacatcattcacaaactgaataagttagtgttgaaatgctgcaaagatcattaattctgaaacttgagtctttgctgtcgtgtgagacgtacgtctattagtataaaatcacttctatttttccttctttccttggaatgttttgatttaccttgttgttgtttgggtttggctaagctttttaacgttcaaaaatttatattacaatagtggcacgatccacatgatg

SEQ ID NO: 150959 - DNA, 1465 bp, Zea Mays
ctgatgacctcttttttttacatacccaaatacacaatgactggtgggtcctcctccattttccccacctactacttcctctgctcgcggctcgccttcgtcggatcggatccacagcaagcagcaacagcctgcagccggcagtcctcgcctccgcctcctccaccctgaccgtcaacagaggaagacgaggatgtcgggatccaaggtgtacaccctcgaggaggtggctaagcacaacaccaaggacgactgctggctcgtcatcggcggcaaggttacatctttttcttcttctctctctatctggctgtggaattcggaaggatccatccctccccttgccttgctgggtgggaactgggatcttcccatcttcccttgatcagaattatcattaagattcgttagatgcctcctggaatcgagatcgagattgagaagcaacgggggaggtaggcggtgggtggtgacctaacaaatcattgaggcgagagggtggctcctactgtgtgtgctttgccttcatatggttttactagtatcagctgtcactgacgttgctagttttgcttccaagaataagcattccatatattccctatgcctatgggacttaatcacccttgcaatgataacactgctgtgcgtgcacacacacacacacaatgtggcactttcatgaccatcattcactaacacaccaagcaaccatgatttgtcttcactttgtggttatcattataggttgggttccctgctgctcagatgtttcatcctcactcttttttttaaaaaaaaagacatctctctactctcaacataatgtcgataggaagaaacatatatatcttttactgaccatatactggccttactctctcctgggtacctggtgaaggtttcttcggtagcaaagcttcatatgatgaacaaagtgaacccttttctgtctgtttgtaggtgtacaatgtgaccaagtttctggaggatcaccctggaggcgatgatgttctgctgtcttccactgccaaggatgctaccgatgatttcgaagatgtggggcacagcagcactgcccgtgcaatgatggacgagtacttagtgggtgagattgatgcagccacgatacccaccaaggtgaagtacacgccccccaagcagccgcactacaaccaggacaagacccaggagttcgtcatcaagatcctccagtttttggtccccctcgcaatactgggtctggccgtcgctgtaaggatgtacaccaagtcggaatctgcctagtctcttgtcatcaacgcttcaaacatcattcacaaactgaataagttagtgttgaaatgctgcaaagatcattaattctgaaacttgagtctttgctgtcgtgtgagacgtacgtctattagtataaaatcacttctatttttccttctttccttggaatgttttgatttaccttgtt

SEQ ID NO: 150960 - DNA, 588 bp, Zea Mays
ctgatgacctcttttttttacatacccaaatacacaatgactggtgggtcctcctccattttccccacctactacttcctctgctcgcggctcgccttcgtcggatcggatccacagcaagcagcaacagcctgcagccggcagtcctcgcctccgcctcctccaccctgaccgtcaacagaggaagacgaggatgtcgggatccaaggtgtacaccctcgaggaggtggctaagcacaacaccaaggacgactgctggctcgtcatcggcggcaaggtgtacaatgtgaccaagtttctggaggatcaccctggaggcgatgatgttctgctgtcttccactggtaataaagctacatactcctcatatcaggtctttgaagttggtgaatgaaggtgtcatttcaaattttctgttgatacaaaatgcagccaaggatgctaccgatgatttcgaagatgtggggcacagcagcactgcccgtgcaatgatggacgagtacttagtgggtgagattgatgcagccacgatacccaccaaggtgaagtacacgccccccaagcagccgcactacaaccaggacaaga

SEQ ID NO: 150961 - DNA, 1554 bp, Zea Mays
cctccagtctgctctcaccaccaccatagatcgatccttgagttgacgaaaacatacacagctgctagctaatcctgccgtgagtgcaatgcatgcgaagatgacgaagcccgcagccatcgttgttgctgctatcgccgtcctctccgtcagcctgctggctgggtcgtcgtgccttgcccttgcgcggcccagcggcgacttctccatcgtgggctactcagaggaggacctgtcgtcgcacgagagcctggcggagctgttcgagcgctggctgtcccgccaccgcagggcgtacgccagcctggaggagaagctccggcggttccaggtgttcaaggacaacctgcaccacatcgacgagaccaaccgcaaggtgagcagctactggctgggcctcaacgagttcgccgacctcacgcacgacgagttcaaggccacctacctcggcctacggagcagtgttggcgatggtggtagtggtatcgatgacgacgacgagccggaggaggaggagggctacgagggtgtggacggggcgagcctccccaagtcggtggactggcggagcaagggcgcggtgacgggggtaaagaaccagggccagtgcggcagctgctgggccttctccacggtggccgccgtcgagggcatcaaccagatcgtcacgggcaacctcacggcgctgtcggagcaggagctcatcgactgcgacacggacggcaacaacggctgcaacggcggcctcatggactacgccttctcctacatcgcacacaacggcggcctccacacggaggaggcctacccgtacctcatggaggaaggcacctgccagcgcagcagcagcagcgagaagaagtggccgggatcgtcggaggacgccaacgacgatgccgcggtggtcaccatctccgggtacgaggacgtgccgaggaacaacgagcaggcgctgctcaaagcgctggcgcaacagcccgtcagcgtcgccatcgaggcctccggcaggaacttccagttctacagcggcggcgtcttcgatgggccctgcggcacgcagctggaccacggggtagcggccgtcggctacgggacggcggccaagggccatgactacatcatcgtcaagaactcgtgggggcccagctggggcgagaaggggtacatccgcatgaggaggggcaccggcaagcgccagggcctctgcggcatcaacaagatggcctcctacccaaccaagaactgaactcagatcatcgattcatcgtcaagcagcagctggctgattactcccactgctggcgctccacgcttcactagttcttcgtcgttctccttcacttccattgttttcaagattggacgatctttcgttgtttgaaatgaaataataatgatgatggaattagtgttccccaagttcgaacaaattaagtattgttggagttttcgttggaacaactgtagtctgtagtcagagtgagccccaaatcagggcagttgcttttgaacataacattgttaaatacttggcttaagtctttcaaaggagac

SEQ ID NO: 150962 - DNA, 743 bp, Zea Mays
ctgcttgattaccatgaatggtacgggaagggcatggctgccaccggcgctggggcaatggtgattccgctgtctctggcactttccacgagcaagatcatcgcagagagtgtgcctgggcgcgctgcagggcacacgacggccggccccgaccatcgcggccacagccatggggacacgccatggacgagcggagcgtgagcttgagcgaaatccgagcagggaaagagctccggccggacttggcagaggaagcagagaaccaggcgtggccacaggggagggatacaggcgaggaaccgcggcacgcagggacgctcggccggacgctgcaagcagagagagggacgagccgaaggaggagcgagcaaggaggagcgtgcagccatggaggaatcttgggcgcggcaaggaagctctagggagcagggagggcgcacggctggagagagatgggggaaggagagaggagcggcgcggctggagcagcaatgccgcggcagggaaggagctcgacgccggagcaagagaaggaggccgcagtccgaacgctggcgagcagggagaggaagaagctccggcaggcgtgctcccgtgggagaactagagagggcgagcgtggagctagagccgtgcgtaggagaagctggatgctggagagagaacacagcagggagaaagatagagacgcgcgcgcagggaggaacggctatggagcttgggctagcggctgttgcaaggac

SEQ ID NO: 150963 - DNA, 1394 bp, Zea Mays
ccacagctgcataccaacctacaattgtcacttccattttctcaataccttaagcaaggaccaatgtctcaagcccagccccctcgttcccaagcccagtggaaacacgttaaatttcaggataaccaagctaatgccatgaaggaaccaggaaccggtgggtatggctatgggacgaaaaatgacaagaataaggatgtggatacaatagcttcggacttcatcaagctgaagcacaaggcttgggcactccagaagagcacaaccatgtaccaaccttctacctaaagccttggatatttgcggatgcggagtgaagttaccatggcatccttgctaagaataagaaagtaatgtggttatgaggagatgtgtaattttgtggcgatattatttgcaacaatgatgtatatatgggcatgtttggttcacggctaactgtgacacactttgcctaaggttagtcgttcgaattgaagaactaaccttaggcagaaaaagttaggcaaagtgtggaaatttatgcagcaaaccaaataggcctatagttttactgctagttaatttgcttctatttggaaatcggaatagtaaagcatcgagcaaggttttcaaattgtccgattaatcgtcctttgcatgaactcaattagggactccgacccgattaggatgccttatcgtccaatcgtccgagtactcgtcacctaatcataactaatcgtccagtttggtagctactcggccaggaatatggaaagtcacctgactctgtctgggtccaaaaaaaatggcgcattgtttccattatggcgccctattgatttgggttattaaaggaactgattacctgattggctggctttccaaatcccaaattcctttccttatttcatctctctctcttctacttcctggctggccggctgctgcttcttttgtttcctggcgtttcctccattcctcctccctaagaaaaaagccggctgctcctcctccctgaccaactccggtggcgctggcgcctccctgatcaagaaacaccggcaacttcaatctgaacaacttcggcgactcctctatgatcaagacctgaggaagatgagcacctcatctaaaggtaccgtgatccctgtccctgatcaagctttgatttgagtgcagtacagaagtagtacaccatggatcaagcattcagtttgctgatcgcccacgtcatggtttgagactttgagtgcagtttgcattcgtttgtgtttgagactttgagtagagtttgcattagtttcgtttgaggtgctactcaaggtgattgctactctgctgtaatgctgtttgatactttgagtactgctaaatagctactgctgtttgagttggtactttgattactg

SEQ ID NO: 150964 - DNA, 710 bp, Zea Mays
ccacagctgcataccaacctacaattgtcacttccattttctcaataccttaagcaaggaccaatgtctcaagcccagccccctcgttcccaagcccagtggaaacacgttaaatttcaggataaccaagctaatgccatgaaggaaccaggaaccggtgggtatggctatgggacgaaaaatgacaagaataaggatgtggatacaatagcttcggacttcatcaagctgaagcacaaggcttgggcactccagaagagcacaaccatgtaccaaccttctacctaaaggtgtcaatagttcaagaagttgatactatatacttatgcttgtctctgtatagtctataagtcctaattcaaataacaggtgctgcttgcagccttggatatttgcggatgcggagtgaagttaccatggcatccttgctaagaataagaaagtaatgtggttatgaggagatgtgtaattttgtggcgatattatttgcaacaatgatgtatatatgggcatgtttggttcacggctaactgtgacacactttgcctaaggttagtcgttcgaattgaagaactaaccttaggcagaaaaagttaggcaaagtgtggaaatttatgcagcaaaccaaataggcctatagttttactgctagttaatttgcttctatttggaaatcggaatagtaaagcatcgagcaaggttttcaaatt

SEQ ID NO: 150965 - DNA, 619 bp, Zea Mays
ataccaacctacaattgtcacttccattttctcaataccttaagcaaggaccaatgtctcaagcccagccccctcgttcccaagcccagtggaaacacgttaaatttcaggataaccaagctaatgccatgaaggaaccaggaaccggtgggtatggctatgggacgaaaaatgacaagaataaggatgtggatacaatagcttcggacttcatcaagctgaagcacaaggcttgggcactccagaagagcacaaccatgtaccaaccttctacctaaaggtgctgcttgcagccttggatatttgcggatgcggagtgaagttaccatggcatccttgctaagaataagaaagtaatgtggttatgaggagatgtgtaattttgtggcgatattatttgcaacaatgatgtatatatgggcatgtttggttcacggctaactgtgacacactttgcctaaggttagtcgttcgaattgaagaactaaccttaggcagaaaaagttaggcaaagtgtggaaatttatgcagcaaaccaaataggcctatagttttactgctagttaatttgcttctatttggaaatcggaatagtaaagcatcgagcaaggttttcaaa

SEQ ID NO: 150966 - DNA, 606 bp, Zea Mays
ataccaacctacaattgtcacttccattttctcaataccttaagcaaggaccaatgtctcaagcccagccccctcgttcccaagcccagtggaaacacgttaaatttcaggataaccaagctaatgccatgaaggaaccaggaaccggtgggtatggctatgggacgaaaaatgacaagaataaggatgtggatacaatagcttcggacttcatcaagctgaagcacaaggcttgggcactccagaagagcacaaccatgtaccaaccttctacctaaagccttggatatttgcggatgcggagtgaagttaccatggcatccttgctaagaataagaaagtaatgtggttatgaggagatgtgtaattttgtggcgatattatttgcaacaatgatgtatatatgggcatgtttggttcacggctaactgtgacacactttgcctaaggttagtcgttcgaattgaagaactaaccttaggcagaaaaagttaggcaaagtgtggaaatttatgcagcaaaccaaataggcctatagttttactgctagttaatttgcttctatttggaaatcggaatagtaaagcatcgagcaaggttttcaaa

SEQ ID NO: 150967 - DNA, 816 bp, Zea Mays
gatgaagatgcaaatgagagggcaacttatgataaaaaagaaaccacaaaaaagggcaacgtggtcattgaagaaatagtggatgaatttaaagacgaagaagaaaagaatgaaattctggtaagcactcaggatagtgggatcatgtttggatcacaagaagaggttgatcagaaagaagaagctgagaaagatatgaggaatcccaaaaacaaaaagcaggttgaagaaaagatgtgtgctaaaaaagaggatagaagggttagtgaaagacttaagaaggacgcgggaatcagaatcgagaagaagaacagaagaatagctgctaaaaggaatttggaagagctagaaaaagacaagggtaaagaggctgcaccctatatgcaagatgatcatggcagcaattctgatttcttatataatgaggaagggtctgaatcagacggcttcattattgttcaatctagaaagaaaaagagagagaaaagacttggcattaaaatatctcctattggaaaaggtcaggaaaatcctgatccaaatagaaagaaaaccaaaggtgctgggaaaatccctgccacaaatgaaaaacaaaccagcaagggtactatgaccgaagagattaatgagaatgttcttaaaaagtttgaccctgatggtgattttctttggaaatggtccccatctactgggaaatctggtggaagtctaattggtgttagaaccaaccagtttgacgttggggctttctttcaaggaaagcatatgctgcaattagatctctgggataaatccatatgttcaaatggaatataa

SEQ ID NO: 150968 - DNA, 1011 bp, Zea Mays
tcgacggacgccatggctcctgcccgtctgcttctgcagttgctggctgctatgtgcgcggcggcggcggccacccagaaagctgatcctgcggcgcgcggcttgcgcccgctgccatccaactaccgcgtgctcacccagggaaggtacaagaggaaccaggagctgacgtgcccggaccccaggacgaagcagccaggctgcatggtgaagtgcgagtcccgctgccccgaccagtgcatcgtcgtctgccccggctgcaagacctactgcatttgcgacttctaccctggcatgtcgtgcggcgacccgcgcttcacgggcggcgacggcaacaccttctacttccacggcagcagggaccgggacttctgcgtcttcaccgacgctggcctccacatcaacgcgcacttcatcggcaaccacaacccggccacgagccgcgacttcacctggatccaggcgctgggcatccgcttcctcgccgaccaccgcctctacgtgggcgcccagaagacgaccgccaggtgggacagcgacgtcgatcgcctcgagctggccttcgacggcgaggccgtggccattccggcgcacaccggcgccgcgtggcggcccgccgcggcgcctgcgctcaccgtcacgaggacggccgcagccaacggcgtgagggtgcgtctggagggggtgctggacgtcgtggccaacgtcgtgcccgtcagcgaggaggactcccgcatccacgcctacggcgtgacggaggacgacaggctcgcgcacctggacctggggttcaggttcttcgggctcaccgacgacgtgcacggcgtgctcgggcagacctaccgctccgactacgtcagccgcctcagcgtgagctctaagattcctgtcatgggcggcgcggccgagtacctctcctcggatatcttcgccaccgactgcaccgtcgcaaagttcggcgacgaccgtcgtgccggcatctccatgctcgcctctgccggggcctattaa

SEQ ID NO: 150969 - DNA, 1844 bp, Zea Mays
tgacggcgaggaacggctccgtgggcgcctccgatgacgacgctctccaggatgctgccgcggttgcgctcctccgccacgcgcgccctccgcaaggtgttcggactggaacccgcggcgccgccgcgacggctccccgcccctgaagccttcgtcgcgtctgagagatcactcctgcgccctcttcctggcctggacctcccgccgtgcctccccgacaacctgagccgcagccccacccgggtcaccacgctccccaacggcctccgcgtcgccaccgaggacatcccgggtccttctgcgtgcatcggtttcttcgtcaactccggctccgtctacgagtccggggagaccaccggcgtgtcatacctgctggagaggatgggcttcaaggacaccaagcaccggagccacctcagcatcgtgagcgagctcgagcttgccggggccagcgtcagcgtctccgcctcccgggagcagatggtctacagctacgacacactcaagggatacatgcccgaggctctcgagatcctcatcgactgcatgcgcaacccgctcttcctccaggaagaagtccaacggcagctggtccttgctcgagaaggattccaggagctgcagaggagccctgaaagatttctccatgaacagcttaacattgttggattttcgggtgctcttgcgaatccactaatagctcctgagcatgtccttgctagaattaatgacaggattattcaaaagttctatcatgaaaattttactgctgatcgtgtggttctagcagcagcaggtgttgatcacgaacacatgctaggctatgcagattttttgttgaaagattggcacaggggggccccaatggaaaagccaaagtctacatatgttggtggatattccaaacacagagcttattcagatatgacagatgttgcattagcttttgaagtgccagggggctggtttcaagagagagacgccgcgattatgactgtcatacagactttaatgggtggtggtggttcattttccactggtggtcctggaaaagggatgcattcacggctttctctacgtgtcctaaataaatatcactttgtcgagtccctttctgcatttagtaatgtatatgacaacactggcctctttggtatctacttgaccacgtctagtcaccatatcatgtggcaaaggctgttgatatcgcaataagtgaattaattgctgttgcaactcccggagaagtgacagaggttgaactgcgacgagcaaaaaactcaacgatttcatctgtattaatgaacctcgaatctagggtagttgttgcagaagatattggaagacagatgttatcttacggtagcaggaagcctatggacaacttccttcaacgtatggaaggaattactctagatgatgtcgcaacatttgccaggaagatgctagcttcacgacccacaatggttagctggggagatgttgacaaagttcctccatatgaatctatttgcaagcggctacgataagtacccctacacaatgacctctggttgactttgaaggatccttccgttgaaaactaaacaatcgcttgtatgaagtgccctagctcaggaactgcttttctttggggcattcaatttagtgagcttaggatttcagcagctacgttcagttgtaactgttccatagtagattaggaagactggcgatcatttttatgtccattttctgcgactatggatagcaggagtattctgctggcctgaattcccggtgtaaacggcttctgaaattttgaatcattgataaactaatagtgtttggtttgaggaaatttt

SEQ ID NO: 150970 - DNA, 963 bp, Zea Mays
acttcgacgtaatggatagtctttgctcatcttgctgtcttatgcagatgacagatgttgcattagcttttgaagtgccagggggctggtttcaagagagagacgccgcgattatgactgtcatacagactttaatgggtggtggtggttcattttccactggtggtcctggaaaagggatgcattcacggctttctctacgtgtcctaaataaatatcactttgtcgagtccctttctgcatttagtaatgtatatgacaacactggcctctttggtatctacttgaccacgtctagtcaccatatcatgtggcaaaggctgttgatatcgcaataagtgaattaattgctgttgcaactcccggagaagtgacagaggttgaactgcgacgagcaaaaaactcaacgatttcatctgtattaatgaacctcgaatctagggtagttgttgcagaagatattggaagacagatgttatcttacggtagcaggaagcctatggacaacttccttcaacgtatggaaggaattactctagatgatgtcgcaacatttgccaggaagatgctagcttcacgacccacaatggttagctggggagatgttgacaaagttcctccatatgaatctatttgcaagcggctacgataagtacccctacacaatgacctctggttgactttgaaggatccttccgttgaaaactaaacaatcgcttgtatgaagtgccctagctcaggaactgcttttctttggggcattcaatttagtgagcttaggatttcagcagctacgttcagttgtaactgttccatagtagattaggaagactggcgatcatttttatgtccattttctgcgactatggatagcaggagtattctgctggcctgaattcccggtgtaaacggcttctgaaattttgaatcattgataaactaatagtgtttggtttgaggaaa

SEQ ID NO: 150971 - DNA, 1869 bp, Zea Mays
caacaatccaaacgccacaacctcaacctccacttcttttttcccgtctcccctgagctccgatgacgacgctctccaggatgctgccgcggttgcgctcctccgccacgcgcgccctccgcaaggtgttcggactggaacccgcggcgccgccgcgacggctccccgcccctgaagccttcgtcgcgtctgagagatcactcctgcgccctcttcctggcctggacctcccgccgtgcctccccgacaacctgagccgcagccccacccgggtcaccacgctccccaacggcctccgcgtcgccaccgaggacatcccgggtccttctgcgtgcatcggtttcttcgtcaactccggctccgtctacgagtccggggagaccaccggcgtgtcatacctgctggagaggatgggcttcaaggacaccaagcaccggagccacctcagcatcgtgagcgagctcgagcttgccggggccagcgtcagcgtctccgcctcccgggagcagatggtctacagctacgacacactcaagggatacatgcccgaggctctcgagatcctcatcgactgcatgcgcaacccgctcttcctccaggaagaagtccaacggcagctggtccttgctcgagaaggattccaggagctgcagaggagccctgaaagatttctccatgaacagcttaacattgttggattttcgggtgctcttgcgaatccactaatagctcctgagcatgtccttgctagaattaatgacaggattattcaaaagttctatcatgaaaattttactgctgatcgtgtggttctagcagcagcaggtgttgatcacgaacacatgctaggctatgcagattttttgttgaaagattggcacaggggggccccaatggaaaagccaaagtctacatatgttggtggatattccaaacacagagcttattcagatatgacagatgttgcattagcttttgaagtgccagggggctggtttcaagagagagacgccgcgattatgactgtcatacagactttaatgggtggtggtggttcattttccactggtggtcctggaaaagggatgcattcacggctttctctacgtgtcctaaataaatatcactttgtcgagtccctttctgcatttagtaatgtatatgacaacactggcctctttggtatctacttgaccacgtctagtcaccatatcatgtggcaaaggctgttgatatcgcaataagtgaattaattgctgttgcaactcccggagaagtgacagaggttgaactgcgacgagcaaaaaactcaacgatttcatctgtattaatgaacctcgaatctagggtagttgttgcagaagatattggaagacagatgttatcttacggtagcaggaagcctatggacaacttccttcaacgtatggaaggaattactctagatgatgtcgcaacatttgccaggaagatgctagcttcacgacccacaatggttagctggggagatgttgacaaagttcctccatatgaatctatttgcaagcggctacgataagtacccctacacaatgacctctggttgactttgaaggatccttccgttgaaaactaaacaatcgcttgtatgaagtgccctagctcaggaactgcttttctttggggcattcaatttagtgagcttaggatttcagcagctacgttcagttgtaactgttccatagtagattaggaagactggcgatcatttttatgtccattttctgcgactatggatagcaggagtattctgctggcctgaattcccggtgtaaacggcttctgaaattttgaatcattgataaactaatagtgtttggtttgaggaaa

SEQ ID NO: 150972 - DNA, 1701 bp, Zea Mays
caacaatccaaacgccacaacctcaacctccacttcttttttcccgtctcccctgagctccgatgacgacgctctccaggatgctgccgcggttgcgctcctccgccacgcgcgccctccgcaaggtgttcggactggaacccgcggcgccgccgcgacggctccccgcccctgaagccttcgtcgcgtctgagagatcactcctgcgccctcttcctggcctggacctcccgccgtgcctccccgacaacctgagccgcagccccacccgggtcaccacgctccccaacggcctccgcgtcgccaccgaggacatcccgggtccttctgcgtgcatcggtttcttcgtcaactccggctccgtctacgagtccggggagaccaccggcgtgtcatacctgctggagaggatgggcttcaaggacaccaagcaccggagccacctcagcatcgtgagcgagctcgagcttgccggggccagcgtcagcgtctccgcctcccgggagcagatggtctacagctacgacacactcaagggatacatgcccgaggctctcgagatcctcatcgactgcatgcgcaacccgctcttcctccaggaagaagtccaacggcaggaaaattttactgctgatcgtgtggttctagcagcagcaggtgttgatcacgaacacatgctaggctatgcagattttttgttgaaagattggcacaggggggccccaatggaaaagccaaagtctacatatgttggtggatattccaaacacagagcttattcagatatgacagatgttgcattagcttttgaagtgccagggggctggtttcaagagagagacgccgcgattatgactgtcatacagactttaatgggtggtggtggttcattttccactggtggtcctggaaaagggatgcattcacggctttctctacgtgtcctaaataaatatcactttgtcgagtccctttctgcatttagtaatgtatatgacaacactggcctctttggtatctacttgaccacgtctagtcaccatatcatgtggcaaaggctgttgatatcgcaataagtgaattaattgctgttgcaactcccggagaagtgacagaggttgaactgcgacgagcaaaaaactcaacgatttcatctgtattaatgaacctcgaatctagggtagttgttgcagaagatattggaagacagatgttatcttacggtagcaggaagcctatggacaacttccttcaacgtatggaaggaattactctagatgatgtcgcaacatttgccaggaagatgctagcttcacgacccacaatggttagctggggagatgttgacaaagttcctccatatgaatctatttgcaagcggctacgataagtacccctacacaatgacctctggttgactttgaaggatccttccgttgaaaactaaacaatcgcttgtatgaagtgccctagctcaggaactgcttttctttggggcattcaatttagtgagcttaggatttcagcagctacgttcagttgtaactgttccatagtagattaggaagactggcgatcatttttatgtccattttctgcgactatggatagcaggagtattctgctggcctgaattcccggtgtaaacggcttctgaaattttgaatcattgataaactaatagtgtttggtttgaggaaa

SEQ ID NO: 150973 - DNA, 435 bp, Zea Mays
atgcgtgagagtaacaatgcgaagatagacagacagatagatatacaaacgtatatgattcgttggattgatcagactacgagtctgacgaattcaatgtgtcggaggaggaggaggaggctgggttgggtctttgccgaagcccatgagtgcgtgggtgagcagcatggcgccccggcggctggcctctgcgagtcggcccaccagcggcacgcccaccgtgtccctgttcttgagaggcttcccgtgccacctgtcctcgtgcttgaccaccttgccgtcctggagctgcagcctgatgagcgacgtcagatccaccggcttgcccagcaccttgtagtgctgcttgttctggatcaccacctcggtcttgcccggccccatgggattctcttgtacggtgtattcggtgatcttggattccccaaacacctg

SEQ ID NO: 150974 - DNA, 651 bp, Zea Mays
cattttgttttacttttttagtacacagaatcgacactttgacatttttatttccagtttcactgtgcaggctgacggtgatattaaggatatgaccttcctcgctgaatatactggggatgtcgattatctggagaacagggaaaatgatgattgcgactgtattatgacgctcctcctgccagctgatccttcccaaatgctggtgatttgccctgacaagcggggtaacatttctcgcttcgtcagtggcatcaacaaccacacaccggatggcaagaagaagcagaatgtcaagtgtgtgcggtacgacatggatggagagagccatgttttgctggtcgcctgccgtgatatagcttgtggtgagaagctatattacgattacaacggatacgagcatgcgtatcctactcaccatttcttctaaacaccccccccccccccaaaaaaaaaaaacagttttgacctgaacagtaaggtagtagtaaaggaggctgggtgaaattgatagaactttgccaactaaaaaccaacaacatatactgaagagatcctaaaatgatagacattgataggtgcttagggaactagtaccctgattcaattacaggagccaatgaagaggaattgccattgtctctgctctcc

SEQ ID NO: 150975 - DNA, 1457 bp, Zea Mays
ccctctcgacttggcgacaggctctctctcctacccgagaggacagaccgcaccgccacgcacccggcaccccctctcctctctgccgtcatgggacgtgccgcgccgtcttcatcgccgagctcgccgcagctcgggcgcaagcgcacggcggcgcccacaccggagcccccgacaccgcagcgccactgctccatggtcgacgtcatgcgccgctcgcgcgccgtcgccgcgccgccccctgtcgcacgcgcgcgggtgtacacctactacgagacccttctctgtgagacctgcggcctcggtgaccgcgacgacgagatgctcctctgcgaccggtgcgaccgcggctgccataccttctgcctccgccccatcgccgccaaggtccccatcggcccctggttctgccccgtctgcgccccgccgactatggcccccaagagtttcccggtgaagcagaccaagatcgtcgatttcttccggattcagaaggatgagcaggatgcacaggccgccaaatgcaggctctcccaagatggtagaaggcgaaggaagcgttctcttgttatgcacaagaggaggaggaggatactgccatttgttccatctgaagatggagctagaagactcaaacaaatggcgtctctggccactgctttgacgtcttccaaaacaaagttcagtaatgagctgacttacatgcctaacatggctcctaggtcttccaatctggcaagattggaggtaggcggaatgcaggttctgcccaaagaggataaggaaaatatagagctgtgcagaaccatgcagcaaagaggcgaatgccctccacttctcgtggtctttgatccccttgaaggtttcactgtgcaggctgacggtgatattaaggatatgaccttcctcgctgaatatactggggatgtcgattatctggagaacagggaaaatgatgattgcgactgtattatgacgctcctcctgccagctgatccttcccaaatgctggtgatttgccctgacaagcggggtaacatttctcgcttcgtcagtggcatcaacaaccacacaccggatggcaagaagaagcagaatgtcaagtgtgtgcggtacgacatggatggagagagccatgttttgctggtcgcctgccgtgatatagcttgtggtgagaagctatattacgattacaacggatacgagcatgcgtatcctactcaccatttcttctaaacaccccccccccccccaaaaaaaaaaaacagttttgacctgaacagtaaggtagtagtaaaggaggctgggtgaaattgatagaactttgccaactaaaaaccaacaacatatactgaagagatcctaaaatgatagacattgataggtgcttagggaactagtaccctgattcaattacaggagccaatgaagaggaattgccattgtctctgctctcc

SEQ ID NO: 150976 - DNA, 1463 bp, Zea Mays
atcctctcctgggtcctggcttctccttccactccggagatcgacggctgcttgccgcactcgcgctcgctcccacggccggcaaccatggccgccgccgctgccgcggtgccagccaccttcctctcgggcctcccctctccacggaccccgtctcctgtgctccactcgcccgtacagagagcccatcccgtcgccgctcctctcttcctctccgccaagcgccgcgcctatgcctgcgccgccacggcctccggctccttctattcctccaactcaggaaatcaaacctcactgatgccgtcgttcagctttgcatttgacgaaggttcttctagttccaaaaggctatatagatggaagagggtattgcttaaagtaagtggagaagctcttgccggcgaccacacagaaaacatcgacccaaagattacaatggctattgcaagagaggttgcttctgtcaccaagctaggtgtagaggttgctattgttgttggcggtggcaatatctttcgtggggcctcttgggctggatgtagtggtcttgaccgctcatctgcagattacatcggcatgttggccactgtgatgaatgctatatttcttcaagcaacaatggagagcatcggaataccgacccgtgtccaaactgccttccgtatgtcagaagttgcagaaccgtacatacgccgaagagctgtaaggcatttagagaaaggaagagttgtcatatttgctgctggaacagggaacccattcttcacgacggatacagctgctgctctccgttgtgccgaaatcaacgcagaggtaatgctgaaagcaacaaatgttgacggtgtgtacgattcagaccccaggcagaacccaaatgcccgccttcttgagactgtgagctaccatgaagttacggcaagagatctctctgtcatggatatgactgctattacactatgccaagaaaacaacatccccatcgtcgtgtttaacttgcaagagcctggaaacattgcaaaggctattgtcggtaagaaggttggtaccttcgtcggatgcaaaagaaatcagaaacgaaatgaaaacacactggttgaagaaagaagattggtcaatgaggtgtgagctccagagctgaaagagttggggctctctctcttgtcttatttagtttatgtatatgcatagaaggttttaggttggattagggttaggtgttggtgctggaattacattagattagctatcaattcttgcagtcgtcatgtttctcttttctttcgaggagaacatctctattatatagagtattaggtttagagggtgtttgaatgcactagaactaatagtcggtgactaaaattagttgagatattcaaacaccccagctaatagttcagctattagctatttttggtaaattagttaatagttaggtagctatttgttagctagctaatttc

SEQ ID NO: 150977 - DNA, 3129 bp, Zea Mays
atgcacactaaaggggcttcttcagatgccatcagagttagcacctctagtgcccccagcacatcgagccatggttctgcacaagatgactatgattcctctggggatgtgtacgtgtggggtgaagtcatttgtgacaacactgtaagagttggtcctgatacagtaatcaggtctaccgctaaggctgattttctattgcctaagcccctggagtccaagctagttcttgatgtgtaccatgtggattgtggggtcaagcacgctgctttggtcacaaagaatggggaagtgtttacatggggtgaggaatctggaggacgtcttggccatggatcaagggaggactctgtgcaccctcgcctagttgagtcattagctatttgtaatgtggacattgttgcttgtggggagttccacacctgtgctgtgacaacatctggggaactttacacctggggtgatggaacacataatattggacttctaggcaatggtaccgatgtaagccactggattcctaaaagaatttcaggagtactggagggtcatcaagttgcgtatgtttcttgtgggacctggcatacagccttggttacgtcgaggggacagctatttacgtttggtgatggtacattcggagttttaggacatggaaaccgcgagagtttttcgtgtccaagggaggtagaatctttatcggggttgaaaacaattgctgtggcttgtggtgtatggcacacggcagctgttgtagaagttatagtcacccaatccagttcaagtatgtcttctggaaagctcttcacatggggagatggtgacaaacatcggcttggtcatggtgacaaggaaccaaaacttaagcctacgtgtgtggcttcacttattgattatgacttctgcaggatagcatgtggtcatagtcttacggtaggactgacaacatctggacaggttctgagcatgggtaatactgtctatggtcagcttgggaatcctcgttcagatggtaaacttccatgcttaattgaagatatcatgggtgaacatgttgtccaagttgcatgtggttcctaccatgttgcagtcttaacaaataagagtgaggtttttacatggggaaagggggccaatggaagactgggtcatggagacgtagaggatagaaaaatacctacactggttgaatcattgagagacagggctgttaggcacatagcttgtggttcaaacttcacttcagctatctgtcaacataagtgggtttctggagctgagcagtcgcaatgtgcctcatgtcggcaaccatttgggttcaccaggaagaggcataattgccataattgtggtcttgtccattgtaatgcgtgcacctcacataaggtcctgagagcagcattggctcctaatcctgcaaaaccataccgtgtttgtgattcatgttttatgaaattgaacagtgcagcatactcaagtacaattaataagaagaaagaggttgtgcctcgccattctggtgaaagcaaccatgatgctaaattagctagagcaattgtgcccagcaatttggatatgattagaagtttggacagcaaggcagcaaaacaagggaagaaaactgatgcactgtcattccttcggactccccaaatgagttcgcttcttcagctaagagatatcactttatctggtggaattgatctgaacaagtcagttccaagagcagttcgcacatcagtccgatcattgaactcatctagggctgtttcccctttctctcgcaagcctagtccaccacgctcaaccacaccagtcccaacaactcatggtctttcaattgctaaaactgctgctgatagtcttgcaaaaactaatgagatgttaagtcaagaggttgaaagactccgtgcacaggttgacaatctaaggcgccgttgcgagcttcaagaacttgagttgcagaaatcagcaaagaaagtacaagaagccatgtcaatggtttcagaggaatccgcaaaatctaaagctgctaaggaagtaataaagtccttaacatcacagctcaaggatatggctgaaagactacctccagatcagggagcctatgatggtagcgaagcaaaacaagcacatgttccaaatggcattgagatgtatgcttctatttacactagcatgaatggtattcatcagccacgaaatgagtctgtcagtgccctaagcacgcctggcctgcatattggacgatcatcgcacccaaatggaatctcaaatcatcatcaatcaccaggaagtattactgaaaacagtgaagtgagtgctcacacccatagggtttcaggtcctcccgacgttgaaaatccgaatcgaaggggacatagcagtagtgacgagatgctcagtgcaagtagtagagcagacgatagtagcagcagggacgctagatcccttttgaatggtgaggatggttacaaatctcggagtgcagtatctttgcccagcaaccaagttcaggctgagtggattgagcagtatgaaccaggtgtatacataacactgacaactcttcgtgatgggacccgagatctaaagcgtgtacgcttcagtcgaaggcgttttggggagcatcaggcggagagctggtggaacgagaaccgcgacaaggtctatgagaagtacaatgtcgatgacccctcctccgtaccacactaccctgcagtagtcatcagaaaacttcaagtgggagcgcagagccaaagtcagagtggcaagggtgccgaggaattcttttttgtccgtgtaatgtcgataattcttgttactgttgttatgaaattgagtcagtgggacttgttaggttgtcttgttcagatgtaatgcacatagagttgtggaacaccgaaacatgttgtagggggtggggcggtagcagagggtggacagtaacagtagcgcgcccagccctctacggcctacccttttgaaagccttggttgtagccaatgcagctagctgtaaagaagtggcattttttttttgtctccaaaaggtgtcacgcttcacattttggctatattgcatttgatgacattcaaaatattcggatccagtagcacctcatattcc

SEQ ID NO: 150978 - DNA, 114 bp, Zea Mays
gtttggttgaagagccaagtagaacggagccgttctgtcccagttttgttgttgtctggttacaaagtaactagaacagagtggctccaattagagaatattctcctcagatcc

SEQ ID NO: 150979 - DNA, 100 bp, Zea Mays
aaaattttctatcattctctgtaaatctaatccctatcatgtacatatggtatactatttgcaattagtaatctgggacaatcataatcacatgaccttt

SEQ ID NO: 150980 - DNA, 747 bp, Zea Mays
gcaagccaggacggacacaacgacgaaagctagccagctagtaacaagaacaaaaaacaccatcatcccatccgcccgtgtcaacgccaccctagccctgtgatatacaatggcggcccagagcacgaggatggtggcgctggccctggtggtcctcctggtggcggcgacggcgttggtgcccacggccaccgcgtacggctgctacgacgactgctacgagcggtgcgccaacggcaagaaggacgaccccgcctgcaccaagatgtgcaaccaggcgtgcggcagcaccgacaagggcgccgccgccggcgcgccggcttgatcgacccgggcttcatcggcgcgcgggctcagctcgatatcatcatatacaatcgctgctccgtcgctcacgtcagcccatgcataatctctcgacccggcccattgaatcttctccttctactatagtatctctttgttgcaggtcttcgttctcatacatcgatccactcatccttttttgtaattcctactaccattaagtgagatgacctctctatatatgcatgattcagttttttttaaaaaaattgttattgtgttgtgcctcgatctgattttcatttttctggatgtattgtatataactatatattattaccacatacattctgtcaatccgttagtactactagtctactaaatttatgtcaatctctgatggagagagagaaaaaagaaataaataaataaataaaagaa

SEQ ID NO: 150981 - DNA, 821 bp, Zea Mays
aaataaacccagggcagtcgcaggccacattggtcattcgctcccactatccagactcacacagtccacactccccgcatctggcgacattgtgtgctcggcagtctcggactcggagtgagagcgagcaacaagaggaggaaatggagaagcgacacggcggcggaggttgcaccctgctccacctcctcggcaccgccgccgccatggcgttcctgctgccgcggtccgccggagctgccaacgacgccaagtggcacgcccatgcccatccggtcgccggcgccgtcggccacggtgcccccgcgccccacgaacacgcggccggcctctcgccgctctcggcaccgccgcccaccgcgggagccgacgacgacttgctgccgccgccgagccgcgcgcccgtgcagaaggccgccccgcacttcggcttccctctgcagccgggcgacgcgtccgcggcggccccgtccggaagcgaggggtacccgtttatcggcagcaacccgacggtgccgctgcccaccggcatgaccgacacctccaccgtgctgccgctgccggacacggggaccggggacgccaccaccaaggcggtggggttggcagcgtccgttcgtgctcccgtctcctccatgattgggcttggggttttcctcgccaccctgttcctgtgtgcaacatctaatcatataatacacttgtactagccttgagctcttggcatgaactaatctagagatctgctaccagttcctttcaactttcatcttccagtgaattcattgttctgccttggcgaacaaaaccagcaggccgca

SEQ ID NO: 150982 - DNA, 882 bp, Zea Mays
aaagcaaaatccggcccggcccaacactagtagcgtagctgagagcctgagacgatggccgactactaccacggcggcagggccatgtactccaacactgacgagtgctatgacgccggcaggcacggcggcagcgtgagggcgtactcgcgcaccgacgagtactacgacaacgtggacgaccgcatgaggaggcccgcgtacggcgccgacgactgcggctacggcggcaggcagaccgccgtgtacgccgacgagtactcccgcggcggccgctacgaaggctacggcgtcgagcaggagcacttcaagagggaggagaaggagcataagcacaaggagcgcctcggcgaggtgggcgccctcgcgggcggcgcctttgctctgtacgaggggcaccgtgcgaagaaggacccggcgaacgcgcagaggcacaagatcgaggccggcgtggcaacggcggcggcgctgggcgccggcggctacgcgtaccacgagcaccgcgagcagaaggaggcccactacgagagcaggcagcaggagcacagggtgccgcacgggcacgggcacgggcacggctactcctactactgcgactgaaacgactgatcatcccatcgatcgagatatgcatgcagaactcgatatatatacggcccctagcgccgtacacgtgcgtgcgtgtaagtaaataagagcaaacgtcgtcacgtgtgtgttgctcgatcactactccatcgatctacttattatcgtctgcaaataacgactaagcgcatgcttctgcagcgtgtaacgatccatcactgttactatatctaatgatgcatgcatgcaattaagctatatatgtattcttctatgcgtgttaataatgtcaaa

SEQ ID NO: 150983 - DNA, 1294 bp, Zea Mays
gaagagatccgtgtggccaaggtcttcctctcctatatattgactcgccgccacacagatagggttttctctccacgcagcgcgctcctcgatccccaacaggcaacagcccagccgctgtcgccctcgttccgtagtacggcgccgccagatcgtcagtcaccatgatcatctccaagaagaaccgccgcgagatctgcaaatacctcttccatgagggggtcttgtacgccaagaaggactacaacctggccaagcaccccaagcttgatgtgcccaacttggaggtgattaagctcatgcagagcttcaagtcgaaggagtatgtgagggaaaccttctcatggcagtactactactggtacctcaccaacgatggcattgagcacctccgcagcttcctcaacctgccatcagaggttgtgcctaataccctcaagaagtcttccaagcccccgtctcgccccttcggctctggcccacctggtgaccgccccaggggccctcctcgttatgaaggtgacaggcctaggtttggtgatagggatggttacagaggaggtccacgtggcgctccaggtgactttggtggtgataagggtggtgctcctgcagatttccaaccatcttttaggggtagcagacctggctttggccgcggtggcggcggtgctttcggtgctggtggatcttccatggagtgatgtgtcaacatgagctagcataacattcgtctttgaactatgagaacaatgagattttgttttgttttaccgagctgttgccgtgggttgacatggttttgtgatcgtttttgtttagatgaaattattgaaatcaagcagcgagttatcagtctatcgcgtgctgaattccttgtgctttctggtctatggttcgtgttgcaagttataacttttgcatggagaccaaaaagttacggtaatccacaacctagtcttttggctaccatcattggttttctaaacaacagctttgacttgtaactaggtttcaagaaaaaaatttgtcaagacacacgataagtatggcaacgaagagctgacaaaaaaacattcctcctagccccgttggtgtgatgtcctcattaccttccaatgcagtgcaagaatttgcaacagccaacgttatgaattatatatatgaacatccataggaaaaaaatccatctacttttaaggcatgcatttattgcatgaatttgcaacagccaatgttatgctgaatttgttggatcaactagaaatcaaaatatcccatctacttttaaggc

SEQ ID NO: 150984 - DNA, 105 bp, Zea Mays
ctttgtcagctgactttattttgttgttttgttagaattgcaatgatgaaatggaattgtcaacagagaacaatttgaatggcaataatagcatcaaagatattt

SEQ ID NO: 150985 - DNA, 2953 bp, Zea Mays
atgggctgcacgacctcccacgacgccgtcgccgccgctgtcacctcctccagttcccggccccgtgcgcgccgcgcgtccgcgtccgcgtccgggccctcaccgcggcgcggagaccccgccgcgctgtgccgcgagcgcgtggcgctcatccgcgccgcggccgaccgccggtacgcgctcgccgccgcgcacgctgcctacttccgctcgctcgccgctgtcggcgacgcgctgcggcgcttcgtggcgtccgcgctcgcgcccggcacgcccgggtcctcgccggtgctcacgctcccgccttcccccgccaagccggtcgctgccgcgtccgccagcctcccgccgtcgccgtcgtccaccgtctcgccgctctcgcactccgtctccgacgacgacctccatctccatgaccttgacgacaccccgtctccgtcgacgtccacgagacactaccaccacttcatgagaagatcgcccaccgtgcccaccgtggtgtacgaggaccccaacgcccagacacagtacaccacagccgagaccagctacggatacgcctacggcgtcggcgacggctacgggcctgcgtacccgtacggtccctatggtgaggtagttgcaggagagactccggaggcggcaccgagatcgcctgggccgccgccttcgcccccgaccgcggaggcctcgccatgggaattcttcgacccgttcacgcagtacgaccagttcatggaggactacactcgtgggaatctgccaaccaacagccccaactacgccgagctgaggaggatggaaggcatcccggagcttgaggacgaggccgagttggtggggaatgcagaggcatcaaagccatcgacttctggggtttctgatcagaacaagaaagggaagggaccaattcaagacaatgccgcttccaacggcgatttttctggtgacagcaagctgcagaagaaagcgacttcaaaggccgattcttctggtggaaagctgcagagggatgccacttcaatcagcgattctcctggtggcaagctgcagaggaagggatcggaaccacctcctggtggcaagttacaggggaagggatcggagccaactactgacgccaaaggcgaggcggggaaaccggtgtccaggaatgattccgggccaagcaatgtcagctcgaaaaacaaagaagggaggaagaagaacacaatgagcctaaagggcacagttagcagtgacattgatggcagcagcaccagtgggaagaagaaaggtgtggccttcgaaagggaacgatccatcagagaagcagaaggatgtggggagatccatggccagtcggtggtgagcagcgacccattctcaccatcgcatcatgggacgagggatgtcagagaggcgattaatgaggtcaatgagctgttcgacgaggcggcaaactgcagcacagatgtctcaaggctgctggaggtgggcaaaatgcctcgtagcgataccccgagagttctcagatatgtctcttccagagtgatggatcctttaggccttgctgtgtcgacatcgtcttgcctcccgaaatcacatggcaggaagtcgagaccatcaagcagcatggcaaggacttcagcttcgttagatgctggcagtagcaatgatgttggccacctctcatcaaccctggagaagctgtgggtctgggaaaaaaagctctatcaggaagttaaggatgaggagaagctacggatgaagtatgagaagtattacagaaggctgaaatccatggacgaacgaggcgctgaatcaagtacaatcgactccacccgtttgtccgcaagacttgtggagtccaagatcagcatcaacattagaaccgcaaacgccttctcgttaaaaatacaggagattcgagacgaagagctttaccctcaactggttgatctcatccagaggttcaggagtttgtggaaagatattatggaatgccatgagaagcagctattagccatacaggacagtaggattcactggatgaaggcgatgactgtaagtgaatccggcgttgtgtcagaggcctcacgggatttggaacgggagctgacgaaatggtaccgttgcttcaacaagtggatgatctcgcaaaggtcctgtgccgaggcgctgaacgaatggctgaagaaatggctccctgagtcgcaggaggaggttacagcagacggggctcctcctttctccccgggcaggcttggcgcgccacccgtattcgtcgtctcaaacgactggttccaagcgatcgagatggtctccaggactgatgtgctgaaagcgatcgaccagttctctaaggtcgtgcgtagattcaagaagagccaggaagacgagcggcggcagaggcggagagccgaccacgcctccaaagactacgacagaaagcgcaaggatctggaggaagagctcgggctgagcaccatggagagtcctcgctacagccatgacaaccgtgtggtggacctggagaagctgaggaaaagaagagacgaggagagcaccaggcatgacagggtcctgaatcatgcccacgtcacggcttcagctactctgccagtcggtttggtccctgtgctgcaacagatcaccagcttctttcagaggaaccaacgggtctacatgcagattagaactcaacaaggcgcctgatgatgatttctagttagcagtgttgcattcttttgtatatagaatttacaagatggggttatagactgctggagttttacataagtagctactaattcatggtaggtataggtgttagactgtgtgtgtgggccggtaccgctgttgggctgtcagtccattaggaggttagggttctgtgtctatatatgtaatcaccacctctatgcaatatcaatcaagagttccattctcctacaataggaagggctactaa

SEQ ID NO: 150986 - DNA, 983 bp, Zea Mays
aaaagcaacgacaattacaaaagagagtaaaaataaagtaacctaaaactcggaggaaagcagaaggggaagagtcagcaatggaggcgagggttgcaggagtgcccgaagacgaagagtccggcctcctcccccgcccgtccgcagccggccgacggccgtcctctcgcggtgcccgcttcccgcctccaccggcagcctgggcgacggtggacggccccctcgggcttccgctggaggacgcggagggccacgcccgccgcttcttcatgtggggtttcgcgtgcctccccttcctctgggccatcaactgctgctacttctggcccgtcctccgctcgtcggtcgcctcctcgcccgccgccttcgcccccatccgcccctatgttgtgcggtcggcaattggcttcaccatcttctccgttgttctggtcacctgggccacgaccttcgtcgtcggaggcgagcggttatttgggccagtgtggaatgatcttgtgatgtacaatgtcgccgacaagcttggcatctctggattcatgggatgagcctgcgatgtctccctcgcttcagctgggctcgcttcacccaagcgtggaacgatctattccatccatctccctagggattaccactgtctcatgtactttattgttgttattattattgacagactgactggtcagaacaatgtctagcatggctagctcatgttatagaaggaatatggatcgatgaaaacgatgataaatggaactcaatctgatggacaaatttgtgtgttcaaaaaaaccaaaatttgcggtgagcgtggatcgaacacgcgaccttcagatcttcagtctgacgctctcccaactgagctatccccgcttacatttttttcttttcatttactaaaatatactatctatgtcagtacttagttgcacctaaattgacttctgtttgatagaacgatcgtgtgcctgcaagaccaatcc

SEQ ID NO: 150987 - DNA, 786 bp, Zea Mays
gccaaaggaggccttacacttctcgaggatatctgtctggttcaatagaaccacaatactcacatgagctaaacagtgcaactgatctctatttgcttgttgattggttacatcaattataagttttggatttctttgtaaacttagtattaccagtgaagaaatgttctaattagaggttgtttgggtttaattggtcttctgccttgtcatcagaaaaaagatctgctaccctcaccggtttaactgcattataaatgtaattatttcatcactaatctcacaaggccactgccattgcatcacgaggtagccattttcagcttcttacacatgtcagtatgttttgcagatgttgtgcggtcggcaattggcttcaccatcttctccgttgttctggtcacctgggccacgaccttcgtcgtcggaggcgagcggttatttgggccagtgtggaatgatcttgtgatgtacaatgtcgccgacaagcttggcatctctggattcatgggatgagcctgcgatgtctccctcgcttcagctgggctcgcttcacccaagcgtggaacgatctattccatccatctccctagggattaccactgtctcatgtactttattgttgttattattattgacagactgactggtcagaacaatgtctagcatggctagctcatgttatagaaggaatatggatcgatgaaaacgatgataaatggaactcaatctgatggacaaatttgtgtgtgtgtgtgtgtgttgctagacatcctgggatgcatt

SEQ ID NO: 150988 - DNA, 881 bp, Zea Mays
aaaagcaacgacaattacaaaagagagtaaaaataaagtaacctaaaactcggaggaaagcagaaggggaagagtcagcaatggaggcgagggttgcaggagtgcccgaagacgaagagtccggcctcctcccccgcccgtccgcagccggccgacggccgtcctctcgcggtgcccgcttcccgcctccaccggcagcctgggcgacggtggacggccccctcgggcttccgctggaggacgcggagggccacgcccgccgcttcttcatgtggggtttcgcgtgcctccccttcctctgggccatcaactgctgctacttctggcccgtcctccgctcgtcggtcgcctcctcgcccgccgccttcgcccccatccgcccctgtgagaccgctatcccttctcctcgcttcctcgtctcctctcttccttctcgcgcctgagatctgatctttcgtgatgctagtatgtgacgcgttgtgtgtgtggtggggttgggggttcagctgcacttaacctgtatggatggatcgtaatctaggttcggattgtctcgtgctgcattgacactagcatcacttggtatgttggatgtggggtgctgccttgcaagcgtgtaacctggagaattggatcggtttgatatatttttcgttcaaaccaaaggctacagtcgaatttgagatgcttagttggaggaatgtctttataattcgggatgaatttattaggtcggcttgtgtataatgatcatgttgcaaaaacatactgctaattttgggaagatatgacacgcacattttcttgttctgaaaataatgttgaaggcaccgatatttcaaaccaatttgaggtttctcagtggtatgctgttatttgct

SEQ ID NO: 150989 - DNA, 968 bp, Zea Mays
gcaatgggaagcaaatggccaaccaatagcaaaaaggcagccgtgtatcgatcgccttatccgggtcctgtggcactggcacaccgcgcgtccggatttggctgagtagctgactagctgagcgagcaatccatcccttcgcccgccgcaccatggaagccctcgcctcggcgcctcgggcgctcttcccgcgcgcgtgcccagtggcgacgccggccggcccagcccggcgccgctccgccgctcctcacatctgcagggcctccgcggcggccggggaggagacgacgccgccgccgccgccggcggccgctcccaagaagatcctcaagaagaagcccgtctactcgatgaagaaagggcagattgtgcgcgtggacaaggagaagtacctgaacagcatcaattatctgtcagtgggacacccgcccttctacaaggggctggactacatataccaagaccgcggcgaggtcttggatatcaggaacttcgaaacaggagaatacgccctgatcgcttgggtggggatcccgacgccaccggcatggctaccaacctacatgctcatcaagtcggacaagctcgactacgagaggatatgatggccggccggcggcctcgcagggcaccgtagcgccgccgccgaattcatgcttcatttcgcatcaggagtcggccaagcaggacacacctcttgttgttgacttgttgtaggtatatacgtacatgccagtattgccagaacagtcgacagaggcaatctgagacctcagctgctggaataatcaggaagtagatcgagagcgacgtacgatgacgagattcataattgctgctgcacatcacttctttatgttatttaaactcacatttcataattaatactaataatatattgtctccgttcttgaatatttgtctcgtcgatagtttattttcgaataaaaaacgacaaaataaaaaaa

SEQ ID NO: 150990 - DNA, 461 bp, Zea Mays
cttgtcggacgtctcggtgcggtacgtgcggtcgccgagagagaggcacgcgaagaacttgtccttgaactgcatatccgcctgcgcccgggaaaccgaacaggaggatcaaccatggcgagtcaaagtcagagtcagagaggcagagacagtgatgcgatacgaatcgaaacccacggattccgcctcggctggccgcgtcgaagcggggagcgagactcggtgctaaggaacatgcgcgtagcagcggagttcgcagcgcgcggcccacgtaccttggctatccggacgcgtgcgatgccggcgaactcgtcggcggcgagggccttggaggagaccgagtcgtcgccggcgccgcggcgcaggcggttgcgcaggcggcggcggaaccgcgcgaagcgcgagggcagcgcctcgccggcgccggcgcaggcagtgggccgcgacgccgagtggcccat

SEQ ID NO: 150991 - DNA, 2439 bp, Zea Mays
tctcttccgttccgtccttccccgaactcgctcaaaaccctagccaaacgccacagggtcgccgccggtcgcccggccgcatccgctgccgccgctgccgccggggacgatggcgaagcctcggcgtggccgctccgcgtctcgctccacctcgggatcttcctcccgctcgccgtcccactccgtctcctccggctccgtctcgtcccgctcccgctccttctcgtcgtcgtcgtcccagtcccggagtcgctcccctcctcctgctaagcgcagttcgcctggagcacggaaaggacgatcaccttcaccgccccctaaaaagggttcaccttcaaaaaaagttcgttcgccatcaccaccccctaaaaaggcttcaccccctaggaaagcgtcgcctcctgctgagtcggttgttctctgcattgatcatttatcaaggaatgttaacgaagctcatctgaaagagatatttgggaactttggtgaagtggtgaatgtggagctatcaatggaccgaatggttaaccttcctcgtggctatggatatattgaattcaagaagagagctgatgctgagaaggctctactttacatggatggtggtcaaattgatggaaatgttgttaagttgaggttcactcttcaaccacgccaaagggctgtatcacctatgaaagctccaccccctcctccaaaacgagatgttgctcagattgaaaaaggtcttagcagtgctgaaaaggatgcccagcagcgtcctagggaatcatctccacgaaggaagccagcttcaccaccgcggaaacgatctccaaatcgaagggctgaatcgcccaggcgtccacctgacccatcacctaggcgtcgtcctgattctccgcctattcgtcgccgaccagatccttctcctgtcaggcgtggtggcacacctcctcgcaggagaccactgtctccagttagaaggcgttctccttcaccacctaggaggcataggtcaccgatgcgtccttcacctaggaggggacgtggcagtccttcaccacgcaggcgctcccctgggcctcttaggcggcgctcgccacctccaaggcgtttgaggagcccaccaagaaggccaccacctccacgtcgctatagtcgatctcctcctcgccgaccccttcgctccagatcgatttctccaagaaggggacgagggcctctcttgaggcgtggtaggtcaggctcatcatattctcgatcacctactccaccgccaagaaaggggccaagaagggtatcaaggagtcgcagccctagaaggcctcccagaggaagaagcatctctagtgacagccgaagcagcagttctccttcccctagacgtggcaggtagaaggaacccgttgcattgtgtatccggcaggtaaagccttttatcccctgactcagatcaagtgttggtttgaggagaagataaaagaaccctacggcaatgcttccagtggatctgcttaacatgcctggtgggctcactggcttgtgatttgtacccgagacagaattatctgccatgtgacatctggctcatgtacttgattgtaccccaagtatgttgaacttgtttccgcacaggagtctggatcttttttttttgcattaaaccattgtgctacttggtctaaagcgttactgggtctttcgtttcaggagtctggatctttttttttttgcattaaatcattgtgctacttggtctaaagccttactgggtctttcgtttcaggtgttgaaaggtttcatctactttgttggaaggagtttttcaacattcccattgtattatgattccgttgatcaagcaatttgtgtatgcgcaggcgcacgcacagcgtacaccttttctaatctgaaaagagttgtcattttgccaaaccccgccctgcttgttgccctgtcccatcagtcattggtttactgacgcgacgcaacgccgtttcctacaacatcctcatcgccgcctactctcgcgcgggcctacctggcgacattcgcgcgctaggaacggcaatgtagggtattgggcgtacccacgtgacggcagaaaaacatattgatgttcttctaagggctcagtccctttgggaccaagggtaatgaatggaattttgaggggatcaaaatcccttactatttaaaattgaatattgagggattatggtcctcttaatcccgttcattacacatacacttgctgtcgaagaagtggaatgttgggacttatgactcatctatttgtaaaattgtctcaaatagttaaatgacacaagattatatttgacatttctatgctcgtaattgaaggagagtaaaattggtgtaactggatatatgtactgccttgccttgtgaaaggatcacgatgtacaaatggaatggagggacaaattagacttt

SEQ ID NO: 150992 - DNA, 2419 bp, Zea Mays
cgaactccaaatcgaaagcccgagcccacctgcagcctcagggtcaggggctcagggcaccagttcccatttcctcggcctccgcgccggccatggacgtcgatgacccctcaccgcgcgccggcggaggcagcggcgtggacccgccccgcatccggcggctggaggaatcggtggtgaaccgcatcgcggcgggggaggtgatccagcgcccgtcgtcggcggtcaaggagctcgtcgagaacagcctcgacgccggcgcgtccacagtctccgtcaccgtcaaggatggaggactcaagctcatacaggtttccgacgacggctacggcattcggtttgaggatttgccaatactgtgtgaaaggcatactacctcaaagttatctgcatatgaggatttacagaccataaaatctatgggctttagaggggaggccctggccagtatgacttatgttggccatgttactgtgacaacaataacagagggccaacttcatggctaccgtgtttgttataaagatggagtaatggagaacgagccaaaaccctgtgctgcagttaaaggaactcaaatcatggttgaaaatttattttacaatatggtagctcgtagaaaaacattgcagaactccaatgatgactacccaaagattgtagatttcattagtcgttttgcagtccatcacatcaatgtgaacttctcctgcagaaagcatggagccaatagagcagatgttcatagttcgagcacatcttctagactagatactattaggaatgtctatggggcttctgttgttcgtgatctgattgaaatagaagtttcagatgaggatgctggagatgcagtcttcaagatggatggttatatatcaaatgcaaattatgtggcaaagaaaatcatgatgatccttttcataaatgataggcttgtagagtgtactgctttaaaaagggcaattgaatttgtgtactctgcaacgttgccacaagcatccaaacccttcatatacatgtccatcaatcttccatcagaacatgtggatgtcaatatacacccaaccaaaaaagaggttagcctcttgaatcaagagcgtgttattgaaactataaaaaataccattgaggaaaaactgaggaattgtaataccacaaggatattccaaactcaggcagtaaactcagcacttactcaagtttacacgcagaaggacaagggtactgaggtcaaaatggcccctggagtgaaatctcaaaaggctcctgtgagccaaatggtcagaactgatccacgcaatccatctggaagcttgcacgcttactggcatgggcaatcttcaaaacttgaaaataaatatgaccttgtttctgtaagaaatgttgtaagatcaaggaggaatccaaaggatgctggtgatttatctagccgtcatgagcttcttatggaaatagattctcactgccatcctggtcttttagaggttattaagaattgcacatatgttggcctggctgatgaagtttccgctttgatacaatacaatactcacttataccttgtcaatgttgtaaatgttagtaaagaactcatgtaccagcaagctctgtgccgttttggaaacttcaatgcgatccagcttagtgaaccagctcctcttcaggagctgctgctgatggcactgaaagatgatgaatcaatcggtgatgaaaatgacgaggagaaactggagattgcagaggcaaactcgaaaatactgaaagaaaacgctgagatgattaatgagtacttctctattcatgttgatcacgatgggaacttgaccaggcttccagttgtacttgatcagtacacccctgatatggaccgtctcccagaatttgttttgactatggggaatgatgttacctgggatgatgagaaagagtgcttcagaacggcagcagctgctattgggaacttctacgcactccatcctcccatccttccaaatccatcggggagtggtgttcaggtgtacaagaaaaataaagcttgcatggcgagtggtgaacatgttgatagtacagatgaagatgacattgatcacgaactacttgcggaagcagaaacagcatggtcccaacgtgagtggaccattcaacatgtcttgtttccatccatgcgacttttcctcaagcccccaaagtcaatggcaacagatggaacctttgttcagattgcctctctggagaaactttacaggatttttgagagatgttagcccacacttctaactacttacaagaagccaagaaagacaccctataacatgttttgcactgtacatattcgtgtagtgtcgcaaatgttttttttaatagttcattgacttatgagatggaagtataccatgagcatgctattgttttctcc

SEQ ID NO: 150993 - DNA, 2287 bp, Zea Mays
aaaaaacgagaggagagcggagagacagacaggagccaaatctacgtctcctgccaattcgcctttctccaaccagcttccccgcgccgcccgcccgtcgccgctcctccccgccctctctgcccgcatcagatcgtcttccccacgccgtgtgaccgaggtcccgtgatccctcccacttctgcgccggcgaggacccgggaggcgggatgagcggctgagcacgacgatggcacgcagagccacgccgcaggaggccgccgtcgctgccgcggaggccgccatacgatccgtaggcctggggttcgacgtcgtcagcgacgtccgcctcaagttctgtaagcagcggggcgcgcccgacccctggctcatcgaacttgaccatggggaggtccaggatatcgtgctgcccggcggcgtcaccgtcgctggcgtcaccgcttcggttaagtgtgacaaaggggagcggatgaggttccgctccgatgtcctgtcgttccagcagatgtctgagcaattcaaccaggagctatcattgtctgggaaaattccatctggcttcttcaatactatgtttgagttttctggcagctggcagaaagatgctgctaataccaaagcacttgcttttgatggttggtatgtcacactatacagtgttgcgctctcaaaagggcaaattgtactccgggatcatgttaaacagtctgttccatcaacctgggatcctgccgctttggcaaggtttattaaaaaatttggcactcatatagttgttggcctaaagatgggtgggaaagatgtaatttatttgaagcaacaacattcatcaaccttgcaagctgtcgacgttcaaaaacgattgaaggagatgtcagatagtagatttcttgatgcaaatgtgcaatatgacatgagtaggaacaatcaggatttggtgatgatgcttaagcgaagaggtgggagggataaagaatctatatctcatagtgagtggcttaatactgttcaagcagagcctgatgttacctcaatgtcctttataccaatcacttcgctgttgaatggagttcctggaagtggatttttgatccatgcaattaatctgtatctccgacataaacctccaatcgaggaattacatcagtttttggagttccagcttccaaggcagtgggcacctgtttacagtgatctcgctctgggtcctcagaggaaaagacaaggcagtacatcgttgccagtaaatttaatcggtccaaagctttatgtttgcactaacatggttgatgtgggtaaaagaccagttacaggactccggttgttccttgaaggaaggaagagcaacaaattagctgtacatcttcaacatctctgctctcttcctcagattattcagcttgaagacgacccttacaatcaccaaaccccggaatatgaccgcaaatactacgaaccaattggaccgtggaaacatttctctcatgtttgcacagcaccagtcgagtcagatgacctgtgcatcgtcacaggggcacaattagacgtggtccaccaaggcctcaagaaaattttgttccttcgcctacatttctccaaagcctgcaatgccgttgtgaggaactcggaatgggagaattctcccaacatagctcagaaatcaggccttatctcaacactcattagcacacatttctcctcggtagctcagacgcctccgccgcggccagccgatgtgaacataaactcggcggtgtaccctgggggaccacctgttccagtgcagaccccaaagctgctgaaatttgttgatccaacagagatgatgcgtgggccgcaggactcaccgggctattgggtggtttcaggcgcaaagttgaaccttgagaggagtaagatctcattgcgggtgaaatactcactgctgacagctatgatgccagatgatgagtttccacttgatgatgatgaattttagaacctggaacgaaagaaacctgtgtagcaaaggttgaggatccaagatttccgtcatttgggcatttgtttgatgttgtatactttgtggtttctttaaacattatagcataaacgagttctctgccctgaatggagcgagaagaattgttgtaacatttctttgtagcgtgggcgtggcacatagcgatcagcattagatgatagatcaaattatctgtatatatgggatgaataaaaaatattgtttcaaatgttttcttgtcttggtactgttgtgatgtattctgggagttttggctcccttgcc

SEQ ID NO: 150994 - DNA, 1483 bp, Zea Mays
tcgccacgcatatcctcacgtcaaacttctttaccaactcctccccccgtgcccgtccagtttgcgacgatgctacagctcgccctcgccctctgcgtcctcaccgccggcggcgtcgtccgcgcgcagccgttcgactacccgacggcgaagccctcgacgacgtgggccaacacggacgcctcgctcccgcaccacgtcacctacgccgacggctccgtggcgcgcgccgcgctgctgcggctcaacccggcggggtacggcccgtcctacgccttcggcttcttctgcaccaaccacctcgcgccgctctgcgccgagttcctcctcggcgtggccgtcgtctactgcaacagcggcgggctcatgacctccgtcgtggcgggcatcccgcaggtcgtctggtccgccaaccgcggcagccccgtcggggagggcgccgccgcggagctcacggccgcgggcgacctcgtgctccgctccgcccagggcgccgtcgtctggtccgccgcgggcaccgcgggccgctccgtcgccgccatggccgtcgcccgcgacggcaacctgctgctcctcgacgcgcgcaacaacacggtgtggcagtcgttcgaccaccccaccgacgcgctgctcgtcggccagtcgctgcgccccggcgcgcgcctcgtcgccaattcctccgccgccaactggtccccgagccggctctacctgaccgtcgccgccgacgacgacagcctcagcgcctacgtcgacgccgagccgccgcagcggtactaccgcctgggattcagcggcggcggcggcggcggcggagcctacgcgacgtacaccaacggcagcctcgccgtgttcgctgctgcggcgcctgctcccacgccgctggccaccatccagctccccgccgtcggcgccggtacggtgcagtacatgcggctggagcacgacggccacctccgggtgtacgagtggagctccgcggggtgggcgccggtgttcgacgtcctgcgcctcttcccggacgactgcgcgttcccgacggtgtgcggcgcctacggcgtgtgcacggacatgcagtgtagctgccccgacgcggccaacttccgggcggtggacttccggaggcccaaccgcggctgcgtcacggtggcgccggttgccggctgcggcggttcgcaccccccggcgcggctggtgtcgctgcccgggctggcctacttcaacgaccccgccaccagcctcagggcgctggagagggtgagcgacgccgcgtgcaggaaggcgtgcctggacgactgcgcctgcgcggcggcgcagttcgtctacggcaccgacgccggcgacggcttctgctacctgcagtcggaggtgctgtcgctggagacgtcgcggccggaggtggtgcactacaactccaccatgcatctcaaggtgcgggccacgcggcgtccgtcaccgtcagccagattttagttggattgga

SEQ ID NO: 150995 - DNA, 1521 bp, Zea Mays
gcagcagccacttgctcttcacctcttctctcttccactcatctcctctcctcatcgcctcctctcctcttgcggcacaataatatatatactgccacccatacggatccaattctctccgcctctactgtagccacggcccttggttcccctccattattcgacctcacctcaccttgccaccagccatggctgccgtgaccgccgcggccatctctctgtcctcctcctccgcctcctcccctgcggctgctgccaaggccaaggcggcgtccccgtcgtcgtcgccatgcaggcacctccagttcctgtcggcagcgagcccgcggcggcggtggcgggccggcgcccgcgcggtacgggcgcaggtgtccaccaccgagaccgcggcggcggggccggcgaagacgtccaagaagcaggacgaggggctggtcaccaacaagtacaagcccaaggagccgtacgtcgggaggtgcctgtccaacaccaggatcaccggcgacgacgcgccgggggagacgtggcacatggtcttcagcaccgaaggcgagatcccgtatagagaggggcagtccatcggcatcatcgctgatggcgaagacaagaacggcaagccgcacaagctcaggctatactccatcgccagcagcgccctcggagatttcggcgactccaagacggtatcgctttgcgtgaagaggctagtctacaccaacgatcagggggagattgtcaaaggagtctgctcaaacttcctgtgtgacttgaaacctggcgccgatgtgaagatcacagggccagtgggcaaggagatgctcatgcccaaagaccccaatgcaacagtcatcatgctcgcaacggggaccggtattgctccgttccgctccttcttgtggaagatgttcctggaggagcacgaggactacaagttcagcggccttgcgtggctgttcttgggagtcccgacgagcgacagcctgctgtacaaggaggagctggagaagatgaaggagatggcgccggacaacttccggctggacttcgcggtgagccgggagcagacgaacgcggcgggggagaagatgtacatccagacgcgcatggcggagtacagggaggagctgtgggagctgctgaagaaggacaacacctacgtctacatgtgcgggctcaagggcatggagaagggcatcgacgacatcatgctcaaccttgcagccaaggacgggatcgactggatgcagtacaagaagcagctcaagaagggcgagcaatggaacgtcgaggtctactgatccatccttccgttgacgactgcggagatcaatcaaatcgttggctcgtcgccgcgcccgagtctgtcagactcaggtctctatctaccgatgtacatataccttacgatgatgaaagacattctctatctatcaatgtacatacatacatacataacttaatttcacacggattgcatcgtacatggatttatttatggatgagccgccgaatttcttcttg

SEQ ID NO: 150996 - DNA, 3658 bp, Zea Mays
tgcacagccccaaaacacagctcggccccggtaccactaccccctacactacacttcctcctccgcgccactagatctcatctactgccagccaccgtcaccgccaccgccaccatagctatcccgccccggcccgagaacattctgcacgcggcagctcggcacccgcaggccgcagctgcactgcagcagcacaaatggccactgctactgccacctcccctgctctcctcctactcctcctcttcctgctcattggcggggcgccaccagcgaccaaggctgacatgccgatgccggtgaacgaggaggtgctggggctggtggtgttcaagtcggcgctgtccgacccgaccagcgcgctggccacgtggacggggtcggacgcgacgacgccctgcgcctgggcgcgcgtggagtgcgacccggccacctcccgcgtgctccgcctcgcgctcgacgggctcgcgctgtccggccgcatgccccgggacctcgaccgcctgccggcgctccagtacctctccctcgcccgcaacaacatctccggcccgctcccgccgggcctctccctcctcgcctccctccgctccctcgacctctcctacaacgccttctccggcccgctccccgacgacatcgcgcgcctcgcctccctccgctccctcgacctcaccggcaacgccttctccggcccgctcccgcccgccttccccgagacgatccgcttcctcgtgctgtccggcaaccagttctccggccccgtgccggaggggctggcgtctgggagcccgctcctgctccacctcaacgtgtccggcaaccagctgtccggctcgccggacttcgcgggcgcgctctggccgctccagcgcctgcgcacgctcgacctctcccgcaaccagttctccggccccgtcaccggcggcattgccaggctccacaacctcaagaccctcatcctcagcggcaaccggttcttcggagccgtcccggcggacatcggcctgtgcccgcatctcagcgccatcgacctcagctccaacgcgttcgacggccacctccctgactccatcgcccagctcgcctcgctggtctacctgtccgcgtccgggaaccggctctccggcgacgtccccgcctggctcggcaagctggcagcggtgcagcacgtggatttatccgacaacgcgctcaccggaggcttgccggactcgctcggcgacctcaaggcgctcaggtacctgagcctatccaggaaccagctctcgggcgccgtcccggcctccatgtccgggtgcaccaagctcgccgagctgcacctgaggggcaacaacctcagcggcagcatcccggacgctctgctcgacgtcgggctcgagacgctcgacgtgtcgtcgaacgcgctctcgggcgtcctcccctcgggctccaccaggctggccgagacgctgcagtggctcgacctctccggcaaccagctcactggcggcatccccaccgagatgtcgctcttcttcaagctccggtacctcaacctgtcccgcaacgacctccgcgcgccgctgccgccggagctcggcctgctccgcaacctgacggtgctcgacctgcgtagcactgggctgtacggcgccgtgccagccgacttctgcgagtccggtagcctcgccgtgctccagctcgacggcaactccctctccggccccatccccgacagcatcggaaactgttcttccctgtacctcctgagcttggggcacaacggcttgacggggccgatcccggcgggcatctcggagctgaagaagctggagatcctgcggctggagtacaacaagctgagcggcgagatcccgcagcagctgggcgcgctggagaacctgctggccgtgaacatctcgcacaaccggctggtggggcggctgccggcgtcgggcgtgttccagagcctggacgcgagcgcgctggagggcaacctgggcatctgcagcccgctggtgacggagccgtgcaggatgaacgtggccaagccgctggtgctggaccccaacgagtatacgcagggcggcggcggcggcgacaacaacctggagacgggcggcggcggtggtgtagaggcgccgaggaagcggcggttcctgatgagcgtgtccgccatggtggccatcttcgcggcggtcgcgatcgtgctcggcgtcatcgtgatcacgctgctcagcgtgtcggcccggcggagggtcgaggctgcgggtgttggaggccctggccacgaccggaaggaggtggacgagagcatcgtcaccaccagctcgacgacgacgaccaagtcatcgtcgtcgccgccgcccgggggcaaggtaaaggaaaagctcgccaccggcaagatggtgacgttcgggcccgggagcagcctccggtcggaggacctcgtggcgggcgccgacgcgctgctgagcaaggcaacagagatcgggcgcggcgcgttgggcacggtgtaccgcgcggccgtgggcgacgggcgggtggtggcggtgaagaagctggcggcggctcacctggtgcggtcgcgcgaggagttcgagcgggaggtgcgcgtgctgggaaaggcgcggcacccaaacctgctggcgctgaggggctactactggacgccgcagctgcagctgctgatcacggactacgcggcgcacggcagcctggaggcgcggctgcacggcggcggagaggcggcgccgatgacgtgggaggagcggttccgcgtggtgtccgggacggcccgggcgctggcgcacctgcaccaggcgttccggccggcgctggtccactacaacgtgaagccgagcaacatcttgctggcggacgcggagtgcaacccggcggtgggcgacttcgggctggcgcggctgctgcatggcagtggcagtggcaggcaggtggcgatggcgggcagccggttccggcagggcggcggcggcgggatggggtacgtggccccggagctggcgtgccagagcctgcgggcgaacgacaagtgcgacgtgtacggggtgggcgtgctgatcctggagctggtgacggggcggcgcgcggtggagtacggggacgacgacgtggtggtgctgactgaccaggtgcgcgcgctgctggagcacggcaacgcgctggagtgcgtggacccgggcatgggcggacgcgggcacgtcccggaggaggaggtggtgccggtgctgaagctgggcatggtgtgcgcgtcgcagatcccgtccaaccggccgtccatggcggaggtggtccagatcctgcaggtcatcaaggcgcccgtgggcggcggtggcagaatgcaagcctccttctgatccgggcgccgtgaccgttgggcgttggcatgcgttgcaggcagggcaacggcatctctggcctggctcggtcggcggcagcccgctgcaagtactatgtgtgcattcatgctagtatagcatggcaagcacagtagggctagggacgagggcagcttctagctccgtctctttttccatgcatgcgtgtccattcattttcagccccactgtatgtaccttgtacttgtacgggcttctcttctcctcgcctgttggatgtgggtggttgtcagctcgaaaccgccttctctttcact

SEQ ID NO: 150997 - DNA, 2254 bp, Zea Mays
ccaggacccgataaatagccgcgccgggcggggagaggtggtgctcctcaccggcctcggcgtcgtcgcctcgcaccgcacccaccggtccaccacccacctattcttcttgtctctctcccccctcgcaaatcggaggccaagtacactgcccacccaagtacccaaccaagtcaggagcagaacaagtagtacgggctgtgttttctgcgacggcgagccaagagcagaacaagtagtacgggcgtgttctctgcgacagcgagcggaccagatcggcggcgccatgtcgcacgacgagctcgccgacaaggagccgtcgtcctccgaggagtttcagctcgcgccgacgggttccaagttccggagcctcagccctgcaccgattccgatcccagcttctccgggcatcagatcattggtcgactcggtctctgatgagacagtaaatgtagatgtcatggcctcacatcaaagtgaaaatggatcaatctctacagctagttctaccgttagtttactggaatcagagaaggcagcatatgaatttcttgctcaaactcctgtcagatcaaccgatgcacatcttattgagttttcagaggccttgagaactgtcgcaaaagccttacgacaagtggctgaagggaaggctgctgctcaagcagaggcagcagagtggaaacgtaagtatgaattagagacagcgcagaagcagcaaagtaaaatcagaggctacagcagttgtatcagtaataacttggacaaactggccagccaactaaccctggagacacctgcacctgatcaattaggctgttgtggtaagcatggtatatgtgcacaccaggttctccaggatgaagttcctggacctatcccaagatctaatcacaaggtgggagggagaaaggcaccatttaaactttcatggggatgtaacggggataaaaatggccagcataagcatgattttgtgtccttcgaaaaaggtgatataacaacagcagaacggagcaataagcagatcttactgaaatgggaatcaccaccacaaacagtgcttttcataaccaaaccgaattccagctctgtgcgtgttctttgtgctgaaatggtcagatggcttagagagtataaaaatgtaaacatctttgttgatccacgtgttagcaaggaacttctaacagaggattcctactacaacttcgtccaaacgtgggataatgatgatgatataaagatgctgcacacgaaggtcgatctaattgtaactctgggcggtgatggaactgttctgtgggctgcatcattgttcaaaggaccagttcctccagttgtcgcattcgcccttggatcactgggcttcatgacacccttcccgagcgagcactaccgtgagttgttggacaacgtgctgaatgggccatttagcatcacgctgagaaatcgcatacagtgtcatgtaatacgagacgcggcgaaggatgaaatcgtgaccgaggagccgttcttagtgctaaatgaagttacgatcgaccgagggatatcgtcttaccttaccaacctggaagtctactgcgacagctcttttgttacttgtgtgcaaggagacggactgatcatatcaaccacatctggaagtacggcatattccctagcagctggagggtccatggtccatcctcaggtccctgggatccttttcaccccaatctgcccgcattccttgtcgttcagacctttgatcctgcccgagtacgtgactctccgcgtccaggtgccgtacaacagcagggggcacgcctgggcgtccttcgacggcaaggaccggaagcagctgtcacccggtgacgccctgatctgcagcatttctccctggcccgtgcccacagcctgcctagtggattcgaccaccgacttcttccgcagcatccatgagggtctccactggaacttgaggaaatcccagtcgtttgacggcccgcgtgattgattcaacagtttctttaccgttccatacttatatacaaaggttgcgtgcgtttagatgtgaggtagtatagacgtatagttgagaatccaaatatatagccatgaccatgcgtgtgtgtacatgattctgtgcttcagtgctccccagatctgaatggaataattggcgagccatacacgtatgacgagatggcagcttgcagtcgtgcgatctgggcacttgtgacgattgatggggaggaagcctccatcctttttt

SEQ ID NO: 150998 - DNA, 1640 bp, Zea Mays
cgaagccaaccgtcccagtctgggccccaccggcgagagcccgtcggcgtcaaaccaggacccgataaatagccgcgccgggcggggagaggtggtgctcctcaccggcctcggcgtcgtcgcctcgcaccgcacccaccggtccaccacccacctattcttcttgtctctctcccccctcgcaaatcggaggccaagtacactgcccacccaagtacccaaccaagtcaggagcagaacaagtagtacgggctgtgttttctgcgacggcgagccaagagcagaacaagtagtacgggcgtgttctctgcgacagcgagcggaccagatcggcggcgccatgtcgcacgacgagctcgccgacaaggagccgtcgtcctccgaggagtttcagctcgcgccgacgggttccaagttccggagcctcagccctgcaccgattccgatcccagcttctccgggcatcagatcattggtcgactcggtctctgatgagacagtaaatgtagatgtcatggcctcacatcaaagtgaaaatggatcaatctctacagctagttctaccgttagtttactggaatcagagaaggcagcatatgaatttcttgctcaaactcctgtcagatcaaccgatgcacatcttattgagttttcagaggccttgagaactgtcgcaaaagccttacgacaagtggctgaagggaaggctgctgctcaagcagaggcagcagagtggaaacgtaagtatgaattagagacagcgcagaagcagcaaagtaaaatcagaggctacagcagttgtatcagtaataacttggacaaactggccagccaactaaccctggagacacctgcacctgatcaattaggctgttgtggtaagcatggtatatgtgcacaccaggttctccaggatgaagttcctggacctatcccaagatctaatcacaaggtgggagggagaaaggcaccatttaaactttcatggggatgtaacggggataaaaatggccagcataagcatgattttgtgtccttcgaaaaaggtgatataacaacagcagaacggagcaataagcagatcttactgaaatgggaatcaccaccacaaacagtgcttttcataaccaaaccgaattccagctctgtgcgtgttctttgtgctgaaatggtcagatggcttagagagtataaaaatgtaaacatctttgttgatccacgtgttagcaaggaacttctaacagaggattcctactacaacttcgtccaaacgtgggataatgatgatgatataaagatgctgcacacgaaggtcgatctaattgtaactctgggcggtgatggaactgttctgtgggtacgcatctaatttcttttatatttcaattgtgatgcatgcttgcaaaatgttatctggactccgaggcttcttcttttttcatccatttttatatagcgataccttcagttatgagtttgtggtagttactgtagatccctccagaaaccaaacaccccataattcaggcgctgagttttcaatgacagagcagagagtactaatacaattcactgtgggaaccacctcagtagcttacctgttacatattttatatgttttatttatgttagtaattttg

SEQ ID NO: 150999 - DNA, 113 bp, Zea Mays
ggaagaatactacagtattcttaaatactacaatattatatacagaatgatgtttgtcaaactagctaaaatctttgttttcaaaactgaagtattgcaaaaaaatgtagttg

SEQ ID NO: 151000 - DNA, 1167 bp, Zea Mays
ggcttagagcagaaaaccaacattccttttataattgtatgcatgtaagatgtagcatggtatatgaactgatcaggaatggtggttttctcgtgcagttccgctgtccatctacgctttcaccctaccactgccgtatatcggtgtggcatcatctctgccacctggctttgttgcgggtgcagcagtactcaccgctggcttactactgtacagcctaccacaggcacgacattttggaaatactttttcacaacaaaaatgactagttagcatccatttcttcattgatttatcacccttcattccaagatggtgctgggttcgaaaggtagaacagaagttctcctcagggccacctgactgatgtactccgatgttgtatggtacatatcatatatatgtatacccaccaataaaggcgaggaaatagcatactgatatatagggaataaagatcgagaggaggactaagtatctggcagtcagacatttgatgttactgagtgtgaaggtcggagaagagtatgcacagcgggggcagtagcatcatcaccgcagggacgaagtgaaaagatcagcggttgcagcaccaatgacagccacaggaggatcactgtcgctgccagcaacatcatcagtactcctttgctcatcgtcgacgccaccgccctgccctcctctggctccccggctcctgtcttttttttctaggttttcatgtttgttgtgaggaagttgttgtaccatgtgtgagagaaagaaaacgttgtaccctacggagctgggaagctatatatgggccagatggggtgttttggcatgtgtgtccatgtgactgggcatgtttgaattttttatccttttaagcatgtgtgcttccatttccagtagaaagctgtacttttggcggacccggaccgttgtaccatgtgtgagagaaagaaaacgttgtaccctacggagctgggaagctatatatgggccagatggggtgttttggcatgtgtgtccatgtgactgggcatgtttgaattttttatccttttaagcatgtgtgcttccatttccagtagaaagctgtacttttggcggacccggaccgtatttctatctattatatgaatttctatatattattattatatgaaagccggatggaaacct

SEQ ID NO: 151001 - DNA, 2119 bp, Zea Mays
ccgcgcaggcaggcggttccgtcccggctcttcccacccaccccgccgaggatggcgccgtcccccgtcacgtgccgcccctccgcggcgcggcaccgcccgctgctggtccgcgcccccgcgccgcgcgctgccgacggggcggcgctgatgctgccgctgccgctgcggaggagggaggcgctgctggccgcagcggcgcggccgcacgcgcggtggatcgcggcggacccgtgggcgtcggcacacgcctggacgagccctggaaggggcaggggggacgcgacaaggtgcgcggcggcggggcgggtcgcggggagcagcagcgcgggcgccgggaggagcgccgggatggaggtggccatcgccgccgctgcggtcgtcgccatgggcacggggaaccgcgtcctctacaagctcgcgctcgtgccgctccgggagtaccccttcttcctggcgcagttcgccacgttcggatatgtagttgtctatttctcgatcctgtatcttcgatatcaagcgggcattgtcaccgatgagatgctgtctctaccacagaaaccttttctagttgtaggactcttagaggcttttgcggcagcagcaggaatggcagctggagctgttctttctggggcttcaataccaatattgtcacagacttatcttgtctggcagcttcttctatctgctattttcttgaagaggcgctatagaattaatgagatagcaggatgctttctagtgaccgttggtgtcataataactgtagcaagtggatctggtactagtgcttcatttaaaagtactggaattttatggccactgctaatgataatatcgttctttctccaagctgctgacacagtattgaaggaaatcatatttctagatgcttctaagaaactgaagtgtggctcagttgatctttttgttgtcaattcatacggctctgcttatcaagctctttttatgtgtctcttgcttcctttcctgtcaaagttatggggagttccattccgtgtgttaccaacgtacattaaagatggtgcagcctgcttcttaaatatgggatcaatatctggttgtgaaggggcgccgctactaccactactatttgtgttggttaacatgggattcaatatatcattactacacctgctaaagatctcctcggcagtcatatcttccttggcttctacattctcagttccgctgtccatctacgctttcaccctaccactgccgtatatcggtgtggcatcatctctgccacctggctttgttgcgggtgcagcagtactcaccgctggcttactactgtacagcctaccacaggcacgacattttggaaatactttttcacaacaaaaatgactagttagcatccatttcttcattgatttatcacccttcattccaagatggtgctgggttcgaaaggtagaacagaagttctcctcagggccacctgactgatgtactccgatgttgtatggtacatatcatatatatgtatacccaccaataaaggcgaggaaatagcatactgatatatagggaataaagatcgagaggaggactaagtatctggcagtcagacatttgatgttactgagtgtgaaggtcggagaagagtatgcacagcgggggcagtagcatcatcaccgcagggacgaagtgaaaagatcagcggttgcagcaccaatgacagccacaggaggatcactgtcgctgccagcaacatcatcagtactcctttgctcatcgtcgacgccaccgccctgccctcctctggctccccggctcctgtcttttttttctaggttttcatgtttgttgtgaggaagttgttgtaccatgtgtgagagaaagaaaacgttgtaccctacggagctgggaagctatatatgggccagatggggtgttttggcatgtgtgtccatgtgactgggcatgtttgaattttttatccttttaagcatgtgtgcttccatttccagtagaaagctgtacttttggcggacccggaccgttgtaccatgtgtgagagaaagaaaacgttgtaccctacggagctgggaagctatatatgggccagatggggtgttttggcatg

SEQ ID NO: 151002 - DNA, 877 bp, Zea Mays
catcggggatggaacgaggagaggacattattgaggagaagcaaggtatgtacgcatgcgttttatctgcaaagcttcaattaccaccatgtctcagccatgtgagctgacctctgcattgcgttgcgatcgagatttgttcgtaacgaataattaatgacagtgatgatctctcgtacgtagctggtggagctgctacgagtgatgagagatcgtcatcccaaaaggtcgccgatggaaagggcgccgagccaccggcggccggagtctcgaaccgcctaaagcctagcgacgacgcagagaagcttgttgcgttcatggaagaccactacgacgacgtcgttgcccgcgtgcaatccttcgacgagttctaccacgccattttcgagctcatcgagatgttctgcgaggaacgtgggcagctgcagtacaggttagcggagaagaaagccctcgaggaggcatacaacaagcaccacaggtcggacggcaaggtgacgaaggaggagttcgaggcgatgagcagggaggtggtgaaggcgggcagcttcagggtggggaaggcgagcctggagcttggcgcgctgctgttcggcgccccggcgtgcgcgctgctggccaagaggatcctgccgggcctgggctggctgtccgacgacgtcgtcgtgcccctcgccacctccggctccgtcgcctacctcatcaagtccaagaggctgtgagcctagctgtgactgtctctgtggaccaagagagggttctgatgtgtattatgagattaatttgcacacgtacgtgcagtggataggactcgatctgcagctgaaacaagcaaagaattatatatataagcatggaatatgtatgatatgtgtta

SEQ ID NO: 151003 - DNA, 456 bp, Zea Mays
atggctccggcggcgcgcgcaccatccgagttcagccgcgtgttctcggcgctggaccgcgacggcgacggcaagctgtcggcggccgagctgcgggcgtgcatgagggcggcgctgggcgaggacgtgtcggcggaggaggcggaccgcctggtggcgtcggcggatggcgacggcgacgggctgctgagccaggaggagctgctggcgctggcggggacaacggcggcggaggaggaggaggaggaggagcgacggcgggggctgagggaggcgttccggatgtacgccgtggaagggcagggctgcatcacgccgctgagcctgaagcggatgctcgccaggctcggctcccaccaggacgttgccgagtgcacggccatgatctgcaggttcgacctcgacggcgacggcgtgctcagcttcgaggaattcagggtcatgatggatgcatag

SEQ ID NO: 151004 - DNA, 922 bp, Zea Mays
cttgcaacgattggttgtgttgtgtggctacaaatacgaatacacagcagccctctgctctctgcacctgcgcattttgtaaaggtacgaggagcaaggtgaggcaccaccagtaccaaccgggctccgagttcatcacgcacgcatggaaggctcggcggcacaggcgccggggaagaccgtcctgagggtggtggcgatctccggctcgctgcgcagggcgtcggccaacaccggcctcatccgcgccgccgcggagatctgcagggagtcgatcccggggctggaggtggagcacgtggacatctcggagctgccgctgctgaacaccgacctggagggcccgggccccggcgcgttcccggcggccgtcgaggcgttccgcggcaaggtgcgcgccgccgactgcttcctgttcgcgtcgcccgagtacaactactccatctcgggcccgctcaagaacgcgctggactgggggtcgcgcccgcccaactgctggggcgacagggccgccgccatcctcagcgcgtcgggcgggtcggggggcagccgctcgcagtaccacgtccgccaggtcggcgtcttcctcgacctccacttcgtcaacaagcccgaggtgttcaccagggcgcaccagccgcccagcaagttcgacgacgacggcaacctcgtcgacccggacaccaaggaccaggtcaccaaggtgctcctggcgctgcaggctctcgcgctcaggctgcacctggggaagctcgctgttgctgcacactcttcttgaacgtcgtcgtcgtcgggggtgcactaaactacactacacatcgtcgccgagctccaaatgccgtgccgtgtccgtgtgtgcgcgcttcaataaattctcggcgtccaacttttaatgagtgatgcacaatcgtgttcatttgtg

SEQ ID NO: 151005 - DNA, 101 bp, Zea Mays
cactttagcgttgtccgacccaagcctcccagcggtgagcctccgctcggctcgccaacacgacctccatatgcagaatttggatcacaaactcaacacag

SEQ ID NO: 151006 - DNA, 1294 bp, Zea Mays
tgcctctcgcctgcctgctcggattggcacccaccctgctctcttctgttccgttctgcctgtaaccaaccaacctctgtcttgttcttgctacgcgctgcaggagatcgacgtgagtctcatcatcactgactactgcatgcccggcatgacaggatacgatctgctcaagcgagtgaaggggtcctcatcgctcaaggacattccggtggtgatcatgtcgtctgagaacgtgcctgcccggatcagcaggtgcttgcaggatggcgcggaggagttcttcctgaagcccgtgaagccggccgacatgaagaagctcaagtcacacctgctgaagcggaagcagcccaaccagaagaacaagcctcaggcgcaggcggtggagtctcctgagcagcagctggacccgcatccgcagccggtgcacgagccggaggaagccgcggcagatcgcaacggcgtcaacaagaggaaggcagcggccatggaggaggggctgaccgtggtggtgacggcgccggagagcaccaagccgaggaggctgtctacgagcagcctgactgtggagacctgatcaaccgtggcgacctacgggctacggctacgcacattaatctagcagtggatgcaagccccagtcccagccccgccgccaagaaacacattttggttctgggagctaacggagggaagtgacaaacaattaaattatatgtagcggctgctgcttcggcctgcaaattttgttgcgctaacggtcatggacatggacatggacaccatcccttgtgttcgttaatcgttcggaaggggaaaagaagaagaagctgtagataaaaaaaggacaggcggctaattgttaatttccgcatggcttaattctggcaacgacctgctggctcaatcaaaaacctgtgacggacagacggatggatcaactgatgatgttgttgttttggctcggttcttcttccttgtacactgagtgttcagatgaacatgttgtaatctgaacatccgttcatgtcagcctgcctgacgatggaggcaaaagttcttctacatcatggtcaaggacaacgtttcagtggtcctccccgccggtgaccggtcccctcgagacaacgggagagacggacagacagacagacaagatctccattcagacgcaacatgtgacatgtcctcctttttttttcctttttacatgagaaaaagaaacaatcgcctaggagtgaactgtaactgtgacagtaagaaactgccagcactgactaatttacagatgaagaat

SEQ ID NO: 151007 - DNA, 1500 bp, Zea Mays
atctccctctacccgccgccacattcatcagtagaaaccacctatcctgcctgctctacctacctccgctccccagccatgacggtgctggacgccgagtcgcggttccatgtcctggcggtggacgacagcatcatcgacaggaagctcatcgagatgctgctcaagagctcgtcttaccaagtgaccacggtggattccgggaacaaggcgctggagctgctggggctgagggacaacggcgcggaggacgcgtcgccgccgtcatcgtcctcatcatcttcgtcgtcgtcctcccctgaccatcaggagatcgacgtgagtctcatcatcactgactactgcatgcccggcatgacaggatacgatctgctcaagcgagtgaaggggtcctcatcgctcaaggacattccggtggtgatcatgtcgtctgagaacgtgcctgcccggatcagcaggtgcttgcaggatggcgcggaggagttcttcctgaagcccgtgaagccggccgacatgaagaagctcaagtcacacctgctgaagcggaagcagcccaaccagaagaacaagcctcaggcgcaggcggtggagtctcctgagcagcagctggacccgcatccgcagccggtgcacgagccggaggaagccgcggcagatcgcaacggcgtcaacaagaggaaggcagcggccatggaggaggggctgaccgtggtggtgacggcgccggagagcaccaagccgaggaggctgtctacgagcagcctgactgtggagacctgatcaaccgtggcgacctacgggctacggctacgcacattaatctagcagtggatgcaagccccagtcccagccccgccgccaagaaacacattttggttctgggagctaacggagggaagtgacaaacaattaaattatatgtagcggctgctgcttcggcctgcaaattttgttgcgctaacggtcatggacatggacatggacaccatcccttgtgttcgttaatcgttcggaaggggaaaagaagaagaagctgtagataaaaaaaggacaggcggctaattgttaatttccgcatggcttaattctggcaacgacctgctggctcaatcaaaaacctgtgacggacagacggatggatcaactgatgatgttgttgttttggctcggttcttcttccttgtacactgagtgttcagatgaacatgttgtaatctgaacatccgttcatgtcagcctgcctgacgatggaggcaaaagttcttctacatcatggtcaaggacaacgtttcagtggtcctccccgccggtgaccggtcccctcgagacaacgggagagacggacagacagacagacaagatctccattcagacgcaacatgtgacatgtcctcctttttttttcctttttacatgagaaaaagaaacaatcgcctaggagtgaactgtaactgtgacagtaagaaactgccagcactgactaatttacagatgaagaat

SEQ ID NO: 151008 - DNA, 898 bp, Zea Mays
atctccctctacccgccgccacattcatcagtagaaaccacctatcctgcctgctctacctacctccgctccccagccatgacggtgctggacgccgagtcgcggttccatgtcctggcggtggacgacagcatcatcgacaggaagctcatcgagatgctgctcaagagctcgtcttaccaagtgaccacggtggattccgggaacaaggcgctggagctgctggggctgagggacaacggcgcggaggacgcgtcgccgccgtcatcgtcctcatcatcttcgtcgtcgtcctcccctgaccatcaggagatcgacgtgagtctcatcatcactgactactgcatgcccggcatgacaggatacgatctgctcaagcgagtgaaggggtcctcatcgctcaaggacattccggtggtgatcatgtcgtctgagaacgtgcctgcccggatcagcaggtgagctcccaccgcattcaatttttaaaaccgccttctcattcactcgcgtatgccactaccagcatccatcgagttctttcgctggtccactagtacgcaactagccgggaggagagtctagatagggcagacctgatattcatctcctgcttcttcatgcttagtatactccgtagaatcagccgaccggtgcctgtcgaggtaccagatggagccgtgctgttgttcttgcctgcctggctgcctgtttcttcccaactggaagggttggggctgttaagggagcagatggaatattaacgccatcatgctagatcaccagttctgcatgaaatgattcagaatggatcgagacaatgtgtgaggaatattgtttagtaatttgttttcttttttctttttacaaaaaagccgcctagggattacgtatttattta

SEQ ID NO: 151009 - DNA, 1333 bp, Zea Mays
gcagttgcagctagctgctcgccacaactggcgcgccgcactcaccgcgccagtacgccacgctcgggctcgatcggcatcgattcccccaatcccgcacccgcacacccggctcgcaatccctagcactagcagcgccgcggcggcaggcaggcagggggggggggggggggggtgccggaggccgctcgtagcacggaacgtctccggatcgatccatggagcgcgcgaggagggcttcgcacgccggctcttggtacaccaacgatgccaggaagctggaagaggaactcaatggttggctgggggcagccggtctaaccaagtctcctgatgttagggcagtaattgcaccccacgctggttattcatactcgggccgatgtgcagcttatgcttttggcaacatcgatccaactaacatttctcgggtgtttctgcttggcccttctcatcactactacactccaaaatgtgctttaaccagggcttctgtctactgtaccccaatcggggatttgccagtagaccaggaagtcattgaggaactcagtgctactggaaagtttgaatttatggaccttaatgtggatgaagctgaacatagcatggaaatgcatttgccctaccttgctaaagtatttcaaggacataatgtgaaagtcgtccctatccttgttggtgcacttagctcccaaaacgaagccttgtatgggcagctgctctccaaatatgtggatgacccaaaaaacttcttttccgtgtcgtcagacttctgccattggggatccaggtttagctacacatactacgaaaagaagcacggtgccatccataaatctatcgaggccttggaccgtatgggcatggagatcatagagactggcgatcccgtagcgttcaaagaatacctgcaggagtacgagaacaccatatgcggacgccaccccatcagcgtcttccttcacatgttgaaacattgctcgacaaaaattaagataggctttgtccgctacgagcagtccagccagtgcaagaacatgagggatagcagcgtgagctatgcatccgcagcagcgaaggttgctggtgcatccggggaagaagataaacaagactgagcgagctacagctctgtttgatatactatatataagccgccaaaccttggtgcggaatgtgtgactggtttcccataagaaaaagaacatgtgatttggtaaaacattttcttcttcagtaaaataaataaatatgcagactgctggggatctgtactaattaattaagagattttcctaacaaagtaaaaaaatatataaataataatcaa

SEQ ID NO: 151010 - DNA, 1274 bp, Zea Mays
gcagttgcagctagctgctcgccacaactggcgcgccgcactcaccgcgccagtacgccacgctcgggctcgatcggcatcgattcccccaatcccgcacccgcacacccggctcgcaatccctagcactagcagcgccgcggcggcaggcaggcagggggggggggggggggggtgccggaggccgctcgtagcacggaacgtctccggatcgatccatggagcgcgcgaggagggcttcgcacgccggctcttggtacaccaacgatgccaggaagctggaagaggaactcaatggttggctgggggcagccggtctaaccaagtctcctgatgttagggcagtaattgcaccccacgctggttattcatactcgggccgatgtgcagcttatgcttttggcaacatcgatccaactaacatttctcgggtgtttctgcttggcccttctcatcactactacactccaaaatgtgctttaaccagggcttctgtctactgtaccccaatcggggatttgccagtagaccaggaagtcattgaggaactcagtgctactggaaagtttgaatttatggaccttaatgtggatgaagctgaacatagcatggaaatgcatttgccctaccttgctaaagtatttcaaggctcccaaaacgaagccttgtatgggcagctgctctccaaatatgtggatgacccaaaaaacttcttttccgtgtcgtcagacttctgccattggggatccaggtttagctacacatactacgaaaagaagcacggtgccatccataaatctatcgaggccttggaccgtatgggcatggagatcatagagactggcgatcccgtagcgttcaaagaatacctgcaggagtacgagaacaccatatgcggacgccaccccatcagcgtcttccttcacatgttgaaacattgctcgacaaaaattaagataggctttgtccgctacgagcagtccagccagtgcaagaacatgagggatagcagcgtgagctatgcatccgcagcagcgaaggttgctggtgcatccggggaagaagataaacaagactgagcgagctacagctctgtttgatatactatatataagccgccaaaccttggtgcggaatgtgtgactggtttcccataagaaaaagaacatgtgatttggtaaaacattttcttcttcagtaaaataaataaatatgcagactgctggggatctgtactaattaattaagagattttcctaattcatgcatcgacc

SEQ ID NO: 151011 - DNA, 686 bp, Zea Mays
gcagttgcagctagctgctcgccacaactggcgcgccgcactcaccgcgccagtacgccacgctcgggctcgatcggcatcgattcccccaatcccgcacccgcacacccggctcgcaatccctagcactagcagcgccgcggcggcaggcaggcagggggggggggggggggggtgccggaggccgctcgtagcacggaacgtctccggatcgatccatggagcgcgcgaggagggcttcgcacgccggctcttggtacaccaacgatgttctcgggtgtttctgcttggcccttctcatcactactacactccaaaatgtgctttaaccagggcttctgtctactgtaccccaatcggggatttgccagtagaccaggaaggtgagtgtttactcaatttggatggttgaatgtttttagcctagttctgtattatgtactctactgtcaagggttttgggattcaaggtagctggacctcggctacagagttcgtagtctcagacaataatggtgtgggaatttccccccggacaccctatggtgaagggggtgagattaggaagaagggagattggggaaatgaatctgttattgcttaatccttaaatgttcccatacatcatgtgtaagtttgaatctgtatatttgtttttgttggaatataatataagtgaattgtcc

SEQ ID NO: 151012 - DNA, 351 bp, Zea Mays
tgcagttgcagctagctgctcgccacaactggcgcgccgcactcaccgcgccagtacgccacgctcgggctcgatcggcatcgattcccccaatcccgcacccgcacacccggctcgcaatccctagcactagcagcgccgcggcggcaggcaggcagggggggggggggggggggtgccggaggccgctcgtagcacggaacgtctccggatcgatccatggagcgcgcgaggagggcttcgcacgccggctcttggtacaccaacgatggtactttgcaattccacaactctcctgccatgtcgctttaacttttaggcgcggctcgtttcgcttgttcttgtcttctt

SEQ ID NO: 151013 - DNA, 884 bp, Zea Mays
ccacttgcaagtacgtatacttcttgacgtggatcgaccgaccatggccaacaagctcgccacttcgtccctcctcgccgcggccgtcctcctcatggcgctcgccgccccctcactggccggcgaccccgacatgctccaggacatctgcgtcgccgactacaaatccctcaagggcccactgcggctgaacggattcccgtgcaagaggccggagaacgtgacggcttgcgacttcttctccggcgcgctggcgagcgccggcaacacggccaacgcgctggggtccgcggtgacggcggcgagcgcggacacgcttccggggctgaacacgctgggcgtgtcgctgtcgcgcatcgactacgcgccgtggggcgtgaacccgccgcacgtccacccgcgcgccaccgaggtcatcttcgtcctccagggctccctcgacgtcggcttcgtcgccgccgccagcaaccgcctgtacgcgcgcaccgtcagcgccggcgatgtcttcgtcttcccccgcggcctcgtccactaccagaggaacaggggcggcgaccccgccgtcgccctctccgccttcgacagtcagctgccaggcacgcagcccgtcgccgaggccctcttcggctcgtcgccgcccgtgcccaccgacgtgctcgccaggagcttccacgtcgacggaggactcgtggaggccatcaggtccaagttcccgcccaagtagaagtagaccttgccactgccatgctcatgcaatgcaagcgccacgtacgtacgtgtacgtattatatatacgtacgctggtattaataacaatcgaggcgtggtttaattgaacaagcactgtcgctttgtatgatgtgtaaggtggtgtgtttctgtcg

SEQ ID NO: 151014 - DNA, 3647 bp, Zea Mays
tggctcatctctctccccgcgtgtccgtccgggtttccgcctgtgcgttgcctgctgcctctgatccactgatcagtggcctcgcctccccgtgttccgctcccccctcccgccccctgatcccgcgatcggcggggcgcccgccctctctctctccgtgagtgtagcagatccggcgacccgcaggccctccgccggccgccccgccggacgatctagatccaggggaagcatctgctatcattttgttttcttcgaagtaatccaagaaaagttgcttccagatgtcaactgcaaaagtgttagatcctgcttttcaaggggctggccaaaaagttgggacagaaatatggcggattgaagattttaagccagttccgctgccaaaatctgattatgacgacctgtactaaaggtggtgcctatctatatgatatccacttctggattgggaaagattcgagtcaagatgaagctgggactgcagcaatcaagacagttgaacttgatgccatccttgggggtcgtgcaatccaacatagggaactccaaggttatgaatctgacaaattcttgtcatacttcaagccttgcattatacctttggagggtggtttcgcctctgggttcaaaaagcctgaagaggagaagtttgaaacacggttgtatatttgcagagggaagagagctattcgggttaaagaggttcccttcgcccggtcatcattaaaccatgatgatgtgtttgtcttagatgctgaaaataagatataccagtttaatggtgctaactccaatatccaagaaagggccaaagcgttggaagtaatccaacatttaaaggagaagtaccatgggggtgtttgcgatgttgcgatcgttgatgatgggaaattacaggcagagtcagactctggtgaattctgggtcctttttggaggttttgcaccaattgggaaaaaaaccgtgagtgatgatgatgttgtacttgaaactacagcaccaaggctgtacagcatcaatgatggccaattgaagctggaagaaacagctcttacaaaagccgtgcttgaaaataccaaatgtttcttacttgactgtggggctgaaatatatgtatgggttggccgggtaacacaaatggaggatagaaaatctgccactaaagcagttgaggaatttcttattaatcaaaagcgtccaaagacaacgagggtaactcaagtgattcaaggttatgagagtcatgctttcaagtccaagtttgaatcatggccagtgggtaatgctactgggagccctggcgcagaggaagggcggggaaaagttgcagctttattgaagcaacaaggtgttgatctcaaaggagctgcaaaaagcaccactccagtaaatgaggaagttcctcctttgcttgaaggcggtggaaagcttgaggtatggtgtgttgatggcaacgctaagactgctctgccaaaagaggatattggaaagttttacagtggagactgttatatcattctctatacgtatcattcgggcgacaagaaagaagaatactatctcagctactggattgggaaggatagcttggtggacgatcaagtgtcggcatctcaaataactaatacagtgtggaattcattgaaaggacggccagttctgggtcgtatataccaagggaaggagccaccacagtttgttgcacttttccagcccatgattatcttgaagggtggaattggatctggatacaagaagctcatagaagaaaagggtgcgacgggtgagacttatactactgaaggcatagctctaattcgagtatctgggacatctatccacaacaacaagactcttcaagtcgatacggtggcaacatctttaagctcaatggagtgtttcatactgcaatctggaaatgctatgtttacatggtttggcaattctagcacatatgagcaacagcagtgggcagcaaaagttgctgaatttttgaagcctggcgttgcagtgaagcactgcaaggaggggacagagagttcaggtttctggtttgctcttggaggaaaacagagttatacaaataaaaatgctcctcaggatattattactagagagcctcacttgtatgcattctcattcaagaacgggcttattcaggtaactgagatcttcaacttttcccaagatgatttgttaactgaagacatgatgatacttgacacacatggtgaggttttcatttggattggtcagtgcgtggaatcaaaagagaaacagaaggcatttgatattggccagaaatacgtggagcatgcaaattctattgatgatctttctccatatgcaccactatataaagttatggaagggaatgagccatgcttcttcaagacatatttctcttgggataacacaaaatctttggttcatggaaattccttccagaagaaactctcactgctttttggattgcgttctgagggtgcatctaggagctctggtaatggtggaccaactcaaagggcatctgcattagcagctctatcatctgcattcaatccatcgtctcaacaaaggctctctaatgagaggcctaaaagcacaggcgatggacccactcaacgcgcctcagcactggctgccctatctaatgcattcaattcatccttaaaacccaaaacaccacctccatctcgctcaggtcaaggttcccaaagagcagctgccgtagctgcactatcctctgtgctgactgctgagcaatctggatcttcagaaaatctacgagccaaagctagcagcacaggagataagactgatgtcgataggcctgtcataactccagctggaccatctggtccatcttctcctcagtctgaagctggggagtccaatgtgtttcgccaggaaaaagatgctgcagtagatggggcaccatctgacactgatggagcagtggctgagacccgagaggaagaaacgacagagaatgttggtgaagcgacatttagctatgaccgcttgatatctaaatctaccgatccagtccgtgggatagattacaaacgcagagaggcatacttatctgatagtgagttccaaagtgtttttggcatgaccaaggatgcattctaccgacagccaaattggaagcaagaactacagaagcgaaaagcagatctcttctaaagagaacacgccttgtctcaagcgcctgctagaaaatgcgaccctctcgtcgtgaatggtcggtcccatgagagtaagtctcaatatattgctggttatttctgaggacgggctactggtggctttgctcggttgttttttttttgcaaccaattttataggccgattcttttatttgtacatggcctgggttgtgctgcttgcgaggtcctaagatgctcatagctttgtgttgtgactgtccatatgtgtatatcgttttttttcatcagtttgttacgtatgggcatatcctggtaggttgtcaattgtattgtcattcagatgtattgcacacgaaatacttgtgctgtctgtttgttgttgatggttggcagttgttttgtttgggatttgaaacacttgattggatttctctgcccgcacaagttttcgtgtggctttgcattccc

SEQ ID NO: 151015 - DNA, 3654 bp, Zea Mays
cgtccgggtttccgcctgtgcgttgcctgctgcctctgatccactgatcagtggcctcgcctccccgtgttccgctcccccctcccgccccctgatcccgcgatcggcggggcgcccgccctctctctctccgtgagtgtagcagatccggcgacccgcaggccctccgccggccgccccgccggacgatctagatccaggggaagcatctgctatcattttgttttcttcgaagtaatccaagaaaagttgcttccagatgtcaactgcaaaagtgttagatcctgcttttcaaggggctggccaaaaagttgggacagaaatatggcggattgaagattttaagccagttccgctgccaaaatctgattatggtaaattctactgtggagattcatacatagttctgcagacgacctgtactaaaggtggtgcctatctatatgatatccacttctggattgggaaagattcgagtcaagatgaagctgggactgcagcaatcaagacagttgaacttgatgccatccttgggggtcgtgcaatccaacatagggaactccaaggttatgaatctgacaaattcttgtcatacttcaagccttgcattatacctttggagggtggtttcgcctctgggttcaaaaagcctgaagaggagaagtttgaaacacggttgtatatttgcagagggaagagagctattcgggttaaagaggttcccttcgcccggtcatcattaaaccatgatgatgtgtttgtcttagatgctgaaaataagatataccagtttaatggtgctaactccaatatccaagaaagggccaaagcgttggaagtaatccaacatttaaaggagaagtaccatgggggtgtttgcgatgttgcgatcgttgatgatgggaaattacaggcagagtcagactctggtgaattctgggtcctttttggaggttttgcaccaattgggaaaaaaaccgtgagtgatgatgatgttgtacttgaaactacagcaccaaggctgtacagcatcaatgatggccaattgaagctggaagaaacagctcttacaaaagccgtgcttgaaaataccaaatgtttcttacttgactgtggggctgaaatatatgtatgggttggccgggtaacacaaatggaggatagaaaatctgccactaaagcagttgaggaatttcttattaatcaaaagcgtccaaagacaacgagggtaactcaagtgattcaaggttatgagagtcatgctttcaagtccaagtttgaatcatggccagtgggtaatgctactgggagccctggcgcagaggaagggcggggaaaagttgcagctttattgaagcaacaaggtgttgatctcaaaggagctgcaaaaagcaccactccagtaaatgaggaagttcctcctttgcttgaaggcggtggaaagcttgaggtatggtgtgttgatggcaacgctaagactgctctgccaaaagaggatattggaaagttttacagtggagactgttatatcattctctatacgtatcattcgggcgacaagaaagaagaatactatctcagctactggattgggaaggatagcttggtggacgatcaagtgtcggcatctcaaataactaatacagtgtggaattcattgaaaggacggccagttctgggtcgtatataccaagggaaggagccaccacagtttgttgcacttttccagcccatgattatcttgaagggtggaattggatctggatacaagaagctcatagaagaaaagggtgcgacgggtgagacttatactactgaaggcatagctctaattcgagtatctgggacatctatccacaacaacaagactcttcaagtcgatacggtggcaacatctttaagctcaatggagtgtttcatactgcaatctggaaatgctatgtttacatggtttggcaattctagcacatatgagcaacagcagtgggcagcaaaagttgctgaatttttgaagcctggcgttgcagtgaagcactgcaaggaggggacagagagttcaggtttctggtttgctcttggaggaaaacagagttatacaaataaaaatgctcctcaggatattattactagagagcctcacttgtatgcattctcattcaagaacgggagactggaggtaactgagatcttcaacttttcccaagatgatttgttaactgaagacatgatgatacttgacacacatggtgaggttttcatttggattggtcagtgcgtggaatcaaaagagaaacagaaggcatttgatattggccagaaatacgtggagcatgcaaattctattgatgatctttctccatatgcaccactatataaagttatggaagggaatgagccatgcttcttcaagacatatttctcttgggataacacaaaatctttggttcatggaaattccttccagaagaaactctcactgctttttggattgcgttctgagggtgcatctaggagctctggtaatggtggaccaactcaaagggcatctgcattagcagctctatcatctgcattcaatccatcgtctcaacaaaggctctctaatgagaggcctaaaagcacaggcgatggacccactcaacgcgcctcagcactggctgccctatctaatgcattcaattcatccttaaaacccaaaacaccacctccatctcgctcaggtcaaggttcccaaagagcagctgccgtagctgcactatcctctgtgctgactgctgagcaatctggatcttcagaaaatctacgagccaaagctagcagcacaggagataagactgatgtcgataggcctgtcataactccagctggaccatctggtccatcttctcctcagtctgaagctggggagtccaatgtgtttcgccaggaaaaagatgctgcagtagatggggcaccatctgacactgatggagcagtggctgagacccgagaggaagaaacgacagagaatgttggtgaagcgacatttagctatgaccgcttgatatctaaatctaccgatccagtccgtgggatagattacaaacgcagagaggcatacttatctgatagtgagttccaaagtgtttttggcatgaccaaggatgcattctaccgacagccaaattggaagcaagaactacagaagcgaaaagcagatctcttctaaagagaacacgccttgtctcaagcgcctgctagaaaatgcgaccctctcgtcgtgaatggtcggtcccatgagagtaagtctcaatatattgctggttatttctgaggacgggctactggtggctttgctcggttgttttttttttgcaaccaattttataggccgattcttttatttgtacatggcctgggttgtgctgcttgcgaggtcctaagatgctcatagctttgtgttgtgactgtccatatgtgtatatcgttttttttcatcagtttgttacgtatgggcatatcctggtaggttgtcaattgtattgtcattcagatgtattgcacacgaaatacttgtgctgtctgtttgttgttgatggttggcagttgttttgtttgggatttgaaacacttgattggatttctctgcccgcacaagttttcgtgtggctttgc

SEQ ID NO: 151016 - DNA, 3609 bp, Zea Mays
tggctcatctctctccccgcgtgtccgtccgggtttccgcctgtgcgttgcctgctgcctctgatccactgatcagtggcctcgcctccccgtgttccgctcccccctcccgccccctgatcccgcgatcggcggggcgcccgccctctctctctccgtgagtgtagcagatccggcgacccgcaggccctccgccggccgccccgccggacgatctagatccaggggaagcatctgctatcattttgttttcttcgaagtaatccaagaaaagttgcttccagatgtcaactgcaaaagtgttagatcctgcttttcaaggggctggccaaaaagttgggacagaaatatggcggattgaagattttaagccagttccgctgccaaaatctgattatggtaaattctactgtggagattcatacatagttctgcagacgacctgtactaaaggtggtgcctatctatatgatatccacttctggattgggaaagattcgagtcaagatgaagctgggactgcagcaatcaagacagttgaacttgatgccatccttgggggtcgtgcaatccaacatagggaactccaaggttatgaatctgacaaattcttgtcatacttcaagccttgcattatacctttggagggtggtttcgcctctgggttcaaaaagcctgaagaggagaagtttgaaacacggttgtatatttgcagagggaagagagctattcgggttaaagaggttcccttcgcccggtcatcattaaaccatgatgatgtgtttgtcttagatgctgaaaataagatataccagtttaatggtgctaactccaatatccaagaaagggccaaagcgttggaagtaatccaacatttaaaggagaagtaccatgggggtgtttgcgatgttgcgatcgttgatgatgggaaattacaggcagagtcagactctggtgaattctgggtcctttttggaggttttgcaccaattgggaaaaaaaccgtgagtgatgatgatgttgtacttgaaactacagcaccaaggctgtacagcatcaatgatggccaattgaagctggaagaaacagctcttacaaaagccgtgcttgaaaataccaaatgtttcttacttgactgtggggctgaaatatatgtatgggttggccgggtaacacaaatggaggatagaaaatctgccactaaagcagttgaggaatttcttattaatcaaaagcgtccaaagacaacgagggtaactcaagtgattcaaggttatgagagtcatgctttcaagtccaagtttgaatcatggccagtgggtaatgctactgggagccctggcgcagaggaagggcggggaaaagttgcagctttattgaagcaacaaggtgttgatctcaaaggagctgcaaaaagcaccactccagtaaatgaggaagttcctcctttgcttgaaggcggtggaaagcttgaggtatggtgtgttgatggcaacgctaagactgctctgccaaaagaggatattggaaagttttacagtggagactgttatatcattctctatacgtatcattcgggcgacaagaaagaagaatactatctcagctactggattgggaaggatagcttggtggacgatcaagtgtcggcatctcaaataactaatacagtgtggaattcattgaaaggacggccagttctgggtcgtatataccaagggaaggagccaccacagtttgttgcacttttccagcccatgattatcttgaagggtggaattggatctggatacaagaagctcatagaagaaaagggtgcgacgggtgagacttatactactgaaggcatagctctaattcgagtatctgggacatctatccacaacaacaagactcttcaagtcgatacggtggcaacatctttaagctcaatggagtgtttcatactgcaatctggaaatgctatgtttacatggtttggcaattctagcacatatgagcaacagcagtgggcagcaaaagttgctgaatttttgaagcctggcgttgcagtgaagcactgcaaggaggggacagagagttcaggtttctggtttgctcttggaggaaaacagagttatacaaataaaaatgctcctcaggatattattactagagagcctcacttgtatgcattctcattcaagaacgggcttattcaggtaactgagatcttcaacttttcccaagatgatttgttaactgaagacatgatgatacttgacacacatggtgaggttttcatttggattggtcagtgcgtggaatcaaaagagaaacagaaggcatttgatattggccagaaatacgtggagcatgcaaattctattgatgatctttctccatatgcaccactatataaagttatggaagggaatgagccatgcttcttcaagacatatttctcttgggataacacaaaatctttggttcatggaaattccttccagaagaaactctcactgctttttggattgcgttctgagggtgcatctaggagctctggtaatggtggaccaactcaaagggcatctgcattagcagctctatcatctgcattcaatccatcgtctcaacaaaggctctctaatgagaggcctaaaagcacaggcgatggacccactcaacgcgcctcagcactggctgccctatctaatgcattcaattcatccttaaaacccaaaacaccacctccatctcgctcaggtcaaggttcccaaagagcagctgccgtagctgcactatcctctgtgctgactgctgagcaatctggatcttcagaaaatctacgagccaaagctagcagcacaggagataagactgatgtcgataggcctgtcataactccagctggaccatctggtccatcttctcctcagtctgaagctggggagtccaatgtgtttcgccaggaaaaagatgctgcagtagatggggcaccatctgacactgatggagcagtggctgagacccgagaggaagaaacgacagagaatgttggtgaagcgacatttagctatgaccgcttgatatctaaatctaccgatccagtccgtgggatagattacaaacgcagagaggcatacttatctgatagtgagttccaaagtgtttttggcatgaccaaggatgcattctaccgacagccaaattggaagcaagaactacagaagcgaaaagcagatctcttctaaagagaacacgccttgtctcaagcgcctgctagaaaatgcgaccctctcgtcgtgaatggtcggtcccatgagagtaagtctcaatatattgctggttatttctgaggacgggctactggtggctttgctcggttgttttttttttgcaaccaattttataggccgattcttttatttgtacatggcctgggttgtgctgcttgcgaggtcctaagatgctcatagctttgtgttgtgactgtccatatgtgtatatcgttttttttcatcagtttgttacgtatgggcatatcctggtaggttgtcaattgtattgtcattcagatgtattgcacacgaaatacttgtgctgtctgtttgttgttgatggttggca

SEQ ID NO: 151017 - DNA, 1899 bp, Zea Mays
tccccccaggcgttgcgcttgcgcagcaaatcaacaaactactacaaagccacttcctgctctcgctccgccgccgccgcctccctccccagtcgatcaccaaacctcagtccaaactccaaacccccgccgcatcagaaaaaaaccctaggccatggacgccgcggcgctggagtcgctcatcctggacctccacgccatcgaggtcgtgaagctgggctccttcacgctcaagtccggcatcaaatcgcccatctacctcgacctccgcgcgctcgtctcccacccgcgcctgctctccgccgtcgcctcgctccttcacgcgctcccggccacgcgcccctacggcctcgtctgcggtgtcccctacaccgcgctccccatcgccgccgtcctctccgtcgaccgctcaatccccatgctcatgcgccgcaaggaggtcaaggcccacggcaccgccaagtccatcgagggctccttcagccccggggacaccgtcctcatcatcgaggacctcgtcaccagtggcgcctccgtgctcgagaccgccgccccgctccgcgccgaggggctcgtcgtcgccgacgccgtagtcgtcgtcgaccgcgagcagggtggcagggagaacctcgccgctaatgggatcacgctgcactcgctcatgaccctcacggaggtgctggccgtgctgctcaagcacgggaaggtgaccgaggagaaggcgcaggaggtgaggcagttcctcgacgccaacaggaaggtggcggtgcctggggcagcacctgttacacccagggtgctcagaaagacattttcggagagggcgaatcttgccaccaaccctatggggaagaagctcttcgagctgatggagaccaagcagaccaacctgtgtgttgccgctgatgtcgggacaacaaaggaactccttgagctggctgacaaggtcggccctcaaatttgtatgttgaaaacccatgtggatatattatctgattttaccccagattttggctctaagctccgctcgattgctgagaagcacaactttttgatcttcgaagaccgcaagtttgctgacattggaaatacagtaaccatgcaatatgaaggaggaatattccgcatattggattgggccgatattgttaatgcgcatatagtacctggacctggaatcgtagatggcttgaagctgaagggtttgcctaaaggaagagggctacttctgctcgctgagatgagctctgccggcaaccttgcccatggagattacactgctgctgccgtaaagattgctgagcaacattctgattttgtgatgggatttatatcagtaaatcctgagtcttggtcagtaaaaccatcaagccctgcatttatccatgccacgcctggagttcagatggtcgcaggaggagatgatcttgggcaacaatacaacactcccgaatctgtgataaactacaggggcagtgacataatcatagttggccgtgggattataaaggcgagcgatcctatgaagaaggcgtgggagtaccgcttgcaagggtggcaggcatacaagaacagcttgctatgaaggaaggggggcgccatgagcatccccaagtataagggcgaatccagtcagtttggcgaaataagcgcatgcggaaaggttttcctgcagttgagtcaggacctaattgacatcagattcactgcagaggagactcatgccccatcatcgtttctgttacaataatttcctctcggtttaccctgttcttgctggttgagttaggcacgttgtgatgcctgtgcgcggttaaatcgtcttactgccatgccacttgaggtttggactcttgagcaagcaattttatcgatgccgagaattgtatgactctacgt

SEQ ID NO: 151018 - DNA, 689 bp, Zea Mays
ttttaaagcatcagtttgttggtagattggtttcctcttgaccatttggaaatatatttagatcataatggccacaaccattaaaaatctgccattttgtttggtaaacaaaattctactttacacatttgatatatattgtggcattggcagatatcgctgcagcgagaatattctcctttttgaaaagttcaaatcttgagatatatgcttcagtctggaggtgtttcttgcctttttgcaatttaggtgataaactacaggggcagtgacataatcatagttggccgtgggattataaaggcgagcgatcctatgaagaaggcgtgggagtaccgcttgcaagggtggcaggcatacaagaacagcttgctatgaaggaaggggggcgccatgagcatccccaagtataagggcgaatccagtcagtttggcgaaataagcgcatgcggaaaggttttcctgcagttgagtcaggacctaattgacatcagattcactgcagaggagactcatgccccatcatcgtttctgttacaataatttcctctcggtttaccctgttcttgctggttgagttaggcacgttgtgatgcctgtgcgcggttaaatcgtcttactgccatgccacttgaggtttggactcttgagcaagcaattttatcgatgccgagaattgtatgactcta

SEQ ID NO: 151019 - DNA, 4100 bp, Zea Mays
agaggacgattcacccgatgtaatacgcgattgttccaaccaagattcgaaggagaggcgacgcacggcctgactgtgcatcacatcgatgccttgcaccacatcgatgccttgcacctgtctctcatcacccccgtcctcggtggctggtgcggcgatcccttctccatccacagcgccgagagaggtctcaatggtgaggtctgccatcacgcacacaaacagtgggaagacctagaggcggcgggctgccatggtgaggtctgccgtctgccatcagcccatcacgcaggacgaataggaagaccatcagttgtgcgatcagcgtagggcgcctggttcggtccggtccggtccactgggccatcgggggcaaatcacaatgaaccagagagtgcaggagatacggcgggagggggtttatgtaaaattgctgctggacgttggatgaggaagggatggtccagattaaaagtgctcacatgtgcacgggagcgccatgagcacgggacacgatccctttttttttctcctcaaatctgaatcctgccaaaatacccgcagcccagctccgattccaacgaccaccgctccttcctcgccccagcctagcagcgcaggcgcggcgcagcgcaggccctgcgccgccctccgcgcacgtccaggtatccttcgaccgcaaccgcgcgcgcctctctccctcctcctgccgcaacacgtcctcctcgacgtcgtcgcctccgcccccaagaagtcgtacgtgatcgctccggacctccgtcgtttccttggatggatcggacgccattgttcatccggccggtctgcctccgttttgctcgctgaccgcccgcgctgagcccgcccgcccgctccctggcacgaggacgatgtagaggagcgcaagaacgggaggcggcgttggggacgacggggacgagatggaggggcgcaatcccgtgcagagattcgttgatagcccaaagccatacaacagaaggaaagcgcgcggtatgcaaacaaggatggattcgagtgaccacggcgaccgccaaggtccgagagcctgtgaagaattgccaggcaagatggataacgaccgtgccgatcgtcaacgcttgaaagcctgcgaattcccagccaagatggacaacaaccatgccgatcgtcaagtttcgaaagcctgcgaatcgaaaggcaatgcctgtgaattgccaggcaagatggataatgaccaccccgtccgtcaaggtttgaaagcccgtggactactgcaacctaagtcggatgctagtgaagatggcgtatgcgaaggtttgaaagcttgtggattgacagccaacaagatggatgctactgaccaatgcgaccacaaaggctccaaagtatgtagggtggtgacaaccaagacggatactagtgaccaaggcgattgtcaaaccttcaaagtatgtgggatagcagccaagatggatgttaacgaccatgccgatcaccaaggctccaaagccagtggaatgccaaccaagacagatgctaatgatcaatgcagcaaccaaggttttgttacatgtactgctcatattcctattttgctgccccttgtaaattgtccctttaagacagctgagaggttagatcatcttctgaaccaaccagcaaacagatactgtgctgattgtggtgctccagatccaaaatgggtgtcaatgacttttggtgttttcatttgcatcaagtgttcaggagctcatagaagtcttggagtacacatatccaaggcaagacatgtggtttcggtgaagctagacgagtgggcagatgaacaggttgatattttagctgattcaggtgggaatgctgcagtaaacatgatatatgaagcatttgtgcccgaaaactacgcgaagccaaggcaagattgttcagcggaggagcgcaatgattttattaggagaaaatacgaggctcaacaatttttgactaacccccagctttcatgtcctccacgacgcaacgagaaacataatcaccaacagcatagtactagttcaagtcgacatggtttaggccattcattcaggaacagctggaggagaaaagagcacgaggccaaatcaacaaagaaaacaatcgaggtgggcatggtagagtttgtcggattgattaagatcgacatcataagaggcacaaatctagctatccgtgatgtcatgtcgagtgatccttacgttatcattaacctaggacaccagacaatgaaaacgaaagtggtaaagagcagtctaaatcctgtatggaatgaaaggctcatgctttcgatacccgacccagtgccgctgcttaaactgcaagtctacgacaaggacacgttcaccactgacgaccggatgggggaggccgagatcaacatccagccactggttgctgcagccaaagcccacgagacctctgctatcgcagataccgcgcagctcaacaaatggctggcgaaagatggcatctggatcccgagggacagcgccatctccatcgtcaacggcaaggtgaagcaggtggtgaatgccaggctccagaacgtcgagcgcggccagcttgagatggagctcgaccatctgaaccgatgcaaatacttattgggaatgacgattctgtgctgtatacttgccatggacgccgcggcgctggagtcgctcatcctggacctccacgccatcgaggtcgtgaagctgggctccttcacgctcaagtccggcatcaaatcgcccatctacctcgacctccgcgcgctcgtctcccacccgcgcctgctctccgccgtcgcctcgctccttcacgcgctcccggccacgcgcccctacggcctcgtctgcggtgtcccctacaccgcgctccccatcgccgccgtcctctccgtcgaccgctcaatccccatgctcatgcgccgcaaggaggtcaaggcccacggcaccgccaagtccatcgagggctccttcagccccggggacaccgtcctcatcatcgaggacctcgtcaccagtggcgcctccgtgctcgagaccgccgccccgctccgcgccgaggggctcgtcgtcgccgacgccgtagtcgtcgtcgaccgcgagcagggtggcagggagaacctcgccgctaatgggatcacgctgcactcgctcatgaccctcacggaggtgctggccgtgctgctcaagcacgggaaggtgaccgaggagaaggcgcaggaggtgaggcagttcctcgacgccaacaggaaggtggcggtgcctggggcagcacctgttacacccagggtgctcagaaagacattttcggagagggcgaatcttgccaccaaccctatggggaagaagctcttcgagctgatggagaccaagcagaccaacctgtgtgttgccgctgatgtcgggacaacaaaggaactccttgagctggctgacaaggtcggccctcaaatttgtatgttgaaaacccatgtggatatattatctgattttaccccagattttggctctaagctccgctcgattgctgagaagcacaactttttgatcttcgaagaccgcaagtttgctgacattggaaatacagtaaccatgcaatatgaaggaggaatattccgcatattggattgggccgatattgttaatgcgcatatagtacctggacctggaatcgtagatggcttgaagctgaagggtttgcctaaaggaagagggctacttctgctcgctgagatgagctctgccggcaaccttgcccatggagattacactgctgctgccgtaaagattgctgagcaacattctgattttgtgatgggatttatatcagtaaatcctgagtcttggtcagtaaaaccatcaagccctgcatttatccatgccacgcctggagttcagatggtcgcaggaggagatgatcttgggcaacaatacaacactcccgaatctgtgataaactacaggggcagtgacataatcatagttggccgtgggattataaaggcgagcgatcctatgaagaaggcgtgggagtaccgcttgcaagggtggcaggcatacaagaacagcttgctatga

SEQ ID NO: 151020 - DNA, 2074 bp, Zea Mays
atggaggggcgcaatcccgtgcagagattcgttgatagcccaaagccatacaacagaaggaaagcgcgcggtatgcaaacaaggatggattcgagtgaccacggcgaccgccaaggtccgagagcctgtgaagaattgccaggcaagatggataacgaccgtgccgatcgtcaacgcttgaaagcctgcgaattcccagccaagatggacaacaaccatgccgatcgtcaagtttcgaaagcctgcgaatcgaaaggcaatgcctgtgaattgccaggcaagatggataatgaccaccccgtccgtcaaggtttgaaagcccgtggactactgcaacctaagtcggatgctagtgaagatggcgtatgcgaaggtttgaaagcttgtggattgacagccaacaagatggatgctactgaccaatgcgaccacaaaggctccaaagtatgtagggtggtgacaaccaagacggatactagtgaccaaggcgattgtcaaaccttcaaagtatgtgggatagcagccaagatggatgttaacgaccatgccgatcaccaaggctccaaagccagtggaatgccaaccaagacagatgctaatgatcaatgcagcaaccaaggttttgttacatgtactgctcatattcctattttgctgccccttgtaaattgtccctttaagacagctgagaggttagatcatcttctgaaccaaccagcaaacagatactgtgctgattgtggtgctccagatccaaaatgggtgtcaatgacttttggtgttttcatttgcatcaagtgttcaggagctcatagaagtcttggagtacacatatccaaggtggtttcggtgaagctagacgagtgggcagatgaacaggttgatattttagctgattcaggtgggaatgctgcagtaaacatgatatatgaagcatttgtgcccgaaaactacgcgaagccaaggcaagattgttcagcggaggagcgcaatgattttattaggagaaaatacgaggctcaacaatttttgactaacccccagctttcatgtcctccacgacgcaacgagaaacataatcaccaacagcatagtactagttcaagtcgacatggtttaggccattcattcaggaacagctggaggagaaaagagcacgaggccaaatcaacaaagaaaacaatcgaggtgggcatggtagagtttgtcggattgattaagatcgacatcataagaggcacaaatctagctatccgtgatgtcatgtcgagtgatccttacgttatcattaacctaggacaccagacaatgaaaacgaaagtggtaaagagcagtctaaatcctgtatggaatgaaaggctcatgctttcgatacccgacccagtgccgctgcttaaactgcaagtctacgacaaggacacgttcaccactgacgaccggatgggggaggccgagatcaacatccagccactggttgctgcagccaaagcccacgagacctctgctatcgcagataccgcgcagctcaacaaatggctggcgaaagatggcatctggatcccgagggacagcgccatctccatcgtcaacggcaaggtgaagcaggtggtgaatgccaggctccagaacgtcgagcgcggccagcttgagatggagctcgagtgcgtccctctcactcaatagcttgctgctcagtaggagtcgagtcctgagtccagattcacttacttgtgtacttcttcattagtctgcctccctctgtttgtgatgacagccatctgaaccgatgcaaatacttattgggaatgacgattctgtgctgtatacttgtatgtgtgggcaaacgaaacaaggatataccatgcccattcctgttgacatgcgagtctagtatacatgttacagttttctgctgtatctaccgagcatttcctgcaagttgctggaataatccattccatggactgcgagcctggtggttattccttgttttattatgataaaagtcttgacggttttgtaatgcaagctgcccccatcgggtttaattcctgccgcagtttcggcgtcaaca

SEQ ID NO: 151021 - DNA, 101 bp, Zea Mays
cactaaagcacacaactatcttatcctttggattctccatagattcatatgggctaataatctatcagacatcaactactttgttggataagaaaagaaat

SEQ ID NO: 151022 - DNA, 1785 bp, Zea Mays
atgtcgaaaactgttgatagcagtgcgacattcaggaagtccagcgacgacacctccaaagatggagcagtggtccagcgagtaattcgtgagaagactgctgctgtgctacttcggaggaagttcgacttggcaacgtttaatgacggtgagtccgttgaagatttcgcgctgcgcctaaatggcatggcagcggaactctccactcttggagctggcgtggaagaagagaagatcgtggagaaaattgctcgcagcgttccaccacgcttcaagcaaatcgtcctctccatcacgactctcctcgacctgtcaaccctcactgtgtctgacatggtggggaggttgagggcagcggaggacgcctttgaggaggccccaggatcactgcaacacagtggtcgactctacctcacggaggaggaatggaatgcccgacgcaagaaggaggtcgagcaccaccctagcagcagttccagtggaggagcagggcgccatggtggaggatatcgtggccgtggtcgtggccgtggccgcggtcgtggccgaggagggcgctcaccaggtgggccatcatctggaaggaccaccggtgatgagtgcagaaggtgtggaaagatgggacactgggcgcgcgagtgtccatcaaagcacaagaaggagcaagcacatgctgtccaagaagaagaggaggctacacttcttgtcgcaagaacgttcccggcccagtgggactgggaaacccacggcaacaccgacccagtaaatgaagaccaggatgtgtttacgatggagtatgccatcgggaagcaaacacgtccagaggtagaagaggctggtgaagaatcgggagatgagcaaactgctagtgaaactgaagatgagcaagctactggcgaatctgaaactgctggtggtctgtcccctttaacccctcatgctgatacagagcacacttcggaagaggaggatgaaatgcaggaagtggagtttgcttcaccaccggagggaaatattgatgagtatctagatgcctatagagcagaagatgatccacttagattccgcaaggtagatggactactggaatccaaaactccacctggttatgcaacaaggaggctgttagatgaggagttacatgcaaacttacctgggaggcaggaactcgccggcaacctgcagggttgtctctccggcgcagtttccaacactaagcgcgtgcacgtgacgcgcgacgtggtctttgatgagtccgcccagtgggactggtcggagggagctaagaccggcactggcgcggatcatggcggcgacgacacgttcaccatccaatttcaggtggtggcggggcaaggaggtgtccaggcgggggcaccggtggctgttttgcagcatatgacgccaccaggaacaccaggggaggccggagtagcttctccggtccgcacgactggcgcgtcgcacgctgtgactgaggctgaggctggtggttcccctgccttaatagctaggggatttggaagtggacagcctggatcagagcaatttgagatgacagttcctgataacaaggtcggtctcattatcggaaaaggtggtgagacaattaaaggcatgcagaccaaatctggtgctcgtattcaggtcgatatgttcaaccattgcctgctgctgctgctggatatggtgctagcgggcagtggacggcatgagccttgtcttccgaacttcgatgacagcaaggcctttaccccgttatcgaaagagattgtaaccccttga

SEQ ID NO: 151023 - DNA, 228 bp, Zea Mays
atgggcaggctagggagcgggcaagatttccggcggccgcctacttttgattacgtgctgaccgcttcctcctcctccatgcaaaggggttgtggagaaggctccacgcgcgttgagaggcgcactgctcggaaggaggttcagaaggaggctaatgtttcgcatgtggttgagggactgagaaagagagaggcatggggacgtgggaagagagtgactgtggattga

SEQ ID NO: 151024 - DNA, 1536 bp, Zea Mays
cccccttttgccaccggcgtttgcccgttcctcaattccaccgacatcatggaaggaggtcctcgaagccgcagggctaagcccacgcccaacggcaaaggtgtctctccgatgagggattcctgtctggagctgagcggtaaaggtgtctcgtcggagagggattctggtctggagctgagcaagtcgcctccgccgccgcccgctccatggtggactgatccttcggcgccggtgaccggagaccatagctggctgatcctcgaccgcatcgtccaccgcagccggaagcggtgcggggacgctacgacctcggcgctcgcccacgagtgcgtcggccggccgatccgtgcctccctccggatcgcggacccccccgcggtgtcccgtctctacgtccactggaccagcattccagccattgactgcatgaaggagcctgtcgtcatcgccgcccaccacaactccattctattccgggtgtctgtccccttcgacgatccctgtttctggagccgaatgatctactttcctgatgattactttgtctactcgtcctcctcgtcgccgccgtcccttactcggcttcccccttgcttcacccgggttcccctttgcttcggcggtggacgcaccgaccccgagttggataagtggttacaaccgcaccggcgccagcaacagcggaccatgattgaagaagatatgggcatcctctgccatggagacaagggtgaattcacggtggcggatctcacctaccgtttcaaccaggaggtccaactctgcttgctgcaccatcccccttctgcctctgatgctgaaatgaaatggagtgttgagaagctgcagatccctgccgatatgaagatcagcctctactcgtttaagactgatgccgtcgtcactattggcgagaggtgcttgtgctgggttgactactaccatggtatgctgctcattgatgtcctcgctggcagcaacaacaacagcaggctccgttatataccactcccatctaaggctttgaagactggccgtgtgtacaaggacggtgaacctgattcctttcggcgtctcagtgtctgtgatggtggcatcattaagctcgtctgcattattaccaaagagcacccttctccttatcccttcaccatagaaacatggactttggttgatatccaccaaggtagatgggagaaggatgtcaacttgaccatgggagccagcgagttcttcaatctttacaacgacactgccaagagtcgcctcccacgagtgatgccaagttttcctgtggtgagcttggttgatccagatgtcatttgcttccgcctcgaggacaagttccgtgaccctttctggatggttcaagtcaacatgcggaataagttgctgctgtcaagttccatctatatcaacgaagaagaagaagaaggataccctcctaaaagggactgcaggaactatttcatttttcatgacttcattgccagcaagttctcctcttacttgagtgaagacgccatcaaaagg

SEQ ID NO: 151025 - DNA, 396 bp, Zea Mays
atgtcgtcgctgacctcgcgtcccgtctcgctgctacgatgccttcgtggaagcttgaaggtttcacgacatatctctgtggagcagattggcatatgtgaaattgataagacggtggtagatggtgatggtttttgcattatcggttctttagcgtgtcgactgtatattttgttgaaccatggctttcattcaagatttttgaagatctatctagaacttccaccaatagtccaaccattacaaatggaagaggatctagagcaactgaaagtttttgaaaacagctatcggatgaagttcaaaaatgaactagcggatgataaatatttaagaacggaggtgatcaaagtggagcaaaatgcccgtggtgtggatgcacctgaggtgcattga

SEQ ID NO: 151026 - DNA, 315 bp, Zea Mays
tttggttacccagtagtccagctaccaacacttgaaacaagctcttcagatgagaagcagcagaagcaacttttctttagaatctacttggtttctaaggattgtcagcatcataagttttccgccacatcctttcttataggtgattgtttgatccccaacctagactcaaagaaactttactgttagttgcagaattgatgctcagttcctttaaaaatgtctcttatagatggaatcggaacacacttgtgcagattagtatcacgatgtaattatttttatttataataatgagtattatttattcctaga

SEQ ID NO: 151027 - DNA, 103 bp, Zea Mays
ctcaaagtgagcctaggagtgctattatgttttatttcagacctcaaagtggtgaatatctatcttgtaacatagatgagaaattccacaacaataaagttta

SEQ ID NO: 151028 - DNA, 345 bp, Zea Mays
atggccgctgggcgcctgcctgggcgtgcgcgccagcgcggtgcgcatcgtgggcgtgggcgcgtggcccgacaggcagggccgctggccgctggccgctggccgctgggcgtgcgcgagcgcgcctggggagatggccgctcgccgctgggcgcctggggagatggccgctgcccgctgggcgcctgggcggccgcagcggtgcgcatcgtggcgtgggctagtggtggctggcggagaccggagaagacgaatggatgggcaggatggcggcggccgacgcctcgggagtcgaggagaaaattggagacggaagaggtgggaaccctaaacggctacaactaa

SEQ ID NO: 151029 - DNA, 826 bp, Zea Mays
gatggcgtcttcactcaagtaagagaacttgttggcaatgaagtcatgaaaaatgaaatagttcttgcagtcccttttaggagggtatccttcttcttcgttgatatagatggaacttaacagtagcaacttatttcgcatgttgacttgaaccatccagaaaggatcgcggaacttgtcctcgaggaggaagcaaatgacatctggatcaaccaagctcaccacaggaaaacttggcctcactcgtgggaggcaactcttggcagcgtcgtcgtaaagattgaataactcgctggctcccatggtcaagttgacatccttctcccatctaccttggtggatatcaaccaaagtccatgttgctatggtgaagggataaaaaagaagggtgttctttagtaataatgcagacgagcttaatgatgccaccatcacagacactgagacgtcgaaacggatctggttcaccgtccttgtacacacggccagtctttaaagccttagatggaagtggtatattacggagcctgttgttgctgtcagtgaggacatcaatcagcagcatatcatggtagtagtcaacctagcacaagaacctctcgccgatgatgacgacggcatcagtcttaaacgagtagaggttgatcttcatgttaggagggatctgcagcttctcaacactccatttcatttcagcatcagatgcagaagggggatggtgcaacaagcagagttggacctcttggttgaaacggtatgtgagatttgccaccgtgaattcacccttgtctccatggcagaggatttccatgtcttcttcaatcat

SEQ ID NO: 151030 - DNA, 423 bp, Zea Mays
atgaaatggagtgttgagaagctacagatccctgccgacatgaagatcaacctctactcgtttaagactgatgtcgtcatcaccatcggcgagaggtgcttgtgctgggttgactactaccatggtatgttgctcattgatgtcctcactgacagcaacagcaacagcaggctccgttatataccactcacatctaaggctttgaagactgatcgtgtgtacaaggacggtaaacctgatccgtttcggcgtctcagtgtctgtgatggtggtatcattaagctagtctgcattattactaaaaagcactcttctccttatcccttcaccatagcaacatggactttggttgatatctaccaaggtagatgggagaaggatgtcaacttgaccatgggagccagcgagttcttcaatctttaa

SEQ ID NO: 151031 - DNA, 187 bp, Zea Mays
gatgctgaaaatcctgggaaacaacctgtatgtgaccgttttgtcacctcgtgtaactgatcaagatctgaagaagcacttctccactgagggagaggtgattgatgcaagcattgtgtatgatccttggacaagggaatcgcgggggtttggttttgtcaccatggctgctactaaggaggcagat

SEQ ID NO: 151032 - DNA, 471 bp, Zea Mays
atgagcttaccagattctgaagaacttgaatattatcagcaccggtgtcctgtaccgtataattctcaagaaaaaatagtagatgagtttgactgggaaatggacgattacgaggattttgctgatcataaagttcaagaaggtggcctgccagaggatgagaaagaaaaattcaagttactgcatttattgctaaaaaagccagaaggaaagctattgatgatatggatcctaaggggaaagggtaaaccaaaatcaaaatcaaatccaaaggatacatgttcatggtttgatggcagcagaaaagccatgatccaactagctggagaacttttctggaaaatgggtgaagacctggatagcatcgcaaaagattatacaacttctcttgatgcttttataacgcagctgcccatgcaacaacacgtcgatttgaggttccttctcttccgccgtgacttcactgaatga

SEQ ID NO: 151033 - DNA, 285 bp, Zea Mays
atggcagtttcacgacatatctctgtggagcagattggcatatgtgaaattgataagatggtggtagattgcaagctttgtgggagagatggaacaattgtgatgattcatgggctttcattcaagatttttgaagatctatctagaacttccaccaatagtccaataccattacaaatggaagaggatctagagcaactgaaagttcttgaaaacagctatcggatgaaggtgatcaaaatggagcaaaatacctgtggtgtggatgcacatgaggtgcattga

SEQ ID NO: 151034 - DNA, 101 bp, Zea Mays
atgaaagagaagaagcaattttcacataatctgatatcaacttatcacttatcagtaggctcaaaattccaaaatcaactctgcttccaatatcatccgcc

SEQ ID NO: 151035 - DNA, 2127 bp, Zea Mays
atggacgcggaggggttgctggcgtcggcggcgatcaatctgggactggcgctggtggcgctctcgctcttctccctgctcaagaagcagccggggaacgcgcccgtttaccgtccccgccggatggcgaccggcgaccttcgtgctgatggtggctttctaccgctcggccacgggcgactaaccccgtcgttccggtggataggcgcggccttccggctctctgaagacgacgtgctgcggcgccacggcctcgacgctctcgtcatcgtccgcctcttcaagtttgggatcaattgtttcagtgtttgctcgattgttggactactggtccttgctccaacaaattatactagtgaaggtcgcgctgaaatcagaagatcgaattccatggaactgttcacggttaccaatgtgacacggggatctaataggctttgggtgcattattcatgcctttgctttatatccttgtatgtggtatatttgcttcataaggaatacagagaaattactatgagaagaattgagcacttgaagcatcactacaaaagatatgatcaatacaccgttttggtgcgaggaattccaacatgtccagaccatggggcttacgggtgttatgtggatcacttcttctcaaagcattatcggacataccgatcataccaaatcgtacatgacataggaaacattgaggcattgcagaagctggcgtcctccattgagaaacggatacagaggaaaagggagaccagtaaatgtagtctcttgggacggatctggagcaagtttacatcggatgcaacaggcattcacaaccatgaagagaaactgaaaaatgtgcaagatactatccgcctcctacagtgtgaaaatatgcttaaacaaaaggaggtacctgtagcctttgtgtcgttcaaatcccggttggaggctgcccaagctgcggagacgcagcagctcgccaatccactgtcgctggtcacaacctacgcgcccgaaccaacggacacgatatggaagaacctgtccatcccgttctggcgcatggctacgtacaggctcggagtcttcgctgccgcggtcttgctgacggtgttcttcaccatccccgtaacggccgtgcaggggatagcgcagttcgagaagatgaagaggtggttcccgccggcgcgagctgtgcagctcatacctggcttgaactccgtggtgaccgggtaccttccgggcatgatcctgaacggcttcatctacctggttccttccgcgatgctcggcatggcctcgttcgaaggctgcgtcgccagcagccagagggagatcagggcctgcgacatggtcttctacttcttgctcggaaacgtgttcttcctcagcgttctctcgggctctctgctcgaccagatcggagagtccttcacgcaccccaagaacatccccaaccgtctcgcgagcgctgtttctgcgcagtcggatttcttcatcacgtacatcttgaccaacggcatgtcagggttctccttggaggtccttcagttcggtctgttgatatggcagtttttaaaggcgcgttcaattggacacagcgaggaaccatatctgtatggcttcccttacttccgagtcgtgcccgtggtttccatcgcaatattgatcggagtggtgtacgctgtggttgcgccccttctgctcccgatccttctggtgtacttcctgctcggttacgcagtgtacatcaaccagatggaagatgtttatgagatcacatacgacacatgcgggcagtactggcccaaaattcaccactacatattcctatcaatagcgctcatgcaagtcaccatgataggactgtttgggctcaagtcgaagccaggagcctccttggccacagttcccttgcttgtgctcaacatccttttcaacgagtactgcaaggcccggtttcttccaactttcaggcatcgaccagtccaggtacgtcgggctgccaatgagcttgatgaggctgagggtacgactgaaggcgacgttgacgatgcaatctgcgcttataggccaccatggatgcgtccgacgaacctggaatctagttctgtggagcctttgaatgtttgatctgtc

SEQ ID NO: 151036 - DNA, 859 bp, Zea Mays
gaacgcattcaaaatccagctcccctccgaagtccgaacgcttcttggacgttaaacacggaggaaacaatcctcaaggtggcgtgggtggtggtgctccaaaggaatcgtcggtcgatagcgtttccagctcgctcagtgggataagctttgaagatgttagctctgcctgtgcctatgcagcagcatcctctcagcagcagaacgggtcgagcattgccaggaggaggagaacatctgaacagggtgtcaagcgaatgcgtcctttcaaacccaggcttccgaatttccttccgtcagagaaggtcgatctcaagcatcagtcggtgggcgatcccagagccgctgaggagtggatgctcgactacgctcttcggaaggaagtgaagaagctggcccgtgctcagaagaggaaagttgagatgcttgtccaggccttcgaatctgttatgcccacgcttgcaaacgagaagaagcccgagcaacacgacaatggtgacaatgacaagagaacattcactcttgcatggccttcccaagtatgtagctgatagatagccttttaagcttgtggtttagctggaaccaaccatggtctgaagtctgaacttctgaaggttctaactcagcagtcactgccagaaaaaattcttaccgctattgttttcttatctgatagttgagctactaggataggagctcgctgagttcggttagtggagggcctagtgcatgtacatatgtctcgtgtgctcagtttagtgatgaggaacgagtgtaggagactagcacaccggcaagaatgttgagatgtgttcctttaggcagatatcaataaagctctcattaacagcattta

SEQ ID NO: 151037 - DNA, 831 bp, Zea Mays
gaacgcattcaaaatccagctcccctccgaagtccgaacgcttcttggacgttaaacacggaggaaacaatcctcaaggtggcgtgggtggtggtgctccaaaggaatcgtcggtcgatagcgtttccagctcgctcagtgggataagctttgaagatgttagctctgcctgtgcctatgcagcagcatcctctcagcagcagaacgggtcgagcattgccaggaggaggagaacatctgaacagggtgtcaagcgaatgcgtcctttcaaacccaggcttccgaatttccttccgtcagagaaggtcgatctcaagcatcagtcggtgggcgatcccagagccgctgaggagtggatgctcgactacgctcttcggaaggaagtgaagaagctggcccgtgctcagaagaggaaagttgagatgcttgtccaggccttcgaatctgttatgcccacgcttgcaaacgagaagaagcccgagcaacacgacaatggtgacaatgacaagagaacattcactcttgcatggccttcccaacttgtggtttagctggaaccaaccatggtctgaagtctgaacttctgaaggttctaactcagcagtcactgccagaaaaaattcttaccgctattgttttcttatctgatagttgagctactaggataggagctcgctgagttcggttagtggagggcctagtgcatgtacatatgtctcgtgtgctcagtttagtgatgaggaacgagtgtaggagactagcacaccggcaagaatgttgagatgtgttcctttaggcagatatcaataaagctctcattaacagcattta

SEQ ID NO: 151038 - DNA, 1864 bp, Zea Mays
cagggtccctgcgccacagaagatacgacgaacgcattcaaaatccagctcccctccgaagtccgaacgcttcttggacgattcttgaaagcgtccagccacgccgccctcgccgccgccgcccccttccgaatccaaaggaacccgaatctcgcaacgatcaccaccacctgaccttccttgttcgcgtcgccccaacccttgcccgtccaggagttcagcgaaaccttccctttctttggccttgccttgcctgcctcccttccctcggtcgccgctcggataagcaacccggagtcccggaccgctccaagaaaccaataagtccccgcgccatggtgctgaggaagccagcgcgcaagaagcccaaagaccccagcgccgtgccggccgggggtccgggaagcaggggtcgctctggcggcatggccccggcgccgccggcccccaactacatgagggcgacgacctgctccggcgccaggtccagcgccgccgccgcgccgcatcctcagccagggagagagaaggcggtgctgacggctgcggcgctgcgcgcgtgcagggccacgtgctcctccgccatgaaggggcccggggccgccgggtcggcggacgcctgcccctacgcgtactgctccttcaagggccacgcccacgcggcagcacccgtgccgcccctgggcgccttcgtggcggcgcggaggcggctcatcaagacgcagcagcgcatgaagctcaagggcgcctcgccgttccgcaacgccgccgccggtcacggaagcggctacttcgtcgagatacgcgccggctcggacgtgaccagcagcgatctctcgtccgacgaagtggggcggacggagcacgtcgtgttcggtcccctgggctgctgcggtggcgacgcggagggttcgggcgctgcttccgtggacgggtcctgcgcgtccagcgacgtgatctcggctggctcgtttgagccgtcggggacgaccaagcatcgcggccttgaggagaagaagaccttggtggaccatggaggggaggacatgggtgactgcaggtctgacatctccgaggagctggacgttaaacacggaggaaacaatcctcaaggtggcgtgggtggtggtgctccaaaggaatcgtcggtcgatagcgtttccagctcgctcagtgggataagctttgaagatgttagctctgcctgtgcctatgcagcagcatcctctcagcagcagaacgggtcgagcattgccaggaggaggagaacatctgaacagggtgtcaagcgaatgcgtcctttcaaacccaggcttccgaatttccttccgtcagagaaggtcgatctcaagcatcagtcggtgggcgatcccagagccgctgaggagtggatgctcgactacgctcttcggaaggaagtgaagaagctggcccgtgctcagaagaggaaagttgagatgcttgtccaggccttcgaatctgttatgcccacgcttgcaaacgagaagaagcccgagcaacacgacaatggtgacaatgacaagagaacattcactcttgcatggccttcccaacttgtggtttagctggaaccaaccatggtctgaagtctgaacttctgaaggttctaactcagcagtcactgccagaaaaaattcttaccgctattgttttcttatctgatagttgagctactaggataggagctcgctgagttcggttagtggagggcctagtgcatgtacatatgtctcgtgtgctcagtttagtgatgaggaacgagtgtaggagactagcacaccggcaagaatgttgagatgtgttcctttaggcagatatcaataaagctctcattaacagcatt

SEQ ID NO: 151039 - DNA, 543 bp, Zea Mays
atgcacgtcagctactacaaccagtacagcagcaggatcccacccaagttcggcaccctgcagtcgctcatccgcctggacatgaacagctgcacgctcacggggcccatcccctggagctcgcatgactcgcccacctcaacatgctcttccttggctcctcagtatcgacagctcaccaggaagataccgccggagctcgacgccctcgccagcctccagtcgctcgacctctccatcaacaacctcaacggcgagatacccaccagcttcgccggcctcaacaacctcacactgctcaacctcttccggagccagctccaggcaagataccggacttggtcgcttcccgttcctagaggtgctgcagacagcaggacagcctgggggcgccatatttcatgtgggggtgccagcctggtggcggcgtgcgaccggagacaggcgctggcagaaggaaccttagcatcgggctcaccattcctcgtgatgttttcacacagatgggaacacaaggggaaaaatgaatcggtattttcataa

SEQ ID NO: 151040 - DNA, 2687 bp, Zea Mays
ccatcctgttgtccaggttcaggttcaccaagctcgtgctgctggtgccgctcgcactgtacacgccgcagccgccgccgccggaaggctcgccgtacatgggcgcggcgttgaccgccgtgtgcgcgtcctcgcgggacatgaccatggccgccgactgcacgagctcgaggcagagccggagcttgttgggctcgatgtgcgcgagccccggcacggcgcccttgaagaggaggtcggaggtgagcgtgcggaggatgtccagcggcgtcacgccctcgacggtgcgcacgttggggtcggcgtggtggtcgagaagcacggcgaccatgtcggggcacaccatctcggcggccacgtggagcggcgtcttcccggcggggcccgcggtgtggttcacgtcggcggcgcccagctccagcagcgccttcaccacctcccggctgcagttctccacggcgtagtgcagcgccagcgcctcgtccaggttcagcccctcgcccatcaccatgagcttcacgagctccacgtcggaggagtcgagcgcgcgccgcatgcgccggatcttgtggtggtcgtcgatgtcggccgcggacgaggcctccatgccgccccccggtgccgggtggtggtggtgcgcgaggaacggcgagcggcgggacagcgaggacttgaggcggagctcgtcgatcttggacacgacgtccatggggaggtgcttggcgagcacctccggcggcagcccggacttggccacgaggtgggagcacgtggtccacagctggtgcaggtcctgcttccgcgacgccatcagcaccttcatcacgtcctcgatcgacgccttctccaccatgccggccagctgcttctgcaagcgcgcagcaacggaagcattgcaattcttcatcagtaacagtaagtctgcgcgcatgtgtaagctcgctcactttcactgtgagactgtgggtcactcactggtaactaccaagcagcggcgcattgcaaaagcacacatgcagcatataaaggccggggagaaagacgagacgagagaatccctgagataagcatcagcataaatggtgagtggattggccctgtgcataaaatatagagaaggggtgcaacagtatgggaacgtcatggtgctgattggaggagcagatttttttgggggggaattaaaggaggagagggaattaaacaactaagcctaggtatgtattggagagacccagcccggccagcatgacgaaaccctagacagaaattgcaaatcaggggacggaaaactgaaagaacgattttttttctttctttctttccagctgacagcaggatgcatgctagcaaattgcacaaccttgcagtacgttgcccttgcactgcacgacggaaagccaaagccatccactatcaacccgtgctgcttgcgctgcaacagtggtgagcgtgggcggtaggcgtggccataaaagagaagagaagtgaggcagcaatggcgtttcattcggatgtggtagatagggagagataaaagaagacgatgcctcttcacctctcctacagtggtggaaagataaagtgagatctccgtgcaacgaaccctaagggagaaaggagaaagcgcggcagccgcagcagcaggccgacggacggacagaaagatggatggatgatggatggacaacgggagaaagagagcaaggagcgcacaggttcgcacgcgtgcatgcgcagggcggcggcgacgaagaaggccgaccactccctgcccggtgcctggcgcgcctgcctgctggtactgccgcggctcatcatccttcacttcatttaaaaagggcggacggcggagcggaagcaggaggggtacagagcgagatcaaatcaatataatgctgcagaatgctcggcaatcccaacataaccaaccccaactcccatcttgatccccacaataatcctcaattccctcgagtagcagacgcgaaaaataaattggaagccgtttttttcttccgttttctcccttttaattaattatttatctttcgtccggctggacggagaaggggagcaggaagaagaacaggagccaccagcaatggagaagaaaccagcaaatcaagaattgaagtcggagagagggagcgagcgagggagacgctcgaattattggttacctgggtgaggagcgcgagctcctcgacgccgaaggagcgtgcggcggcgagcgtgtcgagcgcgaggtcgacggcggcggcgcagtgcgtgtgccagcacgcgcgctcgccgcagcccggccggggctcccccttctgcggcaccagggacacctggccgctgtagaggaactgcagcagcagcaggaacacctcgtagctgacggagttgacgggtatgacggcggcgcccggcgcggcggcggaggcgccgcgcggggaggaggtgccggacggggaacgcgggctgaggtggtccagcagcagcgcgccgggcccggcggcggcctgctcggcgccgcagaagaacttgcggaagaagaggctgcgcgcggccaggatgcagcggtgcgcgtgcacgaggcggccctccacgttgaacgtgacgtcgctgaaggcctgcccgttgatgagcaggttgaggtagtccatggacagcgacttgagggtgtcctccatgggcgg

SEQ ID NO: 151041 - DNA, 1132 bp, Zea Mays
gggccaaaacccactcgcttccgttcaccatggggccgccggtccaaattcgcgtcacggcccaaaacagtgaaaggcttgccgagccagacagacggagtgcttccagttgcagccaagccaaccgaaaccgatggcgtcgggctcccgcggcggcggcgggagcgacttctccgtggtcgtggtgggctccgacgccggcgccggcgcagcgctcctcgttccctccgaccgccactcgtggcacgactgcctcgccgaggcggacgcctgcttctccgacctcgaggagcgccaggtcgtgcgcgtccagggcaccgatcgggcccgccgaaccatcgtccgtgtcgtcggcaagttcttcccggctccagcaattgacggtgaacgtctgaaaaagtatgtgttctacaaactccgcaccgaattgcctgtgggtccattctgcatcttgtacatgcacagtactgtgcagtctgatgataacaaccctggagtgtcaatcttgaggacaatttatgaggagctttcacctgagtacaaggaaaggcttcaggttttctacttcttgcatcctgggcttcgctccaggctggccatcgccacacttggcaggctatttttaagtggagggttgtattggaaaatcaagtacattagtcgactggagtatctctggggcgatataagaaagggagaggttgaaattccagattttgttattgaacatgataaggttcttgagcaccggccactcactgattatggcatagaaccagatcccctacatcttgctgatgtacctgctgaggaagtggggtactcgcttggaagatacgaagataaatggactccagaagatcgatggtattcagggaattacatgtgattttttctgctgtcgctgaagcctaaaagattattattgtatagtaacacgataatatgagatctgtatgtcagattgctgtgaaaacattggcaaactgtgtttccaacttcatgattcaaattcttttgaggggaaaaggctatagggaaactcctacaacggaattttattaaaaccttttgtaatgaaaatacgattacaaggggaaaagaggacaagaaaagaagaagtttcttgtca

SEQ ID NO: 151042 - DNA, 1829 bp, Zea Mays
gggccaaaacccactcgcttccgttcaccatggggccgccggtccaaattcgcgtcacggcccaaaacagtgaaaggcttgccgagccagacagacggagtgcttccagttgcagccaagccaaccgaaaccgatggcgtcgggctcccgcggcggcggcgggagcgacttctccgtggtcgtggtgggctccgacgccggcgccggcgcagcgctcctcgttccctccgaccgccactcgtggcacgactgcctcgccgaggcggacgcctgcttctccgacctcgaggagcgccaggtcgtgcgcgtccagggcaccgatcgggcccgccgaaccatcgtccgtgtcgtcggcaagttcttcccgggtgcgcgaatcggccacgtatttgctccccttacagctgcagttgctcggtcaggcgtggattgctatgaaaaaaaaaaatgaatagaatgagatttaatccctttcgatctatacgcaaccgaatggttttgtcgattcaatcattgggaatgattcatgcgcgtatagtgtaagtatttgatgatttatttaggtgtgagcttgccggttgcaatcctacagtaacgatcgatgctgcagattgtggaatgcggaccaaccaacttctattcaatggatggtacaccatacgtgttctctaaaaacaaaatttggatacgtgggatcgtgagattgaatttatcagaaatctaggtttccagtgtaacatgcccaccttatttacatgtttcaagtacaagatccgacgtaggctgtagcttattttatgtattgaagctcatataccagcaaagtgcatattttcttatggtcattctaaattaagggtggatggtcaatctgcttgttggactgtacgaatttattagttccagccagtatatcagcagacctgacctgaccaatgttccgattctttcactattgctattaacaacccaacaagctgaataaggcttccatagcttcatcatcctcgtgctttgttgctaaaggcttagtgttattgcgtcccagacttctcttggtgtcagtgtttacatggcatttacttcggaattttggtttccagctccagcaattgacggtgaacgtctgaaaaagtatgtgttctacaaactccgcaccgaattgcctgtgggtccattctgcatcttgtacatgcacagtactgtgcagtctgatgataacaaccctggagtgtcaatcttgaggacaatttatgaggagctttcacctgagtacaaggaaaggcttcaggttttctacttcttgcatcctgggcttcgctccaggctggccatcgccacacttggcaggctatttttaagtggagggttgtattggaaaatcaagtacattagtcgactggagtatctctggggcgatataagaaagggagaggttgaaattccagattttgttattgaacatgataaggttcttgagcaccggccactcactgattatggcatagaaccagatcccctacatcttgctgatgtacctgctgaggaagtggggtactcgcttggaagatacgaagataaatggactccagaagatcgatggtattcagggaattacatgtgattttttctgctgtcgctgaagcctaaaagattattattgtatagtaacacgataatatgagatctgtatgtcagattgctgtgaaaacattggcaaactgtgtttccaacttcatgattcaaattcttttgaggggaaaaggctatagggaaactcctacaacggaattttattaaaaccttttgtaatgaaaatacgattacaa

SEQ ID NO: 151043 - DNA, 1624 bp, Zea Mays
acaaggacgaccaccaggacaacaaaacgctgcctgcctgatggtccaggacgagggctcctcgtcgtcggtcacgtcctccccgctgcacaccttctccagcatgccgctccacgggtcgcccgccgcggcgggggccccgacgccgccgtggctgccgcgcgacctccgctccgacgagcgcggcctctgcctcatccacctcctcctcaactgcgcggcggcggcggccgcgggccgcctggacgccgccaacgccgcgctcgagcacatcgcgtcgctggcgtcccccgacggcgacgccatgcagcgcgtggccgccgccttcgccgaggcgctagcgcggcgcgcgctccgcgcatggccgggcctgtgccgcgcgctgctcctgccccgcgcggggcccacgcccgccgagctcgccgccgcgcgccgccacttcctcgacctctgcccgttcctccgcctcgcaggcgccgccgccaaccagtcggtcctggaggctatggagtccgagaagatggtgcacgtcgtcgatctgggtggcgccgacgccgtgcagtggctcgagctgctccacctgctggccgcgcggcccgagggcccgccgcacctccgcctcaccgccgtgcacgagcacagggaagtgctcgcgcagacggctatggtgctcaccaaggaggcggaacggttggacgtgccgttccagtttaaccctatcgtatcccgcctggaaacgctggacgtagagtccctccgcgtcaagaccggcgaggcgctggccatcacctgcagcctgcagctgcactgtctactggcctccgacgacgactccgccaaggacagctgccaccaacagagcagcggcgacaagcggcagcggagcccggagtccggggtgtctccgtccacgtcgcgcgcggacgctttcctgagcgcgctgtggggcctgtcgcccaaggtggtggtggtgacggagcaggaggcgtcgcacaacgcggcggcgctgacggagcggttcgtggaggtgctcaactactacgcggcgctcttcgactgcctggagtcggcggcgccccgcgggtcggtggagcgcgcgcgcgtcgagcgctggcacctcgcggaggaggtgaagaacatcgtggcgtgcgacggcgccgagcggcgggagcggcacgagcgcctggaccgctgggcggcgcggatggagggcaacggcttcgcccgcgtcccgctcagctactactcgctgctgcacgcgcggcgggcggcgcaggggctcggctgcgacggcttcaaggtgcgggaggacaagggcgccttcttcctgtgctggcaggagcgcgccatcttctccgtctccgcctggcgcggtcgccgcttcgactgatggacgaacgcgcgtcgagtcggcgccgtgtcctccccgtatttctgccaaggagacagatgtccctcgtgtcgttggcgtcaggtggccgtcacgcacgttgctttcttttggtcgttttgtgtgttctgttactccgtatctagttagattttaatcaggtcagatggagccgacgatgatgatgtgttaagttttgttcatagcgtacccctctttctctccaatttggaa

SEQ ID NO: 151044 - DNA, 802 bp, Zea Mays
aatatgacatcctctcaattcagaccctccaccgtgagaaaaggctagaaaggcagggtttgctacgtcgcccagaccatctccacccaggaccgccgccctcatccgtctcccccgtcttcctcgccctcgtctacctcgcgctcgtcggaaaaaacagctcaggtgagtcatctacctcgctctcatccatctcgtgtcttcctcaccctcttcctctgctcatctcgacgatctggaggtcgcgatctggaggtgtgtctatcaaggggattcccaggatcgcgtaggatctgcagctctggagcgcgcgggcgtcggggaagtagcggtaggatctgcagccggacgggacggggcctgaaggtccagcgccgctctggacctcgcgtggttgaagtcgaagcaccagtggcctctccttggtttcactctcctcctcgtcgttgtccaatctggcgccagcaatgcccgagaagcgagcgctgctaccaggaacgcccgtgaagcgagcgctgctgccagcgatgtcagagaagcgatgtcgttgtttacaatgaattagcagaactgttttaccttaaaaaataaatttggtccgtctgccatcgttacaagttacaacgttagatacttagatgaatgcttcgtataagtaaatcgattattttgttgtatctaccaacaatgatcctattttcttcccccactgaattattagtgactgctaaagcaaaacttctactacatgataaaaaatatgttaaatcaatttaccttttgcaaagcagagacgtgctcg

SEQ ID NO: 151045 - DNA, 517 bp, Zea Mays
ggagcctccgattctgagagcagcccatggcgcggggcgcccacgtcgtccgagcactctcccagccacctcgttttgtccgagccagcagctgcgccaggccggtgccgggagcctcgcggcggcggcggcggggccggctcatggtggtgcgggccggtgggccgcccagcaccaacgcgctcatcctcgccttcgtgcttccgctctccctcttcgtcggcacgctcgtcaccgccgcccgcgtcgccgacgacctcgacgaccgcttcctgagggagatggagataaaccgagcgatactggaagagaacgaggcgtccgacgaggacggtgccggtgaggaagacgacgatggggaggaggaagagggggtcgacctgccggtggtggtggaggaggagcccgccgttgtcggtccacgcaccaggaacaggccgagaagacgagtgttctcttctcaatagtgttggttctgatttacaggtaattaatataaacaagggaatacgtcatc

SEQ ID NO: 151046 - DNA, 2163 bp, Zea Mays
atgaagccgccatcatcactggtgcactacttcaagctgctggtcctgctggcgctcgcccaggctgaccatgcacgtccccgacgaggacgtgctcttgtccctcggcgcgctgcgcctcgacggccatttcagtttccacgacgtctccgccatggcgcgggacttcggcaaccagtgcagcttcctgccggccgccgtgctccaccctggctcggtctccgacatcgccgccaccgttaggcacgtcttctccctgggcgagggctcgccgctcacggtcgcggcgcgcgggcacgggcactccctcatgggccagtcccaggccgcccaggggatcgtggtcaggatggagtcgctccggggtcctaggcttcaggtcaacgacgccggcgtgtcgccaccgtctgtcgatgctcccggaggagagctctggatcaacgtgctgcgtgagacgctcaagcacggtctggcacccaagtcgtggacggactacctccatctcacggtcggtggcaccttgtctaatgcgggggtcagcgggcaggcgttccgccacggaccgcaggtcagcaatgtcaatcaactggagattgtgacaggaagaggagatgtcgttacctgctcacccgatgataacgctgatctcttctatgctgctctcggtggtcttggtcagttcgggatcatcaccagagcaaggattgcacttgagcctgctccaaagatggtgaggtggataagagttctttactcggattttgaaagcttcaccgaggaccaggagatgctgataatggcagagaactcctttgactacgttgaaggttttgtcatcataaacaggacaggcgtcctcaacaactggagggcgtccttcaagccacaagacccagtcgaagcaagccattttcagtcggatggaagagtactatactgcctcgagctaaccaagaacttcaatagtgacgacactgataccatggaacaggaagttactgtactgctatctcgacttagattcatacagtctactctattccacaccgatgtcacgtacctggagttcttggacagggtgcacacctctgagttgaaactgagggcacaaggcctctgggaagttccacatccttggctgaatcttctaataccgaggagctccatccgcagatttgctaaggaagtctttggcaagatcctgaaagatagcaacaatggtcccatattgctttatccagtgaacaaatcaaagtgggacaacagaacgtcagtagtcataccagatgaggaaattttctacctagtggggttcctttcttcagcaccgtctctctcaggttacggcagcattgcacattcaatgaacctgaacaaacagatagtggagttctgtgaagaggctggtattgggatgaaacagtatctggcaccctacaccacacagcagcagtggaaagcccactttggagcaaggtgggagacatttgaacggaggaaacacagatatgatcccctagccatcctagcgccaggacagagaatattcccaaaggcgtcactgccattgcctttgtgacagttcctgctacttgaaggattctgtagagcatacgtttacgttgtacaaaagtgtaggtaaaaagtatcccctgtaaagacaatatctacggaaggtagctagcctgaagaacacagcatagcgactttttttatagtggccgaagacacctcagagcaatacttcaaagtggagcaatgtcacctgaactctgacacctttggaggcaatcactggaggatcgtagcggtccaagaaacctgtatgttgttacagcgttgataattgagacgagctgtgatgatcaactgatcactaaccagtatcccggttatcaacagtgcagaaagttgcttgagggtagtagtgccttgattaacaaataacactgcctgttatttcacttgtaactagcatctcatcccactcaggagtgcctgcgtaaatgtagcaggtttacattactttccatgagtcagaatattatatgctcatgcaaaaacagtaaagtctcttatcaatcatggtgctcagaaacagaaaacgttttggaattctctcaagttgtccattaaaccttagcaacttgcagtgtgaatttg

SEQ ID NO: 151047 - DNA, 2312 bp, Zea Mays
aagctcctatatagagaggctccctcccctgcatggacagccaccgccttctccaaccccctcttctctctccgtcttcctcttcttaccttgtcgcgtcatctcatcaagaaactttgctcgacaacaggaaaccccatctcttttctttctctctctctctctctctctctctctctgccttctgtttccaggacgtcccaactgcccagcgccgaccggcccggccaccatgaagccgccatcatcactggtgcactacttcaagctgctggtcctgctggcgctcgcccaggctgaccatgcacgtccccgacgaggacgtgctcttgtccctcggcgcgctgcgcctcgacggccatttcagtttccacgacgtctccgccatggcgcgggacttcggcaaccagtgcagcttcctgccggccgccgtgctccaccctggctcggtctccgacatcgccgccaccgttaggcacgtcttctccctgggcgagggctcgccgctcacggtcgcggcgcgcgggcacgggcactccctcatgggccagtcccaggccgcccaggggatcgtggtcaggatggagtcgctccggggtcctaggcttcaggtcaacgacgccggcgtgtcgccaccgtctgtcgatgctcccggaggagagctctggatcaacgtgctgcgtgagacgctcaagcacggtctggcacccaagtcgtggacggactacctccatctcacggtcggtggcaccttgtctaatgcgggggtcagcgggcaggcgttccgccacggaccgcaggtcagcaatgtcaatcaactggagattgtgacaggaagaggagatgtcgttacctgctcacccgatgataacgctgatctcttctatgctgctctcggtggtcttggtcagttcgggatcatcaccagagcaaggattgcacttgagcctgctccaaagatggtgaggtggataagagttctttactcggattttgaaagcttcaccgaggaccaggagatgctgataatggcagagaactcctttgactacgttgaaggttttgtcatcataaacaggacaggcgtcctcaacaactggagggcgtccttcaagccacaagacccagtcgaagcaagccattttcagtcggatggaagagtactatactgcctcgagctaaccaagaacttcaatagtgacgacactgataccatggaacaggaagttactgtactgctatctcgacttagattcatacagtctactctattccacaccgatgtcacgtacctggagttcttggacagggtgcacacctctgagttgaaactgagggcacaaggcctctgggaagttccacatccttggctgaatcttctaataccgaggagctccatccgcagatttgctaaggaagtctttggcaagatcctgaaagatagcaacaatggtcccatattgctttatccagtgaacaaatcaaagtgggacaacagaacgtcagtagtcataccagatgaggaaattttctacctagtggggttcctttcttcagcaccgtctctctcaggttacggcagcattgcacattcaatgaacctgaacaaacagatagtggagttctgtgaagaggctggtattgggatgaaacagtatctggcaccctacaccacacagcagcagtggaaagcccactttggagcaaggtgggagacatttgaacggaggaaacacagatatgatcccctagccatcctagcgccaggacagagaatattcccaaaggcgtcactgccattgcctttgtgacagttcctgctacttgaaggattctgtagagcatacgtttacgttgtacaaaagtgtaggtaaaaagtatcccctgtaaagacaatatctacggaaggtagctagcctgaagaacacagcatagcgactttttttatagtggccgaagacacctcagagcaatacttcaaagtggagcaatgtcacctgaactctgacacctttggaggcaatcactggaggatcgtagcggtccaagaaacctgtatgttgttacagcgttgataattgagacgagctgtgatgatcaactgatcactaaccagtatcccggttatcaacagtgcagaaagttgcttgagggtagtagtgccttgattaacaaataacactgcctgttatttcacttgtaactagcatctcatcccactcaggagtgcctgcgtaaatgtagcaggtttacattactttccatgagtcagaatattatatgctcatgcaaaaacagtaaagtctcttatc

SEQ ID NO: 151048 - DNA, 104 bp, Zea Mays
gaagagtgcttttagagagacatcaccagagatgtgatcgcgagaaccttatgattagcaacctttttaaaactgatcagaaattaattgagcgccaactaaag

SEQ ID NO: 151049 - DNA, 1514 bp, Zea Mays
tgcggctccgcccaacgccagttaccactcaccagtcaccagtctccactctggagtctggaactcccctcatcctccacatctccaccgcatcggaactaggaaggcgaagccgaaggcgcggcgcggcgcggcacggatcgagcgatggcggtggcccctcctacggcggcggcgctggagcagctaagcagcagcaagatgttcgacggcttcaatctccgcttccgccaccagagcgccacccttggctgcgccatgactttctccatctacctgcccccgtccccggcgtccaaccttcccgtgctgtactggctctcgggtctcacctgcaccgacgagaatttcatcataaagtccggcgcccagcgcgccgccgctgcccacggcatcgccctcgtggcacctgacacctccccacgtgggttaaatattgaaggagagtcagacagctatgattttggtgtgggtgccgggttttatttgaatgccacaaatgaaaagtggaaaaactggcgcatgtatgactacattgtgaaggaacttccaaaagttttaagtgataactttgaacaactcaacacgtcacaggcatcaatttttgggcactcaatgggagggcatggcgcgctgacaatttacttgaaaaacactgataaatacaagtcggtgtcagcatttgctccaattgccaatccgataaactgcccttggggtcagaaagcattctcaaattacctgggctcaactaaatcagattgggaggaatatgacgcaacctgcctgattaaaaagaacagcaaagttcccactactatcctaattgaccagatgttggtgtcaacattattgagttgccatcttcctggataagggggaggccgacaagttcctggctgagcagcagttgctacctcacaagttcgaggaggcgtgcaaggccgcaggggctgctctgaccttgcgcatgcagcctggatatgaccactcgtactatttcatcgctacgttcgtggacgatcacattgcgcaccatgctcagtttctcaagagcgcctgactgtaaatgtgtagcgtgaggaagacaaggaggcagcctagcatgggtgttttatctatgccgacagtgttgtctcgtgtggcagcttgaggagaggtgaacagcacaccccacatgcgaaataagatggaagatttgctgttcctgtccattgacattgacgagctcgaatgggactgatgttgcaccgaatgtagtttccctgtcattcgctatgcgcaattatgttataacggccctggtgcaaggaatgattgcccgagtgcttgtgtgtgcggcgcgcgcggttgactcttcttggcattctgcagggggtgtacaaatctgtatggatcagagcttggtttagtgttgtcctcctgttcgaaccagaattgagcgcggacggtccggccctgaggccggacggtccgcggtccggacggtccgcgcctgtgggccggacggtccg

SEQ ID NO: 151050 - DNA, 1380 bp, Zea Mays
tgcggctccgcccaacgccagttaccactcaccagtcaccagtctccactctggagtctggaactcccctcatcctccacatctccaccgcatcggaactaggaaggcgaagccgaaggcgcggcgcggcgcggcacggatcgagcgatggcggtggcccctcctacggcggcggcgctggagcagctaagcagcagcaagatgttcgacggcttcaatctccgcttccgccaccagagcgccacccttggctgcgccatgactttctccatctacctgcccccgtccccggcgtccaaccttcccgtgctgtactggctctcgggtctcacctgcaccgacgagaatttcatcataaagtccggcgcccagcgcgccgccgctgcccacggcatcgccctcgtggcacctgacacctccccacgtgggttaaatattgaaggagagtcagacagctatgattttggtgtgggtgccgggttttatttgaatgccacaaatgaaaagtggaaaaactggcgcatgtatgactacattgtgaaggaacttccaaaagttttaagtgataactttgaacaactcaacacgtcacaggcatcaatttttgggcactcaatgggagggcatggcgcgctgacaatttacttgaaaaacactgataaatacaagtcggtgtcagcatttgctccaattgccaatccgataaactgcccttggggtcagaaagcattctcaaattacctgggctcaactaaatcagattgggaggaatatgacgcaacctgcctgattaaaaagaacagcaaagttcccactactatcctaattgaccagggggaggccgacaagttcctggctgagcagcagttgctacctcacaagttcgaggaggcgtgcaaggccgcaggggctgctctgaccttgcgcatgcagcctggatatgaccactcgtactatttcatcgctacgttcgtggacgatcacattgcgcaccatgctcagtttctcaagagcgcctgactgtaaatgtgtagcgtgaggaagacaaggaggcagcctagcatgggtgttttatctatgccgacagtgttgtctcgtgtggcagcttgaggagaggtgaacagcacaccccacatgcgaaataagatggaagatttgctgttcctgtccattgacattgacgagctcgaatgggactgatgttgcaccgaatgtagtttccctgtcattcgctatgcgcaattatgttataacggccctggtgcaaggaatgattgcccgagtgcttgtgtgtgcggcgcgcgcggttgactcttcttggcattctgcagggggtgtacaaatctgtatggatcagagcttggtttagtgttgtcctcc

SEQ ID NO: 151051 - DNA, 678 bp, Zea Mays
gcattaatttccttaaagaaaagaaaaaaacaaatttcatttatactcatgactcaagttggctaatttttactgacaaacttcaaaagaaaaacccttcgaatttttttgagtcgtctctaaactcttttctttatctcatctcgaacaaattgacttttattccttattcagatctaattctattgttgagacagttgaaaatcgtgtttacttgttccagaatcctttatctttgatttgtgaaatccttgggtttagacattacttcgggaactcataagaaacttgcgatatcgaggggataaacaacaactaatcaagagacaatccacaaagcaattgatcatgatcaaatttgtaacccacttggatattgagcatttaagcataataataggattcttttcaatgagtagttataggcgcaacttcgaaaaagataatttgataaagttttttcttaccttgagggcgtgggacagacgagtggattttttttaaccatagcctaaaattcgctcccacggggagtcgaacccaggacctgaggagtgctactcagaccacctaaccaactcagctagaggccttttcgcgtgctaggccatatacaacctagaaactatgttgtggttctctaataagcactagatacaactcataaacatatttata

SEQ ID NO: 151052 - DNA, 3198 bp, Zea Mays
atggcgtaccttcggaacaagtcgatggagttcctcaagcggttcgaggtgccggccaagaacccgtccgaggacgcgcagcgccggtggcgggaggccgtcggcacgctcgtcaagaaccgccgccgccgcttccgcatggtccccgacctcgacaagcgctcccaggtccaggcgcagcgccgcaacattcagcccaaagcactgagaatgtttctttctgattcacaggagaagcttcgtgttgcactctacgtgcagaaggctgcgctgcagttcatcgatgccgcccgcaagaccgagcacccgttgccggagatggcgcggcaacgcggcttctccgtgagcgcggaggagctggccgccgtggcgcgcaaccacgacgccaagagcctgaggcaccacaggggcgtcgacggcatcgcggcgaagctgaacgtctccctcgccgacggcgtcaggtcggacgaggcgggcgtccgggccgaggtctacggcgccaaccagtacaccgagaagccgccgaggacgttctggatgttcctctgggacgccagccaggacatgacgctcctgctgctcgccttctgcgcgttcatctccgtcgccatcgggctcgccaccgaggggtggcccagcggcatgtacgacggcctcggcatcgtgctcaccatcttcctcgtcgtcatgatcaccgcggctagcgactacaagcaatcgctgcagttccgggacctggacagggagaagaagaagattgacatacaggtcacccgtgacggctaccggcagaaggtgtccatttacgacatcgtcgtcggcgacattgtgcatctatctatcggcgaccaggtgccggcggacggcctgtacatcgacggctattcgctcgtggttgacgagtcaagcatgtccggcgagagcgagccggtgcacccgtctaccgcgaagccgttcctgctcggcgggaccaaagtgcaggatggatcggcgcggatgctggtcaccgcggtcgggatgcgcacggagtggggtaacctgatggagactctgagccagggcggcgaggacgagacgccgctgcaggtcaaacttaacggcgtggccaccatcatcggcaagatcggactggtgttcgcggtgctcacgttcaccgtgctcatggcgcggttcctagtggacaaggcacacgcgcccggcggcctgctgcagtggaggggagcggatgcgctctcgatactcaacttcttcgctgtcgcggtcaccatcattgtcgtcgccgtgcccgaggggctgccgctcgccgtcactctcagcctggcgttcgccatgaagaagctcatgcaggagcgcgcgctcgtgaggcacctgtcggcgtgcgagaccatggggtcggcgagctgtatctgcacggacaagaccggtacgctcaccacgaaccacatggtcgtcgagaaggtctgggcgtccggggcggcgcagacggtgagcaccgccaagggtttcgacgagctccggtcgtcggtgtcggagaacttcacgagggtgctcctggagggcgtcttccactgctccggctctgaggtcgtcacgggcaaggacggaaggactagcgtcatgggcacgcccaccgagacggccatcctggagttcggtctcgaggtggagaagtacatgggggtggagcacgccggcgccaagaagctcaaggtggagcccttcaactcggtgaagaagaccatggccgtggtcatcgcgtccccgaacagcgccggccacccgcgcgcgttcctcaagggtgcgtccgaggtggtcctgagccggtgcagctccgtcatcgacggcaccgggagcgtggagaagctcacggaggcgaaggcgaagcgcgtgggcagcgccatcgacgcgttcgcgtgcgaggcgctgcgcacgctctgcctggcgtaccaggacgtcggcggcgctggcgacgtccccggcgacgggtacacgctcatcgcggtgttcggcatcaaggacccgctccggccgggcgtgagggaggccgtgaggacgtgccacgatgcgggcatcaacgtccgcatggtcaccggcgacaacatcaacacggcgaaggcgatcgcgagggagtgtggcatcctgaccgatgacggcgtcgccatcgagggccccgagttccgggcgaagagacccaacgagatgagagagctcatacccaaaatccaggcacgtagctggagtaatgtgatggctcggtcgttgccactggacaagcacacgctggtgacgaacctgaggggcatgttcaacgaagtggtggcggtgaccggcgacggcaccaacgacgcgccggcgttgcacgaggccgacatcggcctcgccatgggcattgcaggaacagaggttgccaaggagaacgccgacgtgatcatcatggatgacaacttctccaccatcatcaacgtcgccaaatggggccggtccgtatacatcaacatccagaagttcgtgcagttccagctcacggtgaacgtcgttgccctgatggtcaacttcgtctctgcatccttcacaggaagcgcccccctgaccatcgtgcagctgctgtgggtgaacctgatcatggacaccctgggcgccctggcgctggcgacggagccccccaacgacgccatgatgcggaggccgccggtcggccgaggcgacaacttcatcaccaaggtgatgtggcggaacatcgtcggccagagcatctaccagctcgtcgttctcggcgtcctcatcttcaagggcaagagccttctccggctgaacggcggcggggatctgtccgacgcccagctcaacacgttcctattcaacacattcgtgttctgccaggtcttcaacgaggtcaacagccgggagatggagaagatcaacgtgttcagcggcatcttcagcagctggatcttctcggcggtcgccggcgccaccgccgcgttccaggtcatcatcgtggagctcctggggactttcgcgagcacggtgcacctgagcgggaggctctggctcgccagcgtgctcatcggctcggtcagcctgttgatcggtgccgtcctgaagctcatccccgtgggttccggcagcgacgactcgtcgtctgccgatcgccacgatgggtaccagcccatccccaccggccccaacgccgtgtga

SEQ ID NO: 151053 - DNA, 1966 bp, Zea Mays
tgtccagtccaactgcaggcatgcatatccactaggcaattattattagttaaactgctccgcttccgacgccttcaactccatcgcctcttccaccacaacctaaacccaaaaaaacaattggcagcgcaaccgcccacagctcgtgacgaggcgacccaacccccccgtagcggcggcggcggcggcggcgagcaatcctccggtccggccggcggaaacactagcggcgggaggcagagcgtccaatggcggaggacgggggcaaggccgcggcggcgtctgcggccgcggcggaggcaggaggcggaggagccaaggagggcggcgaggagaggaccgtcaagctcttcgtgggccaggtgcccaagcacatggccgaggccgacctgctcgccttgttccgcgaggtagccgccgtcgacgaggtcaccgtcatcaaggacaaggccaccaaggtctcccgagggtgctgcttcgtcatatgcccctcaagggaggaagctgacaaggcggtgaatgcctaccacaacaagcaaacgctctctggggcatcaagtcctttgcaagtaaaatatgctgatggggagttggagaggcttgaacataagcttttcattggaatgcttccgaaaaatgttacagacactgagttgactgatttgttttccaaatatgggaatgtcacggatttgcaaattttgagaggttcacaacaaacaaacaaagctggctgtgccttcattaaatatcaaacaaaagatcaagcattggcagctattgaagctctaaacgggaagcacaaaatagagggttctagcgtgccattggttgtcaaatgggctgatacagaaaaggaaaggcaggctcggaaagcacaaaaagctcagtcacagctatctcatatacccaatgcaagtccaatgcagcagcactcttcagtatttggtgctttacagatgggatatatgcctcaatacaatggatttggttatcagccaccagggacatacggacttatgcagtaccctctatctcctatgcaaaatcaaggccccttccagaatatggttcaacctcttaaccaagggaactcgataagaggagtcaatcctgaagtgtctcccagttcagttcaaaggtcatttaatgcaatgcagctaggcagcccttatcctgctatgcctggtatgcagtatcctggatcatatcccggtggtcccatgggcaaccgtcatttgggaaattctcacaatccgattaaagctccaaattcgaatgccaattccactgtttcttctagtcccagcagcaatgctggtgggcaggttgaaggtcctcctggagccaacctatttatttatcatatcccacaagaatacggtgaccaggagctttccagcgccttccagagtttcggaagagtagtaagcgctaaggtgttcgtagataaagcaacgggcgtgagcaaatgcttcggttttgtgagctacgactctcctgcctccgcgcaggcagccatcaacaggatgaacggctaccagttaggcggtaaaaagctcaaggtacaactgaagagagaaaacaacaccaagcacagtagtaaaccgttttgacagacaaggcagcagccgtccggtacccggtacatattaattgaccatcaacacattgcagcagcagcctcagggcctggggagggaagagacccgtgtacccctctttgttcacttcaacattcttggagattcgtcagtcagctcagctcgtgtaattcattgcagcagacataggccgtagcagcagtttgtaccatgatcagatcacttgtacacatgattcattcaattgttactgacagccggctttcatcctagaataattcgctgtgacaaccttatcatttgctgacgaatgaagtcaggtagacttgttcatctatggaatgatggcaactttcgagcga

SEQ ID NO: 151054 - DNA, 1452 bp, Zea Mays
tgtgtgaggagaagaaaaggaagggcggtgggcccaccaagaaacaggagcatacgtgcaaatatgcgaaaccggagagcagaagcaagcagttgtcaattgtcatcgggaggaggaggaggaggaggagaagaagatagggcctgcctgcaatagaatccctctggaatctggatgatggatggctgtcttttgaacacaccgccacccaatcactatcgtagtatctcgtcccactctgcaccactcaaacccgctgctcccctctgcatttcacccgtcctccacctcctcccagacaccacaccagcgctccctttctggctgcagcttccccggacagctagctgcctgcctctcactcgagagtcacagagaccacccctagctagggatggccgcagtgatgaaggctcttgctgtcgcctcgccggtgtcggcacgggcagcacagcatccccgtcggtaccacgtcgcaggtatactatctcgcaccaagcagggaaacaaatcaaatatgtgcatgtgttccgtcaagttccccataatactgtctctgtactctactatggtggttcattcgttcaggtgtccctagccagcagcatcaacagcagaacttgagcctgcacctgcagtcgttgttccacggcgtatcgtcggttcagtgccctgggcgatggcggcgggcgcaggtggtggcgatggcgggccggcctgcgatccagttcatccagggcacggacgagcagacggtcccggacgtgcggctgaccaagtcccgcgacggcaccaacggcgtggccgtcttcgcgttcgagcgtccgtcggtgttcgactcgtcggcggagctgggcgacatcacgggcttttacatggtggacgacgagggcgtgctgcagtccgtggacgtgagcgccaagttcgtgaacggcaagccggcgcggatcgaggccaagtacgtgatgcgcacgcctcaggagtgggaccgcttcatgcgcttcatggagcggtactcccgggccaacggcctccagttcgtcaggaactgaatgaaagcaactcatgagcccgacgagcctgcctgcctgcctgctttgagctctctctctctcgctgcctgtctgtctctttctcctctgcgcccctgtgtgagttggaatgcttttggattaacggccggattggaagaggactaatcgtacagtctgacaagtattgtgcatcctctgattgctcgcacacaggctggccacatgcaacccctcctccctgttcattgtccgtggcagttgtaccgtcccgttagagccttggccttggcatgacacaaagcatgtggcgtgcgctgtgtcactgtgtctgtgtgaaggaacaaggaagggtatcgaaattcgaacaccctaaatcgatctatcgatgaatttgggccgttttgtgttatttctcact

SEQ ID NO: 151055 - DNA, 2754 bp, Zea Mays
atgcgacgccacacccccggccttctcgccgccaatctcctccgcgcctcgtcgctcctcagacccccgtccgtcctcgccgcccgcgcggccttgctccaccatgcgccggacgacgcccaccgcctgctcgacgaaacgccgcgcgggagggcggccgccatcgtacgtgccctcacgtccgcaccgtcttcctcctccggtgacacggcctgcatcgcgtgcctccactgcgcggccctcaagtcaggcgccgtgctggacccgccagtgcgcacgtccctgctcgcggcgtacgccagggccggccgcggcgcgggagcgggagccggagcaggcgccgccctggcgctcttccgcgaggccgttgcgcccgacgtgatcctgtggaacgcggccgtcggcgccctgacgacgagctgccggtacgacgacgccgcggctctgttccggcggatggcgcgcgagctcggggagtttgactccaccaccgtggtcgtcatgctgtcgggggcgtcccgcgcgggtaaccttcggcgtggaatggagctccatggcatggcggccaagagttgtctcggcgctcattgtctcggcgcgtggaacgctctcgttgacatgtatgcaaagtgtggtgagtttaggtccgcagaggttgtgtttcatagcatgccgtgcagggacaccacctcatggaactctgtcataagtgggagcatttttaacgggctcgctgaggtgtcagcgtgctacttcagggaaatgagttgctccatcttccagccagatgaggtgagcctctcttctgtcctctcagcctgctctcgtctggatgatctcttctcctttggggagtctgtgcatagctgtgcagtcaaactcggttatgaggacaccgcgtcttgctcagtagcgaattctctcgtgacgttctactctgagtttggaatgccagaggctgcgaagaaggtcttcgccagcaatttgaacaggaatttggtatcatggaatgctatgatcaagggtctagtccagaatgaaagagtaaccgaggcccttgctgttttgaggcaaatgagattggagaaccagccagatgtcgccactttggtgaccatagtttcaggctgtgctgatcaaggcctactttctgaaggggaaacactccatggatacgtaatcagaaaaggacttcttcgtgaggagccttccatgggaaatagcttactcgatctgtatttgaaatgtgacgaaccatctaatgcaggcctgttgtttatgacaatgccaagaagggacttgatatcgtggaacacaatgatttctggttactcaagatatggcccactgagagaagaggctcagttaatgttcaaaggattactttctgaaggttcatcgtgcagcttggccactatgctagctgtcataccatcatgctccattccggaagaacttagctttgggaaagcacttcactctttcagcctgaagtgtggatttacatctagtggggtttcggctgttaatgctttgatacacatgtatatgagctgtggtgatccactggccgccttttcgcttattgaaagaataataccggtatcagatatcatttcctggaatacggtcatagttgggtgtctgcaaaatgaactccataaagatgcattggaaatctttcggttcatgtattgttctttggccataaaccctgacagtattacaatagttagtgtcttatcagcatgtggagatcttaatctactagcacttgggaaatccatccactgcatgatcctgaagcacttgtttgcttccaatttgagggtgaaaaattcattattgaccatgtattttcgctttggagatactagaagtgctgagttagtcttttatagcatgggagacacaaatttgtgctcctggaactgtatgatctctggctttgcacagaataacaaaggctggagagcattgcagttctatcagaagatggaggatttcgaacctaatgaaatatctgttgtcggtatcatctgtgcttgcacacagcttggtggttatagacaaggaaagagcatacacgggcatgtgttcaggtctgttctgcacaataatgtttttatttcagcatcacttgttgatatgtattgcaagtgtgggagactggacattgctgtcagagtatttgaagcttctgccgaaaaatcgattgccgggtggaactccttgatatcagcttttggattccatggccatgggatgaaatctatagatcttttctggaagatgcatgattctggaatgaaagccacgaaaagcacatttattgctctactgtcagcttgcagtcactctggacttgttgatgaagggtggaagtattattgccttatgtcagaaaagtttgggatcacaccagccccagagcaccatgtctgcattgtagacatgcttgggcgggctggtcggctgcaggaagcgcacaagtttgtggagagcttgccgtctcaacaaacacacggaatttggggcgcactgttaaatgcttgcagtagcaggagtgaactcaagatgggcgaatccatcgcaaaacatttgctacatttggagcctggaaatagcggttattatgtaactgcagcaaacctttatgcatacaaagacatgtggagtggtgtggcccaagttaggagcgttttgcaagataaagggctggtgaagccccatggtcgtagcactgttggttaa

SEQ ID NO: 151056 - DNA, 465 bp, Zea Mays
atggcgagggcgcgcctccctctcctcctcctcctcctcgtggcgttcctcgccggcacaggctccacggcggcccgacacgccgcgcccgcacccgcgtccgcgccccgggcgtcgccgtccatctccgcggcgcccgagtacggggcgccgctcccgcgcctcccgaaccagcaccagcgcccctccgcgcttgcgccgtcgcaggcgctggcgccggacataatgcccgtgctgccgtctccggccgaggacggcgccgcgccgccgcccgacgcggacgagcccaccatcccgtccagccccagcccgcccaacccggacgcgctggagcccgcgtgggcgctggcgccgttcggctccgcgcccgccgtcgccgcgcagtcccccgccgccgcgccggccccggcgtcggcgctcgtgctgctggccgtgccgtggctgctgctggtggtggtggtgtag

SEQ ID NO: 151057 - DNA, 1100 bp, Zea Mays
aacacgctgacacacacgctagacgaccagccgccggactttacaaccactcgcaccacgaaatctacctgtctgtgaccaaacgaacagaatggaagcaaccaactaataaagtagtagtaggctggaagaaaagttagaggctctacagtctacgctaccacacattactgacaaagtagaggtcgaaaaaggctaggcttattgcctcgattggaaatgggtcctctctctaatctaccgaggaggagattctgcgaggtggagaaagcaaggtgggaggggtttagcttggctcctactccatcgagtacatcgcaggttcggaagcagttcacgggtgcgcctatgatcagttccacgcgcaggaaatcggcaaaaaaaagattaactcgaatcaatcatacagcgtcatgcataaaccatggcagttggcacgacagacacacgatccgcaatgtgggggagaaaacgtgagctacggcaacagaagacgggatcgaagcagacaagcacgccccgacaaacaagcgcggcgcgggggacttacaggtgaactggagctcgctcggatggatctcgacgaggtcctggcccatcgccgccggccgcggaggtatcggccgcgagcagacgcgccaggctacacagcaagcacaagcgttgggcaccagtaatccgttggaggggcgcgagagagcccgagggcgaaccggcgggtggtgcgctatgaatcagcagcgtgtccccgtcatgaaggctcgtcgtcgcgcgcgacagggaccgcctcccagttgcggcagcggcaggggaggcgtcggagtgaatcagtgaagacgacggcgggagacggggaggataaagagggaaggcggtcgctctcggccccaccgctgattttggggtggtgcaggtgcagcagccagcagagtagcggtagcggaggcagcctcggggtcgggggacgcggagcgggcggcgaagtctccgaggcggggcgcgtgtggggtcgcctttccgcggttgcggggtccagccggcagaccttttttttgcagattggtccctaccagtacgaacaacacctcctggttcacgac

SEQ ID NO: 151058 - DNA, 326 bp, Zea Mays
ctcacggagccatgcggcgagcgtcccactgccgcaggcccgggtcgctgcacgcctgcaccccacgccgacaacaaggcaatcgtgagcaggcagagcaccgtgcaagaggcccacaaaagccaccgaaggggccaaccaatcggcaagccgctggccctgccagccgacgccaacaccgatgcacacgcccccgccctgccgccgcgccaacatgcaccctagtagatagcgcagagcaaccatcggacgtgcaggacacggacgaccgacgagcaagcacgataaccccggcagatgtgcgcacgccgccagcgggttggtga

SEQ ID NO: 151059 - DNA, 1779 bp, Zea Mays
tcccccgctccctccacaattaggccagtagcccgcttgcagctgcggcgtcggtcgggaagaggccttgctccagtcccgcagatcgggggaggcgctcccccccgcccccgcctcgtcagctcggccgcttccccgccgccggtccctcccggaggcgccagcgtcgccgatgagctgcttcgtctgcttcgggtcggcggcgcacgacggggagtccaggaagccccccgccgcgggcgccggcaaagacgtcccgccggatcgcgcggtggtccgcgtcggatcagatctgccaccagataaagaacctctagactggaacacacggatgaagatagctgcaggtgcagctaagggcttagagtaccttcacgacaagacgagtcctcctgttatttaccgggattttaagtcgtcaaacattcttcttggagaaggatttcatccgaagctatcagactttggccttgcaaaacttggcccggttggtgacaagacccatgtttcaacacgtgtgatgggtacatatggctactgtgccccagaatatgcaatgactgggcagctcacagttaaatccgatgtgtatagctttggagtcgtgttccttgaacttatcacagggcgcaaagcaattgacaacaccaagacccaaggggagcaaaacctagtggcatgggctcgtccactgttcaaggaccgcaggaaattccctaaaatggctgatccaatgcttcagggccgcttccctatgaggggtctatatcaggccttagctgttgctgccatgtgcttgcaagagcaagctgctacacgccctcacatcggggatgttgtcactgctctctcatatctcgcttctcaggcttatgacccaaacgcccctgttcaacacagccggagcaacgcatctacccccaggtccagaaaccctgctgcatggaacggtgatcagcgcagtgtgcgctcgcctaatcatcaccattctccagacccgcggcggagggaccctgccagggcatccaagtatggagcagaggttagcaggactagctctgccagcgattctggccggcggtcaggtctggatgacatggacccgaccgggtcgcaagtgggaagcccagctcaaaccggaagaagaagagaagctccaagggccaccgacagacagcgcgctgtcggagaggccaggatgtggggggagaactcaagggagcgaacgaatggccatggtagcttcgacagcacgcatgagtgaagccgtcaggttccactccaggcatcatttcagacgaacgatgggtttgagcccactcatcggcaccggtcggatctgatcttgggacatggcgtggtgccgcccggtccgggtgtctgtgaataaggctctctctcttgccctcatgtggcgaatgcaattctcctcatgtccatcccttccgaaggcgatgcttccggcgacggggagcctgaggagcctcctgtaggattcagtcagaggtagacaggtcagtgaagaaaaaggatgcgcggagtcacattggcgagtgtgtgtttttggtggctagagctgagtattttcagctgcatgtatccttttttgtgtatgggtaagagcaaccgtgtcaggtttggctacctgagagacctttgaagctagccagctgctgttgctgctgcttctgcttcttcctccccccttttgggagttcagagctggaatgtaggtaggataggcgatgatgttgagtacagcaactgttttacaccctt

SEQ ID NO: 151060 - DNA, 2228 bp, Zea Mays
gtccctctccctccagggcgccgcgcctccctccctttccctaatcccccgctaccgcggcgcttccccctcccccgctccctccacaattaggccagtagcccgcttgcagctgcggcgtcggtcgggaagaggccttgctccagtcccgcagatcgggggaggcgctcccccccgcccccgcctcgtcagctcggccgcttccccgccgccggtccctcccggaggcgccagcgtcgccgatgagctgcttcgtctgcttcgggtcggcggcgcacgacggggagtccaggaagccccccgccgcgggcgccggcaaagacgtcccgccggatcgcgcggtggtccgcgtcggatcagacaaatcaagatcacagggtggaccagaatctaagaaggacctgattatacatagggatgggaatagtcaaaatattgcagcacatactttcacttttcgtgaacttgctgcagccactaagaatttcaggcaagattgccttttaggggagggaggttttggtcgtgtatataaaggacgcttggagaatggacaggctgttgctgtgaagcaacttgatcgtaatggcctccaaggaaatagggaatttctggttgaggttctcatgctcagtctcttacatcacactaacctggtcaatctaattggctactgtgctgacggtgaccaacgccttcttgtttatgagtttatgccattggggtcactagaagatcatctgcatgatctgccaccagataaagaacctctagactggaacacacggatgaagatagctgcaggtgcagctaagggcttagagtaccttcacgacaagacgagtcctcctgttatttaccgggattttaagtcgtcaaacattcttcttggagaaggatttcatccgaagctatcagactttggccttgcaaaacttggcccggttggtgacaagacccatgtttcaacacgtgtgatgggtacatatggctactgtgccccagaatatgcaatgactgggcagctcacagttaaatccgatgtgtatagctttggagtcgtgttccttgaacttatcacagggcgcaaagcaattgacaacaccaagacccaaggggagcaaaacctagtggcatgggctcgtccactgttcaaggaccgcaggaaattccctaaaatggctgatccaatgcttcagggccgcttccctatgaggggtctatatcaggccttagctgttgctgccatgtgcttgcaagagcaagctgctacacgccctcacatcggggatgttgtcactgctctctcatatctcgcttctcaggcttatgacccaaacgcccctgttcaacacagccggagcaacgcatctacccccaggtccagaaaccctgctgcatggaacggtgatcagcgcagtgtgcgctcgcctaatcatcaccattctccagacccgcggcggagggaccctgccagggcatccaagtatggagcagaggttagcaggactagctctgccagcgattctggccggcggtcaggtctggatgacatggacccgaccgggtcgcaagtgggaagcccagctcaaaccggaagaagaagagaagctccaagggccaccgacagacagcgcgctgtcggagaggccaggatgtggggggagaactcaagggagcgaacgaatggccatggtagcttcgacagcacgcatgagtgaagccgtcaggttccactccaggcatcatttcagacgaacgatgggtttgagcccactcatcggcaccggtcggatctgatcttgggacatggcgtggtgccgcccggtccgggtgtctgtgaataaggctctctctcttgccctcatgtggcgaatgcaattctcctcatgtccatcccttccgaaggcgatgcttccggcgacggggagcctgaggagcctcctgtaggattcagtcagaggtagacaggtcagtgaagaaaaaggatgcgcggagtcacattggcgagtgtgtgtttttggtggctagagctgagtattttcagctgcatgtatccttttttgtgtatgggtaagagcaaccgtgtcaggtttggctacctgagagacctttgaagctagccagctgctgttgctgctgcttctgcttcttcctccccccttttgggagttcagagctggaatgtaggtaggataggcgatgatgttgagtacagcaactgtttt

SEQ ID NO: 151061 - DNA, 2164 bp, Zea Mays
tcttcttacacaactttttttgctgctacgggggagagatatactaggatgaaacacctatttttatgtgtttatttatacaactagatgtatccttaaatgtgcaatggaccatctagagtcgtaggaaatgtgttttaacgtaaaccaaaattattttttttcacatggacagctctcaacgtgtgtgatgtgcaatttgtccgcagtgatttggtggttcgatattgtaaaatgttggatgggttatggtgtccttcagcactgtacaaagaagatcagtgatgggggttttatagtcatagactcataggtagtacttgcttgcccgttacatccttgtgatgcctcaaccgaactttctcgggctggctgcatagcttcttacacagctttattgttgctccacagctgcggggatgaggaacatactaggataaaaataactattattagtgagggagggatgtctctggatcatgatgtgtatgcaggctaggggcacatgggtttccaggtggaccgagccagcccacttcttaccccttccttcttttttcttttcttttttcctattctttctccttcacgctggtgtgttgcatttccttacgttggtacctcatgcctcacttaccgaagttgtattgagactccatgcctcgctttaccaccttgataaccatggttccgcatttctattgatatagttctacttttctgagttatgttcgtttttaaatgttgaattcttgaaagtaactgctgctgatccaatgtataatttctttcttcctgcttagacaaatcaagatcacagggtggaccagaatctaagaaggacctgattatacatagggatgggaatagtcaaaatattgcagcacatactttcacttttcgtgaacttgctgcagccactaagaatttcaggcaagattgccttttaggggagggaggttttggtcgtgtatataaaggacgcttggagaatggacaggctgttgctgtgaagcaacttgatcgtaatggcctccaaggaaatagggaatttctggttgaggttctcatgctcagtctcttacatcacactaacctggtcaatctaattggctactgtgctgacggtgaccaacgccttcttgtttatgagtttatgccattggggtcactagaagatcatctgcatgatctgccaccagataaagaacctctagactggaacacacggatgaagatagctgcaggtgcagctaagggcttagagtaccttcacgacaagacgagtcctcctgttatttaccgggattttaagtcgtcaaacattcttcttggagaaggatttcatccgaagctatcagactttggccttgcaaaacttggcccggttggtgacaagacccatgtttcaacacgtgtgatgggtacatatggctactgtgccccagaatatgcaatgactgggcagctcacagttaaatccgatgtgtatagctttggagtcgtgttccttgaacttatcacagggcgcaaagcaattgacaacaccaagacccaaggggagcaaaacctagtggcatgggctcgtccactgttcaaggaccgcaggaaattccctaaaatggctgatccaatgcttcagggccgcttccctatgaggggtctatatcaggccttagctgttgctgccatgtgcttgcaagagcaagctgctacacgccctcacatcggggatgttgtcactgctctctcatatctcgcttctcaggcttatgacccaaacgcccctgttcaacacagccggagcaacgcatctacccccaggtccagaaaccctgctgcatggaacggtgatcagcgcagtgtgcgctcgcctaatcatcaccattctccagacccgcggcggagggaccctgccagggcatccaagtatggagcagaggttagcaggactagctctgccagcgattctggccggcggtcaggtctggatgacatggacccgaccgggtcgcaagtgggaagcccagctcaaaccggaagaagaagagaagctccaagggccaccgacagacagcgcgctgtcggagaggccaggatgtggggggagaactcaagggagcgaacgaatggccatggtagcttcgacagcacgcatgagtga

SEQ ID NO: 151062 - DNA, 1531 bp, Zea Mays
gtccctctccctccagggcgccgcgcctccctccctttccctaatcccccgctaccgcggcgcttccccctcccccgctccctccacaattaggccagtagcccgcttgcagctgcggcgtcggtcgggaagaggccttgctccagtcccgcagatcgggggaggcgctcccccccgcccccgcctcgtcagctcggccgcttccccgccgccggtccctcccggaggcgccagcgtcgccgatgagctgcttcgtctgcttcgggtcggcggcgcacgacggggagtccaggaagccccccgccgcgggcgccggcaaagacgtcccgccggatcgcgcggtggtccgcgtcggatcagacaaatcaagatcacagggtggaccagaatctaagaaggacctgattatacatagggatgggaatagtcaaaatattgcagcacatactttcacttttcgtgaacttgctgcagccactaagaatttcaggcaagattgccttttaggggagggaggttttggtcgtgtatataaaggacgcttggagaatggacagatctgccaccagataaagaacctctagactggaacacacggatgaagatagctgcaggtgcagctaagggcttagagtaccttcacgacaagacgagtcctcctgttatttaccgggattttaagtcgtcaaacattcttcttggagaaggatttcatccgaagctatcagactttggccttgcaaaacttggcccggttggtgacaagacccatgtttcaacacgtgtgatgggtacatatggctactgtgccccagaatatgcaatgactgggcagctcacagttaaatccgatgtgtatagctttggagtcgtgttccttgaacttatcacagggcgcaaagcaattgacaacaccaagacccaaggggagcaaaacctagtggcatgggctcgtccactgttcaaggaccgcaggaaattccctaaaatggctgatccaatgcttcagggccgcttccctatgaggggtctatatcaggccttagctgttgctgccatgtgcttgcaagagcaagctgctacacgccctcacatcggggatgttgtcactgctctctcatatctcgcttctcaggcttatgacccaaacgcccctgttcaacacagccggagcaacgcatctacccccaggtccagaaaccctgctgcatggaacggtgatcagcgcagtgtgcgctcgcctaatcatcaccattctccagacccgcggcggagggaccctgccagggcatccaagtatggagcagaggttagcaggactagctctgccagcgattctggccggcggtcaggtctggatgacatggacccgaccgggtcgcaagtgggaagcccagctcaaaccggaagaagaagagaagctccaagggccaccgacagacagcgcgctgtcggagaggccaggatgtggggggagaactcaagggagcgaacgaatggccatggtagcttcgacagcacgcatgagtga

SEQ ID NO: 151063 - DNA, 291 bp, Zea Mays
atggagaagatgaagatgaagactggactggtgagtgaggatgaaaaagagtccacgggaagagttaccagtgtgaagagaccaaagtatgcgacaagatctaaaagctcagatagtagggaaaactcgaagactggaagtgacagaagtatcgacgaagatgacgacactgaggatgagcaagatgagactctgggaggttttttagttaacgacgaggatgacgagcctgcggaagagctgagcgatgaagaggaggaggaatttgactatgaggaagatgatgattga

SEQ ID NO: 151064 - DNA, 939 bp, Zea Mays
atgcccccgctcctctcccctccgcgccatccttgccccgcgcgcgcccgcacaccccgcgcgcccttcccttgcccccgtcgtctcgcaagggtccgtcgtctccgcgtaagggcttgtcgtctcgcaagggcgccccttcccctgcccccgtcgtctccgcgcaagggcctgtcgtctcgcaagggcgccccttcccctgcccccgtcgtctccgcgccatccttggatccggggttcgctcaggttgcctcgcctcgcaaggtccccaccacgcgcagtcagggagcatggtgggtggggaagacagggaggagcagaggaggaggtgaagctcaacatcgacaacatgttcacgacgctcgagtccctcaagaagaagggcaacaagaacagggcggatgggccgtcctccagcaagaatcatggcgcagggcccgcactacagcagagcaggaactgcctcaaaggaggcgcatggcgccatggtattgggcgagggcgtcggtgccgcgcatgcttgagttcgccgagagggcgccaagctcgagcgacgcgattggcactggacttgctttaagattgattggaaatgctgatgcctggatctgcggggcaatagagttttggaatccaactactacatctatcactccagcagcatcccaagcacctaagctaccatcagaaattattggcaaaatcattgaggagccattttggaggatgaacaagcaccgagagagagtccgggaggaggcagatactgctgggacatgtccaagcctgtggagatgcagtggagatggagatcgacattggcatggagaagctgcgaaacccaccgcagcagaaccccacccagaggaagttagccagttacttatcaaagtgggattcttattacagctgtgggacattcttgtagagaacaattag

SEQ ID NO: 151065 - DNA, 2199 bp, Zea Mays
atggacgccgaggccggcgtcgccggcgccgaccagcttccgcggaggcagtactacctgaatctactgcttttagcttaccagagctttggtgttgtttacggggacctgagcacatcgcctctctacgtgtataaaagtacgttctctggaaagctcagacactaccaagacgaggagacagtgttcggcgtactttcgctcatcttttggaccttcactctgattcctttgcttaagtatgtcatcatcgtcttgagtgctgatgataacggcgaaggtggaccattcgctctctattcgctcctttgcaggcatgcaaaactcagcttgctgccaaatcaacaagcagctgatgaggagctatcttcatactatagaaatgggttcgcgcctcgcaatggatcttcaccttggtcaagaaggtttctggagaagcacaaaaaaatgaggactctgtttcttctcatagttctctgtggcgctagcatggtgattggtgatggtgtccttaccccagcaatctcagtactctcgtctatgtctggattacacgttcgagctactggtctacatcatagttctgtagttctcctttcatgcattgtgttggttggtctatttgcattgcaacaccgaggtactcagaaggttgcattcatgtttgcaccaattgtcatcatctggctgctttccattggaggaattggtttatacaacattcttcattggaacccaaatgtatatcaagctctctctccatattatatggttaagttctttagaaagacaggcagtgaggcaatgtttgctgaccttggtcactttacgagtgcatctgtcagggtggcttttattaccgtcatatacccatgccttatgctacaatatatgggtcatgctgcatttctgtcgaagaacacatttcacatgccgacaggtttttatgatactatcccagaaccagtgttttggcctgtctttgtggtggccacacttgctgctgttgttggtagccaagctgttatttcagcaacattctccattgtgaaacaatgccatgctttgggatgtttcccgcgagtgaaggttgtccacacatcgaggtggatctatgggcagatatatattccagaaataaattggattcttatggttctttgcgtcgctgtcactattgcatttcgtgatactactcttattggcaatgcctacggtattgcatgcatgactgttatgcttgttactacattcttgatggcattaatagtcatctttgtttggcaaaggaacataatattttccctagttttcctggttttctttggatccattgaagctgtatatctttcgtcatctctcatgaaggttcctcagggaggatgggtgcctcttgtgcttgcattcatattcatgtcagtcatgtacatctggcactatgggtcaaggaggaagtaccagtttgacctacagaacaaagtatcaatgagatccatcctatctctcggtccaagccttggcatagttcgggttcctggtgttggattgatttacacagagctggtcactggtgtaccctccatcttctcccattttgtcacgaatctccctgccttccatgaagttctagtctttctctgtgtgaagtcagtgccagtgccatatgtttcaccagatgagcgataccttgtgggtaggattggacctaaagaatatcggatgtaccgttgcattgttagatatggttacaaagatgtgcagagagatgatgacaattttgagaacatgttagttatgagcatcgcaaagtttattatgatggaagcagaagatgcttcttcagcaagttatgatatcgctaacgaaggaaggatggcggtcataacaaccactgatgcctctggcagcccattggccatgagggatttcgacggcctagctgactccatgtctacgaggagcagtaaatcagaaagccttcgaagtttgcaatcctcctacgagcaagaatccccgagtgtaaaccggcgccgccgtgtccgctttgaggtcccagaggaggatggcatgggtcagcaagtgaaagaagaactcacggcactagttgaagcgaaacatgctgggatcgcatacatcatgggggcattcttatatcaaagccaggaggaactcaaatttcctgaagaagtttgctattga

SEQ ID NO: 151066 - DNA, 1674 bp, Zea Mays
agccaaaccaccacaccttatatctgtcatactttctcgccccccgtgagccgtgaccccgtctcgcctcgccgccgccgccgccgccgatgggctccggggaggagccgtcgcagatgcggagggcgctggtggactctctcgcgggcgccatctccggcggcatctcccgcaccgtcacctcccccctcgacgtcatcaaaatccgcttccaggttcagttagaacccacaacctcgtggggtattcttcgaagggatgtgtatggaccttccaaatacactgggcttctgcaagcaaccaaagatattctcagagaggaaggtttaccgggattttggagaggaaatgtaccggctctgtttatgtatatgccatatacagctatacaattcactgttctacacaaactaaaaacatttgcttctggttcatctagaacagaggatcatttggatttgagcccttacttatcttatgtaagtggagctatagcagggtgcacagcaactatagggtcatatccatttgaccttctgaggactattcttgcatctcagggtgaaccaaaggtttaccccaatatgaggtctgcgtttattgatataattaaaactcgtggtgttcaagggctttattctggtctatctccaactcttgttgaaatcataccatatgccggtttgcagtttggttcatacgacactttcaaacgttcgatgatgacatggaacagatataaatattcacatcttagctttggaagcgaggatgattcagtatcaagtttccagctatttctttgtgggtttgcagctgggacattttcaaaggctgcatgccacccacttgatgttgtaaagaaaaggttccagattgaaggactaaaacgacatccaaggtatggtgctccaattgagagcagtacatacaagggcatgtaccatgccttaaaggagattgtcgtaaaggagggatttggaggcctttataagggccttttcccctctttagtgaaatcggcccctgctggtgcagtgacatttgtggtttatgaatacatctcagactgggtgcaaggctggagttgagtaagttcttgttggatcatggagctgtcaggataacatgacgaaaactttttgcacaccctggataatggaggggaatggagaccataaggtcactcgtgaagtgcatacaatccctagagatctgattgcatacatgtaaagccttacatagaaaatagctgttttatcgtttcttattcttttgcccaattgcctaatctggtggtcggggtattcgttggcgtctcaaacaaggctgagtaaaactaacatagtgatcgtaacacagcatacatgacggaagtcaaaagcagccggcagttttgttgggatcgtgttacgaatattttttttccggctgaattcatgttatatatctactactacagctagtacgagtaacaatgtatgccactcagatggcgtatgtttaatggcagtcataatttttccatcatttgttgccggacctggatggcagttagattgtatgctgtagtctttctgaaatgctgtgctagcaaaaacctagctgatagtttgctgaatctgggggacagcatgttcttatccagtaggtacttgagctatgggttatcac

SEQ ID NO: 151067 - DNA, 1730 bp, Zea Mays
tcggcccccgacccccgtccgcacgagaaaacaaatcgcctcttttccaggagccaaaccaccacaccttatatctgtcatactttctcgccccccgtgagccgtgaccccgtctcgcctcgccgccgccgccgccgccgatgggctccggggaggagccgtcgcagatgcggagggcgctggtggactctctcgcgggcgccatctccggcggcatctcccgcaccgtcacctcccccctcgacgtcatcaaaatccgcttccaggttcagttagaacccacaacctcgtggggtattcttcgaagggatgtgtatggaccttccaaatacactgggcttctgcaagcaaccaaagatattctcagagaggaaggtttaccgggattttggagaggaaatgtaccggctctgtttatgtatatgccatatacagctatacaattcactgttctacacaaactaaaaacatttgcttctggttcatctagaacagaggatcatttggatttgagcccttacttatcttatgtaagtggagctatagcagggtgcacagcaactatagggtcatatccatttgaccttctgaggactattcttgcatctcagggtgaaccaaaggtttaccccaatatgaggtctgcgtttattgatataattaaaactcgtggtgttcaagggctttattctggtctatctccaactcttgttgaaatcataccatatgccggtttgcagtttggttcatacgacactttcaaacgttcgatgatgacatggaacagatataaatattcacatcttagctttggaagcgaggatgattcagtatcaagtttccagctatttctttgtgggtttgcagctgggacattttcaaaggctgcatgccacccacttgatgttgtaaagaaaaggttccagattgaaggactaaaacgacatccaaggtatggtgctccaattgagagcagtacatacaagggcatgtaccatgccttaaaggagattgtcgtaaaggagggatttggaggcctttataagggccttttcccctctttagtgaaatcggcccctgctggtgcagtgacatttgtggtttatgaatacatctcagactggatagggtgcaaggctggagttgagtaagttcttgttggatcatggagctgtcaggataacatgacgaaaactttttgcacaccctggataatggaggggaatggagaccataaggtcactcgtgaagtgcatacaatccctagagatctgattgcatacatgtaaagccttacatagaaaatagctgttttatcgtttcttattcttttgcccaattgcctaatctggtggtcggggtattcgttggcgtctcaaacaaggctgagtaaaactaacatagtgatcgtaacacagcatacatgacggaagtcaaaagcagccggcagttttgttgggatcgtgttacgaatattttttttccggctgaattcatgttatatatctactactacagctagtacgagtaacaatgtatgccactcagatggcgtatgtttaatggcagtcataatttttccatcatttgttgccggacctggatggcagttagattgtatgctgtagtctttctgaaatgctgtgctagcaaaaacctagctgatagtttgctgaatctgggggacagcatgttcttatccagtaggtacttgagctatgggttatcac

SEQ ID NO: 151068 - DNA, 1408 bp, Zea Mays
gaagagaagaaaactgcgtgcaattcatacagtataatgtcacgctttcagcatcaataccatatatgtatgcataatcttgattgatttcgttccgacaattacatagattgcgtacagaaggaaacaaatcacaaaaggcaaatccaaaacgggaacctctccgtctctgatgcgcggcgtggcgtcaccacccatgccaccggagcgcgctagaaatcgaagccgccgccgtcgtcgaacccggcgtcgtagccggcgtcgtacgccgacgagtccgagatcatgtcgccgatcaggaggcccccgacggcgcctccgagcagcccggccccgagccccatcccgaagttgttcttcttcttctgcggcctcacggcctgctgctggtacccgtacccggcggcctgcggcggcgggtagccgtacccgtacccggcctgctgcgggggcgggtagccgtacccggcggcctgctgcggcgggtacccgtagccgccgtactgcggcggaggagcagcgtagggcgccgccgtgctgggaccggccgaagggtaggccgtcaccggttcgccccccttggctggcttgcctgccgcgggtgggtagccggatgagggcgggtaagcagcgtcggccttgccgccggcgggcgggtaggcgccgtatggaggtgggtacgcgtcggccttggctgccggcgggtatgcggtggcagggggcgcgtacgcgtcggccttgcccgaaggaggcgggtacgcggcgggaggcgcgtaggcgtcagccttgcctgaaggaggcgggtacgcggcggtcggtggaggatgggcgtaggcggactgggcggcggaagcgggggcgtagccgttggcgacctcgccgagcttgtacgagaggttgaggactccctggggcttgccggaggagatcttgcgcacctggtaggcgacgaacttggcggggacagggccgtcgggggcgccggagaggagctcggacagcgggatgtggacctcgccgacatcgcggtcgccgagggcgcgctcggcgcggaggaggacgtggagggagccggcgccagtggctgggacggcgaagcggagcgtggcgttccaggtcgggttgcggccgccggtgcggtcggcctggacccgctgccgcgaccgggggtcgccggagagcgacaccacggcgtagacctccatcctggacatcaggttcacgtccttgaggtccttgcccgagatcagcgtcagctccagcgaccgcgtcgccatggccgggatcttttttccttgtttgatcggcgatgaaattggttggttctctccctctcctagatcgatcggtatgtgcgctgctaccgctggatcgacgactttgagaatttgagatttttttgtttgat

SEQ ID NO: 151069 - DNA, 104 bp, Zea Mays
tctgtttttttccctgtagattacaaaagcaaccgaagcggttgtaaacgaataccgcagcatcacaacctgttcctagactacagatctatttttttattttt

SEQ ID NO: 151070 - DNA, 2799 bp, Zea Mays
tcatttttcgcctttcttctacctcccgactctctggcctctcctgactctgccccgcctcatcactcccattccaccgacacgcggacgcggcgtgtcgcgcgcctccgctaaaaccgtagcccgaggcccgatggccgccccgccgcaaccgcacccacaggcagcggaggagagggccgcgccggcggttcccctgcccactgccccggcgggtccgcggccgtacgacgtggcggtcgcggcggcggagctccggccggtagactgcaacctcgccgcgctctgtgaccacgtccaggcggaggggttcgggttgggggccttctccgacctcgtcgtggaggccgcgggcgccacctaccgcctccatcgcctcatcctctctcgtagcgcctatttcaggaatatgctacatggtccttggagagaggcgggagcacccacagtggttttgcacatagatgatgccaatgttgattcagaagcaattgcaattgcgcttgcatatctttatgggcaagcccccaagcttaatgataacaatgcattccgggttcttgcagctgcatcatttctggatcttcaggacttgtgcacgatatgtacagattttattatttctgagctttggacatcgaactttttacaatatcagttgtttgctgagagtcaagattatggtagccatggagagcgtgtcaggaatgcttgctggggttatctttgtcaaagtgccacactggaattgcgagaggttctaccaaagctttcttcacagactttgcatgccctccttacatctgatgaattgtgggtacctaacgaggagaaaaggtttgaactagcattgtttactctacttgcaaaggttactacgtgtgagatacaagttagtgggaatgaaacaagcttaccaagtgctgatcgatccatgaggaaggggaaggctccaatgaacgaatctggggaggaactgttaatggactctaaactgcagaacttgaagttgcatgataactcggggaatgaaattccccataacattattgctatttcagatatgaatggtgaagctcctaagagaatggagaatgattgttctactggaggaccatctggagaaagcacttcatatcaatttaatgaaaataactggctttctagtgagcaaactgcaaataattatttctcaagaactttcagtagtggtgttgttcctactgagtggggaaggcccaatgcaccactttggggtggtagggttataggacggcggcaagttagatgcattagaggaagttcttgcctatctactgatgaatacaacacttttatgaatatatttgagaggggttctcttctctactgcaatatgtcctttgatgcgctgctaagtgtgcgaaagcaactcgaagaatttggattcccttgcaaagctgtcaatgatggtctatggctacagatgcttctgtgtcacagggtgcaagcgatagttgctgacacttgcaggaactgttgccttacgaataattcttgtgcttgcaagcaagcatatgtgagctcacatacacaccactacaggcaggaacatgaccggagcagtgtttccggcaccataggtaatgtctaccttgcggatgcccagggcgatgggaatggtgtacttgggcctgtccgtgttaacgtaagaggagcagttgatggccttgccggtattgggagagggaactcaaatgtgcctggtgcagcctgggctcctacacgttacgtcttctcacgtgtcccttacgggctcggttcaagaaatgcccagcaatttgccaatgatgaatcagaacctagaattgaccgcaatggagatatttcagcagatggtctgactgcattggttaaccttagccaagaaaacagtgctgcccatccacaggctgaaagtctatttgagacagggatgcagacaagatatcacagtgttgcatctgtttccactcccggtggttcttctgtccagatgcaggagtcaaaggagcatgactgggaaactgcagaggatgcaactatatcattagacatgaaaacacctcttagccattttcctcctttccgctttggggttgagttcgatgatgtgcacaggcttgctgatggtcatgtgaaacattcgactgaagtgttttatgcaggctctctatggaaggtgagtgtccaggcattcaatgatgaggatcctcatgggcgacgcactcttggactttttctccaccggcgcaaggctgagttgttagatcccttgaggaaggctcacttgtacgtcgacccccgggaaaaggtcactgcgcgctatcagctcatctgtccatcaaagagggaggtcatggtatttggatgcctgaagcaggctgggacgctgctgccgaaagccccaaagggctggggttggcgcactgctatactgtttgatgagcttgcagatcttctccagggtggtgccctgcgaattgctgcagtggtccagctcgtctaaacttgagttgtagaaaacaactgcttgcttgcaaggatggtgacaccacggcagtttgtgtagttggtacctgcaagaactcaatccgtcatgtattcgttctctgtaattgtgtattactgtatagtggttcgttgtttgatgctcactccgtcctaaaatatagttcttttcagcctattttttctgtctaagttcatttaaatgataataaatataaatatatatgcaaactatatttatgtattatttaatgaatgtgtaattagtct

SEQ ID NO: 151071 - DNA, 1992 bp, Zea Mays
cttttggttattcacaatattattttttattttgttcttgaaaggttctaccaaagctttcttcacagactttgcatgccctccttacatctgatgaattgtgggtacctaacgaggagaaaaggtttgaactagcattgtttactctacttgcaaaggttactacgtgtgagatacaagttagtgggaatgaaacaagcttaccaagtgctgatcgatccatgaggaaggggaaggctccaatgaacgaatctggggaggaactgttaatggactctaaactgcagaacttgaagttgcatgataactcggggaatgaaattccccataacattattgctatttcagatatgaatggtgaagctcctaagagaatggagaatgattgttctactggaggaccatctggagaaagcacttcatatcaatttaatgaaaataactggctttctagtgagcaaactgcaaataattatttctcaagaactttcagtagtggtgttgttcctactgagtggggaaggcccaatgcaccactttggggtggtagggttataggacggcggcaagttagatgcattagaggaagttcttgcctatctactgatgaatacaacacttttatgaatatatttgagaggggttctcttctctactgcaatatgtcctttgatgcgctgctaagtgtgcgaaagcaactcgaagaatttggattcccttgcaaagctgtcaatgatggtctatggctacagatgcttctgtgtcacagggtgcaagcgatagttgctgacacttgcaggaactgttgccttacgaataattcttgtgcttgcaagcaagcatatgtgagctcacatacacaccactacaggcaggaacatgaccggagcagtgtttccggcaccataggtaatgtctaccttgcggatgcccagggcgatgggaatggtgtacttgggcctgtccgtgttaacgtaagaggagcagttgatggccttgccggtattgggagagggaactcaaatgtgcctggtgcagcctgggctcctacacgttacgtcttctcacgtgtcccttacgggctcggttcaagaaatgcccagcaatttgccaatgatgaatcagaacctagaattgaccgcaatggagatatttcagcagatggtctgactgcattggttaaccttagccaagaaaacagtgctgcccatccacaggctgaaagtctatttgagacagggatgcagacaagatatcacagtgttgcatctgtttccactcccggtggttcttctgtccagatgcaggagtcaaaggagcatgactgggaaactgcagaggatgcaactatatcattagacatgaaaacacctcttagccattttcctcctttccgctttggggttgagttcgatgatgtgcacaggcttgctgatggtcatgtgaaacattcgactgaagtgttttatgcaggctctctatggaaggtgagtgtccaggcattcaatgatgaggatcctcatgggcgacgcactcttggactttttctccaccggcgcaaggctgagttgttagatcccttgaggaaggctcacttgtacgtcgacccccgggaaaaggtcactgcgcgctatcagctcatctgtccatcaaagagggaggtcatggtatttggatgcctgaagcaggctgggacgctgctgccgaaagccccaaagggctggggttggcgcactgctatactgtttgatgagcttgcagatcttctccagggtggtgccctgcgaattgctgcagtggtccagctcgtctaaacttgagttgtagaaaacaactgcttgcttgcaaggatggtgacaccacggcagtttgtgtagttggtacctgcaagaactcaatccgtcatgtattcgttctctgtaattgtgtattactgtatagtggttcgttgtttgatgctcactccgtcctaaaatatagttcttttcagcc

SEQ ID NO: 151072 - DNA, 726 bp, Zea Mays
aagaagaaatcaatggcagtcagtaggatccagccgctctccggtcacctccacccacgcgccgctactgatccggctgcggctgccgggaagcagcagcagcagcagcaggtgtacacggtgtggatgaagtcgctggtgctgagcgggcacgggtgcaccgtctacggggaggacggccgcgtggcctaccgcgtcgacaactacgcctgcagccgcagccgcgaggtgtacgtcatggacagtgacggcaggacgctgctcaagctgctcaagaagagcttcgcggcggtcgagacatggacgggctactcttacggttccgccggcactgcgccggcggcaggcctggggcaggagggctccgccaggccatggttcagcgtccggaaggcgccccaccggatcctgaagaagaagatgaagaaaggagggcagcaggagcagaacggtggcgctggcggggctgtggcgacggcctgcgtcgtcggcggggacgtcgtctacaggatcgacggcgcgccgcgcaagtcggagttcaggatcagcggccccgacggcgaggtcgtggcggagacgaagcggaagcagacggaggcaggggtggcgctgggagaagacgtcctcagcctcacagtcacagtgggcggcgcttcagcgcacgcagaccgcctgctccttgtcgggctcgtggtcgtttgcggcctcctcgcccgctgcatctga

SEQ ID NO: 151073 - DNA, 102 bp, Zea Mays
atgttgagttgctgttgctaatgagtcatggccactaccggaatcgcgttctttgccgagtgtctaacactcggcaaaggctattttatactcggcaaaggc

SEQ ID NO: 151074 - DNA, 1633 bp, Zea Mays
acgttaagacaaggcgaaggtaccaggcatctctgttcatcctgtgatggagaatccactgcacagtgccgggcgttcacgaacttgctagtctagtacagtgtatatatattccgcgactgcgactacaatgggcgacagatcgtgtgcaatcgagagcgagctacctccatggcggcggcggcgggcatccggagcagggaggaacggtggagcctcgccggtaagacggcgctcgtcaccggaggaagcaaggggatcgggcgcgcgatcgtggaggagctcgcggggttcggggtgcgcgtgcacacgtgcgcccgcaccgcggccgacctggacgagcgcctgcgcgcgtgggccgcggacgcccgcctgccgggccgcgtcacggcgtccgtgtgcgacgtgtcggcgcggggcgaccgggaggcgctggtggcggcggcgcgggcggagctggggcccaggctggacatcctcgtcaacaacgccgggcagagcacgttccgcgcggccacggagacggcggccggcgactacgcgcgcctcatggccaccaacctcgagtcctgcttccacctcgcgcagctggcgcacccgctgctcctcgccgcgggcgcgggcgcgggcgcgggcgccgcggtggtgaacgtgtcctccatcgcggggctcgtcgcgtacccggcgctggcggcgtactcggcgaccaagggcgggctgaaccagctcacgcgcagcctggccgccgagtgggccggcgacggcgtgcgcgtcaactgcgtcgcgccgggcggcgtccagacggacatgttcagcagcgtcgcgctggagatggacccggacccggagacgtcgctgaggatgatggaggcggagctggcgcgggtgccgttgcgccgattcggcgagaccgaggagatcgcgtccctcgtcgccttcctctgcatgcccgcctcgtcctacatcaccgggcaggtcatctgcgccgacggtggccgcaccattgctgcctaggccttcgcgctatgcatgctacactgagtacctgtactgaacgtttcaaaagacaaaagcatgctatgccaccgttcgctcgctagagcttccagtagaggcgagcgcggtggaggacgccggagacgagcgcccagaagaggatctgcgcgaagaggacgtagaggaggatgcccaccctggtggagtgccacaccttgacgaacacgtgcttcctcacccataccacccgttgaggaagccctcgaagacgccttccgcggccatcacgtacaccagcatcgcgttcatgccgacccaccgcagcggcgcgaaggcgtagcgcaggctcacgacgtcgacctgcgacacgcaagcaggcatgcacagacacagtcttgagccttgtccagacacacgtacgaaacgtgcggagtcgtggaggaggagacacggcatcgtctaccaagaagtagagcgctgagaagacgaccccagcggcgccggcagtgacgcagatgtagctgaacgtgtagagctgcttgttgagcgggatcgctgcgaggaaggagacgacgacgtgtaaatgtaaaccagcagcttgcttgtcaagcgaaatttcagacggaagatgataaac

SEQ ID NO: 151075 - DNA, 1846 bp, Zea Mays
tgcttgcttccattcccagccacccacttcccaccggctcaaacattcccacgtaacgtaatctctggccgcaataaataccttccccgtaattatctccgacgagggggcgccgagccgagctgagttgagcacgacgaaccccggacacccccctccccacgcccggccatggaggactggctcttctactccctcaccactctcctctgcctcctctgctcgctcattctgcgggcgcgcacaccaggcaagaaggcccggaatgccgactcctcctccccgctccctcccctgcccccgggcccgacgccgctgccggtgctgggcccgctgctcttcctcgcgcgccgcgacttcgacatcgagcccgtcctccgccgcatcgcgcgggaccacggcaaggtcttcacgttcgcgccgctggggcgggcgcgcccgggcatcttcgtggccgaccgcggcgcggcgcaccgcgcgctcgtgcagcgcggcgccgcgttcgcctcccgcccgccctccacggcctccagcgccgtgctcaccagcggcggccgcaacgtcagctcctccccctacggcgccacgtggcgggcgctgcgccggaacctcgcctccggggtgctcaacccggcgcggctccgggccttctcccccgcgcgccggtgggtgctcggcgtcctcgcccgccgcgtccgcgccgacggccgccacggggaggctcccgtcgccgtcatggagccgttccagtacgccatgttctgcctcctcgtccacatgtgcttcggtggcgaccgcctcggggacgacgcgcgcgtccgggacatcgaggccacgcagcgggagctcctcggcagcttcctcagcttccaggtcttctccttcctcccgtgggtgaccaagctcgtgttccgccgacgctgggagaagctcgtctcgctgcggcgtcggcaggaggagctcttcgtcccgctgatacaggccaggcgggaggccggcggcgacggggacagctacgtcgactccctggtgaagctgaccattcccgaggacggcgggaggccgctgacggacggcgagatcgtgagcctctgctccgagttcctcagcgccggcaccgacacgacggccaccgcgctgcagtggatcctggcgaacctggtgaagaacccggcgatgcaggacaggctccgggacgaggtgtccagcgccggcgccggcgccgacggcgaggtgctggaggaggagctgcaggcgatgccgtacctcaaggccgtggtgctggaggcgctccggcgccacccgccgggccactacgtgctcccgcacgccgtgcacgaggacacgacgctggacgggtaccgcgtgcccgccggcgcgcccgtcaacttcgcggtgggggacatcgggatggacgaggaggtgtggagggcccccgcggagttccggccggagcggttcctgcccggcggcgagggggacgacgtggacctcaccggcagcaaggagatcaagatgatgccgttcggcgccgggcgccgggtctgccccggcatggcgctggcgctgctgcacctcgagtacttcgtggccaacctcgtgagggagttcgactggcgccaggccgacggcgaggaggtggacctcaccgagaagctcgagttcaccgtcgtcatgaagcggccgctcagggccagggccgtgccgctgcggccgccgccgcccgccgtcgcagctgcttgatcgagcgaggcttgccttctgagtagtggcatcgtggctgcttctcgttgttctgttactatatttatataaccaaatattaggtataatgataggaaagtat

SEQ ID NO: 151076 - DNA, 1110 bp, Zea Mays
aaaaaaggaggggctcgcacgagagacgtggtccacctgcccaccgggcgcctactgggggcggttgttgttggtatatttgcggtggccggggacgggtcagcaccgccttcttctcaccagcccctctcgcctcacgaaaaggcgcaggccaaggccaaggccaagccgccccctccctcctctcctctcctctcctctcctttcctctccactctctggcagccaaaggcgaggccgagatcctgcgcgcggaggatgccttccaggtccatgagccggctgtccgtcgagtccgcctcgggcagcggcggcggcggctgccgggaggccgagccggtgctctgcgcgcctcggccgcgcagggcccagcagcagctggtccacgtccacccccgcggcgccgacctcatcctcggcccgccgcccttccttctcaacgagagcagcgaggagggtcggtgcagctgggcggcgttcggcggcgggtcgccgccggcgcgcgcgggcaacccgctggtgcacgaccccagcttcctgctgagccagcgccaccccgcggcggacccgccgctggagctcggcttcttcgaccacctgatccgcaccagcagctacgttcaccggccgacgccgacgacgtcgtataccagcaccagcagcagcggcagtagcagcaagagtagttttggcccgtcgtcgttcgcgcccgccgtgaggatccaggggttcgacgtcgccgcgtgccggagctcccacagcggcggcggcggcgcgggcggccgcgttctgtccgccgcccgcgcgtgagctagcggtcgagctccatggtgtggaggggcaggaaatcaaagagggaggaggaagaaccttgtgtacagattatctgtctgatgagtcgtgttcgtgtccgctgtactaattgtgaacaccaccacgtagcatagcatagcatatagcatagcatatcaaagacaactaggtcggtcggacggtcagcgctcgtgttcttgtagcagtcgagctagcgactaggctaccgcgcgccatgtaacgtacggtcctgcaaacaatactgcacgtataaagatggaaaccgtgtacatacct

SEQ ID NO: 151077 - DNA, 2103 bp, Zea Mays
cactgtgcggatctgtaaccgtggtgcgtttccacttcctccccagctcatccgcgacagagcaattagtccattgcacacctccactcctcacccttcaatctttcgttcccaactgcgtttcctcctccgcgtcttcaaggaggggagacctgaaacgaatccagtccaggctggtggctgccggcgctggacctgaacgctggtgcatactgcgtaggcaagagcaggcaatggcggaggcgaatgcggggaaggagaagaaggaagtggtgcggctggagcgcgagtccgtgatccccatcatgaagcccaagctcaccatgaagctcgcctacctcatcgaacatcagtctgacagagaagaattcttgaagctctgcaggagggttgagtacaccataagggcttggtaccatctccagtttgatgatatgatggaactgttcgctctcttcgatcctgtgcatggtgctaaaaaactcgagcagcagaacttcctacctgaggaaatcgacacgcttgagcagaacttcctgtcctatttctttcgggtgatggaaaagagcaattttaacatagtaaatgacgatgaggttgaacttgctcattctggacaatatctgttgaatcttcccattaaagttgatgaatcaaagttagatgacaaacttctgtcgaagtattttaaggagcaccgtcatgaaaacctgcccgacttctcagacaagtatgttatatttcgtaggggcattggattggaccgcactagcaactttttcttcatggagaaagtggacatgatcatagctcgtgcatggcgaaggttccttgagaagacgagactgcaaaagctgttctcaagaaagaaaaatagtaagccaaagatagattccaagaagaatgatgatttagctagtgaaatagaagacaaggagctttatgttgaacgcatacgtcttgaaacaatggatttaagctttgggaatttatttggcaaggtcacaattcaagagcctacatttgaagaggtgattgtcttgtataggagaaaaagtccaaagggccaggatgatagggcaattcatgtaaagcacttcaaaaatatcccaatggcagacatggagttggttctgcctgagaagaaaaacccgagcctcacacctatggactgggttcaatttattgtttctgttgtcattggacttgttacactcatcagttcactggaaatgcctaaagctgatttctgggttgtaattgcaatcctctctgcactggcaggatattgcgcgaagatctatttctcgtttcaacagaatatggcaacctaccaaaacttaatcactcaatcaatgtatgacaaacaactagatagtgggaaaggcacactcctccacctctgtgatgatgtgattcaacaggaggtcaaggaggtcataattgcctactacattttgatggagaatggaaaggctaccagtgatgatcttgacttgcaatgcgaggagttaatccaggaagagtttggcttgcaatgcaattttgaggtgatggatgcagttcagaagctggagaggcttggtgtcattacaagagactctattggaaggatttgctgtgtccctctaaagcgtgccaatgagatcatcggcgcgaccacggaagaactggttatgaaagccaggcaaagctagcaatctattattttgaacaatgtagccgcattgtagattcttgcctgatggcgctgtaacgtttatggttactccagaaagtccaaacactgaactcttgcacaccaggagataagtacattctggtcatctccacagtagttctgggagagctacaagaaaatgtggttgtatttatttttttttatttttttggtggggggtactatggtttgtggaacgtcgtcgagggtgttgtaagcatgtagcattcttttgataacaagcgtggtaggaaggatgtttgaagaacacatacaagggctattatgttgctggattgatgctgtgaaccatgtattcttttcgtcagaacagtaaacttccgtaatgctgacggttcactgcggtgtgtacactgggccac

SEQ ID NO: 151078 - DNA, 2277 bp, Zea Mays
cactgtgcggatctgtaaccgtggtgcgtttccacttcctccccagctcatccgcgacagagcaattagtccattgcacacctccactcctcacccttcaatctttcgttcccaactgcgtttcctcctccgcgtcttcaaggaggggagacctgaaacgaatccagtccaggctggtggctgccggcgctggacctgaacgctggtgcatactgcgtaggcaagagcaggcaatggcggaggcgaatgcggggaaggagaagaaggaagtggtgcggctggagcgcgagtccgtgatccccatcatgaagcccaagctcaccatgaagctcgcctacctcatcgaacatcagtctgacagagaagaattcttgaagctctgcaggagggttgagtacaccataagggcttggtaccatctccagtttgatgatatgatggaactgttcgctctcttcgatcctgtgcatggtgctaaaaaactcgagcagcagaacttcctacctgaggaaatcgacacgcttgagcagaacttcctgtcctatttctttcgggtgatggaaaagagcaattttaacatagtaaatgacgatgaggttgaacttgctcattctggacaatatctgttgaatcttcccattaaagttgatgaatcaaagttagatgacaaacttctgtcgaagtattttaaggagcaccgtcatgaaaacctgcccgacttctcagacaagtatgttatatttcgtaggggcattggattggaccgcactagcaactttttcttcatggagaaagtggacatgatcatagctcgtgcatggcgaaggttccttgagaagacgagactgcaaaagctgttctcaagaaagaaaaatagtaagccaaagatagattccaagaagaatgatgatttagctagtgaaatagaagacaaggagctttatgttgaacgcatacgtcttgaaacaatggatttaagctttgggaatttatttggcaaggtcacaattcaagagcctacatttgaagaggtgattgtcttgtataggagaaaaagtccaaagggccaggatgatagggcaattcatgtaaagcacttcaaaaatatcccaatggcagacatggagttggttctgcctgagaagaaaaacccgagcctcacacctatggactgggttcaatttattgtttctgttgtcattggacttgttacactcatcagttcactggaaatgcctaaagctgatttctgggttgtaattgcaatcctctctgcactggcaggatattgcgcgaagatctatttctcgtttcaacagaatatggcaacctaccaaaacttaatcactcaatcaatgtatgacaaacaactagatagtgggaaaggcacactcctccacctctgtgatgatgtgattcaacaggaggtcaaggaggtcataattgcctactacattttgatggagaatggaaaggctaccagtgatgatcttgacttgcaatgcgaggagttaatccaggaagagtttggcttgcaatgcaattttgaggtgatggatgcagttcagaagctggagaggcttggtgtcattacaagagtgagttctcacttgtttctttttcttctcatggtgccacctgatcagagcatagggacgttttcttacagatacagtgcacagaataacgatttttgcagacacgtttacagggccagaagtttttgcatctactgaccatcatgttgtcacgtattgttctctgcttctttttttctttttctttctgcccaatactgaaggccgttttgcatccaggactctattggaaggatttgctgtgtccctctaaagcgtgccaatgagatcatcggcgcgaccacggaagaactggttatgaaagccaggcaaagctagcaatctattattttgaacaatgtagccgcattgtagattcttgcctgatggcgctgtaacgtttatggttactccagaaagtccaaacactgaactcttgcacaccaggagataagtacattctggtcatctccacagtagttctgggagagctacaagaaaatgtggttgtatttatttttttttatttttttggtggggggtactatggtttgtggaacgtcgtcgagggtgttgtaagcatgtagcattcttttgataacaagcgtggtaggaaggatgtttgaagaacacatacaagggctattatgttgctggattgatgctgtgaaccatgtattcttttcgtcagaacagtaaa

SEQ ID NO: 151079 - DNA, 2294 bp, Zea Mays
gtgtggaccttccagcggcaaatatagacaggactcctgcactgcaccatgcgtccagccatcgacacattattgggccgcagaatttcgttttattgggctgggccgctggtgcataccttaccggggttgtctggtgtcggacaggggttcccttcgtccagacggagctcccagtccgcaaccgccgcctcccgtttattctctctcaagcttctctccccgctaccgctccgagtcccaagtcccacccggccagcctccatcgctagtaccactcctagtcccaagtcccagccttccatcgacggcgagggagggagaggcgacctccatccgggctggttagattcatcgcttttcttgtcgctgtccctcggcctttccccctactgtgctccgagtctgggagaagcgactcgcgcacgcgctcggccaaaccaattaagcacagagcggggctctcgggcgagaacgcgctgaggcagtgctgggtttgcagttcgtgccgtagcgttttttttgtgtgtgtgccgaagcggagaggcgatggctgcgccgaggaaggggacggcgacgccgctgggcaccgtgttctcgccggaggagacgaagagggccgtggcgagggtggccgagtccgtcgctgggcgccgcgccgagctcgcccgcctccagggtttcgccgccgacaacgccgccctcgtctccctcgtcaacaggctccccgacgaactctctcacgatatcatggttccctttggtggcgccgcctttttcccagggcgtttaatacacacaaatgaactcttggtgcttctgggtgaggggtactatgcagagaggtcggctaagcagacgactaatatattgcacaggagggggcaggaattggaagctcaagtcgaagcaatgaaggcaactatcgctgaccttgaagctgaggccaaattctttgaattcacggccaccgaggcttcagagggtcttgttgaaatcagggaagagtatgatgaggacttagagacgaattcatcaagatcagaggcttcagttgctactgtggttatgtccgataaagacagggaacatgctcgaatcatggcaaggttagatgaacttgaaagggaagaaaaggatgctggaagtgcctgtgaagatgataatgatggcgacgatgatgatggagatgctggaacaagtgatgatggcgaggaaaataaggaatctggaaatgctttaagtgatgtcaatgaagactacagttctggttttggcgcttcattttctggaagtggcggcaatgataggagtcatgggaatattaagagtgcactgaagaagcctggaggagatgaaatgctgataggcatttctcataagccatcatcccatacatctcatctagcatttcctggccaaacctctgcaacaaattctgatgtccgagttcacactaaagctgttacttttgaagacgacaaatatgtagttagttcgtcaaagtctcctcccttgctactggattctatacagtctgatcctgtgctcaagaattcttcagaccccgctctatctcgtgacagaaagataatatcaagtggacgaaaggcctttacaggatctatcattgagcacgacgacaatgtttccaccattgaaccttctgtggctagttcgttggcaaaacctggtacttgtgcttcttcaaggcccgtgtcaaggttcaagatgcagaaaggagggcggtgagtctggacactcgggtggacctttggtgtctgatagattgcatcttgaacacgttcaaattgtctgtgctgtctgaactcctggacgctagacatgttgtggatcctggacgctagacatgttgtggatcctggacgctagacatgttctggagtgattgtcttctgccgactgtagagtgaaaccgggacgtccaagcgaagaagggaattaaaaacgaggttttttttggtcggttaattattagtatcacaggacgtccaagcatcgcattagttagccactgcacacagagcctgtcggccaataaggtcagttaattacagatttagtggtgctagcttgctgttcctacttgtgctgtagcagagtgtcatgacatggtcagtagcagccgatgagcgccgcgaagtcagcagggcggctgctggtggtgtctcttctcgttccctgggcggcgccgtggagcaccagattgtctctctcacgtatttcagcggcagcaagggacgaagaacctgccctctgcatgtcagctccac

SEQ ID NO: 151080 - DNA, 118 bp, Zea Mays
tgttttttatgattggatatttcacgggattacggtttagtttaccctatgcctatatgcaatatgtacacttctatgctttatcttttttcctactaaagccacctgtacacttcta

SEQ ID NO: 151081 - DNA, 359 bp, Zea Mays
tggattcgcaatagataactcacgtcgacggacagacgcatgaagtccaaagtccaagtgcatgctagagttccgcatggaagactcccgtccgccaacgtccacgatagttcttcatttccctttctcgcttgtttcttcaacctttcaacatcgacttctctctgttctctcacgagcagtgctgataacgtattgtaactcagtggcaaacaagtgaacagaggaacagtgcaaatgacagttgtatatctttattgcagagattctggtttatatacatgtggatacagtgtctcccaaagggtgtgtcccttgggagaaaactgtcaggggagagggttgatcacatgacaata

SEQ ID NO: 151082 - DNA, 3194 bp, Zea Mays
ctcctttctcccgtccccgcacaaaaacatttgccccccacccggccacccctcccgagtcccgactgctactgccgctgcctcctctccctttccgcctgccttcgctctcctcgtcgtctcctccgtctagggttctccaccccacccgccccgccgccgcccgatccgaggcagatgccgcccgcagccatggcgctgccgtcccaggccccgtctaactcaggggatccgctgtacccggagctctggcgcgcctgcgccggcccgctcgtcaccgtcccccgcgtcggcgacctcgtcttctacttcccccagggacacatcgagcaggtggaggcgtccatgaaccaggttgccgggaacccgatgcgtctctacgatctgccttccaagctgctctgccgcgtgctcaacgtcgagctgaaggcggagaccgacaccgacgaggtgtacgcgcagatcatgctcatgccggagcccgagcaaaacgatgtggctgccgagaagacgagctctgggtctgctgcgccaccgaggccagcggtcaggtcattctgcaagacgctcaccgcctccgacaccagcacacacggcggcttctctgtcctgcgccgccacgctgacgagtgcctccctgccctggatatgtcccagtcgcctcccactcaggagctggtggcgaaggatctgcatggcatggagtggcgattccgccacatcttccgcgggcaacccaggaggcatctccttcagagtggttggagtgtttttgtcagttccaaaaggcttgttgctggagacgccttcattttcctcagaggagaaaacggtgaacttcgagttggtgttaggcgcgctatgaggcagttgtctaatgtaccttcttcggttatatctagccaaagcatgcatctcggggttcttgcgactgcatggcacgctattaacacaaagtccatgttcactgtctactacaaacctaggacgagcccttcagagttcatcattccatatgatcaatatatggagtcagtaaaaaacaattattctattgggatgagattcaggatgaggtttgaaggggaagaggcccccgagcagaggtttactggtacaatagttggctgtgaaaatcttgacccactatggcctgattccagttggagatacttgaaggtgcgctgggatgagccttctactatcccgcggccagataaggtctctccctggaagatagagcctgcttcatcacctcctgttaatcctctccctctttctagaggaaaaagacctagacaaaatgcacctccaccttcccctgaatcatctgttctcacaaaagaaggtgcaaccaagattgatactgattctgctcaaacaccacatcaaaattcggtcttgcaaagtcaagagcagatgagctttaggaacaacctgactgaaagcaccgactctgattccactgttcagaagcagatgatgtggtccccatcacccaatgggaaagttcacactaattttcagccgagacctgctatggataactggatgccattgggaaggcgtgaaactgacttcaaggacacccgttctgccttcaaggatgcccgcaccgcttctcaatcgtttggagatacacaggggttctttatgcaagcttatgatgacagtcgtcaccgtctttctttcaacaatcagtttcaagatcagggttcagctcatcgctttgcagatccatacttctatatgcctcaacaaccttctctgacggttgaatcaggcacaaggacgcaaacagcgaacaatgacttgcgtttttggagtgagcggaattcgatgtatggtaatccaagtgaccaacagcagggtttcagctttgggcaaaacacatcaagttggttgaaccagccacttccccaggttgaacagtcacgagtggtcaggccgcatgcaacggttgctccatttgatttagagaagactagagaaggcagtgggttcaaaatatttggtttccaagttgatacaaccaatccatcacctgtccaattgagctctccattgtctgctatccgagagcatgtggtacaaactcgaccatcggcaccagtgaatgaattgcaacctgtgcaaattgagtgcttgcctgaggtgtccgtaagcacagctggaactgcagctgagaacattcagcaagtccagcaaagttcgaaagatattcaaagcaagtcccagggcgcttcaacaaggagctgtacaaaggttcataagcaaggagttgcgcttggccggtccgtggacctctctaaattcaccgactacggtgagctcaaagcggaactagacaagatgtttgagttcgagggcgaattggtatctgctaaccggaactggcagatcgtttataccgacaacgagggtgatatgatgcttgtcggagatgacccgtgggaggagttctgcaacatagtgcgcaagatctacatctacacgaaggaggaggtccagaagatgaactcgaaatcatccgtgccgaggaaggaggaacccccagcagcaggcgaaggctgcgccgccgccgccgcaaacgagtaggatgtctgcctgcactgcagcaagcagttttagatgactaggtcgtgtggaggaagccgacgatgatgcatgcgtgatgaacccgttccttgtgcaggaggtggtgccagcccgggtcccagggaagtaaaaactcctgagatcttttgcttgtccgttgcagccccatcccccgtccgtttgggttttagttgggaacgtagaaactactgtctccgcctgcttctccgaagctcgctgttggtagcaagttttattgctagtattattgttattgctgatttgctcccctctgcctttgcgatgtaaatatttgtgtacccagccccagccccagccccagccccagcttgtagtgagcagtaacaagcagtagcggtaccttcggtattaaccggcagctagctatttcgcggcattttaatccctgtaagcgtagctctgtggcgtgagatagatgacaaacactgggtatatgtatgtctgatctttctcactgaatgtaccataagagagtttgtagagtacctgacctgtgaccaaccccgttcctgtcagctctctggtctcagcaacacgctgtgtgatgccgcata

SEQ ID NO: 151083 - DNA, 3212 bp, Zea Mays
ctcctttctcccgtccccgcacaaaaacatttgccccccacccggccacccctcccgagtcccgactgctactgccgctgcctcctctccctttccgcctgccttcgctctcctcgtcgtctcctccgtctagggttctccaccccacccgccccgccgccgcccgatccgaggcagatgccgcccgcagccatggcgctgccgtcccaggccccgtctaactcaggggatccgctgtacccggagctctggcgcgcctgcgccggcccgctcgtcaccgtcccccgcgtcggcgacctcgtcttctacttcccccagggacacatcgagcaggtggaggcgtccatgaaccaggttgccgggaacccgatgcgtctctacgatctgccttccaagctgctctgccgcgtgctcaacgtcgagctgaaggcggagaccgacaccgacgaggtgtacgcgcagatcatgctcatgccggagcccgagcaaaacgatgtggctgccgagaagacgagctctgggtctgctgcgccaccgaggccagcggtcaggtcattctgcaagacgctcaccgcctccgacaccagcacacacggcggcttctctgtcctgcgccgccacgctgacgagtgcctccctgccctggatatgtcccagtcgcctcccactcaggagctggtggcgaaggatctgcatggcatggagtggcgattccgccacatcttccgcgggcaacccaggaggcatctccttcagagtggttggagtgtttttgtcagttccaaaaggcttgttgctggagacgccttcattttcctcagaggagaaaacggtgaacttcgagttggtgttaggcgcgctatgaggcagttgtctaatgtaccttcttcggttatatctagccaaagcatgcatctcggggttcttgcgactgcatggcacgctattaacacaaagtccatgttcactgtctactacaaacctaggacgagcccttcagagttcatcattccatatgatcaatatatggagtcagtaaaaaacaattattctattgggatgagattcaggatgaggtttgaaggggaagaggcccccgagcagaggtttactggtacaatagttggctgtgaaaatcttgacccactatggcctgattccagttggagatacttgaaggtgcgctgggatgagccttctactatcccgcggccagataaggtctctccctggaagatagagcctgcttcatcacctcctgttaatcctctccctctttctagaggaaaaagacctagacaaaatgcacctccaccttcccctgaatcatctgttctcacaaaagaaggtgcaaccaagattgatactgattctgctcaaacaccacatcaaaattcggtcttgcaaagtcaagagcagatgagctttaggaacaacctgactgaaagcaccgactctgattccactgttcagaagcagatgatgtggtccccatcacccaatgggaaagttcacactaattttcagccgagacctgctatggataactggatgccattgggaaggcgtgaaactgacttcaaggacacccgttctgccttcaaggatgcccgcaccgcttctcaatcgtttggagatacacaggggttctttatgcaagcttatgatgacagtcgtcaccgtctttctttcaacaatcagtttcaagatcagggttcagctcatcgctttgcagatccatacttctatatgcctcaacaaccttctctgacggttgaatcaggcacaaggacgcaaacagcgaacaatgacttgcgtttttggagtgagcggaattcgatgtatggtaatccaagtgaccaacagcagggtttcagctttgggcaaaacacatcaagttggttgaaccagccacttccccaggttgaacagtcacgagtggtcaggccgcatgcaacggttgctccatttgatttagagaagactagagaaggcagtgggttcaaaatatttggtttccaagttgatacaaccaatccatcacctgtccaattgagctctccattgtctgctatccgagagcatgtggtacaaactcgaccatcggcaccagtgaatgaattgcaacctgtgcaaattgagtgcttgcctgaggtgtccgtaagcacagctggaactgcagctgagaacattcagcaagtccagcaaagttcgaaagatattcaaagcaagtcccagggcgcttcaacaaggagctgtacaaaggttcataagcaaggagttgcgcttggccggtccgtggacctctctaaattcaccgactacggtgagctcaaagcggaactagacaagatgtttgagttcgagggcgaattggtatctgctaaccggaactggcagatcgtttataccgacaacgagggtgatatgatgcttgtcggagatgacccgtgggatccattgcttacgagcagggagttctgcaacatagtgcgcaagatctacatctacacgaaggaggaggtccagaagatgaactcgaaatcatccgtgccgaggaaggaggaacccccagcagcaggcgaaggctgcgccgccgccgccgcaaacgagtaggatgtctgcctgcactgcagcaagcagttttagatgactaggtcgtgtggaggaagccgacgatgatgcatgcgtgatgaacccgttccttgtgcaggaggtggtgccagcccgggtcccagggaagtaaaaactcctgagatcttttgcttgtccgttgcagccccatcccccgtccgtttgggttttagttgggaacgtagaaactactgtctccgcctgcttctccgaagctcgctgttggtagcaagttttattgctagtattattgttattgctgatttgctcccctctgcctttgcgatgtaaatatttgtgtacccagccccagccccagccccagccccagcttgtagtgagcagtaacaagcagtagcggtaccttcggtattaaccggcagctagctatttcgcggcattttaatccctgtaagcgtagctctgtggcgtgagatagatgacaaacactgggtatatgtatgtctgatctttctcactgaatgtaccataagagagtttgtagagtacctgacctgtgaccaaccccgttcctgtcagctctctggtctcagcaacacgctgtgtgatgccgcata

SEQ ID NO: 151084 - DNA, 2769 bp, Zea Mays
ctcctttctcccgtccccgcacaaaaacatttgccccccacccggccacccctcccgagtcccgactgctactgccgctgcctcctctccctttccgcctgccttcgctctcctcgtcgtctcctccgtctagggttctccaccccacccgccccgccgccgcccgatccgaggcagatgccgcccgcagccatggcgctgccgtcccaggccccgtctaactcaggggatccgctgtacccggagctctggcgcgcctgcgccggcccgctcgtcaccgtcccccgcgtcggcgacctcgtcttctacttcccccagggacacatcgagcaggtggaggcgtccatgaaccaggttgccgggaacccgatgcgtctctacgatctgccttccaagctgctctgccgcgtgctcaacgtcgagctgaaggcggagaccgacaccgacgaggtgtacgcgcagatcatgctcatgccggagcccgagcaaaacgatgtggctgccgagaagacgagctctgggtctgctgcgccaccgaggccagcggtcaggtcattctgcaagacgctcaccgcctccgacaccagcacacacggcggcttctctgtcctgcgccgccacgctgacgagtgcctccctgccctggatatgtcccagtcgcctcccactcaggagctggtggcgaaggatctgcatggcatggagtggcgattccgccacatcttccgcgggcaacccaggaggcatctccttcagagtggttggagtgtttttgtcagttccaaaaggcttgttgctggagacgccttcattttcctcagaggagaaaacggtgaacttcgagttggtgttaggcgcgctatgaggcagttgtctaatgtaccttcttcggttatatctagccaaagcatgcatctcggggttcttgcgactgcatggcacgctattaacacaaagtccatgttcactgtctactacaaacctaggacgagcccttcagagttcatcattccatatgatcaatatatggagtcagtaaaaaacaattattctattgggatgagattcaggatgaggtttgaaggggaagaggcccccgagcagaggtttactggtacaatagttggctgtgaaaatcttgacccactatggcctgattccagttggagatacttgaaggtgcgctgggatgagccttctactatcccgcggccagataaggtctctccctggaagatagagcctgcttcatcacctcctgttaatcctctccctctttctagaggaaaaagacctagacaaaatgcacctccaccttcccctgaatcatctgttctcacaaaagaaggtgcaaccaagattgatactgattctgctcaaacaccacatcaaaattcggtcttgcaaagtcaagagcagatgagctttaggaacaacctgactgaaagcaccgactctgattccactgttcagaagcagatgatgtggtccccatcacccaatgggaaagttcacactaattttcagccgagacctgctatggataactggatgccattgggaaggcgtgaaactgacttcaaggacacccgttctgccttcaaggatgcccgcaccgcttctcaatcgtttggagatacacaggggttctttatgcaagcttatgatgacagtcgtcaccgtctttctttcaacaatcagtttcaagatcagggttcagctcatcgctttgcagatccatacttctatatgcctcaacaaccttctctgacggttgaatcaggcacaaggacgcaaacagcgaacaatgacttgcgtttttggagtgagcggaattcgatgtatggtaatccaagtgaccaacagcagggtttcagctttgggcaaaacacatcaagttggttgaaccagccacttccccaggttgaacagtcacgagtggtcaggccgcatgcaacggttgctccatttgatttagagaagactagagaaggcagtgggttcaaaatatttggtttccaagttgatacaaccaatccatcacctgtccaattgagctctccattgtctgctatccgagagcatgtggtacaaactcgaccatcggcaccagtgaatgaattgcaacctgtgcaaattgagtgcttgcctgaggtgtccgtaagcacagctggaactgcagctgagaacattcagcaagtccagcaaagttcgaaagatattcaaagcaagtcccagggcgcttcaacaaggagctgtacaaaggttcataagcaaggagttgcgcttggccggtccgtggacctctctaaattcaccgactacggtgagctcaaagcggaactagacaagatgtttgagttcgagggcgaattggtatctgctaaccggaactggcagatcgtttataccgacaacgagggtgatatgatgcttgtcggagatgacccgtgggatccattgcttacgagcagggagttctgcaacatagtgcgcaagatctacatctacacgaaggaggaggtccagaagatgaactcgaaatcatccgtgccgaggaaggaggaacccccagcagcaggcgaaggctgcgccgccgccgccgcaaacgagtaggatgtctgcctgcactgcagcaagcagttttagatgactaggtaagtcctccgtttgagccgcagtactctgttttttttgttgttgttgcaacagtggtggtgaatggggttttgactctggactaaaggagcaacgaatttgtctttgttg

SEQ ID NO: 151085 - DNA, 2599 bp, Zea Mays
ctcctttctcccgtccccgcacaaaaacatttgccccccacccggccacccctcccgagtcccgactgctactgccgctgcctcctctccctttccgcctgccttcgctctcctcgtcgtctcctccgtctagggttctccaccccacccgccccgccgccgcccgatccgaggcagatgccgcccgcagccatggcgctgccgtcccaggccccgtctaactcaggggatccgctgtacccggagctctggcgcgcctgcgccggcccgctcgtcaccgtcccccgcgtcggcgacctcgtcttctacttcccccagggacacatcgagcaggtggaggcgtccatgaaccaggttgccgggaacccgatgcgtctctacgatctgccttccaagctgctctgccgcgtgctcaacgtcgagctgaaggcggagaccgacaccgacgaggtgtacgcgcagatcatgctcatgccggagcccgagcaaaacgatgtggctgccgagaagacgagctctgggtctgctgcgccaccgaggccagcggtcaggtcattctgcaagacgctcaccgcctccgacaccagcacacacggcggcttctctgtcctgcgccgccacgctgacgagtgcctccctgccctggatatgtcccagtcgcctcccactcaggagctggtggcgaaggatctgcatggcatggagtggcgattccgccacatcttccgcgggcaacccaggaggcatctccttcagagtggttggagtgtttttgtcagttccaaaaggcttgttgctggagacgccttcattttcctcagaggagaaaacggtgaacttcgagttggtgttaggcgcgctatgaggcagttgtctaatgtaccttcttcggttatatctagccaaagcatgcatctcggggttcttgcgactgcatggcacgctattaacacaaagtccatgttcactgtctactacaaacctaggacgagcccttcagagttcatcattccatatgatcaatatatggagtcagtaaaaaacaattattctattgggatgagattcaggatgaggtttgaaggggaagaggcccccgagcagaggtttactggtacaatagttggctgtgaaaatcttgacccactatggcctgattccagttggagatacttgaaggtgcgctgggatgagccttctactatcccgcggccagataaggtctctccctggaagatagagcctgcttcatcacctcctgttaatcctctccctctttctagaggaaaaagacctagacaaaatgcacctccaccttcccctgaatcatctgttctcacaaaagaaggtgcaaccaagattgatactgattctgctcaaacaccacatcaaaattcggtcttgcaaagtcaagagcagatgagctttaggaacaacctgactgaaagcaccgactctgattccactgttcagaagcagatgatgtggtccccatcacccaatgggaaagttcacactaattttcagccgagacctgctatggataactggatgccattgggaaggcgtgaaactgacttcaaggacacccgttctgccttcaaggatgcccgcaccgcttctcaatcgtttggagatacacaggggttctttatgcaagcttatgatgacagtcgtcaccgtctttctttcaacaatcagtttcaagatcagggttcagctcatcgctttgcagatccatacttctatatgcctcaacaaccttctctgacggttgaatcaggcacaaggacgcaaacagcgaacaatgacttgcgtttttggagtgagcggaattcgatgtatggtaatccaagtgaccaacagcagggtttcagctttgggcaaaacacatcaagttggttgaaccagccacttccccaggttgaacagtcacgagtggtcaggccgcatgcaacggttgctccatttgatttagagaagactagagaaggcagtgggttcaaaatatttggtttccaagttgatacaaccaatccatcacctgtccaattgagctctccattgtctgctatccgagagcatgtggtacaaactcgaccatcggcaccagtgaatgaattgcaacctgtgcaaattgagtgcttgcctgaggtgtccgtaagcacagctggaactgcagctgagaacattcagcaagtccagcaaagttcgaaagatattcaaagcaagtcccagggcgcttcaacaaggagctgtacaaaggtattgtttttttccgtttttatgaccatgcacttgtctatattcaatgtgcatgtgattgggaatatattatcagctattggctcattcggttattgaaacaaaatgacctcttcagatattgctgtgtggttccgaaatcctggtggtttggttcctaattgtctgaatgcagactggtcgttgagttcatgactcaaatctgtggttttcaccgacactgatcgaatctgccaataatcgtttgatgtgttctctatgttgcctaaaatcgcatctccatttggcagaattcaaaaaagaagaagaaaagaaacagaaacaaaacaataaa

SEQ ID NO: 151086 - DNA, 108 bp, Zea Mays
ctcaccacaacagtcagagtcagagaggagttcccatcaccacccgctcccccggtaaaaaaattcaaccttcaacccccggatatcttcagaaaataattttctgac

SEQ ID NO: 151087 - DNA, 1710 bp, Zea Mays
ttcagcgcacctcgctaggcgagtcgcctccggggtgcctggacgactaggcgatagttacgcgaccaactggttcacaacattgcgcaaaacaaagcagagcatagcatcacagttcacagcagcgcgcggaggcaaggcgcacaacagcgtgcggtggcgcggcgtgcagagcagccgcgcgagcgaagctagtagcgccgcacggaatcgcagagaaggaagtggggagggttaccggcgtcgacgagcgagcaggctctaggtaatcttttcacctacctagacctaggcgcttgattgggtgctcctagacgacgcctagccgtccacgccacgacgacttacccttcaggcgtccgcctagccatcttcaggcgaggtgccgcatcacgatgagcctggccgggcgcctggacacctaggcctcgcctaggcgacaccgacatagcgatgctgtgcgatttactcgtgcagaagctccgacaactatttctgaattacctggactggtttgtgacgatatctctggagggcaagaaaacattccgattcctgccactaacttggttgatgatccacctgttcctccatctggtttcacatacttgaagtctctaaaaattccaaaggacatcaagatcccatctagtattattggctgtgattgtgaaggagattgtgctagcaacaaaaattgttcatgtgctcagcgcaatggttctgatctgccttatgtatcatataagaacattggcaggttggtggagcccaaagcagttgtatttgaatgcggggctaactgcagctgcaaccatgattgtgtaaacagaacatctcaacagggtttgcagtatcacttagaggtatttaagacagcttcaaaaggttggggagtcaggacttgggacactatcctccctggggctcccatctgtgagtacacgggggtgttgaggaggactgaagatctggatggttcacagaacaactattgttttgacattgattgtcttcaaaccatgaaaggtttggatggaagggagaaaagagctggatctgaaatgcacctgcctaatctttatccagagaatgactcagatgcaccacctgcacctgagtactgcatagacggcagttccattggcaattttgcaagatttataaatcatagttgccaacctaaccttttcgtccagtgcgtcatgagctcacacaacgatgttaaactagcaaaagtgatgctttttgctgctgacacaatacttcctcttcaggagctatcctatgactacggttatcgcttggacagtgttgttgggcctgatggtaaaattgtgaagctgccatgccactgtggtgctccagattgccggaagcgcctctactagacctgcagtgtgtttccattttgattttgcaggaaacaacctatattgtaggaaagcattcatgttatttatgtagttggcatgctctgatatatagcgaaagaggagcaacttaatctccttttagagcattcttattttgtgataattggaggacatgctggtcatggtagcatattttgcaggaaatcaattaactgatatgtctgggcatggatctatgttttttctattatgtgctgtcgtgtttttttaatcaatggatactacattactgttatggccactgaattgatacaatgttatcgatttatatagc

SEQ ID NO: 151088 - DNA, 1796 bp, Zea Mays
aaatgtgttctaaaataaagcagctcatattgattatatgtgcatagaataatggaagactatcgtgttgtatcgccttggcctggagtgcgactatgtattctccctcaattccaaaataagttgttttagttttgtcctaagtcaaagttatataactttaatcaaatttatagaaaaatccataatgtaaacattaaaccagttttattaaatctgccatgaatcatgtcttgataatgtaattattttgtattttaaatattaatactattattatataaacttggccaaagttatagagatttaacttaaacaaaactaaaacgacctgtattgtgaaccaggatagttttcagttcaagtatccgtataacatgccagtctactggagataagagagaaaccatagctaaatatacctttaaatatttgcaacactagactgtactctatcaacatcaatggttgtggtagtttcacgctgtgctatgctaacatccatgtatgtattcttttgtcaccttagccttagtgatactgagattatgtttccttgaatgaaactaatcgtatgtcatgttttaatttgatagactggtttgtgacgatatctctggagggcaagaaaacattccgattcctgccactaacttggttgatgatccacctgttcctccatctggtttcacatacttgaagtctctaaaaattccaaaggacatcaagatcccatctagtattattggctgtgattgtgaaggagattgtgctagcaacaaaaattgttcatgtgctcagcgcaatggttctgatctgccttatgtatcatataagaacattggcaggttggtggagcccaaagcagttgtatttgaatgcggggctaactgcagctgcaaccatgattgtgtaaacagaacatctcaacagggtttgcagtatcacttagaggtatttaagacagcttcaaaaggttggggagtcaggacttgggacactatcctccctggggctcccatctgtgagtacacgggggtgttgaggaggactgaagatctggatggttcacagaacaactattgttttgacattgattgtcttcaaaccatgaaaggtttggatggaagggagaaaagagctggatctgaaatgcacctgcctaatctttatccagagaatgactcagatgcaccacctgcacctgagtactgcatagacggcagttccattggcaattttgcaagatttataaatcatagttgccaacctaaccttttcgtccagtgcgtcatgagctcacacaacgatgttaaactagcaaaagtgatgctttttgctgctgacacaatacttcctcttcaggagctatcctatgactacggttatcgcttggacagtgttgttgggcctgatggtaaaattgtgaagctgccatgccactgtggtgctccagattgccggaagcgcctctactagacctgcagtgtgtttccattttgattttgcaggaaacaacctatattgtaggaaagcattcatgttatttatgtagttggcatgctctgatatatagcgaaagaggagcaacttaatctccttttagagcattcttattttgtgataattggaggacatgctggtcatggtagcatattttgcaggaaatcaattaactgatatgtctgggcatggatctatgttttttctattatgtgctgtcgtgtttttttaatcaatggatactacattactgttatggccactgaattgatacaatgttatcgatttatata

SEQ ID NO: 151089 - DNA, 1597 bp, Zea Mays
gatccgtccctgcttggggccctgagcaggaatagtataagccctcagccccctcacggctgggcaccagacggtacaagccttcagcgcacctcgctaggcgagtcgcctccggggtgcctggacgactaggcgatagttacgcgaccaactggttcacaacattgcgcaaaacaaagcagagcatagcatcacagttcacagcagcgcgcggaggcaaggcgcacaacagcgtgcggtggcgcggcgtgcagagcagccgcgcgagcgaagctagtagcgccgcacggaatcgcagagaaggaagtggggagggttaccggcgtcgacgagcgagcaggctctaggtgcgatttactcgtgcagaagctccgacaactatttctgaattacctggactggtttgtgacgatatctctggagggcaagaaaacattccgattcctgccactaacttggttgatgatccacctgttcctccatctggtttcacatacttgaagtctctaaaaattccaaaggacatcaagatcccatctagtattattggctgtgattgtgaaggagattgtgctagcaacaaaaattgttcatgtgctcagcgcaatggttctgatctgccttatgtatcatataagaacattggcaggttggtggagcccaaagcagttgtatttgaatgcggggctaactgcagctgcaaccatgattgtgtaaacagaacatctcaacagggtttgcagtatcacttagaggtatttaagacagcttcaaaaggttggggagtcaggacttgggacactatcctccctggggctcccatctgtgagtacacgggggtgttgaggaggactgaagatctggatggttcacagaacaactattgttttgacattgattgtcttcaaaccatgaaaggtttggatggaagggagaaaagagctggatctgaaatgcacctgcctaatctttatccagagaatgactcagatgcaccacctgcacctgagtactgcatagacggcagttccattggcaattttgcaagatttataaatcatagttgccaacctaaccttttcgtccagtgcgtcatgagctcacacaacgatgttaaactagcaaaagtgatgctttttgctgctgacacaatacttcctcttcaggagctatcctatgactacggttatcgcttggacagtgttgttgggcctgatggtaaaattgtgaagctgccatgccactgtggtgctccagattgccggaagcgcctctactagacctgcagtgtgtttccattttgattttgcaggaaacaacctatattgtaggaaagcattcatgttatttatgtagttggcatgctctgatatatagcgaaagaggagcaacttaatctccttttagagcattcttattttgtgataattggaggacatgctggtcatggtagcatattttgcaggaaatcaattaactgatatgtctgggcatggatctatgttttttctattatgtgctgtcgtgtttttttaatcaatggatactacattactgttatggccactgaattgatacaatgttatcgatttatata

SEQ ID NO: 151090 - DNA, 2539 bp, Zea Mays
atgcgcggcgcgtaccctgtcctgcctactttgctctgctctcgacgctttgctctcctcccttccccacccgcccacccggacttggttcttccgccattcccgttatcgcggagcgcaggtgctcctcgtcttctgcggcggcatcgagagggtgagctcctcgtctctcttgctgagctcgacgcggcggtccggtgctcgctgcgaagctggtggatggcgaatatggattcggttgttgtgatggaggtggcgccggtgccgatcccgacgttcatggacgccactcccctgaaccccccactgccgcttgtggtggaggagctcgtgctgcgccgcagtgctcgttacctcaacaggccaacccggcctaactacgcggaccaggagcctccaaaaaaccccggcggccggggccggggcaagcgaaagagggatgaggagaagccggagctggcggcgcagcagggtaccaagaccccaggcaggaatgactccaatgttgaggcgggtgagaggaagccgatgcccgtgactgcggcggtgccggcctgttgcgctggcgttgctgcggaagacgatgcgacgccgactgggaagagcgccaagctgagggtgaaggagacactgagggcgttcaacagccactacctccactttgtccaggaggagcagaaaagagctcaggctgcgatacaggagattgaggctaagggtggcctcaaacgtcagaccaaggggggtaaaaagaagagcagtaagcaagaggctgaagctgaggagaaagagaaacgcccatcaaagcgacctgacctgaaggcaatcaccaagatgcaagaaatgaatgccgtgctttatcaggagaagacgattgggcatctaccagggctcgatgtcggagatcagttttattctcgcgctgaaatggtagtgttgggcatccacagccattggctcaatggcattgactatatggggatgaaataccaaggaaagaaggagtatgccaacttaactttcccattggccacatgtattgtaatgtcggggatatatgaagatgatctagacaaggctgatgaaattatttatactggtcaaggaggaaatgatttacttggtaaccaccgccaaattggctctcaacagttgaaacgtgggaatttagcattgaagaatagcaggaagaatggtaatcctgtccgagttattcgaggtcatttatcaaagaatagctatactggaaaggtctacacctacgatgggctttacaaggttgtagatgactgggtgcagaacggtgtgcaaggccatgttgttttcaaatttaagttgaagcggcttgagggtcagccatcattgacaacttctgaggtgcgatttactcgtgcagaagctccgacaactatttctgaattacctggactggtttgtgacgatatctctggagggcaagaaaacattccgattcctgccactaacttggttgatgatccacctgttcctccatctggtttcacatacttgaagtctctaaaaattccaaaggacatcaagatcccatctagtattattggctgtgattgtgaaggagattgtgctagcaacaaaaattgttcatgtgctcagcgcaatggttctgatctgccttatgtatcatataagaacattggcaggttggtggagcccaaagcagttgtatttgaatgcggggctaactgcagctgcaaccatgattgtgtaaacagaacatctcaacagggtttgcagtatcacttagaggtatttaagacagcttcaaaaggttggggagtcaggacttgggacactatcctccctggggctcccatctgtgagtacacgggggtgttgaggaggactgaagatctggatggttcacagaacaactattgttttgacattgattgtcttcaaaccatgaaaggtttggatggaagggagaaaagagctggatctgaaatgcacctgcctaatctttatccagagaatgactcagatgcaccacctgcacctgagtactgcatagacggcagttccattggcaattttgcaagatttataaatcatagttgccaacctaaccttttcgtccagtgcgtcatgagctcacacaacgatgttaaactagcaaaagtgatgctttttgctgctgacacaatacttcctcttcaggagctatcctatgactacggttatcgcttggacagtgttgttgggcctgatggtaaaattgtgaagctgccatgccactgtggtgctccagattgccggaagcgcctctactagacctgcagtgtgtttccattttgattttgcaggaaacaacctatattgtaggaaagcattcatgttatttatgtagttggcatgctctgatatatagcgaaagaggagcaacttaatctccttttagagcattcttattttgtgataattggaggacatgctggtcatggtagcatattttgcaggaaatcaattaactgatatgtctgggcatggatctatgtttttt

SEQ ID NO: 151091 - DNA, 701 bp, Zea Mays
gatccgtccctgcttggggccctgagcaggaatagtataagccctcagccccctcacggctgggcaccagacggtacaagccttcagcgcacctcgctaggcgagtcgcctccggggtgcctggacgactaggcgatagttacgcgaccaactggttcacaacattgcgcaaaacaaagcagagcatagcatcacagttcacagcagcgcgcggaggcaaggcgcacaacagcgtgcggtggcgcggcgtgcagagcagccgcgcgagcgaagctagtagcgccgcacggaatcgcagagaaggaagtggggagggttaccggcgtcgacgagcgagcaggctctaggtgcgatttactcgtgcagaagctccgacaactatttctgaattacctggactggtttgtgacgatatctctggagggcaagaaaacattccgattcctgccactaacttggttgatgatccacctgttcctccatctggtttcacatacttgaagtctctaaaaattccaaaggacatcaagatcccatctagtattattggctgtgattgtgaaggagattgtgctagcaacaaaaattgttcatgtgctcagcgcaatggttctgatctgccttatgtatcatataagaacattggcaggtaagctcaacttttaaacgcttcaacacttggatgcattttgcaactatta

SEQ ID NO: 151092 - DNA, 1583 bp, Zea Mays
ttaacatatcctcgcggctccccgatcgccgccaccgctttaccccactctgctgctgttgttatgataacaactcgcacccccactctcagcaccgcagcctcactcctgctcacccaccggcaccgcatcctcgccgcccggaccctctctgtctctgtctccgccgcggcgggctcctcctccatccccgtcaaggtaacctggcctgggaggcttgattggtttttttttttgggtgggggtggtctcctacctagctgagatgctgccgtcgtggactcttgcttgacgcttgctctgttcatggactcatgcgcgcgcgtcagatgactgcgcggtcggcgctggacgaggtcaccgacacgggcgccttcgaccggtcgccgtccaccttccggagctccgtttccagggacgggcggttccccgccgtggcggggcggtaccacctctacgtctcgtacgcgtgcccctgggcgtcccggtgcctcgccttcctcaagctcaagggcctcgaccacgccatcggcgtcacggccgtgaagcctatcttcgagcggaccaaggagagcgacgagcatctgggctgggtgttccccgccgccgccgacgaggagcccggcgccgagcccgaccctctcaacggcgcccggagcgtgagggagctatacgagatcgccagctccaactacgccgggaagccaaccgtccccgtgctgtgggacaagcagctgaagacggtggtgaacaacgagagctccgagatcatccggatgctcaacgccgagttcaacggcatcgccaggaaccccgggctggacctctacccggcccacctccgggcctccatcgacgaggccaacgagctggtctacgacgccatcaacaacggcgtctacaagtgcggcttcgccaagaagcaggggccgtacgacgaggccgtgacgagattgtacgaggctctggacagatgcgaggagattcttggcaagcggcgctatatttgtggcgaccagctgactgaggcggacattcgcctgttcgtgactctcattcggttcgatgaggtctacgccgttcacttcaagtgcaacaagaagctgctgagggagtacccaaacctgttcaactacaccaaggacatataccagatccccggcatcagcagcaccgtcaacatggaacacatcaggaagcactactacggaagccatccgtccataaacccatacgggattatccccgctggacccaacatcgactacaatgccccacatgacagggagaggttcagcgcctgactgcgcgtgggaccttgttgcttcctttctctctctctctctctctctcttttctgcaggagccgtgtgcagtgttgttgtgcttcatgagggtcttgtgcttggccgtgtcagaggctgcaagaatccctactgtactttttttcttcttctgagcagttgaagatggaagacaaggttttatttcgcacagataaataaaaggtacaaagggtcgtcgattttatacgaaggcctcgtttggcacagtagcaccgaacgtggtgttttctttctttc

SEQ ID NO: 151093 - DNA, 1470 bp, Zea Mays
ttaacatatcctcgcggctccccgatcgccgccaccgctttaccccactctgctgctgttgttatgataacaactcgcacccccactctcagcaccgcagcctcactcctgctcacccaccggcaccgcatcctcgccgcccggaccctctctgtctctgtctccgccgcggcgggctcctcctccatccccgtcaagatgactgcgcggtcggcgctggacgaggtcaccgacacgggcgccttcgaccggtcgccgtccaccttccggagctccgtttccagggacgggcggttccccgccgtggcggggcggtaccacctctacgtctcgtacgcgtgcccctgggcgtcccggtgcctcgccttcctcaagctcaagggcctcgaccacgccatcggcgtcacggccgtgaagcctatcttcgagcggaccaaggagagcgacgagcatctgggctgggtgttccccgccgccgccgacgaggagcccggcgccgagcccgaccctctcaacggcgcccggagcgtgagggagctatacgagatcgccagctccaactacgccgggaagccaaccgtcccctgttccattgcgtttcaggtgctgtgggacaagcagctgaagacggtggtgaacaacgagagctccgagatcatccggatgctcaacgccgagttcaacggcatcgccaggaaccccgggctggacctctacccggcccacctccgggcctccatcgacgaggccaacgagctggtctacgacgccatcaacaacggcgtctacaagtgcggcttcgccaagaagcaggggccgtacgacgaggccgtgacgagattgtacgaggctctggacagatgcgaggagattcttggcaagcggcgctatatttgtggcgaccagctgactgaggcggacattcgcctgttcgtgactctcattcggttcgatgaggtctacgccgttcacttcaagtgcaacaagaagctgctgagggagtacccaaacctgttcaactacaccaaggacatataccagatccccggcatcagcagcaccgtcaacatggaacacatcaggaagcactactacggaagccatccgtccataaacccatacgggattatccccgctggacccaacatcgactacaatgccccacatgacagggagaggttcagcgcctgactgcgcgtgggaccttgttgcttcctttctctctctctctctctctctcttttctgcaggagccgtgtgcagtgttgttgtgcttcatgagggtcttgtgcttggccgtgtcagaggctgcaagaatccctactgtactttttttcttcttctgagcagttgaagatggaagacaaggttttatttcgcacagataaataaaaggtacaaagggtcgtcgattttatacgaaggcctcgtttggcacagtagcaccgaacgtggtgttttctttctttc

SEQ ID NO: 151094 - DNA, 1452 bp, Zea Mays
ttaacatatcctcgcggctccccgatcgccgccaccgctttaccccactctgctgctgttgttatgataacaactcgcacccccactctcagcaccgcagcctcactcctgctcacccaccggcaccgcatcctcgccgcccggaccctctctgtctctgtctccgccgcggcgggctcctcctccatccccgtcaagatgactgcgcggtcggcgctggacgaggtcaccgacacgggcgccttcgaccggtcgccgtccaccttccggagctccgtttccagggacgggcggttccccgccgtggcggggcggtaccacctctacgtctcgtacgcgtgcccctgggcgtcccggtgcctcgccttcctcaagctcaagggcctcgaccacgccatcggcgtcacggccgtgaagcctatcttcgagcggaccaaggagagcgacgagcatctgggctgggtgttccccgccgccgccgacgaggagcccggcgccgagcccgaccctctcaacggcgcccggagcgtgagggagctatacgagatcgccagctccaactacgccgggaagccaaccgtccccgtgctgtgggacaagcagctgaagacggtggtgaacaacgagagctccgagatcatccggatgctcaacgccgagttcaacggcatcgccaggaaccccgggctggacctctacccggcccacctccgggcctccatcgacgaggccaacgagctggtctacgacgccatcaacaacggcgtctacaagtgcggcttcgccaagaagcaggggccgtacgacgaggccgtgacgagattgtacgaggctctggacagatgcgaggagattcttggcaagcggcgctatatttgtggcgaccagctgactgaggcggacattcgcctgttcgtgactctcattcggttcgatgaggtctacgccgttcacttcaagtgcaacaagaagctgctgagggagtacccaaacctgttcaactacaccaaggacatataccagatccccggcatcagcagcaccgtcaacatggaacacatcaggaagcactactacggaagccatccgtccataaacccatacgggattatccccgctggacccaacatcgactacaatgccccacatgacagggagaggttcagcgcctgactgcgcgtgggaccttgttgcttcctttctctctctctctctctctctcttttctgcaggagccgtgtgcagtgttgttgtgcttcatgagggtcttgtgcttggccgtgtcagaggctgcaagaatccctactgtactttttttcttcttctgagcagttgaagatggaagacaaggttttatttcgcacagataaataaaaggtacaaagggtcgtcgattttatacgaaggcctcgtttggcacagtagcaccgaacgtggtgttttctttctttc

SEQ ID NO: 151095 - DNA, 75 bp, Zea Mays
tttcttactaatatctattttagggttagtttacacgttcttttggaattgctcttacatgacatttttgtttat

SEQ ID NO: 151096 - DNA, 114 bp, Zea Mays
cctgtaaaactagatattctactcctcaaactattgaaaagcgtcaaaataaccccacgggcagttttgaaaatggtcttgatgatgtgtcatgtttagagttctatatgaccc

SEQ ID NO: 151097 - DNA, 285 bp, Zea Mays
caccttctcgagcttctggaaggcgtcggcaccgcggggcgcccagccgcggagcgcgtcgccggcggcctcggagagccagagcggccacccggacgcatccttcttcaccgccgcgatgtgctccggccgcggcgcctgcagctgcacctccctgtcgtcgcctcctcccacagaggtcgcggcggcggggaagaagagggaggacccgggcgcggtggtggcgagcttaccgatgatgcagcccattgcttgggaaacgcagggaggacgcgggaagtgttg

SEQ ID NO: 151098 - DNA, 1171 bp, Zea Mays
gcgcccccgccaaatttggaccccgctccgagaagcccgcgccgccgctggccggccgcagcggtcgaaactgcctcgcgcgcgtctccttactaaggccgtccgcgcggcgcggcatgagacgccatccttcccgaccaaccaccccgcgctcccgccccacgcacgccctcgcgctcaccggcgccccgcccctcccccacgctggccgcacccgcaatggggtgcgcggcgtcggccgccaacggggccgggccccggcggcgggggtgggcgcgggcgcggatgcggcggtacagcgaggcgtccacctcgggtctgccgccgccgccgccgccgccgcaggaggcggcggagtcgtcgtccgggggcaggaggcgagggcgcaaggtggcgccggagcccaaggagccggcggaggaggggaccgccgcgctgccgccgatgcccggctcgcccagcttcaggtactactgccagaagaagacggcggccgtcgacaggatcgtggccgacgccgacgccgccgacgccgatgactccgtcagggtcagagcgacggcgcgtcagctgagcaacaggtgcgaaatcacggcgaccaaggcacacgattctaccgaggttgctcaacctaaagagggaaccagatggcttaggttcagtggcctgtccctcgtcgctaccgcttggcacaacttgatcagccgacaaagaagcaaacattcgccgcctcctgctgccgcaacctctcaaccatgaccaggcagcgctgtacgggatcctcagcttgtaaaaaacacgcacacacacgcatggctcatccatccatccatccatgctacatttgcagtcatttgctgttattttccaatcctggttagttcttgtaagctaaccccgcatccgataagctaatcctgtaaatggcgcaaggagcatcagctctggactgctcctgttgtagagaaaaaaaaatactacagcttagagttggggaaggagggcaatctggaaattcatccaaagctttgtggcgtaacttgattatatatgtacttttgtaaaacctaccagttgtggttcaaatccaccggctactaactaactagcctatgcaaaaccaaaacaaaaaaaagaggagtaacatgatcacaggatgtcacttgactgc

SEQ ID NO: 151099 - DNA, 119 bp, Zea Mays
gccggggtgatgaccgcctggtcctgctgcctgctgggacctgggaggacggatggagacatgttggtgactgagccccgcacgcaattgtaagaccggccggcggtgcgcatcgcgtc

SEQ ID NO: 151100 - DNA, 2010 bp, Zea Mays
attttgtgaggaggagaaaagctgaatgaataggccggcgggcacgagcatggcagttgatgagagtttggacggggttgagtccatttcacgccaccgccgctgcacctataaaacggcggagccgacgcccccctgttttccgctcctccccacgacgacgagaatccccccatcccccaccaggccacaaaaaccaggtcgccgatgccgcctaccgtctgacatcgatcacccaggcagatcgcgcgcaagccacccaaacaaatccaaaaccgaatcctgatccgatcccgtcgatcggcggcggcggcgatggaggcccggcccggcgcgtggcgcctgcagcagcggggccccggcgcgcccgtcgcgggcctgcccatcggcttccgcttccgccccaccgacgaggagctgctgctgcactacctccgccgcaaggcgctggcctgcccgctcccggcgggcgtcatcccggacgccgacctcgcgcgcctcgacccgtcggacctcctcctccccgccgccgcaccacctgcggggggagccgccgacgacgccagcggggagcacttcttcttccaccgcccggcgacgcggtgctggcgcaggggaggcggcgcggccagggcggccggcgccggcgtctggaggccgtccgggaaggagaccgtcgtcgtgtcgccgcgctgcaagcgccccgtcggcaccaagcggacgctcgtcttctgcccgcgccgccgtggcggcggcggcgcccgcaccgactgggtcatgcacgagtaccgcctcctccccgccggcctccacctccacggctgcgccgccaacgcgcctccgcccactaatgtgagctcccatggcggtggcgcggcggcggccgactgggtggtctgtcgcattttcaggagggccaggccagcccaccgcgcccgccttggtgacgcgcaagaagaagaagaagagcacgcggcggtggagagcgcgtcgtccacgtcgtcgtgcgtcaccgacgcctccgggaccatcggccaggacgatgacggcgacgaagggatcagtggcagctgcagcgtcgcctcctctaattgagaccgactagaagaaacaagagttggctagcccgcccgtcgaccaaatcacgggcgccgtgtcctaattgccgtagcaccctctcagtctcagtccctagtagcaatcaatagagagaagaagcttgagctccaacaaaccgacaacaacatcataaaaaggctaagcgctttgctgccatgttatgttgttgctggagctcgtcgcgaatccagagtgttaattagcgagaaaatcaatcagttcccttccagcaaccgaccgccatttcctgctgtgccaaggttctcccacaaacgcgttgctcgttcaaatcttcttcaatcttgctttgagaagcaaaacacagtctcactcgctcaaaccatgtactgtgcttgtgatgcatttcgctttgctgatgctcgaaaccaaccaaaccaaatggcttgttgccaactggcaggcagcgagtgacgaaaccaagccaagcagaaacagaagcaagccaagctccacaaggaactgatgccccaacaacctgagtggcttcagcgaccgagtgcaaggaacagcagggcagggcatgtacacaacgcaagaatcacccaggcacgaaagggaaggtcgagctgagcagtgagcagaggcgtgaggacgagagaaaggcaggccagaaagagcagtgcacttaggaggatgcagaaaaaggagacgtcgataaggttcctcctgatatactcgctcactcattgctgccaagaggggcggcgtagtagatgtagagcagagatgcctctcttcttcaggggcctttcttcttcctcaccggaataaggaacctgccgcgcgccgccactgccactgccaggactctagtccatccaaacagacgttcgtgcgagaggcatctcgcctgggctctcgctttgcatc

SEQ ID NO: 151101 - DNA, 1447 bp, Zea Mays
attttgtgaggaggagaaaagctgaatgaataggccggcgggcacgagcatggcagttgatgagagtttggacggggttgagtccatttcacgccaccgccgctgcacctataaaacggcggagccgacgcccccctgttttccgctcctccccacgacgacgagaatccccccatcccccaccaggccacaaaaaccaggtcgccgatgccgcctaccgtctgacatcgatcacccaggcagatcgcgcgcaagccacccaaacaaatccaaaaccgaatcctgatccgatcccgtcgatcggcggcggcggcgatggaggcccggcccggcgcgtggcgcctgcagcagcggggccccggcgcgcccgtcgcgggcctgcccatcggcttccgcttccgccccaccgacgaggagctgctgctgcactacctccgccgcaaggcgctggcctgcccgctcccggcgggcgtcatcccggacgccgacctcgcgcgcctcgacccgtcggacctcctcctccccgccgccgcaccacgtacaccacccatccccacccccacccccgctccatccgcgtcctttacctgaacgagagtatcgatttcgaacctgtgcagctgcggggggagccgccgacgacgccagcggggagcacttcttcttccaccgcccggcgacgcggtgctggcgcaggggaggcggcgcggccagggcggccggcgccggcgtctggaggccgtccgggaaggagaccgtcgtcgtgtcgccgcgctgcaagcgccccgtcggcaccaagcggacgctcgtcttctgcccgcgccgccgtggcggcggcggcgcccgcaccgactgggtcatgcacgagtaccgcctcctccccgccggcctccacctccacggctgcgccgccaacgcgcctccgcccactaatgtgagctcccatggcggtggcgcggcggcggccgactgggtggtctgtcgcattttcaggagggccaggccagcccaccgcgcccgccttggtgacgcgcaagaagaagaagaagagcacgcggcggtggagagcgcgtcgtccacgtcgtcgtgcgtcaccgacgcctccgggaccatcggccaggacgatgacggcgacgaagggatcagtggcagctgcagcgtcgcctcctctaattgagaccgactagaagaaacaagagttggctagcccgcccgtcgaccaaatcacgggcgccgtgtcctaattgccgtagcaccctctcagtctcagtccctagtagcaatcaatagagagaagaagcttgagctccaacaaaccgacaacaacatcataaaaaggctaagcgctttgctgccatgttatgttgttgctggagctcgtcgcgaatccagagtgttaattagcgagaaaatcaatcagttcccttccagcaaccgaccgccattt

SEQ ID NO: 151102 - DNA, 1598 bp, Zea Mays
aggagcgatataagtcagaagatgattatccctatccgcctccgcttaccttagatgtctccgagatccaaaaacaagaacaagagcgagcagagcgtggcgacaaatcacccgctgccttttatcccgcaaccagcagcagcgaaggccgcgagaggcaggtagtagccgcacgccacatcaacccaccacggatggccggcggcggcgaccgtgacgcatccgacgcggagctccgcgcggggttcgagaccctggccgtgacgcggccggacccttccgcgggggtctacgaggtccgcctcaaccgcccggcgcagcgcaacgcgctgagcccggccgcgttcgcggagatcccgcgcgccatgtctctgctggaccgcgccccctcggcgcgcgccgtggtgctgtccgccgcgggcccgcacttctgcgcgggcatcgagctcgggggccccggggacccgctgtccgccgcctccgccgatcccgtggccgccgcggaggggctccgccgcgcggtcctcgacatgcaggcggcgctcacggccatcgagcggtgccggaagcccgtcgtcgcggcggtgcacggcgcctgcgtcggcggcggcgtcgacctcgtggccgcctgcgacatcaggtgctgctccagggacgcctccttcgtgctcaaggaggtggacatggccatcgtcgccgacctcggcgcgctgcagcgcctcccgcggatcgtcggctacggcaacgctgctgacctcgcgctcaccggacgcaagatcaacgccatggaggccaaggacatggggttggttaccagggtctttgattccaagcaagacttggatgcgggcgtcgcaaagatcgccaaagaaatagctgacaagtcggcatgggcggtgattggaaccaaggccgttctgctgagaagcagggatgcgaccatagaacaaggcctggagcatgtagccacatggaacgcgggtatgatgaggtcgaacgatctgaaggaggccatcagagccttcctggagaagcggaagcctgtgttctccaagctgtaatgatcagataccatcataccatacctctgtgttacttaacaagtggtgctacgtatctggaaatgcaaaggaataaagtgtgctaggagtagacaattgtcagggaaaaagaaaaaaaaaatgcctgttctcgatggagctgtgaaggcatttttccatgtcagttgagcttaccaaagttgttttggtcggtatggatgaaccgggggtgttactgttttgttacctgttccagtctgtacgtagattcatctcttctgcaccgagacaaaatgccaaacaatcatctggagttcaaagtcatctggggctttgagcgaactgggacattcactacagtctgtggtgcacaagaaatgaatctgcgtacaaactggaacaggtaacaaaaccgtacaaactggaataggtactcaaaacagtactctctgtcctgaattagattcatatatatatgaataatttatctagaaacaaatctatctctatcaattttacaaggttaaatggtccaccaaacaatttatttttctcaaa

SEQ ID NO: 151103 - DNA, 846 bp, Zea Mays
atgagcgactgcaggttgacaaggttgccaatggtgcttgggagcttctctaggtggccgcagcggagacccaggtacctcaaatggatcatggagccgatctcgtttgggagcctcttgagctcgagtccctggatgtcgatgacacggaggaacttggaagcatggaggaagctcaggtcgctggtgcggatgaagttgctggacctgactcggcgaccctccaccaggtcgcagatgatggagcgcagcttggggagcgcgttgctgagctggacgtacctgtccgtggtggagttgaggacggcgaggcgccgcacggtggccggcgcgagcacgtctgtgctgtcgtggctctcgatgaagctggcctcctgtgcctcgtcctgcgcgaatgcgtgcagccggtcgtgcaccaccaccgtcagcacggcgccgaagtcgtccttgtccaccagctgcaccatgcaccgggagatgagctccttgaggtacccctgcccgacctcctccatggtgctcccgcggcgcgggcgcacgaacccctcggccacccacaggcgcaccaggcgctgcgcgtccaccggggtgctctcccgcatcgccgccaggtataggaagcacgacttgaggtggtgcggcaggtcgtcgaaggcccgcgacatgatccggggccagctgttgctgctgccgccgctgccgcccctttgctgctcgcgcgccggcggggccagctgcgccatcacctcgtcccactctgcgggcagctccttggaccgcaggataccggcgaggacgacgatcgacagcggcaggccacgcgtgatccggaacacgtcttggtag

SEQ ID NO: 151104 - DNA, 430 bp, Zea Mays
agttcaaatttaaaaatatatatgtccaaacataaaagtcttgcaagaatacaagtccaaacatatgtttcacttctaataagtacaccatcacatgaaaatataaagcccaaacacatcgctcactctgctactcgggttcaccaattggtccacaacacaaagttcatattgttttttcggagtttggcatgaaccaaatttaaaccctacaagagatatagaatatgtgttagattagtgtacaaaataatcttctacaatataaggtatatatgtttaacacatgggaggctgcggagacaggcatgggaaaggtttttcgcaaattattggatacccgtgccgaaaaacacgttagccgaaaattattggatgaaatattcatattagctttggatacccgtgccggtaggtcgcacgtgaggca

SEQ ID NO: 151105 - DNA, 546 bp, Zea Mays
aatttgtttacaaattttatttggtgttccttggttgtttggtgggaaaaggaaccagagtcgagtctgaagttgtttagagacgcgatccaagcgggtatccaaccagtcaggctgcagctagccaggcgctagacgctcatacaaccaatcacatggtatatgaatctattccaagtatcagcctctttccgatgtggttgctgccgctggaagcatacggcctctactgttcatgtatagcgcccgctcacaacaagcatacatggccaggtcaagctatatatttttcttccgtagcaactctattggcagctctaccagtggggaaagagctagtttttagctaactatttagcaaaatagctccacgtatatacagcttcttaaaaaaatttaatatttatcatgtttagcacaaaacagtttcaaaccgttcctgaagttttgatcgagaaacctagagtttggtagataggggtagcttttggttgtaaaaacaaaatactctatccgttacaaaatagtagtcgttttagcggttga

SEQ ID NO: 151106 - DNA, 1416 bp, Zea Mays
cacgccaccgccttccgcttccccctcgcggtttgcggtcgccgatggcgtcccctgccctgagccttccataggttagctccgcaatgggccatcgtgatgttcaagaaagctcccggctctaaaacctcacatctttctacccccatcctcttgccccaatctaagaagcaaaaatcctgaggggaaaatctggtccgaaaattccatggattcgagcgatggggtgggcgacatggttcctagcgacgatgtgcttctttgctgcgggcatcctattcgtcccttatgctctcgattcccccctccggcataggctctgtcacctccgccaagctggctcatgtcctttcctttgccaccttctagaacaccgccctctggcccaccttcattagcgccatcataatgttcaggaacctatcgaggcacatgttcggcaacttgcagagcaactgttcctagcctacttcacgcttgcaggagatttggcaaaacattatggatatgagtgctaaccttggcaaatttgcagcatctttgaagaaaaagatggttgggttatgaatatagtcccttttacagaataaggaagctaaaaattatatatgatcgtggtttaatggggactgtccatgattgatgttgggcatataaatgtgaagaacaacaaatttttggacgcctcctcgcacttggcgggctaaatcgtgaaagagctaaatcgtgattttagtgtgaaaaagaacaaatgttaaaggatcgtgttcttcatctggaccgaacatatcaagaattctgaaggcggtcggaggtactatgtaataattattctgatgaaattgagctagaggagcatgactacaacctcctccaatcagtaattgagaatcttcagacttggattcaagcaaggaaaatgggcccaccgaaacctgtcggggccgggcatcacccaatgggatgccacataaactgtcacagggaggttctcctagctcatatctgcaacacgaaatggttgtatggcaaaactctagaatgtagaaaacattgtaaattacagctatcttgttccttccctgtccagtgagaaatgcagcttctgccagtgctgctacgagtgttcctttgcctaaatagtaaggtcatcgctagatcatgatgcttcattctaagaggtgctcgcgagcacctaggcttctccgcttctgatcatggttgtggaccttcctgtatgtcaatatccattggtcgttcccacaggcagtagtcgtcgagcccactggcgtgtatatagagatcatctgctgctaagaccttctggtcgtgaactgtgttgtttaattacttatgtaaccggcatattttgataaacatgacatataatatatttcgcaaggtgtccggttcctc

SEQ ID NO: 151107 - DNA, 1079 bp, Zea Mays
gctatagtgctcattctaagtgcatggtgttacttacaattctaactctattgaagtgcataaactgtgataattttaatagtaagcacaaaagaatttttttcttagaagaaatgttgcaatgcatttcttgaacattttcctagataccggatcaagattcaccctatgggaagctatccaagagtcacagacatccacaatcatacatatgaactgtttggtcccgtgaatttgttctggagcacccgatttgacaaagccatgacatggtttctgacttgcctgcaagagttcgctgagtttgccataagtctggataaggagaacaatgttccacctgaaaaaacactgaagcttccccacaagatcgatggtgacaaagtagggaaccacacgatcgtcctaagtttcaatcaggatgaaacctggaccaaggcgctcaagtacatgctgtacgatctgaagtttgttctctcctggtttattggcaatacaagttttgcgccaccttcgagatcactgcacacccaatttctgaagaacaagagttgatgttgttctctctctctctctctctctctctctctctctctctctctctctctctctctctctctctctctctctctctaagggcatgtttgggagcaagaaggggattttagccccttctccaatcctttggcttagtaaccaggttcccggatcgatgggatcgaggaacgggaacgtggtacgcggtacgctacaaaaagtaggatttaacactaccggaacgagattgttcccacgttcccggaacgaggaacgtggccaagttcccagttcccggttgttcccggaacgaggaacgtggccaagttcccagttcccggttactaagtcctttggtcccaaacatgtcgtgactgtacatagtttatatacttgaccctagctagccgttggatgtaaccgtagtgacaatgacgacatgtttgatgtacatatgtttactgtactatctaaagctcagcgactccattttcgctgcgctctttaaaaacctctgctgcgctcttattcttggcagccac

SEQ ID NO: 151108 - DNA, 2467 bp, Zea Mays
gctaccaagcgccatacaccgaccgccgcgctccagtttagtgcgtcgcaagccttagccggccggatcgggatcccctgcagtactgcatgggctactgccgcgtgggctccgcgtgcgacagggcccacgcgcagtgacccaactgcacggtgcagtacgtcagaggatccgtgtcccggccggccgggacggcgtgcgcaatgcgcgcggcagctactagtaaatactctccctgcgccgcttttcgctgctgcagtgctggcgactggcgtgctgcgtgcctgcggggatactccgtctcctccacctccagtcctcctccacgatcccgcctcccccacctctcgccggccgacgacgacgacgatccgccggcagcagcccgcgcgccgcagatctcccgttcggttccttggagccgacaagacgagggcagcatgaagcccacggccggcgccagcggcaagggcggcgccgtgtatccttctctgccgcggctcaagtgccaggagtgccgccgtgccctcgtcgtcgtcggggtcgagtcctacgccgacaggctacccgcacacgccgcgcccggtaatcatgcatcttctgttcaggacagtgttatgggtgcaagcaagatggacaattcttatgttgtgctatcgaggcagaacaaagttcagggtcctagaattcccccacgcccaggaagtgcggtggcggcacatactgatcccaaccaatcaacaagagcgatagaggggtcatatatagtgctaccacctccttccgcttccatatacaagaaatctgcctctgaaggaggtggtgcgcagctcacaccaccaggtggaaactccagtagtcccttgtcgggaaacaattctgggtttcactctagtgtaactgtgctgaaaagggcttttgaggttgctagctcacaaactcaggttgaacaaccactttgtctggaatgtatgagggttctttctgataagatggacaaggagattgaagattgtaatgctgatattaaatcttatgaggcttgtcttcaacgtttgcagcaggaaccctacaacatcctcagtgaaacagattttcaaaaggagaaacaaaagattgaggaagaggaaaagaaacttaaatgtgctattgaagaagctgaaaagcaatattctgaagttagttctgagatgaaagatcttgaaataaagtctaaacaatttgaggaattggaagagcggtactggcatgaattcaacagttttcagtttcagttgacatctcatcaggaagaaagagacgcagtttttgccaagataggagtttctcaggttcatttggaaatgttgaagcatactaatgttctcaatgatgcattctatatttcatgtgatgaagtaattgcaagaataaataactttcgcctcggacgccttcctaatgtagaggttgagtgggatgagataaatgttgcgtggggtcaggctgcacttctgttgcataccatggcccattatttcactccaaaattccgataccggatcaagattcaccctatgggaagctatccaagagtcacagacatccacaatcatacatatgaactgtttggtcccgtgaatttgttctggagcacccgatttgacaaagccatgacatggtttctgacttgcctgcaagagttcgctgagtttgccataagtctggataaggagaacaatgttccacctgaaaaaacactgaagcttccccacaagatcgatggtgacaaagtagggaaccacacgatcgtcctaagtttcaatcaggatgaaacctggaccaaggcgctcaagtacatgctgtacgatctgaagtttgttctctcctggtttattggcaatacaagttttgcgccaccttcgagatcactgcacacccaatttctgaagaacaagagttgatgttgttctctctctctctctctctctctctctctctctctctctctctctctctctctctctctctctctctctctctaagggcatgtttgggagcaagaaggggattttagccccttctccaatcctttggcttagtaaccaggttcccggatcgatgggatcgaggaacgggaacgtggtacgcggtacgctacaaaaagtaggatttaacactaccggaacgagattgttcccacgttcccggaacgaggaacgtggccaagttcccagttcccggttgttcccggaacgaggaacgtggccaagttcccagttcccggttactaagtcctttggtcccaaacatgtcgtgactgtacatagtttatatacttgaccctagctagccgttggatgtaaccgtagtgacaatgacgacatgtttgatgtacatatgtttactgtactatctaaagctcagcgactccattttcgctgcgctctttaaaaacctctgctgcgctcttattcttggcagccac

SEQ ID NO: 151109 - DNA, 630 bp, Zea Mays
gcgtaaacgcgtccctccttcgcctgggatcgcactcgcaccatcgccccctcctctgcttcgacgccgacgccgtgatgcctcagccctcctccgcctgacccgacctgttggctcgaaaacgcatccaccactcggagcatcttggcctcctgcaggggcggagccagacccatgaccgccagggcatggcctggggtgtgtatctcattacctccttctccctgctacacccgctggctgtggctccacgtcgccagtctgctggtggtgcggcaagaggtcagctcccttctggttttggcttcccacaatcccacggcctaggggctaccagtaccaggtagcagcggattgtagcaccttgaaaggatcgatgtgaagcttgcgttgttgaacaacaaatatcttgtctgatgcggtgatgcctcatacatcaatgctaggagactggtctaggcatttacagagcataccgtggtttcgaatcccattgattccttgaacattacaggtttaggctaattctccccttcatgttgaggccttagcctttttcttcgatctccatcttattgttctttcaactatattcataatttattctttatcactaaccagttgaccaaa

SEQ ID NO: 151110 - DNA, 507 bp, Zea Mays
ttcttctattcaggggttgtcaaatatcccctgctcatcttctacaagctgttctttttatttcccgatcttttgtcttggcgaatggctacattctatttctaggctacgtgtagcatcagggacacgtcattctttaagaacatccatatcatctgaacagtacttggtgtgtggatcttttcgctttaaacaacatgctgaagacaacatcgagatcaagcggggactttaagccgggcagctgttcggtaaagttgctgagtgtgcacaaaagacgaccttttctacgtgggtatcatgattgtgttggcaggtgtagctgctcaacgtattctactagtttatggctgagcttgcttaccacgactgcaagtgccgctctgattgttctttgcatggattcacacgtttttatggtcctcataacatccatgtatgagatgttgttcctttcgctatcccaaaataaaatttgttttagctttttagttggttcatacaata

SEQ ID NO: 151111 - DNA, 2451 bp, Zea Mays
tagattttcttattcgccccttctctctccttctattttcagagagtcccctcgcctctgcctgcctgtcccatccccagtccaccaagcagcgcccgtcaccatctctccccatcccctttgccaccctcggtcttctccctcctcagggcaggcaggggaagcagaagaaggaagcgagagcacggagcctgatttggtttgctttttgttgcccagactcggagggagttggtgcctctgtgtctctgtgtgtgtggagatggaccccaagttccccccacccccaccgctaaacaaaacggagcccaccaccgcgacgaccaccaccacctcgaccgcgcagcagcagcagcagcagctggatcctaaggactaccagcagcagcagcagcagccggcgcagcacctgcaaatccaaatccaccagtcgcagcaggacggaggcggcggagggaaggagcagcagcagctgcaggtggtggcgcagcccggggagaggaggcagcaggcgctcgcgcccaagcggagctccaacaaggaccgacacaccaaggtcgacggcaggggccggcggatccggatgcccgcgctctgcgccgcgcggatcttccagctcacgcgggaactcggccacaagtccgacggcgagaccgtccagtggctgctgcagcaggccgagccggccatcgtcgccgccaccggcacgggcaccataccggcgtccgcgctcgcctccgtcgcgccctcgctcccgtcgcccacctccgggctcgccaggccgcaccaccacatgtgggcgccgtccgccggcttctcctcgccctccttcctgaactctgccgccgcgggcacgggcgatgccgccggtatcatgcagcggatggggatccccgcgggcttcgagctgccgggagcctccgccgccggagccaccctcggcgccggcggccacatcggctttgcgcccatgttcgctggacacgccgccgccatgccggggctcgagctcgggctatcgcaggacggccacatcggcgtgctcgccgcgcagtcgatcagccagttctaccaccaggtgggtgctgccgccggcggcggcggccagatgcatcacgcgcacgggcaccatcatcaccatcaccagcagcaggaggacggggaggacgaccgcgaggacggcgagtccgatgacgagtctgggcagtagtagtgtaaccgttcaaccttttgcgttgctgaatcttccctcaagttggaaggagagaaaagtgtatgcgtgcagccacgggatgcttctgctactcttggactgttgttggtcgagttctgatggatttttgtgttcatttttttctcgtgtggtatccaaactcaacggaggcctctcttgctgtgaggacttgcggattcgagatcatcctcagttcttcctacaatctcatggagtggatgatcgccacagccttctctccgacttccaggtgtatactagctgagaaaatgatggattggatcgatcacccttgagtgagtgccttatttgttattgcagtgtgtagatattcaggtaattttgcagttagagaggtgttctttttattgtagtagtgatccacgttttaaaacaatcaaggtattctcctccacaggctgtctatgcaatgcaagtatagtacaattctagttcatgaccacgcataccacttttctccttctctgatatgtctgtgatctgtttctgacaaggtatctttttcttttgtgtgatgaaacatgcatatcctagttgtttgcttgaatcatcagttattgtttcagtatatttgtacctaggagaattgtctatcaggccctatatggtagtgctcctctccggctccagcttcatggaaggagctctaccaaaaagtttagttggaggagccatttttttttgtgaaaaaacgatgaagtggagctgttttataggagccacagaaggagccctttgggaggagccctcctaaacacatcttaaggggtgtttggtttctagggactaatttctaatcccttctattttattctattttagtttctaaatcgctaaaacggaaattaaaatatagttttactatctatatttggtaatttagggagtaaaatagaataaaatgaaggggctaaaattagtccctagaaatcaaacacccataaagtaaaactctgttttatattatagattgcacttttatggagtgaatttttgaatagtggaaaagataggtagtaagagtatgtacaacctagatatttcgttgttgctctccaggcactagatatataaaaagaccattcatacgatctaatttgtccaagtcttgcatcttattcactataacccctcaatatacgatttatttatgtggcttgtatgagtataaccgtatctagacttagagacccgtg

SEQ ID NO: 151112 - DNA, 1724 bp, Zea Mays
tagattttcttattcgccccttctctctccttctattttcagagagtcccctcgcctctgcctgcctgtcccatccccagtccaccaagcagcgcccgtcaccatctctccccatcccctttgccaccctcggtcttctccctcctcagggcaggcaggggaagcagaagaaggaagcgagagcacggagcctgatttggtttgctttttgttgcccagactcggagggagttggtgcctctgtgtctctgtgtgtgtggagatggaccccaagttccccccacccccaccgctaaacaaaacggagcccaccaccgcgacgaccaccaccacctcgaccgcgcagcagcagcagcagcagctggatcctaaggactaccagcagcagcagcagcagccggcgcagcacctgcaaatccaaatccaccagtcgcagcaggacggaggcggcggagggaaggagcagcagcagctgcaggtggtggcgcagcccggggagaggaggcagcaggcgctcgcgcccaagcggagctccaacaaggaccgacacaccaaggtcgacggcaggggccggcggatccggatgcccgcgctctgcgccgcgcggatcttccagctcacgcgggaactcggccacaagtccgacggcgagaccgtccagtggctgctgcagcaggccgagccggccatcgtcgccgccaccggcacgggcaccataccggcgtccgcgctcgcctccgtcgcgccctcgctcccgtcgcccacctccgggctcgccaggccgcaccaccacatgtgggcgccgtccgccggcttctcctcgccctccttcctgaactctgccgccgcgggcacgggcgatgccgccggtatcatgcagcggatggggatccccgcgggcttcgagctgccgggagcctccgccgccggagccaccctcggcgccggcggccacatcggctttgcgcccatgttcgctggacacgccgccgccatgccggggctcgagctcgggctatcgcaggacggccacatcggcgtgctcgccgcgcagtcgatcagccagttctaccaccaggtgggtgctgccgccggcggcggcggccagatgcatcacgcgcacgggcaccatcatcaccatcaccagcagcaggaggacggggaggacgaccgcgaggacggcgagtccgatgacgagtctgggcagtagtagtgtaaccgttcaaccttttgcgttgctgaatcttccctcaagttggaaggagagaaaagtgtatgcgtgcagccacgggatgcttctgctactcttggactgttgttggtcgagttctgatggatttttgtgttcatttttttctcgtgtggtatccaaactcaacggaggcctctcttgctgtgaggacttgcggattcgagatcatcctcagttcttcctacaatctcatggagtggatgatcgccacagccttctctccgacttccaggtgtatactagctgagaaaatgatggattggatcgatcacccttgagtgagtgccttatttgttattgcagtgtgtagatattcaggtaattttgcagttagagaggtgttctttttattgtagtagtgatccacgttttaaaacaatcaaggtattctcctccacaggctgtctatgcaatgcaagtatagtacaattctagttcatgaccacgcataccacttttctccttctctgat

SEQ ID NO: 151113 - DNA, 1088 bp, Zea Mays
tcctcgtcttcttcttcttttcctgactgtccatgtcctacaatcccttcctggcttcctccacatataaaaccctctcactctcaccccctccatcccatctcatgcattgtggcctccagagagccccaagaagctgaagatctttctctgtacatacacacattcttgtatagatcccaccagcagttccttcctgtgctgttcgtcgcaagaaccccattgttcaaccggtgtctgtccaaatggatcccattagcatggagcaggtcagggccatgaacaagtacagaaagagcaggagacagccgcatcttcctactctctacatggctgtcacctttgtcctctgcctgctgctcactagccctgcctggttcccccgcatgtgctccgccctcggcttcttcttcctcaccactgtccctgacttggtcaccgccttcctgctcagccccaagtgcctcttcgtcgtcggcaacctcatcgtcgccttcctcgtcggggagtctaggctggcgccgaggaggggcgacgacgacgacgaccggccttcattggtgaacgagatacacgaggagcacatgaagaagaacgcggcgttgaccgcagcaacggcggcggcggcggctcaggccgaccacagcgccttcgttggagctgttgggaagcgagtggaggtgaaggaagaggaggaggaactgcacaagagagtggaggacttcatcgcaagggtcaagaagcaaaggaagctggagctcaagagtttcttcgatgtcgatcgatgaaggctatgatctggcaggtggtgcaaattacagcaagattgagcactaaacctaaagatgctctgtgctgctagttatccttcattctgtcacttattaggttagaatgtcagaggttaaacgagaaggagatgaacccattccactgtaggaattgcagtgtatctgaggtggagccatggcaagtagagtatagtattgtattaggaaaaggagaggaggcaatggatgtgtgtgatctctgaaaaattattcgggtgtggctgttcgtttcgtattaaagacgactgtttgactgct

SEQ ID NO: 151114 - DNA, 1185 bp, Zea Mays
gagccaacgaagaagcaagccccatcgtcatcatggaaggaggaggccatcccacccacgctgacgaggagccaccgaaggagaaggccccaccacccaaggagaaagccgcccaaggaaaccttttcatttcaggttgtttagatctactagagcttaatttagtcagactagagacagttcgccatatgttgatgatcaccgtgacactgtcgaagaagcctctggatacatcatctccaggctttcctgcttatccctactactctataagcacgcttaggggccctgatgctcggggaatcaaggaaatatggcacaactattgtccctggtctgtatgcaccagttcatctacatttctttgttgctcgtatggacatggctgttgattgcaaattgaatgaggttcataaccaggtggttgaggttaatgttaaggtggaaagtgcaggcacacataacatgcacaataatgatttctatgctaaagagaagttgctcaaatcaatgcgtgattgtgatccttcgtctttgcgccattggattgtaagagttgttttcttgttttatattttttttgttattcctaccattgaattgggcattcaatacctgttcattatctttatgcttatgcaatccaataatgatggaaaataactgacttggctgctctcttgagttgtggcaacggaagttccaggccccattgcagcactacactgcgctaatggaccttcaggactattctgagaatggaactgtaaccgtggtatatcgagtgatacttaaaggaactgatggagaggcatatagagatgccacgggcacaacacagttccatgaggggcgcagggaagatgctgttgcagccgcagaggaagctgcattcagcaaagcttgcgcatggttcggttttggcctgtatctgtaccaccaggatgaatctcattacgacgaccacttccattgaggctcaatctgcaaaagagttgatcataagttgtaacatgcgttggatatgcccctagaaaacttcgtatctagaatcaatttttggtctttgcgtagtatcatactcataacacaaagaagtgaacctatgtagatgctatttgaaacctttttattaatattataattcttattaatattattgtataattactttttgagtggaga

SEQ ID NO: 151115 - DNA, 619 bp, Zea Mays
gagccaacgaagaagcaagccccatcgtcatcatggaaggaggaggccatcccacccacgctgacgaggagccaccgaaggagaaggccccaccacccaaggagaaagccgcccaaggaaaccttttcatttcagttcgccatatgttgatgatcaccgtgacactgtcgaagaagcctctggatacatcatctccagggtggttgaggttaatgttaaggtggaaagtgcaggcacacataacatgcacaataatgatttctatgctaaagagaagttgctcaaatcaatgcgtgattgtgatccttcgtctttgcgccattggattttgtggcaacggaagttccaggccccattgcagcactacactgcgctaatggaccttcaggactattctgagaatggaactgtaaccgtggtatatcgagtgatacttaaaggaactgatggagaggcatatagagatgccacgggcacaacacagttccatgaggggcgcagggaagatgctgttgcagccgcagaggaagctgcattcagcaaagcttgcgcatggttcggttttggcctgtatctgtaccaccaggatgaatctcattacgacgaccacttccattga

SEQ ID NO: 151116 - DNA, 744 bp, Zea Mays
ctgcaccgaccggagccgccgcagacccacctcgccatggcggcggcggtcgcggcgcctcccatccccgcccctaaccacactccccttccatcctcgctcacttccagccgcccccattcccagttgaaggagctgtccaggaaccgggaaccccatcaccggatcaggagcagccgtgtcgcggggatggtcgttgctgagctcacgatgaccgcccgatggtgtcggaccccgcaccgccgtcggcaccgcgctaatgatggtatggcttccaacttcagcgtggtatccacagggacgacgcgatctcctgctctaggctgtactgacgcgtcccatcctgagcagtcaccggaaccacgccgtagcgcctagtgcgtcgccctgtttcaccgggaggatggaactcgccgtccgctctcggtcccgaagcagcagcgcgtgccttggccttgaggagctgcagcctcaactccacgtctttcatggttggcctcgcctctcgcctcagatccagacactccagcgccaggcgagcaaagcacacgaccgcttccttgctcgcttcctcccagacctgaccgtccactatctcctcgagaggtttctccttggcctcccacaggtagttggacaggttctccttctcgccgttccccttctcgatgatcggcttgttcctcgtcaggagctcagcgagtatcacttcgaagctgtagacgtcgctcttgtcagtcagct

SEQ ID NO: 151117 - DNA, 1036 bp, Zea Mays
agggttcgcggatcccccacgacacctataagcaccaaccctagcccaaaaccccgcttccacttcacagcctctccgcctccgctcctcgcgccgccgccgcgtctcctcctgtacaggtaaggagaggaagagggcgaaatggtgaagcacaacaacgtcatccccaacgggcacttcaagaagcactggcagaactatgtcaagacatggttcaaccagcccgcccgcaagcagaggcgccgcatcgctcgtcaaaagaaggctgtgaagatattcccccgcccgactgctggtcctctacgccccattgttcaatgccagactttaaagtacaacatgaagtcaagggctgggagaggctttacccttgaggagctgaaggctgctggcatcccaaagaagcttgctccaaccattggtatttctgttgatcaccgccgcaagaacaaatcccttgagggactgcaggccaatgtccagaggcttaagacatacaaggccaagctggttatcttcccaaggcgtgcacacaaggttaaggctggtgactctactccagaggagcttgccaccgctacccaggtccagggtgactacatgccatttactcgtggtgagaaacgttcagttgaggttgtgaaggtcacagatgagatgaagtcatttgctgcctatggcaagctccgccttgagcggatgaacaagaaacatcttggtgcccgccagaagaaggcagctgaggcagagaaggaagataagaagtgaagcggttgaagatagtaccctgttttgttctattcagtcattagtgaatgctactacttaaagtgcttgttctatgttttttttgcggtaatggaaatagagcccagacaaacattttggtgtcctactgtttgatgccttgtacttgtttgcgaactcagctatctaatgggttattggattcttgctcaccttcacgtttatgccttgtttaatttttcatgggatcgtttgaaattcatatacgcacatagctgaagtgctaatc

SEQ ID NO: 151118 - DNA, 1030 bp, Zea Mays
agggttcgcggatcccccacgacacctataagcaccaaccctagcccaaaaccccgcttccacttcacagcctctccgcctccgctcctcgcgccgccgccgcgtctcctcctgtacaggtaaggagaggaagagggcgaaatggtgaagcacaacaacgtcatccccaacgggcacttcaagaagcactggcagaactatgtcaagacatggttcaaccagcccgcccgcaagcagaggcgccgcatcgctcgtcaaaagaaggctgtgaagatattcccccgcccgactgctggtcctctacgccccattgttcaatgccagactttaaagtacaacatgaagtcaagggctgggagaggctttacccttgaggagctgaaggctgctggcatcccaaagaagcttgctccaaccattggtatttctgttgatcaccgccgcaagaacaaatcccttgagggactgcaggccaatgtccagaggcttaagacatacaaggccaagctggttatcttcccaaggcgtgcacacaaggctggtgactctactccagaggagcttgccaccgctacccaggtccagggtgactacatgccatttactcgtggtgagaaacgttcagttgaggttgtgaaggtcacagatgagatgaagtcatttgctgcctatggcaagctccgccttgagcggatgaacaagaaacatcttggtgcccgccagaagaaggcagctgaggcagagaaggaagataagaagtgaagcggttgaagatagtaccctgttttgttctattcagtcattagtgaatgctactacttaaagtgcttgttctatgttttttttgcggtaatggaaatagagcccagacaaacattttggtgtcctactgtttgatgccttgtacttgtttgcgaactcagctatctaatgggttattggattcttgctcaccttcacgtttatgccttgtttaatttttcatgggatcgtttgaaattcatatacgcacatagctgaagtgctaatc

SEQ ID NO: 151119 - DNA, 727 bp, Zea Mays
ccgtttttaagttttttcttaaaataaaatcttttggacatttcaggtctatcctggaaataacgttggaatgggcaaggatcacacactcttttctttgatagatggactcgtcaagtttgagaagtatgggccggacaagaaaaaggttagtgtttacccatatgagaaggagcctgaaaacccaaacagttacagagcaaggaagagagagtacttccgcatgcggcgtgaacggaagaaggcgagagcggagggcgccgctgagcctcagttggtactagctgctgttgatgaaaactctgaggtcagcgcggactgctgataagtttcctgtgtggtgtttctctttttcacagcccttgttacactttttcttccttaattgtaagaccacatgatctataaaggtcatatttacatgtgttgtttagataaatggatatgttctacttgtactttttgtggggtagttgtgctttagagtcacagtgggggtctattccaacttcctagaccactccacgtagggcgtgtttggttcggcttttttctgaatagcttttctgaaaagctggtggttagaatttaggtgtttggttcgccagctgtgcggaaaagctgttcgttagaatctaggtgtttggatacacagattctcagattgcagattctgtttgaagaaactatacacattaacaccgaaccaacaaaaggtcattacata

SEQ ID NO: 151120 - DNA, 1082 bp, Zea Mays
ctccgttatcaccagcgcccacacctctgtacctcaccgcctcatctgctctcttcccccgtcttcttcccaagctgccacgttgcctccctccgctccagcggcccatggcctccatggcgttcgccctggcgggggccttcaagggcctctccctggcgcccaccaccaccacctcctccttcccgcgctgcgaccgcgcctcgctctccgtcggcggcgcagcgggcgtgccggtgccggtgccggcgcggcggctcaccatccagatggcgcacaagaagggggccgggagcaccaagaacggccgcgactccaagggccagcgcctcggggtcaagatatacggcgaccagctcgccaagcccggggccatcatcatccgccagcgcggcaccagggtctatcctggaaataacgttggaatgggcaaggatcacacactcttttctttgatagatggactcgtcaagtttgagaagtatgggccggacaagaaaaaggttagtgtttacccatatgagaaggagcctgaaaacccaaacagttacagagcaaggaagagagagtacttccgcatgcggcgtgaacggaagaaggcgagagcggagggcgccgctgagcctcagttggtactagctgctgttgatgaaaactctgaggtcagcgcggactgctgataagtttcctgtgtggtgtttctctttttcacagcccttgttacactttttcttccttaattgtaagaccacatgatctataaaggtcatatttacatgtgttgtttagataaatggatatgttctacttgtactttttgtggggtagttgtgctttagagtcacagtgggggtctattccaacttcctagaccactccacgtagggcgtgtttggttcggcttttttctgaatagcttttctgaaaagctggtggttagaatttaggtgtttggttcgccagctgtgcggaaaagctgttcgttagaatctaggtgtttggatacacagattctcagattgcagattctgtttgaagaaactatacacattaacaccgaaccaacaaaaggtcattacata

SEQ ID NO: 151121 - DNA, 2694 bp, Zea Mays
ttacctgcagatatggagtgcaacagagatgacgcggtgcgatcaaaggatattgctgaaacaaagttcagggagaatgacattacgggtgcgaagaagtttgccctcaaagcaaaggctctttttgagacgcttgagggcattgatcagatgattgtagccttagatgtccacgtaagggcacagacaaagattgcaggggaaaatgactggtatgggatcttagaggtgccacccatggctgatgaggaggcaatcaagaagaaatacaagaagttggccttccaaactcatcctgacaaaaatagctctgtttgtgctaaagccgcttttaatctcatctcggatgcttggaatgtgttgtccaatactgccaagaggacggtgtatgaccacaggaggcgtgtgcatgccctaggagtgcatcagaataacttcaaagcaactgcccgtaagaattccaactcctctatgtcaagtgtggatagattctgtgccagacgtagggaagtggcgccccacctcgcccatgaaggaatagaaacattctggacactctgctggtcatgtcttatgaacttccagtactccagggaatacttcaaccaccatctgaagtgtcataattgtcatgcagtgtttgttgctgctgaagttcgaccaccaagtgttcagatttacccgactgagccgatgcctatgtctactaataataacattggtggcaatacagttcctggcatggtggctccaggagtacaggcaggagtgtcacagggcaatcaaaattgtgatccaacagtgttcaaatctgcaacatgtgcaaaaagtactaaacatacggtccaacagacacatgatagtattagaaaagatgatgcagctggagctagtatacccgctaatgaagaagcaaattgcacaaaagttctgcagcatgctgcaaggaaacatgcacatgcagtctcttctgccagacgagcaaatgcagcaacaagggagcatgaagctgcaaagagaaaacacgccaatgctggcaagcaaggaacctggcagtcagcagcctcctaccctgatggtgatggatgcaaaccggtgttcccagtaaaaagaaagcctcgctcaacctctgaaacatcaggtgccaagaaacacaaggtgtcttctggtgattttaattgtgaatcttctagtgatgttggaaggaccagctttggcagagtgctcatgaagttagatgtccgtagcatcctaattgaaaaggggaaacttcaagctcagaaattgcaggagctcagtagcaagaaagccaatgtgaaaaagaaacaaaagatgcagaatggtaagaaaagcagcagaaaaggtgtttgcaacatagaaaatgaggtcaataaaattgagatgaagcaaagcagcagttcagttgatccaaaaaaagatgtcttggagttggttagcagaagggttgattctgaagaaaaggagaggcagaagagcagtaaacaggttgggttgaaagaaaagctgaagtcatggcctgtacctgaagtgcgcatagtatacacgaggagaaaccgcaagcaacacaagaaggaactgggagatgaagtaactggtgctactccgggaacagagcaccatatgcctgccagatatggctgtttgaaccaagtatgtcctgatgcaggctctgacaaaattcctgttcctgatgcagatttctacagtgttcctgatgcagatttttccagttttggtgatcattctgaaagttcatttcaaaatgatcaagtctgggccatgtatgatgaagaagatggtatgcctcgctattatgctttgatcagaaaagtcatttccactcgcccttttaaagttagactggtccacctcaaagcaaacgactctaatgagttcggagcctccagttggctctcgtgtggatactccaagacctgtggtgagttcaagtttgatgtgtccaaacatactgaccaagtgaatatcttctcacataaggtcaagtatgacaaaggtccaggaggcattatcagaatttttcctaagaaaggtgatatctgggctctgtaccagaattggtcccctgactgggatcaattcacagctgatgatatgatttacaagtatgaactggtcgagattcttgacagctacagtccttccagaggcatttctgtgatgcctattgtgaaggttcctgggtttgtgtcagtgtttaagcctgttcacaacgcaacgagaagctggaggataccaagggaagagatgatgtgtttttcacaccaagtgccattccatgtccttactggagaagaagctcataatgctcccaaggggtgctatgaattggatccaggctcaactccacaggagcttcttcatgtagttccaccatctggcgatgctaaataagtttgcacttgaagctggagcttgctctgtacttaaatttttgtgtttgaaactttttaatcctttgacctagcagcagttggcgtaagatgtttccttttgaagtgtaaattatataccttgttttgtgctgatgtagcagcttactgtcaggattatgcagacttatattgtcatgttcaatgtgctcagttctcgttctcgatgcaagcattgagagctgtagaaatcacaattgcaactcagtatgcgattttttcc

SEQ ID NO: 151122 - DNA, 1161 bp, Zea Mays
atggcggcgaccccgtccccctccgtccccgcctgcccgaccttcccgtcctcctcctcgctccctcctcgctcgaagactccgaccaccttcctcccttctccatcccgactcgtcgccatcggagacctccacggggacctgcccaagtccctctccgcgctccgcctcgtcggcctcgtgcccccgtcttgcacccccgactccccctccgcctcctcctcatggaccgcggggcccaccctcaccgtccagctcggcgacatcctcgaccgcggcggcgacgagctccgcctcctatacctactccgcctttccctctctgccgagacacgcggaggcgcgttcctccccatcctcggcaaccacgaggtcaagaacgtctccagcgacttccgcttcgccacgccgcagggtttccacgacagggcggtgaatcgcggggggaggggaggggggctggatccatcgcggcggttgtgcgcgtgcgcgggattcgcggcgggggctgctgaggcgggggcagtctacattctcctcttaatagttagtagagattttaaccttcatcaagccttcaaatttgaatgtgcaaagatctgctgcctatcaaaagggccaaaagcattgcgccctagaaagaggaatggatgcataagctgcaagactgctctttatgcttacacagaagaaaaccaatatgttgataccaaacctggaaaatacattaccaaacctagaacaaacaattccctcatcgttatttcatggaaatgcgaccaggttttatccaataatttgtttggccttggctatgcgattcaggccgtgttgaggaaagcaacatccagtgagaaattagacaaagagacgaaaggggaaaagaaccaatctgagagacgcgtcgaaagggcttcagtgtgtgtaacaacataaggcgatcagcggcggacgaatctgcctcaccgaaatccgctaagatcctttcggatccaaatcatcatcagcccgagctacgaaccaatccctggtacagttgagagaaaataggaaaaaatcacagaagcacagaacgagagaacatgacaagaagatatcagcacgcagatgcagaaccgccgtaaagaagcgagctcgagcaatcggcggcggcggcggcgg

SEQ ID NO: 151123 - DNA, 1863 bp, Zea Mays
atgcaaacctactgtattgggctgcatgcgctaactagccgcaggcccacctatcctttccagggcacacaccagaaacgacctggattccatcatgtacgtccatatctcatcggtcggcttgcaagttgcatcagccagcagcaactcgccaatgaagccactgcccgcccgcgcgccgcattcccaaaccctactataccccgctcctctcctccccgtctgccggctcccttcttcttcgctgtcgacgacgcggactccccgccgcgctccctctctcaggcctcgcggggtgatcagaggcggctgggagactcgtgcgctccgacgagtccggttacggcgcggtaattaagcaggggaggagccggccctgagcggcggagtccaaaatgagtgacgacgtggtatggcactgcatccgccacaaccactgcagcttcatgtccaagatcacaacggggatcttctgtcgcaacccctacaacgcgacgggcatctgcaaccggagctcctgcccgcttgccaacagccgctatgccaccatccgggatcatgaaggtattttctatctgtatatgaaaaccgccgaaagagctcatctgccaaacaaattatgggagagagtcaaactgccgaagaattatgagaaagcaatggaagtcataaacaaacatcttgaattttggcctaagctacttgtgcacaagatcaaacagcggctgacaaaaatgactcaatatcgtataagaatgaggaaacttcaactgaaagtgagggagaaggtcatgacaatgcccaggaagcaaacacagcgtgatctccggagaatggagaaagctgaaagggctgctcaactagaaaggaatattgaaaatgaattgaaggaacgcctgaacaaaggtgtttatgctgacatctataatgttcccttcaaagcgtttgatgaggttcttgatatggaaagagatgaagtggttcttgaagaagaggaggaagaagaaggtgaggtatatgttgaaggcgatgacatggaagagatggatgacatggaagactttgaaggcctcagtgatggaggcacagatgaagatgatgttttggatgatcccgtatcaaagaaacccaagggatcctcttcttattcgaagcaaaatgtcgggaaaaggtctaggaaggttatgactgaggtggaagaagacgaggagataaatacgaggcaaaggcaaagggcgtgagtgcgaaatgtgcaactgcaacgacggttatatgatgttagatgccggcaggcgccacttctgctgtatgttggatcattttatacttgccttcgtactgtaacgcggagtgctgagacgtcaattaattttggccgtggtttacatggcctaatatgttatgagcaagaaaaagaaacgggtgataactcagttgaggatgtgggagaccatctagttttcgaggtgaatttaggtatctatttttgtaagttacagattggtttagctttgttctttgttacgaggaaaaccagagtcatgcgtttactaacacattctgagttgtcattgaggatttgggatatcctaagatcctaggtgagtagcctaaaccgcatctttcgttgactgtatcaaggaggcaacagtagctacaaaatcacatcccggtttcgtttctaatgtcgagcactttctcatatctttaatactcctagttaatatggaggtatgctacattatagcctattgcactcatgggtgccaaatgttcgtgttggttgggatttctgcccgtgtgtcttggcgctactgtctggttgtgtttctgtgtgtctccctttttccttttcaaattgaa

SEQ ID NO: 151124 - DNA, 291 bp, Zea Mays
atgccgggcgcgaggggctggctccctttcctcttgcgtctctcgctccgtccctccctcttgatctctcaccgctcaggcttgattcctcaagcaaggaagcagcggcaaatctcgggagccgctggctttgaccagaggacggcaggtgggagcagggcggcggcggcggcggcggcggcagcggcaggtgggagagaggatactagacgaccagtgagaggaagggaagcacgggacgggaatagcaacagcaacaggccaacagcgagcgagagcaggcacaagtga

SEQ ID NO: 151125 - DNA, 641 bp, Zea Mays
tggcgactgatgttttttttttttgtcaaacaaaacttccatctttgaatgtgtcatttacactttacagcttcgacccatacaggccgaatatgatgcatacaaaaatgcctgcacaaacaaccaaccaatccctaatataatatgtacagccgtgccttccgggggaaggaaaacttctccccctagtcttatatattatatagtggcagagggcacctgcagttagtgaatgcagctgattttttttcacacgccttgacctcagcaaatcgtcgaatgaatagctgcacgtgcatgttgatttcaagacattgcgcatttagctttgcagattggtcagatgtaccaagcatccgaacatgggtggttccatctccagcctaaatcgtttccacctaactggcggccacatcccagcatttctagtgttttaataggggccctctaactttgcgaattgatgcccacctgtatagcaatgtgaatcgacagtgatgtaaaacttaaatgatattgaccatttgaaagaattgacccacaattgttgctactcatttactctgtgcataacaacaaccagatattttacagcagggaaaaaaacgaaactagggaaaaatgaactcccacgaaaatag

SEQ ID NO: 151126 - DNA, 1966 bp, Zea Mays
acggaatggacgggaaccccgaaccccaaattgatccgatccactcaccttttttccccttctaatttcactttcacctcctccgccaccagttcggggaaaaggaatttttggagaaaaatcccattggcccagcccagaatactcagccgcgcgccgcgaccttcgctcccgtctccggtctccgcctgccccccgtccccaacctatcgggagcgctcccgattcgcgggagcgagagaaatagagtgccccccgctctccgctctccgccgcggatcagcgccgtcgccgatcggaggccctcgcttccgccggcgggcggcgcgagccgggagatggacggcggcgcgggtgccggtcggaggagcgtcccctcctcctccggattcaggaggagggtcccgcccgccgagaacgggcacggccatgacgccccgccgccctccaggcggtcctccgcctccctctcccgcggccactccacgtcctaacaattttattgagactcttcgagaacggatgtttaggccatcactgtctaccattatctctgagaattcaaaagtggtcactgttgtaccatcagacacggtgttgacagcatcaaagaagatgctggaactaaaaatgagttcagcagttgtagcaatcgaaagcaaacctgggggaattctgacatctagagatatcctgatgcgtgttatcgcccaaaatcttcctcctgagtccactacagtcgagaaggtcatgactcagtgtcctgaatgtgcctcggtagacaccccaattcttgatgctcttcacacaatgcatgatggaaaatttttacatttgcctgttctggacagggatggaaatgttgtgactgttgttgatgttcttcacataacgcatgctgcaattgctacggttggaaacagcggggcagctggatctgagtcaacgtctgccatgatgcagaggttctgggattcagcaatgtccattggacctcttgatgatgatgatgactccaccagaagcgaaggatcgacaaaggtggcatctgaggcagcagatataggaagatcagccttgtttccagcttctgctttatcaaacacttttgggttcaagattcaggacaagcaagggagaatgcacagatttaactgtgaaacgagcagcttgacagacctgataactagcattcttcagagggtcggcgatgacattgacagaaaacacctgccacaaattttgtatgaagatgaggaccatgataaggtcatattgtcgtcggacagtgaccttatagctgccgtagaccacgcaagacaaatcggttggaagagcctaaggctgcacttggactacgcccgccggaagagaggggacggttcctcagacttcgagtacgctggcaaggatgcatgggcttctgcatacagtgctgtcgcggcaggggcggctctggttgctgggctcggcgtgatggcttacttgaaacggtcagggtaatagcttgaggcaagcacggcagggactagggagcacggttttgatcgtctttgtgatacaagtgccacttcatcggaattggcagaatggctgtgtaagtaattcttgtgagagaggaaaaaaatgaagattttaataatactactgtcaaggcagtgaatggtcccttcatacaagtacacggaactgatcgagttttttttggtgggttgagacttgagagtcaccatggctgtcagcttcgtcacgattgtatttattatcataaaaacacatgattcattgtacaagaagagtcttgatagaccttcttcatgcagcgtctggctgattagaatttatccaaggcgatttttgtccatagttactagctcttgctgcaacctgcaatgtactaagctccttgttccagcagacaccagattttttgtatgatactgtgactaaaattttgctctccaca

SEQ ID NO: 151127 - DNA, 2403 bp, Zea Mays
cggaatggacgggaaccccgaaccccaaattgatccgatccactcaccttttttccccttctaatttcactttcacctcctccgccaccagttcggggaaaaggaatttttggagaaaaatcccattggcccagcccagaatactcagccgcgcgccgcgaccttcgctcccgtctccggtctccgcctgccccccgtccccaacctatcgggagcgctcccgattcgcgggagcgagagaaatagagtgccccccgctctccgctctccgccgcggatcagcgccgtcgccgatcggaggccctcgcttccgccggcgggcggcgcgagccgggagatggacggcggcgcgggtgccggtcggaggagcgtcccctcctcctccggattcaggaggagggtcccgcccgccgagaacgggcacggccatgacgccccgccgccctccaggcggtcctccgcctccctctcccgcggccactccacgccgctgactggcgagaggaccgtgaaaaggctgaggttgtccaaggcactgacgataccggatcacacgaccgtgcacgaggcttgtcggaggatggcatcacgcagggtagatgccgtgttactgaccgactccaatgctttgctctgtgggatccttaccgacaaggacataaccacaagagtgattgctcgtgagttgaagatggaagagacactggtctccaaggtcatgactagaaaccctgtatttgttctcgcggacacgcttgccgttgaggcgttgcaaaagatggtgcaaggtaagttcagacatctgcctgttgttgagaatggtgaagtcattgcaattctggacatagccaagtgcctatatgatgctattgcacggatggaaagggcggcggagaaaggaaaagcgatcgccgctgctgttgagggcgttgaaaagcattggggaacagctgtatctggtcctaacaattttattgagactcttcgagaacggatgtttaggccatcactgtctaccattatctctgagaattcaaaagtggtcactgttgtaccatcagacacggtgttgacagcatcaaagaagatgctggaactaaaaatgagttcagcagttgtagcaatcgaaagcaaacctgggggaattctgacatctagagatatcctgatgcgtgttatcgcccaaaatcttcctcctgagtccactacagtcgagaaggtcatgactcagtgtcctgaatgtgcctcggtagacaccccaattcttgatgctcttcacacaatgcatgatggaaaatttttacatttgcctgttctggacagggatggaaatgttgtgactgttgttgatgttcttcacataacgcatgctgcaattgctacggttggaaacagcggggcagctggatctgagtcaacgtctgccatgatgcagaggttctgggattcagcaatgtccattggacctcttgatgatgatgatgactccaccagaagcgaaggatcgacaaaggtggcatctgaggcagcagatataggaagatcagccttgtttccagcttctgctttatcaaacacttttgggttcaagattcaggacaagcaagggagaatgcacagatttaactgtgaaacgagcagcttgacagacctgataactagcattcttcagagggtcggcgatgacattgacagaaaacacctgccacaaattttgtatgaagatgaggaccatgataaggtcatattgtcgtcggacagtgaccttatagctgccgtagaccacgcaagacaaatcggttggaagagcctaaggctgcacttggactacgcccgccggaagagaggggacggttcctcagacttcgagtacgctggcaaggatgcatgggcttctgcatacagtgctgtcgcggcaggggcggctctggttgctgggctcggcgtgatggcttacttgaaacggtcagggtaatagcttgaggcaagcacggcagggactagggagcacggttttgatcgtctttgtgatacaagtgccacttcatcggaattggcagaatggctgtgtaagtaattcttgtgagagaggaaaaaaatgaagattttaataatactactgtcaaggcagtgaatggtcccttcatacaagtacacggaactgatcgagttttttttggtgggttgagacttgagagtcaccatggctgtcagcttcgtcacgattgtatttattatcataaaaacacatgattcattgtacaagaagagtcttgatagaccttcttcatgcagcgtctggctgattagaatttatccaaggcgatttttgtccatagttactagctcttgctgcaacctgcaatgtactaagctccttgttccagcagacaccagattttt

SEQ ID NO: 151128 - DNA, 815 bp, Zea Mays
gccaatcccctccctgttctgttccactctccctcttcctctctcccttccccgcctcctcttgccgtacgccacgtctcgagtcccctcgccctctcctcgcctgcgcgctgatccaccgaccgaccgctcgcgacgagtcaaaggggcgaggacccctcgacctcttcctcccagcaacccagcgagcatgacgtgtaccggcggcggcggcggcggcggcgagcactactcgcggcaggtccgcgagctctgcgcgctgctgctcgccatcgtgtccccctccccggcgccgccgcggcagccggtgtcgacgatgtcccctgccgcggccgcggccatgctcctcggcgcgtcggtggcgctcatgctctgcggctccgtcaccttcgccatcggcttcctcctcatgccctgggtcgccggcctcgcgctcctcttcggcttcgccggcgccgtcaacaccctctcctcctcggggctgttcctctgcagcggcagcggcaccaagcagccccccgccgcgggcccctgcaagcacacgcggtgacggatcgtcatcgggctcgggccgccggggccccaaccccagtggtcggatccgatgcgctcctcgcctagcttgctcccctcctccggccagccggaaccgtgcctagatttatttttcttcttcgtggatggatggatgatggaaggattattataattccctgtaaaaacgcgcccatttgctgtagtactaatatgctggttaatgggaggaatgtcacaggatatttaagtgatcgtttagaatccttattgagaatccg

SEQ ID NO: 151129 - DNA, 101 bp, Zea Mays
aaaaaatggaggagctatatatggctaagagtcttgctaatgctccgtcgcaaagagcgtctttatactattcgtatggcggaagatacatttattcaatc

SEQ ID NO: 151130 - DNA, 1175 bp, Zea Mays
aagcggccgcgcccgggccacgcgcagcaggcggcgccggcgtgctccgtgcagggctgcgacgccgacctgtcccagtgccgcgactaccaccgccgccacaaggtctgcgtggcgcactccaaggcgcccttcgtcaccgtcgccggccagcagcagcgcttctgccagcagtgcagcaggtttcatctgctcgaggagttcgacgaggtgaagcgaagctgcaggaagcgcctcgacggacacaaccggcgccgccgcaagccgcagccggaccctctcagccctgccggcttgtttggcgatcaccaccatggaggagtgacaaggttcacatcgtacccacaccgcttcaccacatccatcgcaaagcccgaatggggggcggtcgtcaagacggagaccgacgcgttccaagaccagtactaccctgccgtccacctcaacggcgccggcgccggcgccctcttccacgacaaggaccggaagcacctcccattcctgaccaaccacaacaatggatgccagccattcaccgtcaccacgacggcttcctcagagagcagcagcaagcacagcaacggcaactgtgctctctctcttctgtcagacaacccgacaccagcacaggcacagacggccacgatccctaccgcgcagcccctcgtcgccacggcatcgcagtacggcaggctccctggcggcgacgacgacgacgtctccctcgccgggatgtcgtacatgagggtgggagacagccggcaggcttccaatctgacaacgtcctcacccggtcctgccactgcagctgcaacacagcagcacctgcagtaccaccatggctactactaccatgtgagcggtggcgagcagggcaacaacagcccagatggcgccgccattcaggccctccccttctcgtcgtggtagacgcgcgactttctgatgaagatcatgtgctaggataggcaggcagtcgctcttgttgttcaccaaacacatgggttgtaacactaggctcggtcatactgaaaaaccatgacaaaaaatgtccatttttcagcttgttctgataggtctaatctatggaaaattcttccctaagttactatgtgattcagaatcgtgtaaaaatgcccactttcagttgcccacacggatgagcttgtgcaggc

SEQ ID NO: 151131 - DNA, 91 bp, Zea Mays
ggctcttttgcattattgcttgcagggagggagtatatattgtatttatatgtgaatcgtgtacagttgtgcatgttatgtgccttagcgc

SEQ ID NO: 151132 - DNA, 820 bp, Zea Mays
cttttatttattactattggtggctcatgatgtggggtttagtatgtagtttatcccaaatttgttgagcatgaattgccttttttgttttgttttatgcactgttctcgttacaagtaaaaatgttttttaaattggtatttctgttgtgtatatactgttataactggaaaatctgcccccgtgttttgtcgagtgtagatagccttcttctgtttgaacagttttgacattttatagtttatatactgatttcatatggtatatgtggtttgccttaccctgggtcttaaggtgccatatttaagctgacaacattatctgcagcaatcaaggaagaagaagaagaaggacaacgagttctggtacgatgtttgtggatgggtgatccttggcgcgggcatttgtgcttgggttggattggcaagagcaagcatgcctcccccatcggcaccagccacgtgaagctgatcgagtgccaagaatgctttgcaaatgttgttaacatgcccccatgttaaggtgcctcaggcatgggatctttccaggtgttagttttccatggagaggagagagtggtgtttccatacgggttggatcaatttttcatgcttgttcttttcggagcctcgatgaggtttcccttataatcggcatatgctgctggataattttgtacttgcttataccgttttgagccttaaaaaccgtcacgacgttgcgactgttacagctgtgttcgctatgaatcctgaaatggtgcccatgcataaagtggcaaataaatgtatgcggctgtttgtttgctttgttttctcac

SEQ ID NO: 151133 - DNA, 1111 bp, Zea Mays
agccggtatttgaagccccactttggtgaaccctgctccaccgttccggtcctcccgaaagctaagggagacgagcagcctaaaaaccctagcccccgaatcagatcccaccgcccgccggaacgcggaaccctgcccccggccgccatggagatgagcgatgcggagcggctgttcttcttcgagatggcctgcaacaactccgaggtcgcgtacgagcagaaccccaacgacgccgacaacttgacgcgatggggcggagcgctgctggagctatcacagatgcgtaacggccccgacagcctcaagctcctccaagatgcggaagccaagctggaggaggcactgcaaattgatcccaacaagtctgatgcactctggtgcttgggaaatgctcagacttctcatggattcttcactccagacactgcaatggcaaatgagttctttgcgaaggcaactgaatgtttccagaaggctgctgatgtggaacctgcaaatgagctgtacaggaagtcattagacttgtcagcgaaggcacctgaactgcactcggagatccataggcaaatggcttctcaagcggcaacacaagcatcctcagcctctaatccaacgcaatcaaggaagaagaagaagaaggacaacgagttctggtacgatgtttgtggatgggtgatccttggcgcgggcatttgtgcttgggttggattggcaagagcaagcatgcctcccccatcggcaccagccacgtgaagctgatcgagtgccaagaatgctttgcaaatgttgttaacatgcccccatgttaaggtgcctcaggcatgggatctttccaggtgttagttttccatggagaggagagagtggtgtttccatacgggttggatcaatttttcatgcttgttcttttcggagcctcgatgaggtttcccttataatcggcatatgctgctggataattttgtacttgcttataccgttttgagccttaaaaaccgtcacgacgttgcgactgttacagctgtgttcgctatgaatcctgaaatggtgcccatgcataaagtggcaaataaatgtatgcggctgtttgtttgctttgttttctcac

SEQ ID NO: 151134 - DNA, 2729 bp, Zea Mays
gctcagcgcagcgggcagattagtcgactccatttcgcttccccgtccatctcattcctcttctctcctcccctccctcggcctttctcccatccccgttcgaagaagccgccgataccgcggcagtcgaggatggcggcggcggcaccaccggacgggcaggagaaggtgattgcggcggcgcagcacatcgtcaagttgctcgccagctccaagaacgctgccgacgacatgatccgcatcctctccggcttcgacaaccgcctctcgctcatgtccgacctcttcactcctccccctgccgccgccgccgttggttccatcctggaggcggacgaggggacccagagggagggggacgaggccgactacgacgaagacgacgccgctgcccgggccgaggcggagtgggacgtggcggccgaggtggtcgagcgccgggtgtcccccgctgccggggcggccgaggtggtcgagcgccgggtgtcccccgctgccggggaagcgctggtgttcgactcgcgggagggcgccgaggagtacctcgccgcggtcgcctgcctcgttggcgcgccgggcccgcgcgccgaggccgcgctgcaggccgccatgacgcggctcgaggacgagttccgccacctgctcgtgcgcggggcgccgccgctcgccccagaggacctccagacctcgctcctccggcggctctcgctcacggtgccctccttcaactcctccgccgtagacctagactgccactccttcgcccaccacccggccgccgtggggggagacgagcagcagtgcggcaggagctccgcctccgacgacgagaccttgccctacctcatggccccggacaccgtcagcgccctcagggacatcgccgacgtcatgctgcgcgcgggctacgcgcccgagctgtgccaggtctacggggaggtgcgccgggacacgctcatggaacgcctcgccgtgctcgggatcgacaagatgagcctcgaggaggtgcagcaggtggagtggggcgtgcttgacggcaagacgaagaagtggatccaggcgttcaaggtcgttgtccggggcctccttgctgaggagcgccgcatctgcagccagatccttgcggccgaccctaacgccgaggaggagtgcttcactgaggcggccaagggctgtgtcctccagatgctcaacttcgctgacgccattgcgatcgggaagaggtccacagagaagctgtttcgcatccttggtatgtatgaggcgcttgctgaggtgctgccagagcttgaaggcttgttctccggtgacgcaaaggatttcatcaaggacgaggctgagggaatactggtacggctcggtgatgcagcgcgtggcacgattgaagagtttgctaatgccatacagggagagacttctcggagtcggagaccgctgcctggtggggagatccatcctcttacccgctatgtcatgaactatgtgtgtctgcttgcggattacaatgcctcgctaaataggcttctggaatattgggatactgagctgactggggttgataatccgaacacgactccattggggcactgcgtgttcatgctgatcacacacctacagtgcaagattgatgagaaatcgaggctgtatgaggatgaagcgctgcagaacatattttttatgaacaatctgctgtacattgtgcagaaggtgaaggattcagagctcaagacattgcttggtgataactggattcgcaaacatcgtggtcagataaggcaatactctacagggtatctccggtcatcatggactagggtgttagcttgcctgagagacgatgggcttccacacacaatgggttcatcaggcgcactcaaggctgcactgaaggatagattcaaaaacttcaacttggcctttgaggagctgtacaggactcagacatcatggaaggttgtcgatcctcagttaagagaagagctgaagatttccatctccgagaaggttcttccagcataccgttcatttgttggaagatttcatggccaactagagggagggaggggttctgcaaggtatataaagtacaaccctgatgatttggagaaccaggtctcggagttttttgaagggagaaagccaaatgcttgatggtcaagggatgttcatatcaactatgcaacctcaagacatgcaaatttgatgatgctagttccaagtttccttccaaatttcttgaactaccgtacatggaacttctagcctaccctaacttggttggaacttaaaggtctgtacagagaacttgaccttccaacatcttttgaatgtctgaagacaactgacaaaaactgtgtgaacttcaaagcaacctgaactgaatactttagcctgtcatccttgatcctgtcatggtgtgtggtcacatcattgaggcttgcacatgggattatgacaactgcatctgccataagctgtataattgtaattaatacatattatcttttttttttgccgattgtaacatctcgtgagccatgtttgacttcaaaagaatgttggtgctagtcatttttatgtacagtcctaccagcagtcatgttcacatttaccttgttgcaacctttcgtatagtgcgttgcagcctcctgttatattcatttgttaatgacaacaaatggtcccgttgtcttgttaatctctgatcgtaaaagtagcattttcatgat

SEQ ID NO: 151135 - DNA, 2160 bp, Zea Mays
gctcagcgcagcgggcagattagtcgactccatttcgcttccccgtccatctcattcctcttctctcctcccctccctcggcctttctcccatccccgttcgaagaagccgccgataccgcggcagtcgaggatggcggcggcggcaccaccggacgggcaggagaaggtgattgcggcggcgcagcacatcgtcaagttgctcgccagctccaagaacgctgccgacgacatgatccgcatcctctccggcttcgacaaccgcctctcgctcatgtccgacctcttcactcctccccctgccgccgccgccgttggttccatcctggaggcggacgaggggacccagagggagggggacgaggccgactacgacgaagacgacgccgctgcccgggccgaggcggagtgggacgtggcggccgaggtggtcgagcgccgggtgtcccccgctgccggggcggccgaggtggtcgagcgccgggtgtcccccgctgccggggaagcgctggtgttcgactcgcgggagggcgccgaggagtacctcgccgcggtcgcctgcctcgttggcgcgccgggcccgcgcgccgaggccgcgctgcaggccgccatgacgcggctcgaggacgagttccgccacctgctcgtgcgcggggcgccgccgctcgccccagaggacctccagacctcgctcctccggcggctctcgctcacggtgccctccttcaactcctccgccgtagacctagactgccactccttcgcccaccacccggccgccgtggggggagacgagcagcagtgcggcaggagctccgcctccgacgacgagaccttgccctacctcatggccccggacaccgtcagcgccctcagggacatcgccgacgtcatgctgcgcgcgggctacgcgcccgagctgtgccaggtctacggggaggtgcgccgggacacgctcatggaacgcctcgccgtgctcgggatcgacaagatgagcctcgaggaggtgcagcaggtggagtggggcgtgcttgacggcaagacgaagaagtggatccaggcgttcaaggtcgttgtccggggcctccttgctgaggagcgccgcatctgcagccagatccttgcggccgaccctaacgccgaggaggagtgcttcactgaggcggccaagggctgtgtcctccagatgctcaacttcgctgacgccattgcgatcgggaagaggtccacagagaagctgtttcgcatccttggtatgtatgaggcgcttgctgaggtgctgccagagcttgaaggcttgttctccggtgacgcaaaggatttcatcaaggacgaggctgagggaatactggtacggctcggtgatgcagcgcgtggcacgattgaagagtttgctaatgccatacagggagagacttctcggagtcggagaccgctgcctggtggggagatccatcctcttacccgctatgtcatgaactatgtgtgtctgcttgcggattacaatgcctcgctaaataggcttctggaatattgggatactgagctgactggggttgataatccgaacacgactccattggggcactgcgtgttcatgctgatcacacacctacagtgcaagattgatgagaaatcgaggctgtatgaggatgaagcgctgcagaacatattttttatgaacaatctgctgtacattgtgcagaaggtgaaggattcagagctcaagacattgcttggtgataactggattcgcaaacatcgtggtcagataaggcaatactctacagggtatctccggtcatcatggactagggtgttagcttgcctgagagacgatgggcttccacacacaatgggttcatcaggcgcactcaaggctgcactgaaggatagattcaaaaacttcaacttggcctttgaggagctgtacaggactcagacatcatggaaggttgtcgatcctcagttaagagaagagctgaagatttccatctccgagaaggttcttccagcataccgttcatttgttggaagatttcatggccaactagagggagggaggggttctgcaaggtatataaagtacaaccctgatgatttggagaaccaggtctcggagttttttgaagggagaaagccaaatgcttgatggtcaagg

SEQ ID NO: 151136 - DNA, 1156 bp, Zea Mays
cgacatgggggcgggattgttcggaggcagcagcaagcagagcggccacgcggtgtcgttcctcctcggcgcggcgctgcccactgccctactcttcttcctcgcgtccgaccgcctcggcgagggcttgtccaccatctccagcagctggcggggcaacgggtcgatatcgaccgcgcagcagcctgccgcggcaaagccggcgacgaccgatgctcatgctctgtccgccgccgccgccgacgcctccgatgcccgtgccgcgcctacgcaagatcacgaggtagagttcgcgggccttgccgagctgctggcgagagtggcgacggaggacaggacggtgatcatgacgtcggtgaacgagatatggacgcggcccaactcgctgctcgacatcttcctcggcggcttgaggggcggcgaggacacagcgcacctcgtcgaccacgtcctcatcgtcaccgtcgacgccggctccttcagcggctgcaaggccgtgcacccgcactgctacctcctcgaggtcaagtccatggacatgaacagggccaagacgttcgggaccccggagtacgtggagatgatctggctcaagctctccatccagcagcgcgtcctggagctcggctacaacttcctcttcacggacgccgacatactgtggcttcgcaacccgttccagcgcatctccgtctacgccgacatgagctgctcggtggacaactccaagatggcgccggcgctcctggactgcgagaacaacgtcgggttctactacatgaagtcgacgaaccggagcgtcgagatggtcaggtactggcgggcggcgagggcgaggttcgacgggaacctgatcgagcaggtggtgttcaacaagatcaagtacgagctcatcagcaggctcggggccaggatccagccgctggagacggagtacatcagcggcttctgcgacttccaggatcatttcgacaaggtctgcaccgtgcacgccaactgctgcatggggctggagaacaaggtgcatgacctcaagagcgtcgccgcggattggaggaactacacgagcctgacgccggagcagaggaagctgcaggaggggagcttcaaggtgacgcccccgcgcatgtgccagaagtccatgggatgggtctga

SEQ ID NO: 151137 - DNA, 1721 bp, Zea Mays
cagaagcttcggcggcagcgcagacaggtagaatcactgaataaaagagttgaattgaatgaaacgcgagagtcgagttgggcagcacaaactggcacgtctagcgtccgactagcaatctccaagagaggtcaatttcggaaatatgccagctagctgggactctggactagctagctagtacgagtagcactagcagcattactttcgctcgcggctggctggcatggcgacctccaagaacagcagcccgtctctgtctccgctggtcgtcttcctcctcggggcggcttcggccaccgtgctgctcctcttcttcctgacggcgacggcgagccccgcgtggaacgcgctggaggccggtcctcgctctggctcaggcagcgtgcgctgcagtactagtactccacgagcaaacggcacggtggtcgtcgacgctctagagcaacacgccggcggagtaggagctcctccagcgaacgaggcgggcgcgtccggctccgatgatgacgatgcggggtttgcgcggatgctgcgccgagcggcgatggaggaccggacggtgatcatgacgtcggtgaacgaggcgtgggcggcgccggggtcgctgctggactcgttcctggagagcttccaggtgggcgagaacgtgtcgcacttcgcgaagcacgtcgtggtggtggccatggacgacggcgcgttccggcggtgccaggccgtgcacccgcactgccacctgctcaggccggagaaggcgggcctcgacctctccggcgccaagagctacatgaccaaggactacctggacctcgtgtggagcaagctgaagctgcagcagcgcgtcctcgagctcggctacaacctgctcttcacggacgtggacgtggcgtggttccggaacccgctggtgcacatcacgatggcggcggacatcacgacgtcgagcgacttctacttcggcaacccggacgacctgggcaacttccccaacacgggcttcatctacttcaaggcgacgccccggaacgcccgcgccatggcctactggcacgcggcgcggcggcggttcccggagaaccacgaccagttcgtgttcaacgagatcaagcgggagctcgcggacgggctgggggtccggatccggttcatcgacgccgccaccgtcagcggcttctgccagctgggcagggacctcaaccgcatcgccaccgtgcacatgacctgctgcgtcgggctggagaacaagctgttcgacctcaagagggtgatcgtggactggaagcgctacatggcgcgcccgctgtgggagcgccagatggggaagatcggctggacgttccagggaggaaggtgcatacactgactcactgcatttgcactgcacgcggtgcctggatggattggctcgattcaaatctgtaggacttgctgaaatccggggcaacaatcatcgtccaaccagcatatgcgtagcctgtcaaacacttaaaactcagaagcatttatgacatcttaattaactagtatgtgtctctttcagacacattgtttctgttcgtactacactgtagtacgtgcgagagacgtgtgtgcccttgtttcttctgaaaacaacgtgcgtacgtgaaagcgactaactggctgattcaccatcatcattgatctaattaaaaggaatgaaacaaggcctgctgataaataatagtctggactgttaaact

SEQ ID NO: 151138 - DNA, 1530 bp, Zea Mays
ctagcgtccgactagcaatctccaagagaggtcaatttcggaaatatgccagctagctgggactctggactagctagctagtacgagtagcactagcagcattactttcgctcgcggctggctggcatggcgacctccaagaacagcagcccgtctctgtctccgctggtcgtcttcctcctcggggcggcttcggccaccgtgctgctcctcttcttcctgacggcgacggcgagccccgcgtggaacgcgctggaggccggtcctcgctctggctcaggcagcgtgcgctgcagtactagtactccacgagcaaacggcacggtggtcgtcgacgctctagagcaacacgccggcggagtaggagctcctccagcgaacgaggcgggcgcgtccggctccgatgatgacgatgcggggtttgcgcggatgctgcgccgagcggcgatggaggaccggacggtgatcatgacgtcggtgaacgaggcgtgggcggcgccggggtcgctgctggactcgttcctggagagcttccaggtgggcgagaacgtgtcgcacttcgcgaagcacgtcgtggtggtggccatggacgacggcgcgttccggcggtgccaggccgtgcacccgcactgccacctgctcaggccggagaaggcgggcctcgacctctccggcgccaagagctacatgaccaaggactacctggacctcgtgtggagcaagctgaagctgcagcagcgcgtcctcgagctcggctacaacctgctcttcacggcacgtgcctcgctcgctagtcgctgctcccgttgagttttcactggtttattcacgagttacgaggcggcgttccgtttgacgactggcgtggcgtggcgcgcgcaggacgtggacgtggcgtggttccggaacccgctggtgcacatcacgatggcggcggacatcacgacgtcgagcgacttctacttcggcaacccggacgacctgggcaacttccccaacacgggcttcatctacttcaaggcgacgccccggaacgcccgcgccatggcctactggcacgcggcgcggcggcggttcccggagaaccacgaccagttcgtgttcaacgagatcaagcgggagctcgcggacgggctgggggtccggatccggttcatcgacgccgccaccgtcagcggcttctgccagctgggcagggacctcaaccgcatcgccaccgtgcacatgacctgctgcgtcgggctggagaacaagctgttcgacctcaagagggtgatcgtggactggaagcgctacatggcgcgcccgctgtgggagcgccagatggggaagatcggctggacgttccagggaggaaggtgcatacactgactcactgcatttgcactgcacgcggtgcctggatggattggctcgattcaaatctgtaggacttgctgaaatccggggcaacaatcatcgtccaaccagcatatgcgtagcctgtcaaacacttaaaactcagaagcatttatgacatcttaattaact

SEQ ID NO: 151139 - DNA, 1101 bp, Zea Mays
atggcggggctggggtttccgaggagcaaggaggcggcccgtagccacgcggtgtcgttcctcctcggcgcggcgctgcccactgccctcctcttcttcctcgcgtccgaccgcctcggcgacggcttgtccaccatctcgcacagctgggggaacgggccggcgggcgacgacgaagcaaaccagcatgccatgttcaagggcctagccgagctgctgccgagagttgccatggacgacaggacggtgatcatcacgtcggtgaacgaggcgtgggcgcggcccggctccctgctggacctctacctcgacagcttcaggaacggccaggacaccgcgcacctcctcggccacctcctcgtggtcgcgctcgacgcccgcggcttccgccgctgccaggccgtgcaccctcactgctacctcctcctcaacgtcacgtcgtccgtggacatgagctccgccaagccgttcatgagcacggactacctggagctcgtctggaccaagctcgtcttccagcagcgcgtgctggagctcggctacaacttccttttcacggcaagacatctttcattatcatcatatcatgcatctcagttggactgcgacatggtatggttccgcaacccgttccagcacttccccgtgtacgccgacatgagctgctcgtcggacgacttcaagccgtcgcgcgcgccgctggacaacccgctcaacacaggcctctactacatcaagtcgacgcaccggagcgtcgagatgatcaagtactggcgggcggccagggagaggttcccggggcagcacgaccaggccgtgttcgtcaacatcaggcacgagctcgtcaccaagctgcaggtcaggatcccagccgctggacacggtgtactatggagggatctgcgagtaccacgacgaccccgagaaggtctgcaccatccacgccgactgctgcgttgggctggacaccaaggtgcacgacctcaaggcctttgccgcggactggaagaactacaccagccaggcgccggaggagaggcagaaggctgctttcaagtggacctacccgactcggtgccgggattccataggttggcgtaa

SEQ ID NO: 151140 - DNA, 885 bp, Zea Mays
tgcatccaggcgcacgcccgcaagccttgacccttgaggatagcgggaaacgagtaggcgtccggccacacgcgaagcagagcagcgcgatgcgggggcgtggagacggacagacgtgctccagaggaataggtcgcgagcggcgggctccgggaggcgcgcgaagacgacgggacggacgcaagggcgagcaggaggaggttggatagccgcagcggggagccggcgaggtggcccgaggtgaggaggtgtgcgtggcacaggaacgcgagtggggcggagctgcacgcgcggaggcgtgagaggagtactctgcagcgcgaaggcgggacgcggagtctgggaggcgggatcaatcaggcacggccgcttcaaactctgacgaagcctgatcgaggagactgagtgaattccaggcccgacggattcttcagtgggctagctattgatgggccatggcgagcatatttctacagcgacccgctaaccaaaatagcgcgcgacgtccctgcatgtgcgtggagcactggaggctggagcgcgcctcagtttagtgccaccctgaaagctttggacgagcggagccagatgaggtttataaaattcgaccctggaccttatagcaaatcatacctttctcggccttttggctaagatcaagtgtagtatctgttcttatcagtttaatatctgatatgtgaaccatgtgttcactacgatattaaatttattttttgtgggggagggctcaccacagtagcttgctactgaggtcctcatgtgtcgcttgggcgttgcactactgtccaagcctggcgcgccccaaccaagtcaaatataaatttgcacagacttttgattgaattttctgctattccacctttt

SEQ ID NO: 151141 - DNA, 884 bp, Zea Mays
aatttttttaaagaagtttgcccttggttaccgaaccaatctattttatgatgtgtatattgtctactttgaattgtactaaatgaagtttgttaatgcagcattgaaattctggctatcttcaaacgggaatcagaagctggtcaaaagaaaaagaagaaagcaaaaaagaaggctaagtagattaacaaaaggctgatccaccttgcggattttgtatttttgtgaatcttaggcattgatccagaacttcagaatgagtgctcatgtctgttatgaggaattttgcatcgtccgaaccaatcaagtgaccaatatgacacaggtcactcaaaatgtagccgtccaaaagcgtcggctcggaatgaaagggtcttttttgctaatcataccggggacttggttttgcgtaccacccgtggtgacattgtgacaggcaagtgggtgtttgcacacaagctgcacgccgatggctctttccaccgatacaagtctcgttagatccttggcgggtcagtggcttggagttaactatgataacactttcagtcctacggtgaagttagccactatgtgcactgttctatctatggctctatctggttttggcttgtctatcaattggacgtcaagaacgtcttccttcgtggcactctgactgagataatgtattgcaaccagcagatcgtttttgtagattcagctcatttgaacattgtatgcaaactcaacaagtcattgtatgatctgaagcatgcaccttgagtttggtatggtcactttgcttcctttgtctcgctggactttgatgaggctaagtcagaactcatcgttgtttatctatcgccagtggtgacactatgtgtctacttctgtacgtcgat

SEQ ID NO: 151142 - DNA, 2636 bp, Zea Mays
cttaatccttatcccctccccacgtttccctcttcacttcccggttcccgcctgcatacggtacagtggtacacccaccgccggtgagccatgcctcccccggcggggctgcccccctggccgacgccgtccaccacgcgcctcgcgaccccgaccccgacgcggcctcctcctcgcaccacccacgttcggccgccgcctccaccttacactcgcgtccgccttcctccgcctccgcctgctacgacgccactgccgccccgcctggagcccgctgcgccaaaaccagcggccgtcgccacactcctgcctccctccactgcctctgcagcgtcttcttcgtccacctgcctcgactgcgtccattttggcaagtgctcagggtgcacgcacgaggtggacctcgacaagccgccggtgctgcaggaggtggcgaatttcttcaagggacacggggtcggagatttcaccttcagcaggggcaggctgtcccaatggcggtgccgagcaaagctagctgttcgtggaacaccagagaacccgttgattggtttataccaggaagggacgcatgctgttatagatattccagagtgcagagctcatcacccaagcattaatgctgctgttaagttgttaaggcaaggtataactgagctaagtattcagccatttgatgaagatgctggagctggtgaactcagatatgttcagatggccgtgacaacatataacacatctattccggttgataaaagatacgagcaagggaaagttcaagtttcattggtttggaattcaagagacgagcgctcccagaacgcagagaagctgacttcaataatagaatacttgtggacaaatggtgggccaaaaagtagtgtccatctcattcattctatatgggccaattttcagacatcaaccagcaacataatttttgggcataaatggagacatcttaagggggagagggacatgtgggagcgttatgggggagttgatatttctctggatccttgtagctttggccaggctaatactctgtcatttaactctttgttgcataagctgaacaagtatgtaccacgtagttcaacagttgttgatttgtactctggggctggtgttattggcctatcagttgctgcttcaaggaaatgtaggtctgtgaaatgtatcgagattaacaaacagtcaaagatgtcttttgagacatcagcaagccgacttccagcgaacctgggttgcaccattacttggcacaataccgatgcttcagttgaaccttcgcactggcttgaagggtcaagtgttgttattgtggatccaccaaggaaaggattgcacccatctgttatcagcgctttacagaaagttgctttgtctgagcgcaaggcatacaaggctaaaagttcgcttgcaaaggttaaggatgagaagagaccatggatcttacgggcaagggaggctgcagttcatgttgataatacaacaactgaagagggcaatgaaacgtggcctgaaactctcatatacattagctgtggatgggaaagttttaagagggactgcaaaagcttgatatccagcaaggcctggcagttggaaaatgctcatgcttttaacttcttccctggcacagatagcattgaaattctggctatcttcaaacgggaatcagaagctggtcaaaagaaaaagaagaaagcaaaaaagaaggctaagtagattaacaaaaggctgatccaccttgcggattttgtatttttgtgaatcttaggcattgatccagaacttcagaatgagtgctcatgtctgttatgaggaattttgcatcgtccgaaccaatcaagtgaccaatatgacacagggtaattacagaaactttctcagctagaccaagtttttgcctgcacaggaaattatatcatagatcagcaacttcagttctgtagtatgaaataaaaataaacagaaaacacgcatatttcaatggttagacgactcttctgatatgcttcgtggacccttttattctactgatgaatcttcaacttttcatcttctatttctagtcactcaaaatgtagccgtccaaaagcgtcggctcggaatgaaagggtcttttttgctaatcataccggggacttggttttgcgtaccacccgtggtgacattgtgacaggcaagtgggtgtttgcacacaagctgcacgccgatggctctttccaccgatacaagtctcgttagatccttggcgggtcagtggcttggagttaactatgataacactttcagtcctacggtgaagttagccactatgtgcactgttctatctatggctctatctggttttggcttgtctatcaattggacgtcaagaacgtcttccttcgtggcactctgactgagataatgtattgcaaccagcagatcgtttttgtagattcagctcatttgaacattgtatgcaaactcaacaagtcattgtatgatctgaagcatgcaccttgagtttggtatggtcactttgcttcctttgtctcgctggactttgatgaggctaagtcagaactcatcgttgtttatctatcgccagtggtgacactatgtgtctacttctgtacgtcgat

SEQ ID NO: 151143 - DNA, 657 bp, Zea Mays
aattccttcttgtggtaaccttgttattaataatatattcattttctgaacacagttcgcttgcaaaggttaaggatgagaagagaccatggatcttacgggcaagggaggctgcagttcatgttgataatacaacaactgaagagggcaatgaaacgtggcctgaaactctcatatacattagctgtggatgggaaagttttaagagggactgcaaaagcttgatatccagcaaggcctggcagttggaaaatgctcatgcttttaacttcttccctggcacagatagcattgaaattctggctatcttcaaacgggaatcagaagctggtcaaaagaaaaagaagaaagcaaaaaagaaggctaagtagattaacaaaaggctgatccaccttgcggattttgtatttttgtgaatcttaggcattgatccagaacttcagaatgagtgctcatgtctgttatgaggaattttgcatcgtccgaaccaatcaagtgaccaatatgacacagggtaattacagaaactttctcagctagaccaagtttttgcctgcacaggaaattatatcatagatcagcaacttcagttctgtagtatgaaataaaaataaacagaaaacacgcatatttcaatggttagacgactcttctgat

SEQ ID NO: 151144 - DNA, 2017 bp, Zea Mays
cttaatccttatcccctccccacgtttccctcttcacttcccggttcccgcctgcatacggtacagtggtacacccaccgccggtgagccatgcctcccccggcggggctgcccccctggccgacgccgtccaccacgcgcctcgcgaccccgaccccgacgcggcctcctcctcgcaccacccacgttcggccgccgcctccaccttacactcgcgtccgccttcctccgcctccgcctgctacgacgccactgccgccccgcctggagcccgctgcgccaaaaccagcggccgtcgccacactcctgcctccctccactgcctctgcagcgtcttcttcgtccacctgcctcgactgcgtccattttggcaagtgctcagggtgcacgcacgaggtggacctcgacaagccgccggtgctgcaggaggtggcgaatttcttcaagggacacggggtcggagatttcaccttcagcaggggcaggctgtcccaatggcggtgccgagcaaagctagctgttcgtggaacaccagagaacccgttgattggtttataccaggaagggacgcatgctgttatagatattccagagtgcagagctcatcacccaagcattaatgctgctgttaagttgttaaggcaaggtataactgagctaagtattcagccatttgatgaagatgctggagctggtgaactcagatatgttcagatggccgtgacaacatataacacatctattccggttgataaaagatacgagcaagggaaagttcaagtttcattggtttggaattcaagagacgagcgctcccagaacgcagagaagctgacttcaataatagaatacttgtggacaaatggtgggccaaaaagtagtgtccatctcattcattctatatgggccaattttcagacatcaaccagcaacataatttttgggcataaatggagacatcttaagggggagagggacatgtgggagcgttatgggggagttgatatttctctggatccttgtagctttggccaggctaatactctgtcatttaactctttgttgcataagctgaacaagtatgtaccacgtagttcaacagttgttgatttgtactctggggctggtgttattggcctatcagttgctgcttcaaggaaatgtaggtctgtgaaatgtatcgagattaacaaacagtcaaagatgtcttttgagacatcagcaagccgacttccagcgaacctgggttgcaccattacttggcacaataccgatgcttcagttgaaccttcgcactggcttgaagggtcaagtgttgttattgtggatccaccaaggaaaggattgcacccatctgttatcagcgctttacagaaagttgctttgtctgagcgcaaggcatacaaggctaaaagttcgcttgcaaaggttaaggatgagaagagaccatggatcttacgggcaagggaggctgcagttcatgttgataatacaacaactgaagagggcaatgaaacgtggcctgaaactctcatatacattagctgtggatgggaaagttttaagagggactgcaaaagcttgatatccagcaaggcctggcagttggaaaatgctcatgcttttaacttcttccctggcacagatagcattgaaattctggctatcttcaaacgggaatcagaagctggtcaaaagaaaaagaagaaagcaaaaaagaaggctaagtagattaacaaaaggctgatccaccttgcggattttgtatttttgtgaatcttaggcattgatccagaacttcagaatgagtgctcatgtctgttatgaggaattttgcatcgtccgaaccaatcaagtgaccaatatgacacagggtaattacagaaactttctcagctagaccaagtttttgcctgcacaggaaattatatcatagatcagcaacttcagttctgtagtatgaaataaaaataaacagaaaacacgcatatttcaatggttagacgactcttctgat

SEQ ID NO: 151145 - DNA, 298 bp, Zea Mays
ctgcctcctggatttctcactacttcataggctccgaaagcaaattagtggctagaataattatgatttatttaattattttgttgttgtgtaggttatattatatggtcattaattgtttcttgcgacatttgaaaccaacaaatgattcgaatatcatataattaagatgttaggatcatagagtttgtttcatttattaccacatgttggtattactaaggtttagcgtatgctaaggttgtggcatggctaacaagtggcaaaatagaattgtttctgctcactgtttttttct

SEQ ID NO: 151146 - DNA, 1407 bp, Zea Mays
tttgtcgtctttgctccccagctctttttcccacgcccatttctcaaaaagcgagggcatgaccgccccggcgtcgccgcactgtttcctagtaaaagacgcccactctttggctcctcgcctccctcctcccctccgtctcatctcctccctgtaggctgtaggagcattcgtgtgttcaccttttgctcccccacgttgatccttgaccctcgtactcctttcttgattccttctccgtgggatctcttgccaggagtaacctgccccgtgtccgcgctcgcactcgcacagacatgcttcttgccgcgtcttgaaaggggagaaagtgaagatgggtgcttgcgcttcagttcacaaggacccggggtaccccaaggagcagtttcttgactcgcccaccaaggcggaagctgcaaacgagaagggcggctgcggcggcggtgacgatgactttgctgatttcaagtccaaggtcgacgctgagcagcagcgggcagagttgaaccccaagagcccggattctggtagcaaggatgaagtgttcttcgaatctcgagcttggttagattccgactgcgaggatgacttctacagcgtgaatggagatttcactccatctcgtggcagcacacccatccatcagcccagagcgcagacggtgatgagcaacatctttcaaccagacacgcacggttccaaatcaccggagccttctccaactggacggaggaagctagctgagctcctgcaggaggcaatgcaaaacggccccgaagaaagcaccgaccaggagctgcagttgcggtctgttgccgcagatgggaagccggtgtctgaatccacatccagctccgcttgcagcactgtgacgactccgatcgcagtcgctaacgccaagagccggaaggagaaggcgtggtacaccggacgctgttgcctgccgagctttgttcatagcctgaccttagatgagagtgagagggcgcagaagatgagctctaggccatgtgctgtttgacagtggggctccagtgccctcacggctcatgccctgagctatactgtaaaggagaagtattaagagtactgtatgtatagagagagggtaatcaagtggataatagctactagttaaatgctctgcacaccatgtttatcaattgcccttacctgtgtatatatatctaatcgaatctcaaatgtcaacagccagctgagctgtcctcttggcacttgcatttgcatgattgacgccagacaaatgtgttgttcattgctccattctattccaagtggaccttttaattttctctaaaaaacaaaagggtctctagctgagttggttaggtggtatgagtagcactacttaggtcctgagtttgaatttcagtggtagtgaatttc

SEQ ID NO: 151147 - DNA, 1705 bp, Zea Mays
tttgtcgtctttgctccccagctctttttcccacgcccatttctcaaaaagcgagggcatgaccgccccggcgtcgccgcactgtttcctagtaaaagacgcccactctttggctcctcgcctccctcctcccctccgtctcatctcctccctgtaggctgtaggagcattcgtgtgttcaccttttgctcccccacgttgatccttgaccctcgtactcctttcttgattccttctccgtgggatctcttgccaggagtaacctgccccgtgtccgcgctcgcactcgcacagacatgcttcttgccgcgtcttgaaaggggagaaagtgaagatgggtgcttgcgcttcagttcacaaggacccggggtaccccaaggagcagtttcttgactcgcccaccaaggcggaagctgcaaacgagaagggcggctgcggcggcggtgacgatgactttgctgatttcaagtccaaggtcgacgctgagcagcagcgggcagagttgaaccccaagagcccggattctggtacgcgtgatggatgggtgtttgtttttttggtctttttctgaagtgatgttccgattttatcttctataatcagttactgttgtttattgaagatctttggaggtaaagattccgtaaagagcagatgagcagtcagttctttacgttaaaaggaaaccttttggtttgtttattcatatactgggctcttgatttcaggatttggcaacgaaatcattgcattaatcgcttctggcgatcagttagttttgtaggggcgcggatgatcttgaacggaaaatgcttactgattttggtttcttgtaatggaaaaggagtttttttgtccaaaaatcaattgctacctcttgaattatcaacctgccaagtagtaaataatcgttctgtgtttctgtttttccttacttctttgattagtctcttagctgaaattcgtcaaacgcgtatacaaaaattactactattttatatggaatttaatttccaggtagcaaggatgaagtgttcttcgaatctcgagcttggttagattccgactgcgaggatgacttctacagcgtgaatggagatttcactccatctcgtggcagcacacccatccatcagcccagagcgcagacggtgatgagcaacatctttcaaccagacacgcacggttccaaatcaccggagccttctccaactggacggaggaagctagctgagctcctgcaggaggcaatgcaaaacggccccgaagaaagcaccgaccaggagctgcagttgcggtctgttgccgcagatgggaagccggtgtctgaatccacatccagctccgcttgcagcactgtgacgactccgatcgcagtcgctaacgccaagagccggaaggagaaggcgtggtacaccggacgctgttgcctgccgagctttgttcatagcctgaccttagatgagagtgagagggcgcagaagatgagctctaggccatgtgctgtttgacagtggggctccagtgccctcacggctcatgccctgagctatactgtaaaggagaagtattaagagtactgtatgtatagagagagggtaatcaagtggataatagctactagttaaatgctctgcacaccatgtttatcaattgcccttacctgtgtatatatatctaatcgaatctcaaatgtcaacagcca

SEQ ID NO: 151148 - DNA, 267 bp, Zea Mays
atgaccgccgcgagggtgctcgtggtcttgcacatcagcggcgcgctcctgcggtcctgccccggtggctctggggagatcgagataggcgttgacccgttctcgtcggcgcccatgacgaactgcccagctgacaggcgcagatgcttccacgtaaccgtactgcgggtttatggctccaagggaaaatatctgagtcagcgggatgggagcaagagcaccaaccaccaagtcatccacgagaaactggagaacgtcttcccttga

SEQ ID NO: 151149 - DNA, 750 bp, Zea Mays
atgtctagtcagcacggaccagactatgactggaggacctcacctattgatcctcaggctgtgtatgcaagtggtggaaaagctcatggaaggtacacaatgtttgctaacgtcatcgactcgagccaggtgagggttcagcgtggaggttcgtcgaggtctgctgctcgtagctcccgtcgctccactcaagatctagcagaagtggagcaactgcgagaagaacttaggcgacatcaggattacttgaagcaacaagctgcgcaacatgaatattatgctacacagattcagcaacagcaaacactcatacaacaactagcagatgcccaagggatacacgtcccggtgcccccccccaccacctcccgttcattatccttggtcttcacctccacctatacctacatctccatctaccgaacatcagacccctccagctaccttgccgacgcatgaacaagaggacgggttagactttgtcgaaaccctcttcaacagtggaggtatcgatggtgatcggcgatcgtgagcttccatgttattgcgttctgatacttgagacttttattatgactatgtatgagatattgtcttttattagtattggatgatgatatgtgtgagacttttgtgatgtaattgatgacactatggatgagacttttgtgatgtaattgatgagactatggatttatatattgttatgtgattgtgtgtgagatgttttatgcgaaaatatgttgtgct

SEQ ID NO: 151150 - DNA, 427 bp, Zea Mays
gctcttcttcccaccgcgttcaggctccgcccgacgcccgacaccaacgaagccctccacaaaaaacggcacgcaactgtctccatctccatcggtgccaccgtccgtcctccgcgtgtctgacgacccgagcttggtgtttgacaaaatgtccatgtcgtctatcatggtcgtgtcatgcccagcgttcggagatcgtgctcacctactgcagctaatcgtataaagcgactttagctttcgtctgggaacaatttgttttttagttctcaatgtcaaatggtaggatgttggcgggctagaggatgtgaaaaggattcttctagatactattctggtaaattggacttggtttagcagtaaatatcagcaacaccaatacgacgctcaattataggtaaaacaagtgttttccctacaatagttt

SEQ ID NO: 151151 - DNA, 330 bp, Zea Mays
atgacgatgtcgatagaaccagcactgctgaagaaccatccaaacaggatgagcctcgaaacaaatggaaattttgtcaatgtcaagagtacggaacgaagaggaaagctcactgtgggcgatgcttattccaccacaggtgtggatgaaccgtcaaggagcaacaagcagactcagggtcagggaactggtgcaattcattggctccccttctcaatctgtaggctgcagggtgtcagttctgaatcagggatgacgctgcagggtgcaatggaagtgccagtgccatcaggcccatcacgcagcaaggtgcagaatgaggtaatgtga

SEQ ID NO: 151152 - DNA, 425 bp, Zea Mays
tggcatgacagatggatcttgggtcagaggattgcagacttggcccctcatgtttttagtttggttcctaaaaggctggtgaagcgaaggacagtggctgatgctttggggatttaaggggagtggtaacatgggaggtcattgctgacttcattttgctggatgttgtggctgacgttgatcttcaatcgggagttccagataaacattattggaggttctcttccaatggtatctattcggccaaatctgcttatgagataatgttctgtggttctacctccctggcgggctttgaaagagtgtggaacacatgggcgccgactaagtgtcagtttttcctctggttggtcctacataataaatattggacgactgaccggctcgctaagaggggtcttccccatcctagttcttgcccctta

SEQ ID NO: 151153 - DNA, 1591 bp, Zea Mays
aaaattccctcaattaattgtcgaactcctcttccttttgcctcttcatttcaaattccagcttcttcctcgcggcgcactgcttgttcggtttgttcgaggcgacgaggccacaaatggtcatcgtgagtggcagcaacttccaaacggattcgtgacccttccgcgatggatcccgtctccaaaggtgcgtggcagaagcgattcttcagcgtcgcgccgccggcggcgctggtcttcttcttcgtgctgatattcgtcgccggtgcagccgtcacgctagatcataaggagagtcgtgtgtccgtattgcagttgcagccaaaactagtgactgcagcagcggagatgaggcctccagcgacgacgagcgagctgcgcgcagggccagcagaggaacccgacatctgtgagagtaaatgtagacctccaggcagcgaggcgttgccgcggggcatcgtgcaggacaagtccaacttggagatggagtcgatgggtggcaaccctgaacgtgaggagaacggcagcggcaggcggtcgaaaagcctcctcgccatccccgtcggcatcaagcagaaggcggtcgtcgacaagctcgtctccaagttcccggacaccaagttcaccgtgatgctgttccactacgacggcgaggtggacgggtggcgagacctcgagtggtcgggccgcgcggtccacgtcgccgcgcgcgaccagaccaagtggtggttcgccaagaggttcctgcacccggacctggtggcggagtacgactacgtcttcctctgggacgaggacgtcgaggtggacagcttcgacccgctcaggtacctgcgggtcgtgaggaaggaagggctcgaggtctcgcagccggcgctggaccgccggtcgcagatccaccacgggctcacggcccgcgcgcggcggggcggcggcgtccaccggcggtactacaagacgaaggggcacggcaggtgctacggcaacagcacgggcccgccgtgcacggggtgggtggagatgatggtgcccgtgttctcgcgcgcggcgtggcggtgcgcgtggcgcatggtccagaacgacctcgtctacgcgtggggaatggactacaagctcggctactgcgcgcagggcgaccggcgccgcaacgtcggcatcgtcgatagccagtacgtgctgcaccggggcatccccaccctcggcggcggcggcggcaacggcaacggcaagccttcgttctccgcttccgcgtcagcgttgggggcagaccggttagcggtcaggcagcggtcctacaccgagctgcaggtgttcaataggaggtggaagaaggccgtgtcggaggacgggtgctggactgacccttacccgaacacggcgaccaccggctgaccgttggacggaacgagacagctcagtagttggtagctgtcggattgacctcgtctagatgatggtagcagatcatacaccgcattactttacagattcagagagctcatatatgatgtacagattaaaaaaaaaatcctaactcttgactgttgtctatacaagggaaagagcaaattttgtactgtcaatcagttgt

SEQ ID NO: 151154 - DNA, 315 bp, Zea Mays
aaataacaaaatttatgtatggttaggatcacaaattgattatgaaacattttctcataacaatataacacacattttgtatataagttatcgtagtatactgatattatatattcccgttgcaacacacgggcatttagctatttaataatatgtgttgtttatttatctattaacttatttgagctgaattatgtaaatttgagggtaaataaatagggcctaggtgtttgtataatccatgagttgaattatataattctagaagaaaacaaatatggtctaattgtttatataatccataaattgtattat

SEQ ID NO: 151155 - DNA, 354 bp, Zea Mays
atgtcctcctcgacggcatacacgaagaaagatcaggagcatgaccactcgccccgtacccgcgtcgacgagcgtcggtcggctcgcggttgcgaccgtgggcgggggcagcagccactgcgcgagtcggtgttggggctggtgtcggatgaatacggggagaagacgcatgctcctacgccctttgttgagaatggggtggtgcggaggtggaggcgtgaggggaaagagaaaagaagtagaatggcgaacgtggtggtggcaactaaggcgaggaccatcattatcgtgcggaagtatagatggctagatgggctgtgtctggcgagccggtccgaggcacgacacatttaa

SEQ ID NO: 151156 - DNA, 2347 bp, Zea Mays
aaggaacacccagaacggtcgctctcccccggccccgccgagatggacacgggctgcctccaaccaccctgcaacccctcctcgtcggaggcgtcgggaggcgacgcctccgacgcctgcggctccgcctctgcctcccggtcctcctccgcccgccgcagcaagggggtgcggctccggctccggctgcggcgaaggcggcaggagccgggccccgccgctacgcctgggggtgagggtcagggtggcgccggcgtgcaggtgcaggacgacctcgcgctgcccctcgggatgtcgttcgcggccgtcctcgcgcaggttgtgaatacaaagaatcgttcaggcgaaagattacagcctgcacttctttccaagatctgtacatcggcagtgaaggaatcattgagaaatatatatggtaacaagttagacagttttatgagaaactttgagaaatcattcagcagcacattgacaacgcttcatcttgttaatgagatgcctgtctatggacaaggtccagttcctcaatgttcttctaagcatgaagactctgaagcttcaagcaagttgagcactggtggtacacaaaatctaacgcgtgaaatcaagcaggagcgtttgaattcagtggaaagtcagcttgttctttatgctggcggctatcagcagatgactcgccgcgctcatagcttatcttctcctgaagctgatcagcgcatccttaatgcatttgagagatctttgaaagaacaaactcggtcaaatgagctcaaggaatttgagataagccttagcatgagaaagttgaagctaaaacagtctcaactagaacttaactcctattcacacatgttagacaagattaagttatccttgggatttcagaaagcttccttccaagtggaaaaattcaagactcagatgcaggacacgaggcatgcacaaataatgaggacactcatagattttcttgttagtgcagtgattattatgtcagtatgctttgggtatggaacttatacttattcataccaaaggataactgatattacagcagcatgttcagccacttcaaagggatctaaatcatggtggatgccaaattcagtgtcaaacttcaatactgggttgctcttcataagatgtcatgtaatagctgcaacacggatgttctttggtatagtaatgattttggcagttgtttggttagcgttccagcgctctgcggtgtctgtatcaagtatgccagtaacttttaacatcattctgttgggagttatttgtggctacgctggaaggttctgtaccaacacacttggtggtgatgggaacatgtggcttatatgctgggaggtactttgttccgtccatttgattggaaattgttatccatcggtcttgtaccgtgttctccatggtcctatatctgtatctcatagcaaggagtctgtctggttcccgtattggattcgccgttggatgttttatgctgtgctggggttttttatcccagccttgaatggcttactgccatttgcttctctttctgactggaataaccatttcactaaggagctaaaatccatcttcattgatgagagaatcgaagcctgaatgaatcatggatgcaacaattggtgcagtgttgtcctttttgtgccagcggtgcagccaaaggaaagcgaggactgaatgatctttagctgcaactagtgcacaatgtcaatgatttctgagaaatgaaatggttctgtttgagaagcgattcagaagttcagcttggtgttgtctcaagagaataatatatgggatggaagttataggcaccgttcaaggaataagttgactgtacactactgcaggagacgctagcattttgatccaactcaacgtgctttcatcagtgcctcctaccaccgcagtcaaagcttcagatgatctaggattttgacttttgagatcttcgtgtctcttcgacttcaaatgcctcgatttgccctaggcattttatgatgcaagtttacattacagttcagcgtgtaggcaggttcaccaccagttggaaattctgttgaattcgtttttgttgtctttgttgtagctcgataatttgtttttttcactgtaaatatcaagagccgtttatctggtactggctgcttactctttgtggttagtttatgtgcatgttatctccgggcttgagagaacacagcctgatgttgtacttgttcagtgtgttcatgtattgtaagtgcacttgcatttaagcccaaaaactaatgtaagattttgatgtgtacaatttttttatgggatcatatacccaatcatgtactccttc

SEQ ID NO: 151157 - DNA, 1608 bp, Zea Mays
gaccatcatgaacatttccgtggagcaggaacatagacaggcaggcagggaaactggacgatcacggcaaccggttggcacgggcgcacagcagccttcctatggccagcgcaaccgaacgtaaccaccgtccaccgaggcgcagacaggagagagagcgagacaaacaaaaaaggtagcgacaaccagatcccatggatggagtatcgtgtaaagcgagcaattaaggtttcgtaatggcggcaaggaacacgtagcaagccaacgaggagggtgaggaccccccccggcgaaaaatggctacgtacagcgctccgcagcgatatggcgccaaagcacaagcaaacgaagcacgcaccaactccgacgaccagctccccccacccttctcttccctccacatgggatgggagccgaccatggggcggcagaaacggacgacggcctgtcacgctcacgcctggctgacggacgagcccagcccatcaccaaggcccgtaggcgtgtaccaccaccgcctctcgctctgtctggcgctagctgtgacgccggtgggccgcagtcgttgcgccgccggcggcctgggcctgggcgcccatggcgagctcgagctgccgcatggacagcgccggcaggggcagcgggtactgctcctgcggacgctgctggggcgcggagaacgacgaggccggtggaggcggcgcggggcggttccaggaacggaggttgctgctggtgctcgtggcgccgtcccagccgatgtgggccacgtgcttcacgtccgtagggaggccgatcaccatctcccgctcctcctcctcctcctcgtcgtacaccgcgaagatctgcgacaggttcttgaacccccgcaggagccgcgccaccagagactcccccttgcccctcgccgccgccgccgccgcccctgcttcagcccctgtcatagcaggcggaactcttcagtaactgttgtcggccgtcgaaagaacggcaacggaacagaactgcgggctgcccaattgacgcgcgcgcgcacgtaccttgcgggtggggcttcttgccgtcgccggcgaggcgcccggtgtcgacgacgtcgacgctggagtgggagcggcagccggaggagaaggggatggcgatgaacctccgccgtggcatctgctgttccctgctcatggcttctcacggtcacggccttcgccagctgagccgaggccggccaggggccggcgctgctgcctcttgctgacttgctggcagagcaagcggattaggatagcagggcagctgccgaccggcgaggctttgctttactacaccggaaagggcgcgttaggtccgcgcgcgcaacagcagcagcaggcagtacgcactgcccccggtccccgtcgccgtccggatacgggggatgggagcgtcgaagtggtggtgccactaccagtctgccattgcatacactactgctagcaccatgttgacatggccgcggtgtggcagattgtcagtgcgggaaaggaaagagatggggcggagtgatttgttgatgggtgggttgggtacttgggttggtgtttggttgtactcccacccgaacctcacaacgccttt

SEQ ID NO: 151158 - DNA, 1068 bp, Zea Mays
atggctacgtacagcgctccgcagcgatatggcgccaaagcacaagcaaacgaagcacgcaccaactccgacgaccagctccccccacccttctcttccctccacatgggatgggagccgaccatggggcggcagaaacggacgacggcctgtcacgctcacgcctggctgacggacgagcccagcccatcaccaaggcccgtaggcgtgtaccaccaccgcctctcgctctgtctggcgctagctgtgacgccggtgggccgcagtcgttgcgccgccggcggcctgggcctgggcgcccatggcgagctcgagctgccgcatggacagcgccggcaggggcagcgggtactgctcctgcggacgctgctggggcgcggagaacgacgaggccggtggaggcggcgcggggcggttccaggaacggaggttgctgctggtgctcgtggcgccgtcccagccgatgtgggccacgtgcttcacgtccgtagggaggccgatcaccatctcccgctcctcctcctcctcctcgtcgtacaccgcgaagatctgcgacaggttcttgaacccccgcaggagccgcgccaccagagactcccccttgcccctcgccgccgccgccgccgcccctgcttcagccccttgcgggtggggcttcttgccgtcgccggcgaggcgcccggtgtcgacgacgtcgacgctggagtgggagcggcagccggaggagaaggggatggcgatgaacctccgccgtggcatctgctgttccctgctcatggcttctcacggtcacggccttcgccagctgagccgaggccggccaggggccggcgctgctgcctcttgctgacttgctggcagagcaagcggattaggatagcagggcagctgccgaccggcgaggctttgctttactacaccggaaagggcgcgttaggtccgcgcgcgcaacagcagcagcaggcagtacgcactgcccccggtccccgtcgccgtccggatacgggggatgggagcgtcgaagtggtggtgccactaccagtctgccattgcatacactactgctag

SEQ ID NO: 151159 - DNA, 444 bp, Zea Mays
atggagaacgggagtcttgagacgtggctcaggaaccgggccgacgccatcgaagcactcggatggccagaccgcctgaagatatgcatcggttctgcccgggggctctcgttcctgcaccatggatttgtgccccatatcatccaccgagacatgaagccgagcaacattctgctggatggaaacttggagccaagggtctctgatttcggcctcgcgaggataatcagcgcgtgcgagacccatgtcagcaccgacattgccgatggcccgtgtgctagccatcgcccgagactgcactgtggacgagccatggaagaggccaactatgctggaggtgatgaagggcctcaagatggccgaaacaatagaatgcggccctgtgagttgcgacagtcaccaagaacatgtaatgcattgctgacggtgtcgctgctgatgtag

SEQ ID NO: 151160 - DNA, 758 bp, Zea Mays
gacgagggagtcggtatacaccagcagggccggtgcctaggcttggctccgctgctggtttaagctgcccagtaggccagtagctcaagcatggagaggactgtctaagcggcactcgcagcaagagctatctacacctctggtccgagagcggcttcgccgcgatcgcacgagacaacggtggacacggaggtggtgctcgctgaagaagagaactgtttcctagtgctgcgagcctgcgactgtacgaggcgctcaacgcctgcgacgcgcgtcgggcacaagaactgctggcaccaaacctcgagtggtggttccatggccctcccacatgccagcacatgacgcacctcctcaccggcgcgagctagcgcgagaagaaccgcgtcggtggctgctttgtcttcaaagtgcgacaaacttctacgtattatgcccttgtacgttctatgtcctcaagctgcttgatggaatgccgaaacgagtctatccgctactttttatcagtgaattgccatccagcgttgttagaacttataacatcctgtcgcacaatgacggtggcctgtggtgccatgcttctgttatgggctaacttgactccactattggtacgtgcttgctcttctgtttccttggattctcttaattagttagtggtggtactgttgaactgaacaacttttttctacacattcccctgtatacaaagtaactaagtaacttaagtatcaactctatatacatatcttcgtctc

SEQ ID NO: 151161 - DNA, 668 bp, Zea Mays
gaagcaacatgaatccgccgcacccagagccgggccttccccgccgccaccaccacatggtccacctccacctcgacccgcgccaccaccaccacgtccacatccacctccgctgctgccatcatcaccaccacggcacccacctgctcgctcctgcgccgccggcccgcctcaacgacaaccagcagcggcacccggctcccgtactcttccccaacacctacccgaacccaagcgcggcgcctgggcagccagagccgccccgcgccgccgtaagggaggacgtggaggatttggatcccgagccggggctgctgcacgcggaggaggaggaggaggaagacgaggagccggtgttcgtacttacggacgagtgggcggagttcttcgccaaatccgaggccaagagaagactggctaaacagcagaagaagaagagccggaagtgatctgatgtgtctgggccatcatcagacagtctggccagagtctggagctcgggaagagaacggacgaatagcttgtcaacatatacgcatcgctttgccaggagttcattatgttttttttttactttatacagagagttacgagttcacatgatctaaacactgtaaccttttgagttcacatcatctgaaatctgtgctgtatctattcggacttgg

SEQ ID NO: 151162 - DNA, 1393 bp, Zea Mays
cgggcgagatattttttgccaagctggcaggcacatgacacatcgccccagccccaagtccaaagccgcgagaggcaggggcgcagcaaaaccctagccgccttcccgtccttttcctttcataaaccccaagccgcgccgcaatagctcgccccctcgttcgccgcctctcctgctcctaccgcagctctccctcaggtttagtgttcgcaatggcggccttcaacaagcttggtggccttctaaggcacagtgctctggtgagcggtatcactggtggctcttctcctgcagtgttcaatgctgcacggctcatgtctaccaagctatttattggtggtcttgactggggtgttgatgacgtgaaactaagagaagcatttagcagctttggagaggttactgaagcgagggtgatcacagacagggagactgggaggtcaagaggctttggctttgtgaactactccgacagtgatgctgccaaggaagctatttctgcaatggatggcaaggaaattgatgggcggcaggtacgtgtcaacatggctaatgagagacctgctgggaaccgtggtggtggcggctatggtggcggcggctatggaggtggtggctacggaggtggtggcggctacggaggtggtggctatggtggtggcagccaaagctatgatgcttgaggggggcaggatcctattaagtgcattatcaaccaagatatttgaaataatgaactttaggacttggtatgacgttttatgttaagcattgtcaggttttgctattcgtgttatgctgaattgttggaactcctagatgcagaatattacgtattggttttggttccttcgagaagtgcaaatgcaagacgcatctattcccattgagtgaatacaggactaccacatgaagtatttgcttgaaaatttgcttagctaccctgtttattggtgggttttgtgtttttagtgtagctactttaattggaggtctacattcatcttgtctgttctcatcaattgaatttttttcgaatgagagcggttgtgctggctacaataaccttatcattcatatagaggacttaaagccaatttaacataaaccaaaccattgtcaggtttaagccaggtcaaaggatttggcgtctgaacatgacggaattttccttgtgccactcatattgattactgtgctcgttttttcctcctagacttttcctacctggaaaattaatatacagttaagtttttgtacaatcaaactatcaaaaaaaatcatatttgttttaaaaaagcataagctttaggagccatataaattaaacggactcgcagatacgtgagataggaaccctattagttcataattagccagttgtctgtgtttt

SEQ ID NO: 151163 - DNA, 100 bp, Zea Mays
ctgggaaccgtggtggtggcggctatggtggcagccaaagctatgatgcttgaggggggcaggatcctattaagtgcattatcaaccaagatatttgaaa

SEQ ID NO: 151164 - DNA, 860 bp, Zea Mays
cgggcgagatattttttgccaagctggcaggcacatgacacatcgccccagccccaagtccaaagccgcgagaggcaggggcgcagcaaaaccctagccgccttcccgtccttttcctttcataaaccccaagccgcgccgcaatagctcgccccctcgttcgccgcctctcctgctcctaccgcagctctccctcaggtatggcttcattacgccgcctttgatcctctcgttccgatctatagtatcaagtagtcaattgtcgcggtggatctcgtgttgcgcttcgtttcctttgggggttgattcttacttagatggggcatgttgcgcttcggttccttgggttgattcttagtgttgttcttcgggtactacggggaagatttttatataggccataggccagtggggtaaaattgaatcattgattcgaggaaagctggatcggagacgctgtggtgagaagggtcgtggttcgcgccgccgtgaggacggcgattaccgcgtatagtagcgctcccgctcgggattggaccgtgactcggacccgtgagacgacagcggcgccaccgtgttaggcgagcagggttcagcctcccccccccggtcctatgctagtggcggctccggaacccagtcttggtgtgctgcgcgaaggcagcagcggatcgtgaattcgtgatgttttagcatatataacaatttatccttgttgaggaattgttttctgctgtgaattttaatgttccaactacaacatcgtaatttcccatgtatttctggggtcctcccccgaaataaacaaatcacagattcccatcccctgatgtcaggaggtctgattgtctcattcattg

SEQ ID NO: 151165 - DNA, 97 bp, Zea Mays
ttttttgaaaaaagatggcgcaggacgaccgttgaaactggtgctttaattatactagtcggttactcgtgcgttgcgacggctcacaacaataccc

SEQ ID NO: 151166 - DNA, 213 bp, Zea Mays
tttttttatttttcaaaaaacatatatacatatgtacaatttatattcaatattgtaaacatttgagcataatgttctactggttagatagcttcgccgaatgtcttccagccaccctttttccattagggtgtgggttcaaaccccacctattgctttttaatattttacgttgagttgattttaaagaaatgtaaggactttttgtaaaaa

SEQ ID NO: 151167 - DNA, 100 bp, Zea Mays
tttttttatatagtccagattcaagagtttcttcagctgataatctgattctgttcattcagtttatttcaaataagacgtaacttgttcaagcaattaa

SEQ ID NO: 151168 - DNA, 110 bp, Zea Mays
atgttttactattgtagcttgttagctaattcttttatttctatatgtatatatccacacgtattgcttcgtctacatgtctacgataacacactgttgactttgtaaac

SEQ ID NO: 151169 - DNA, 756 bp, Zea Mays
gcgtgcgcgcgcgctcatcacaagctgtcacaaactcagcacacaatcacactgacacacacacaccacaccacggcaccgctagtgagaagcagagcgggaggacacgcggcgcggactgcgatggctcgtgcgctcggcgcttgcgtgctgctcgccgtcctgctcggtgccctggcgccggcgccggcgccggcggcggccgcgcgcgcccacgacgaccagggcagcggggccggcatacggcagccgagcggcgagtaccgcgggaggaaggtgggggccaggaccgaggtgcgggacgtggagggcgacggcgaggtgcaggagctcggccggttctccgtcgccgagtacaaccggcagctccgagaaggtggcggcggcggcggcaggctcgagttcggcagggtggtggcggcgcagcggcaggtggtgtcggggctcaagtactacctccgcgtcgtggccgtggaggagggcggcggcgcggggaacggcggcgagcgcgtgttcgacgccgtcgtcgtcgtcaagccctggctcgactcgcgtaccctgctcacgttcgcgcccgcggccgccaagtaagcgcggcgctaccgccggtgtagtgtagtatctctggtctacccttctcggagaccatggacgctgaataaagtcttgtgtgttttgtataagcgaagcgtactagagagtgaagatggacgaactctgcgctgccgcgcgcagatcgatgtttttttttgaaag

SEQ ID NO: 151170 - DNA, 1107 bp, Zea Mays
atgccgttctgtctccttccctttccgcccgtcccgtcgaccccctctcccaagggcggctgcggcaaggaccgctgcgccttcagccacgccacgagggcgtcttcctcctcctctggtcctcctctacagcgtcggcactggttttggggattttttttccaggctttgctttatggtgttgcatgggcttcgtgggttccatattttagctcttcattgggtatcatctatgttctggccaaaccagcaatatatgcgataatttctggtgaagtactgtcaactgaccagggaaaagcgcaaggttttattgcaaccgtgcagtctataactatattgttggcaccacaatttatgagtccactgacctcttacttcatttcagaggaagcgcccttcgactgcaaaggtttcagctttattgtggcgagtttcttcttgggatttgccattggttcagctgctcttgtgtctctggcactttttggtgccttcatcagcagagctggagtgaaggttgtccatgtcctctcccccaaggttttcattggtttgattgttggagccatgcttccctattggttctctgccatgaccatgaagagtgttggaagtgtcgccctaaagatggtggaggaggtccgcagacagttcaacaccattcctgggttgatggagggaactgccaagcctgactatgcaacctgtgtgaagatctccactgatgcttccatcaaggagatgattcctcctggtgctctggtcatgctcactcccctcattgttggaaccctcttcggtgttgagactctctctggtgttcttgctggtgccctgattgccatctttgctcccaacatcggtggtgcatgggacaatgctaagaagtacattgaggctggtgccagcgagcatgccaggaccctcggccccaagggatctgactgccacaaggctgctgtgataggtgacaccattggtgaccccctgaaggacaccttgggcccgtccctcaacatcctgatcaagcttatggcggtggagtcccttgtgtttgcccccttcttcgccacccacggcggcctgttgttcaagtacctgtaa

SEQ ID NO: 151171 - DNA, 1203 bp, Zea Mays
atgaagaaggaagttgggttcagaaatgtaacagtggaagctgcttctgttgaacatctgcaggaggaagaagctcccacaagtaaagacggccaaaaggtccaagctgctagcactacagttggtgatcaagaaaatgcagccctgaagagcatagaggaagatcatgtgcaagaaaatgctggtgcaggaagcttgaatggatgtgacaaaagaaaaaatgaagatgggacagtgattgaaagtgaaactgcgaaagatgatgccagaacatatggagttaatttgtcagaatcagatgctgcagttggtattcagtctgcctacagagggtatgatgttcgaaaatggcaacctttggataagctctggaagatcaagcatgtgcatgaacagatgcaagttgtgaggaagcagattcaatgccttttagattcttgcagtaagccaacacaaaaagagcaagtggccataggtgaaactattatgaatttactcctgaagcttgacgcaatccagggcttgcatccaagtgtaagggaagctaggaagtctgttgctcgagaactgatttgcttgcaggagaagcttgatactttatgcaaagcatcatctggagacttgaatcacacagatagtaatgatgatgaatctgaggggaccaagaacattatccaaactgcagctcctactgtaataactgaagcttctgatagaaagagaactgttgaactgggtaaggtacaagaaccatgttcagtggactccatggagccatgcaacgcagttccatctggagtttcctgggaggtgaggccagatgtagacgctagcgaggagaagaatgaaaaacaagagtcatgtagcaccacagtggatgaagcacacgaagaagcaaggggagccatgggggaacacggcgtggagaacgattggaacagaacagagggcgcactgggaacagaaagcaggggcgcggcagggctgagggcgagctcggcgagcaccaagggggaggtggaggcggcatccgccatggctgagggcgagctcactgtgaaggttgaacagagccagggcgctgggaggagcagaggtgagggcgccatgggagggatggggaagacgacctggcggccggcactagaggaagatggggaagatgacctggcggccggcactagaggaagatggggaagatga

SEQ ID NO: 151172 - DNA, 967 bp, Zea Mays
gttgatgggccttgaaatggtgtctgaaataaagtccgagcacgtcaatcacactcaagttgaaaatctgtttatcagttatagaaaatattatgcggtgatttatgtataaaaaaatatttgtagggctagtttgaacctctattttcgttttctatttttcccacagaaagaaaatgaattaatttagaaaataggttgccaaactagccctgtagaatatgaaattccatacagttgtagaagatgaaactccatagtaagaatatgaaactccatacagttgtagaagatgaaactccatagtaagaatatgaaactccatacagttgtagaagatgaaactccatagtaagaattttatgtgtcgcttcttttcatttgaggtaccctcacttggacatgtatagagttcatttagacatgtatagcgataaaaatacttataatactggtagtgcgttcacttggacatgtatagcgataaaaaatacttctaatactggtagtgcaggcctacaacccatcctcgacacagagcggaactgcttaactagaaatctcgcaacacaacaacaaagcgacatagctaacgacaataaaaaaatctgaacatatttctttctaaagttctcctaaaattatagagcaaatgataataataataataaaattaagatttgagccgaccaaaaatgtcggtcatgtctgaaattacttaggacgtgtttgggaacatattattttcttagtcccaaaacaataccacgatatttgaacattctatggtattttaggttaagagccgtttgggagcacatctaaaaactctatatttaaaccatagttttactaataccatgctatttttgaggtcaaaaaaaattctggtctagatcacagttttttgtttgcacacaggtgttagattggactgatgtaaaatataccataggtatgtcatgac

SEQ ID NO: 151173 - DNA, 840 bp, Zea Mays
tgtctctgcatggtatggcacagggatatgcatatgcaaggcatgagcagagtctcagtcacagagcggccgcacacaggccattgcacctgtctccagtttatataacctctagcatttgctcccttatgctgtttctctgaatccaaataaagcatcatcctcccatatgctacccatcgctcacttgaacaagaggaatggctaatggttgccccacatctaccacaagctccctgcccctcttcttccttctctcttgcctgcttatcggccatgctctctgcagccaagcccacaatggcagaacatcagatgctgattatgtggtgcaatttcctcaccaagaattgactactaagcatataattttgccgaaggtcatcaagggtctaaacaagggcatactgtcaaagtatgcaaggagaatgttgatcggctcaattgctccaatatgtacatacaacgagtgcagggggtgtcgattcaagtgtactgctgagcaagtcccagtggatgcaaatgaccccatgaacagtgcttaccactacaagtgtgtttgccacaggtgatcttcaatgagtaggaggagctgctatgttatggtatgtcctggagaatagtagtatttttttccccattcttggttctccgttctccctcttcgcttccttctattctttgttttctctgttgaaaagggttccttttttttcatttctattttacaagaggctagctagtagaggactggagcctagaggagcattttgtactttaaaatgcttgttcaggttatgaactagtaattttgttagtaaatggttatcaattttgaca

SEQ ID NO: 151174 - DNA, 390 bp, Zea Mays
tgtctctgcatggtatggcacagggatatgcatatgcaaggcatgagcagagtctcagtcacagagcggccgcacacaggccattgcacctgtctccagtttatataacctctagcatttgctcccttatgctgtttctctgaatccaaataaagcatcatcctcccatatgctacccatcgctcacttgaacaagaggaatggctaatggttgccccacatctaccacaagctccctgcccctcttcttccttctctcttgcctgcttatcggccatgctctctgcagccaagcccacaatggcagaacatcaggtattcaggcccttcccctccttacacacaaaccctgacttgtttatttcctctttccttgcacgagactagtcc

SEQ ID NO: 151175 - DNA, 87 bp, Zea Mays
tgctcagccagtaaaacttctcacatgctggcttgttcttgctgccaaataccaccgctgtatagcttggttaccacacaaattagt

SEQ ID NO: 151176 - DNA, 804 bp, Zea Mays
gcgcgtggccactgcaccactacacaagcaaagctataggcctatagctaagtgtgctcgcgtgggtacgtgctggagcggatccatcgatgtccgggacgaggatgaaggcgagcaacgcggcgccgctggtggcgttgctggtcgtggccgtggcagcgggcgcggcgggcgccatcaagctctgcggcgtggaccggtccgcggtggacgcgtgcacgccctactgcgtggtgggcagcgcgcaggccgcgccgggccagctctgctgcgacaaggtgaaggccgcccgctggagctgcctctgcgactaccggagcgctctccccagcggcatcgacgccgcgcgcgtcatggacctcgccaccaagtgcaagtgcgactacccgccggcgtcctgcgacgccaactagctagccgtttattctgtgtctagactagatctagatgccacgccggacgtgtctcgtggccatcgattatcgtgtattgttgctttatttatcatcgtttcagtgctacgtacggtacgggtatagtaacaaactgtgacggcctgacgggctctgcacactgcgcgcaggctgcatgcttgtgcactgcagtcgtgctcgtgctcgtcggtgggctatctatctatctatccgtcagccgcgtgccacgtcgtgtaccctctcgtacgtacgtgtttctttgctgcgtcctactagtactagctcactgctgtggcactgtgcctgtgcggtgcgtccacgtcgtccgtcgcaaacaataaacattcaggtctcaatttgtttgttgttt

SEQ ID NO: 151177 - DNA, 202 bp, Zea Mays
ttaaatctctatcttccgcagttccgctactgctaaaggaaatcgcgtcaaatgccaatggtctacgccgcatctttcttgtgtaatttatgttggttgctcctgtcgcaacctggacaattatctgatttaggactaatttggtaactttatcttcctaaaggatctttatttttcaatagaaaataaactagattttctt

SEQ ID NO: 151178 - DNA, 630 bp, Zea Mays
ttgcaagtgcagatcacactagcctacacacaccgagcgccgtctaaactgacagcaggtcagcagcctagcgaagccaagacatccgccgatctcagatggccgggagaagggtgcgcggcaagagtgccgtggccgtggcggccgtcgcgctgctggcgctgctcttcgcggcgagcgaggccgacgggacgtgcaacgtcgaccggggcacggtgctgaggcagtgcgcgtcctgctcgagcggcgcgccgagccaggggtgctgcgacgcgctgaggaacgccgacttcggctgcctctgcagcaactactggaacaagctcaagaacacgccatacgccagctgcgccaaggccatcccttccgcgtgcaacctcccaaacgccaagtgccagtagatggagacatggagtgcgtgacccggacagcgaacgggcagcttggaccaaacagaataaatccgcttcattaccctgtttcttcctcctctgagtgtgttagttctttgctttgagtcgttatccgatatgatcggctgccctgctagccggcgggacgttctatatatgtctttgcaactcatggtttcagcctatgcatatgcatgcacgcatcttactatcgtat

SEQ ID NO: 151179 - DNA, 1082 bp, Zea Mays
aaagtgagtcaccaaaacaacaccaagagagatggaatgcgagctagtgtttacattcaaaagagtgcaaaagcagcagtaagtttccattgattccatattagcgtagacactatacaactctccagagcacccaccgaacaacaaactccccagaaacttattaagcgatgcgtctctcggtcatgcgatgcagctcaggcccaggcaccctcccagcagattcctcaggagcttcttctgcaacacaaacaaaagagcatgagaacaaaactctcacctaaaatctttctggagtttacagtccagctttattgctcatgatctttggcaaagctccacttgctgtgaaaaatgaagtgcttaagcttttgaagaaaggtcacagcatatattggcaaagtatagctgttctatctagtgttgttatcctaacaaaagctacttgcaaagggtcagcttaggctagataaaggcttatgccaatcacatgacgagaactagataagaagtagacccacttaggtacacgtggggtgcaaattaggattacaggatccttgccttcttcaccttgcagagaagctgcggggatatcttgtagaggtcctcgtccacagctcccttgggcttccacttctgttgctcgttcacgcggcgcctccttcctcccttcctcgccgccggaggcacagcagttcctttctcccccttcactcgaacaacgcactgcacatgcaagcatcgaccacagaattgctgtagggcgtggcagggaactggggcaccttgaagagatcctcgtcgtcgtccttctctgtcgtcggcgcggcgaagaagaaggtccctgcctgaaagtactgggtgacgggcatgtcgtcccacaggttccagtcgccgaacgccgggacttggcgccacttgcagtcgtcttgcgcctatcagaaaaaacgaaacggaacaaagcttactcctctggactctggtgaaagcttggaagccagtcttggaagcaagaaagacagtgtgtgaatgtatgacacatacgtgcttgtttgaaaagaaaataaacactgttaaga

SEQ ID NO: 151180 - DNA, 1926 bp, Zea Mays
gcccacggcattgtttccaaacaagcgaaaccgagcgtgtcgatgcagcctccccgtttcgccgtcgccctgccgccgctcgtctcccgcctcccctctgcgcctctccaaccttctcctcgccgtcgcgtccgttccggtgccgccgagcacgcggacgcgtcttcgcgcgcctcccggagcccgccgcccgcgaccagaagcaagggcaaatgggcgccacaccggtgcggtggccgcgggtgctgaccccggcgcagctagccggagccatacgccagcagaaggacccgctcgaagccgcccacctgtactgggacgcacctcgccgctacccacactcctaccgccacaacgacgacgtccgcttcaccctccttggcaccgccgccggctcccccgtcctcccgtccctcctccgccgggttctcccatcctccccatccgccgactccctccttgccgcttcgatacccaaactctctcctccagacgccgtgtccatcttccgctcgtcgctcccctcctccccgtccccgtcttggtccctctccttcaccgccctcctccggcacctcgtctcccaagcactactccccgaggctgcccgcctcttcgctgacttcgccaggcggccggaagtgtcaatagcatccgcggatctgactcttctcataattggtctctgccgcgtgcgccgccctgaccttgcgctgcaggtgctcgacgaaatgcccaacctatgcctcgctccggaaagggacgcgtaccgcgcgattgtgcctgctctctgtgatgctggcatgcttgatgaggccacacacgtcgtctattccatgatgtggcgggtgtcgcagaggggctgtgatgcagatgttatggtgtaccggacattgctggccgcactctgtgcggctggccggggtgaacaggctgagctggttctggataaggtgctcaggaagggtctgagatcaccaagtagtcgtcggtctcttcgtgtgccaatgcttgctgtgcttagtgtcgaggatgctcgggaagccattgaccaggcgttggctgttcgaactggacgtactgtatgcagctttgagtccatgatttttgagctctatgaagagggtcggtttgatcaggctgacagattgttccaggacatggccaagaaggggttcaggccaaccatctgcatgtatgaggcaaagatcggtgctttatgcagggaacggaatgtggatgatgctgtggaagtgctggaagaggagctgccaaagaatgaccttgttccaacagtgacaacatataacttgctcatgaagggtctatgtgacacgatgcaatcaatgagggcactagaatacctcaaaaagatggataagcagctcggttgtgttgctcaaaaggacactttctcaatcttggttcacggtttgtgctcagaaacgaagtttgttgatgcatcaaagttaatggagagaatggtgaagggacatcatcggcctgacaaaagtgcattcaacagagttatcgaaggtttatgttctgctggcagaatatatgatgcattgctatggctagaggagatgatcaaccatggagaaacaccaaacgccggtgtttggtcatccttagtctcagcagtatgtttgccccagtttgaagctttaggagctggactgctggagacagcataggttgtaactgcagaagaagactcgttcgacctaggaaactcttgaaaccacaatacaccaataatgagtgtaagacattcttctacttatgtatgtaaaacaaaatagctgtggtttcatctactgtccccatctgcatggttttgatcagtaccaagaacacagcttttagtcaccaaatgcatcttacactaaaaatccacaggcatattgtttccgagagaaggta

SEQ ID NO: 151181 - DNA, 1195 bp, Zea Mays
acgagaggcagtggcgcaccgcggccttatccgcagcgtccaatccccgcgcgtcttcacgccgcgccacgccgtccgggccatgggccaccaatggcgacccccaccgccaccgcactcacctgctcctgccgcccttcgtcgccctcctcatcatccgccgccttccgccggctgaacatcttcgcccccgtctcgggcgcccattctcctcctcgacgccgcctccgtctcgcgccattgcacgtcgtcgacgactccaagaacccccccgaggagaggtctgagacggataagatggtggacggcatggacttcggggagctctgcagcgacttcgagtgcataagcagcccctacgtggagtcgacggcgaggcaggtcgcgcgggacatcctggagctccgcgaggacaaccgcgcattcaactgctacgccgtctccgtcaagtacaaggacccactcaggacatttgttgggcgtgagaagtacaggaggccgttgtggatcaccaaggcgttggaaaaccctgtagtgacagtccaggaaatgtcaatgcagtcgacgagcaacctgaccatcagatgggcgttgagagggaagcctaagaacccgttgttcgcgagcgtcggaggagacgtcatcgtccgcgtcgagtcacggttcgtcctgaaccagataagcgggcaggtgctggagcaggccgagtcctgggacctctccgcctcgtccctccctgcccaggcctacttctggctgtcccgaagggtctactccgccgtggagtccgggaaggacgcgatcgaagccgccaagagcgcggcgtcgtctgggctgacgaccaagggagaccagaatctcgaggcctatccggatccttctgctgatcctacaaagttctttcagaggccggatgatgggttcagccaagacgtgtaccagatcggccttctcctggccgtgatctacttcattgtacagtttctgaaggcgaccctgtgaccggctgcagcctgtcgaagaatgtagcctgtgtgcagtatacatgtatgtaactatgcctagcaacattataaaatacgggcatatatcatcctgccatctgacctgcgacagatttgtgacctttcaccactgctgtcggtgatattagtttggcacgcaagttgccaatttacaggtgttaaacttgaca

SEQ ID NO: 151182 - DNA, 2286 bp, Zea Mays
cgcccccgcccccgctcgacgcgcccccgctcgcctccgcgcgacgcgccaccgcctgccccgctcgacgcgccaccgctcgcctccgcgcgacgcgccaccgctcgcctccgcgcgacgcgccaccgcctgccccgctcgacgcgccaccgctcgcctccgcgcgacgcgccaccgcctgccccgctcgacgcgccaccgctcgcctccgcgcgacgcgccaccgctcgtctccgcgcgacgcgccaccgctcgcctccgcgcgacgcgccaccgcctgccccgcccccacctgccccgcgccgtcgtggagagaagcgccgtcgtggtgatgacgggcgacggagagggagtcgagagctctgccgccggcgaacggcagggcgtgcccttcgctctaggcggcccgctgttcgtccccttcatggtgggccccatcaccaccataccagagttcatgtcctcagccctccacgagctccaggccttggaagacgaattaggagacaccagagacgaattcagcaatgagctttgtgtcgatgagctcaaggtgctctctgaggaggagctggtggagcgcgccctgcaggaggctatggaggtgtcctctactgataagcatctcaatttaatcactttgttttggattgcattttcgtttgaagctttgatgatttttgtgtctaggactcggattctggcactcaaccacaaccagaggatcaaacacttgatggaggcatgtcagcgaatccaacacctacaattcaggcccccacattaagcccattggctgaaagagagagctctggattgcaagatatggcggacgtattaaatgaaccacaaagcagcaatggcaagcctagaggcaaagaggcaaacagcagatgcaggaagggggaaactggaaccttcacactagattctccggttgtaggagagagccatggatcagctattgacatgtcaattgtaccatttgaaccggaaggtagtgagggaaatggaacgatgccttcaaatccatcagctgaaaatggtgcatctgaatcacctgttgatggtatgtcaattgttccacatgatccagagggaattaatggacaaacaacatgtaggaagggcaaaaagagaggcaggcattttgatagagaggttcgagcagagattttacagggaagctatcttactaaagcagataagtgggtacaaatcaaggccaagcaagacgaagacaaatttgcagcaaggctgcattctttcagtggcaattctgtgaagcccaaaggttcaaagtcatcatgtgagaaaattgaaatggcgagatctcttaatctaatcggtgcaccttggaagaacaaagctttaagatctgatgagcacagacctgtggtccgtccagaagtaattctctgtgttgaaatttatcagaagacatatgcctctgttaagtcccaggaacttcttttgctgggaagccaattccttactgatctgagggacaacatttattgtttgactgataaggtgatgaaggtggctgggcaacacgatcattctgggtattttcttattgaggacacgttctacaatgatacgagacatcgttctgccactgattacagtaagcctatactggattggcttgagaattccagtgatgaggtaacagagaagtgggatgccataacatctggtgttctgaagaagcgacaaaaggacttgctgcgcggtctgagtatttctaacgtgcctgaatttaaatctgaaaagatgcaaacgactcgtatctctgacctgcacttccggcccggtgctgggtacctctactgccaccaggggaactgcaagcacacgatcgtgataagggacatgaggttgattcacccagatgacacacagaaccaagcggagtaccctctccagacgttccagctgcagaggcgcttgcagaagtgctcggtgtgccagatctatcttgcgacgaaggtaacggtcgacgataagtgggctctgaacaacccctgctacttctgcatcaaatgctactacctcctccactacaaggaggacagcacactgctatatcctcacactgtatatgatttcatccaagagtgatgtttctctgtttttttttcttcgtagaaaagtagtctgtagtttatcctacactgtacattcttcactgcaagaaatccatgcgggcttcgtgcattttgctgagttattaaatggctatatggacctgggtcagacgtcagacttccaagttccaaa

SEQ ID NO: 151183 - DNA, 2200 bp, Zea Mays
cgcccccgcccccgctcgacgcgcccccgctcgcctccgcgcgacgcgccaccgcctgccccgctcgacgcgccaccgctcgcctccgcgcgacgcgccaccgctcgcctccgcgcgacgcgccaccgcctgccccgctcgacgcgccaccgctcgcctccgcgcgacgcgccaccgcctgccccgctcgacgcgccaccgctcgcctccgcgcgacgcgccaccgctcgtctccgcgcgacgcgccaccgctcgcctccgcgcgacgcgccaccgcctgccccgcccccacctgccccgcgccgtcgtggagagaagcgccgtcgtggtgatgacgggcgacggagagggagtcgagagctctgccgccggcgaacggcagggcgtgcccttcgctctaggcggcccgctgttcgtccccttcatggtgggccccatcaccaccataccagagttcatgtcctcagccctccacgagctccaggccttggaagacgaattaggagacaccagagacgaattcagcaatgagctttgtgtcgatgagctcaaggtgctctctgaggaggagctggtggagcgcgccctgcaggaggctatggaggactcggattctggcactcaaccacaaccagaggatcaaacacttgatggaggcatgtcagcgaatccaacacctacaattcaggcccccacattaagcccattggctgaaagagagagctctggattgcaagatatggcggacgtattaaatgaaccacaaagcagcaatggcaagcctagaggcaaagaggcaaacagcagatgcaggaagggggaaactggaaccttcacactagattctccggttgtaggagagagccatggatcagctattgacatgtcaattgtaccatttgaaccggaaggtagtgagggaaatggaacgatgccttcaaatccatcagctgaaaatggtgcatctgaatcacctgttgatggtatgtcaattgttccacatgatccagagggaattaatggacaaacaacatgtaggaagggcaaaaagagaggcaggcattttgatagagaggttcgagcagagattttacagggaagctatcttactaaagcagataagtgggtacaaatcaaggccaagcaagacgaagacaaatttgcagcaaggctgcattctttcagtggcaattctgtgaagcccaaaggttcaaagtcatcatgtgagaaaattgaaatggcgagatctcttaatctaatcggtgcaccttggaagaacaaagctttaagatctgatgagcacagacctgtggtccgtccagaagtaattctctgtgttgaaatttatcagaagacatatgcctctgttaagtcccaggaacttcttttgctgggaagccaattccttactgatctgagggacaacatttattgtttgactgataaggtgatgaaggtggctgggcaacacgatcattctgggtattttcttattgaggacacgttctacaatgatacgagacatcgttctgccactgattacagtaagcctatactggattggcttgagaattccagtgatgaggtaacagagaagtgggatgccataacatctggtgttctgaagaagcgacaaaaggacttgctgcgcggtctgagtatttctaacgtgcctgaatttaaatctgaaaagatgcaaacgactcgtatctctgacctgcacttccggcccggtgctgggtacctctactgccaccaggggaactgcaagcacacgatcgtgataagggacatgaggttgattcacccagatgacacacagaaccaagcggagtaccctctccagacgttccagctgcagaggcgcttgcagaagtgctcggtgtgccagatctatcttgcgacgaaggtaacggtcgacgataagtgggctctgaacaacccctgctacttctgcatcaaatgctactacctcctccactacaaggaggacagcacactgctatatcctcacactgtatatgatttcatccaagagtgatgtttctctgtttttttttcttcgtagaaaagtagtctgtagtttatcctacactgtacattcttcactgcaagaaatccatgcgggcttcgtgcattttgctgagttattaaatggctatatggacctgggtcagacgtcagacttccaagttccaaa

SEQ ID NO: 151184 - DNA, 2900 bp, Zea Mays
gccgagttgccgacgcaccgaaaaaagacagctgacgcgaatgcccaaacgttcggggggcgagcgggatttggaagctgcgcaacgcgcttcccaaatcccccaatcccgacgcccacccgaccccgtcgccagatctcgcgcctcgtccccggggctcgatcggataagcggcggtcggcgattcggggacggggtcatctcgcctaggcttgggcggggctgggctggtgggagccgccgagccggggagccatggcgtcggcgcaggcgccgtcctccgccgctgcgccgtcgcgcaaggaccatctcgaggccgggaagaagcggctcgagcagttccgcaagaagaaagcggcgaagaaggccactgcagctagtgcagagcaggcaaaagcgcctgcgcctgatgtagtggagaacccacctccaattgtcaatgctggtagcttgggagatggactggtgtctgatgtagacccaaaccaagcgagcacgtcttcggtaccattgtccgtatatgagaatggcccagccagtgcatccaggggtgcagaattcatgtcaaatggtcatcagcaagatgctgttagtgatggaggacgtaagttctatgggaacttgagcttctctgaccttgttaatggtcatcatgagaattggagaggcgacggagcccgtaaaaaggacgagcacagcccttacaaggatgtggaatcaaaatcaaaattaagtgcctttgggaatggcagcagtttaaatttaccttctactgaaaacatgccgagttggggaagaaattctttatcaagtcaagtacatgatactgaacaatctagttcatattcatccagcaccctttttggaaagtccaaaaatgcctatgctcaggattactccacaaacagtgatatctttggtcgtttgagagctacctccgaagactcttccaaagtggagcaatctatgtatgccagcactcgagattatggcaatgccttcaatagttcaatgattgccggtactgtagatcatgatacaaatgttggaataactcggacatctgcagattccacacctgttaattctgaaagacaggatccttttctgtcatctggttatccaactacatacactcgatcaaggccatcatttcttgatatgattggagtgcaaagagcccccctaacaactgaagcctcatatagggagcctgcaaaggctaatcaactatccagctattcaaattatcagagttcatttttgcagcaatcaaatcaacaatccactggaagtaatgctgcagatattccttttgcatcagaaagtcaggaatatagtcatgaaaaggggtcatatggcagctccactcctcctgatttcttacttcccaaagaagaaagaagtaaacaccatggtaatcaaacattccaaaacttcacaactcatgggaaggatgatgattttgcagcactagagcagctcattgaagatttgacaaaagagaagttttctttgcaacaaagtcttcagaaatctcaagaactagccgaaactttggcgacagataactctgcattaactgataagttcaaccaacaggcacatgtaatcagccagttgacatctgacatggagagattgcaggaagagattcaagctcaactgctggcgctggagtctatcaggaccgaatatgctaatgcacaactagaatgcagtgctgcagatgagagggcaaaagtacttgcagctgaagtcattctactagaagataagggtttgaggctgaggtcaagtgagctaaaacttgaaaaggaagttgaaggtttacattctgagatttcttcttacaggcgcaaagtttctagtctagaaaaggagcgtcagcatcttcaatctactgtcaaagctcttcaagaagaaaagaagctattgaggaacattcccgtgaatgagaaggcaacaactactgtagagaaaccttgggttgataaaagagacgcatcaactgcgacagaagatttagatattggggaaaacagctcttcagaaacgctaaccagcactgttgacacattggaagatgctggaatatctgttttgcgttccaacattatgtctgatttttcttccttagaagaggtctcatctagcattccagatgatcagcttagaatgattgacaacatcaattctttgatgtcagagttagtagtggagagagaagcgctgctgcgagcactgagaattgagtcatccaactgctccaagctgaaggagttgaataaggacctaacacaaaagctggagattcagacacagaggcttgaactattgacttctcaaaggatggctaacgagaatgccctggcaaaaccaattgacacacgctccatcaatgatgcaacaatgtatgcagatgaaggagatgaggttgttgaacgggtgcttggctggataatgaagctcttcccaggagggccaaagcggcgaaccagcaaacttctgtaatgaaaatagagctcctagtataccagatgtttctttcatttaaggcttgtttaggtgaaaggggttgttctaggagcaccaccaagtgtttagttcaaatttgaactaaatgttgaggaatttgttccaaatccccagcatccgaacatgcctttatatatatatatatatatttctttgcccggttttgctgatagcatggtgagaagctgtatattggagccattcaatgtaaccattatttatttttgacagaagataatgtaattccctggagtatggtgcgggcggcagcctgttttggcaaggaaaagaatagtcgcaaagaatagacccttttgtatccattgaagtatggaacaatttctttcattatacgagtcgaa

SEQ ID NO: 151185 - DNA, 2553 bp, Zea Mays
cggacaagcggacacaccatcggcggtgctgcgagcctgcgactgctcccgctccacaatttcaacctccagatctggccactcccactctcacacgcccagtcttctcaatcctcacatcctattggccacggcaactgccatcgccatggccgggaggcgtccggcaccggcggccctcctcctcctcgccgtagccttcgctcccatctcctccgccgttcgcccagtctccgatgcgcacagatccgctgccgaggagctcttcgccccctccgccgacggatcctttggcgatttggagagtacgtatgaggcagtgaaaacattccagatactcgggctggagaaatataatagtttatctgggaaggcgtgcaagtttgccgcggagaacctggcttccaccgattccaccgcgaaagatctgttccacgcagtccggatcagtggcgcgctgggatgtggcgttgatgccggcgtgtatgatggtgttgtggcgagactcaaggcagtgattaaggataccaattccctgttggaattctactattctgtgggaggtttgcttagcattaaggaacaaggccataatgttgttctgcctgatgcagaaagtacatttcatgccattaaggcacttagccaaagtgacgggagatggcgttatggcactaacagcgctgaatctagcacatttgctgctggtatcgcactagaagcattggcgggcgttgtttcactggcagatgcagaggttgatccatccatgatggtagtggttagaaatgacatcgttaagctgtttgacaccatcaagagttacgatgatgggaccttctactttgatgaaaagcatgttgatgctaccgaatacaagggtcctataatgacttctgcttcggtggtacgtggtgtcacctcttttgcagctgttgcttctggaaaattggatatccctggtgacaagatacttggcttggcaaaattcttccttggtattgggctcccaggtagctcaaaggattgctttaatcagattgactctttgtcagtcctggaggacaatagggtcttcgttcctttgatactctcacttcctaccaaagtattctcattgtctttgaaagatcagcttaaggttgaagttaccacagtgtttggatctgcagcacctttactcaaagtgaatcttgtgcaagtgttgggaactgactctaaagtcatcaccaatgggaacagggagcttcaatatgaccttgacaaaaatgtccattacttggacattgctccattggaaatagatgttgggaaatactcggtagtttttgagatttcacttcaggaacaagagcgtgagactgtttatgctactggagggaggaacactgaaagtgtatttgtcacaggactgatcaaagttgataaggcagaaataggaatatccgacaatgatgctgggaccgtggagtctgtccaaaagttagatcttctgaaagatacaaaggtgtctctttctgcaaaccacctacagaagctgcgtttatcttttcaattaactactccgcttgggctcacatttaaacctcaccaggtgttcttgaagttgaagcatgagagtaaggttgaacacttatttgtggtacctggctctgcaaggcaattcaaaattgttctcgacttcctagggttggtggagaaattttactacctctctggaagatatgaccttgagcttgccgttggtgatgctgcaatggaaaattcatttctacgacctcttggccatttggagttggacctaccagaggccccagaaaaagccccacgtcctcctgcacaagctgttgacccattctcaaaatttgggccgaaggcagagatattgcatatattccgtgccccagagaagaggccacccaaggaactctcgctcgcattcacgggtctcacgcttctgccttttatcggattcttgattgggctcgtgcgtcttggagtgaacgtgaagaacttcccgtccttgccgggaccggccgcatttgcctcagttttccatgctggaataggagcagtcttgctgctctacgttctcttctggctcaagttggaccttttcacaactctgaagtaccttggcttcctcggcatcttcctcgtgtttgtgggccataggaccctgtcctacctttcctcggcgtcagcaaaacagaagacggcatgagtggacagtgcaagcagagctttcccgatcatcaattcgttttttgaggtggccattccaggccactgggtgtctttgcttggtactctgaccgcaccctagtttttctttagctaacatgcattttgagggaggactcggtttatttcagttgtctttgacgaatactgatactaggacaagtaacaggacctcacatcacagtttctgaatagaatggatgtttaatcatagcatttatatgatcattcgatatacatcatccttaatcgaactgaaacgttatatgtacacagaaatgatgcaaagttaaagaatttttgagcgtg

SEQ ID NO: 151186 - DNA, 204 bp, Zea Mays
cttgtcttaatatccaacttacaccaccttctgatatctgatcccgacaacaggctaggaggcttaactgacggtttcgaccttgggatgaacatgctgttgggaggagacaaggaagatgatggcggttcaagcaagtcgcatggtaagagcggaaaccgaaagaagcacctgaagagcagcaagaagaggaagaggcattag

SEQ ID NO: 151187 - DNA, 318 bp, Zea Mays
atggaggtgtgtgacctgcgcaaggtgtgggaggtccatgagctcaagaccaagctcgacgcggccgccgcccaggctaccctcgatcgcgtcgccaggaccgtaggcgacctcatcaagagtggagcattcaggcaggtctacctcggcatggacctcgattccagtgagatcctcgctatcaaacagaggtatattgggacgacatgggaggaaaacacgctaaatattctactggaatttgttcctggaggctccatccaatcactacttaggaggcttggatcattcccagaggctgtgttgtctctggagtaa

SEQ ID NO: 151188 - DNA, 1467 bp, Zea Mays
atggccgcctctcgccgcctcgcgcggaagctgccgtctctgatctcccggtatgagcgcctcatctccccggagactgacgcgcctgaactcaccgaagcccccaccacctccgcatccatcccgtttgacccctcactccctgtccttccgctcgccgtctcccacctctcgccgcctaacccgctcccggtgctcccctccgctcacgcttcctcccccgcctctctctttcgtctcctccgccgagcccgccaccacccccgactcgtggcgctcgacctccacatcctgctggccgccgcagacgcgtcctccgctttccgacccgaccacagcctcacgtccctcgtcgccgcccgcctcgcggcttcccgccgcctcccttcgctccagcgcctcctggagctcgtcctcacccgcccctgcccctgtgccgacgactccatctttgcatgccccgagctcctccccaccttccgcaaggccatcgtcgccttcgccgcctccggcgacatcccctccgcatcgcatgccctcgcctctctccggcgcgtcgctgactccccactacccgccgagttctacaacatcatcctccaagctctctcccgcctccgtcgccacgacgatgccattcgcttctacggcgaaatgacctccgtctaccgcgtcgctccggatgtccacaccttcaacatactcatcagtagctcatgccgggtggaaggcgtagacgccgccatgcggtggtttggtgagatgcagcgccggagctgtgcaccgacggtcgttagtttcaacacacttatgcgtgggttcatcagagaaggcaggtataaggagggaacaaaggtggcacgcgagatgcttgagcttggggttgggctgtccgttgcgtccatggagattttgatcggtggattgtgccgtggtagcaaggctctagaggcggctgagctgtttgttgagtttttgggggatggggtggtgccagaagggtttgattgctttgaagtcgttgaggctctttgccgtggtgggaaggtggacagagcagtggaagcagtagacatggtattagagaggaataccaaatgctgtatgagtgcacctgctggcgccacagttttggagtgcctgatggaggcagggaagctggatgaggtttaccggttgatgtggagaatgattgatcaagggattgttccggattcaatttcttgtaactgcatctttgaggcgctttgcgaagctgggaggacagctgatgctaaccagctaagggtgttcgctaaggagaagggttttgaggctgacggtgaaacttatcgtatgctggtgcaaggatttgggaggcaggggaaaagaaaggaagggaaggctgtgttggatgaaatgcttgatttaggatttataccaaatattgcctcttataataggcttcttggtggcttgcataagtga

SEQ ID NO: 151189 - DNA, 2085 bp, Zea Mays
atgccccgccgcgcgctccgagctcaatcccccgcgcgtgaaaccccgagctcaatccgcccgccgacgtcgtcctcctcgacccgtaaggcttcctcgcccgctccgtccctgcccctgctacccgtttgcggaaatcctgagccgaccgactgcttgctttctctgactgagtgccgggtgcgcgtgtcattgagtgtctgtgcgtgcttccacgactcaggaaagtcccttcatacatgctatttaccctcttctgatgatgacaggaaagactacctggagatcccctgggctgagctgcgctccatggtcgaaccgtcctttgctgagagatcgttgatctaccacaaagattacctcagcgatgcgaccatcgtgacatcttctgcggtcaatatcactgaacacgttgtcctgactgttgacggccactctcttccatatgattatctcatcatagcgactggccatgctttggcttctcctgccagcagagctgaaaggataaatgaattccagagagataatgggaagatagagtcatcagaatctgtgctgataattgggggtggtccaactggtgttgaactggctggagagattgtggtagactacccagggaagagggtgacccttatccatagaggaccgcgtttactcgaattcattggagataaggcttcaaagaagtgccttgattggcttacttcgaagaaagtagacgtgctccttcagcaatcggttgacttgggctcattatcagacacagagaaggtgtacaagacatcagacggagaaacagtaacagctgattgccactttgtatgcattggaaagccactgagttcgtcgtggctacatgataccatcctaaaggaatccttggacagcaaggggagagtaatggtggaaaaggatttaagagtgaaaggttttaataacattttcgcgattggtgacatcacagatattcctactcctgcttctgcggcggaggccaagcaggagtcggtgttggagacggaggaaactaagcaggcggtggcagcagcagcagcagcggcaggaggtgtgcaggccatggcggtcaccgtagtgcgggacgttgagacgggtctggacacgagtaccaacgaccgggacggcgacaagccttcctggttcacacctaagagctccaattggtcgtactgggactcgattttgctgggtctgagaaattgggttatccggctgctcgggattaacttgagcttctggcgatgctcaagtgcggtgggatctgagcagaccagcgaagtctttagtacgaattcttctaggatttttgaacaaggcccgccctattttggggccatgggcagcaacactggtggtgccagtggtggcttctaccagcccttcaacagcaacttagctggtgcaggggctagcactggcatccaaaactttccaggtgtacggctgcgaggtctcccttttgattgcaatgacattgatatctgcaagttctttgtgggactggacatagtggactgcctcctggttaacaagaatggtcgcttcactggtgaggcttttgtggtcttcccaacagctatgcaaacagaatctggtctgcatcataacaggcagaacatgggccggaggtatgttgaggtgttcagatgtaagaagttggagtactaccgtgcaatagccaacgaggtgagccagggtggttactttgagtcggagtatcgccgctcctcacctcctctgaggccccctaagaagcctgctgaagacaagggcagcatggagtacactgaggtgctgaagctccatgggcttccctactctgcgaccactgaggacatcatcaagttcttcctggagtatgagctgacagaggagaatgtgcatattgcgatcagctcagatgggaaagctaccagtgaagcctttgttgagttcccaacagctgaagttgccaagacggcgatgtgcaaggataagatgactatcgggacgaggtatgtggagttgttcccgtctaccccagaggaggcgagcagggcgagaactcgaggcaagcattga

SEQ ID NO: 151190 - DNA, 1938 bp, Zea Mays
cgcgatctcgctcgtgatattccagccccgccgccgccgtccccgcccccatccgtgacaccccaccatcaccgccgcgccacgcgcgacaactccatcccccgtccgcacccctaccccgagcatcgcagcgcctcccgcacgaggtcgttgcgcttgtcgatctgatggcggcccatggcaaaggagcaggtagaaaatggccgatgccgaggatatccagcccctcgtctgcgacaacggaactggcatggtcaaggctgggttcgctggcgacgacgccccgagggccgtcttccccagcatcgtggggcgcccgcgccacattggtgtcatggtcgggatggggcagaaggacgcctacgtcggtgacgaggttctgcaaaccgatcatgacaaaaccaaaggtagctttgaagccgcagactctgtctccacaacctgaagcccaagcacctcatgatcctcaaacaccagagcaacaacaaagcgggactggtgtaggcgtgtagctggtgagccgggtagtgaaggaggtgtgtaccaggcctccagtgagcaaatgggcatggtgccggatgcatctgcggccggtggcaggaaggtcgagctggatggggacatgcgatggacatcacagaagacgaaatgaatcgcaaggggaaactaacatgcgagagaggaggagctagccacaaccaaagagcttggttcaatacttcaatggctagaataatgaacgatatgaagatcaggtagcattatatatgtcaataagaagcagaggagagaagcagcccacatcgcaggagacaaggacttcacttgtttggccagttcaggacttcaggatgttgtcgatgatgtccatgctatattccctcgcttcatgcttaacaatgagggagagactaagtgaggggctgaaggccgttggtgctgtcagaatgtttttttggagttttggtggatgatgctcagtgactgcaatgcaaaggatccttctgttttgtatattgaatgagattacatcactgtttttttcttagcgatatgttgagctcatgtgctcgtttatgttagtcgatctctggctcttgtagtaacttggaaagcttgctgctttttttaagggcatacatgcctgtgatgtgtggtcatgatcatttttttctcctgttattttagttgtcgtatcataaatgccatgtttgcattggtgttccaacatgtcaatattattgaataaatgtttgcattggcggcagcggggacgacgctaagtcgagcaatggcgaagcggcccgtggtggcagtaacggtggagagaagcagggggatgaatccaacggtggcgggatacttagcgctgtggcttccaggattggcgtggtcgtgtccagcgccaacggggaccgcagcggcagcgctgaggatggtgccaagacgagcgctggcgacgctggtcacggtagcaagggcgaggagaaggggcgtggtgtgaacggtggtagaatagtcgagcagatcatttccaatctgccctcagatgatcaggcgcctgatgccgatgaagcttccttgctcatcgccattatcgaagattagctccatgttccgaaggctctctaggtcgtcctcaacgccaggatcaaatcatcagctgagccggagactgaaaacaataaagaaaagcaagcagctggtcatagtaaacatcatgtagcgaggcttagcagattgcttttttttcccgttagaatcagtccacatgtcctcgacacgggctagatttgttctaggattatttttccagtagtaagccatgtatccatggacagtccacagcgcgacgtctaatgtaacatcatcaaggttcttttgactatcccataagaaaccattccttaagacaaccgatattgtgagttgataacc

SEQ ID NO: 151191 - DNA, 2042 bp, Zea Mays
cgcgatctcgctcgtgatattccagccccgccgccgccgtccccgcccccatccgtgacaccccaccatcaccgccgcgccacgcgcgacaactccatcccccgtccgcacccctaccccgagcatcgcagcgcctcccgcacgaggtcgttgcgcttgtcgatctgatggcggcccatggcaaaggagcaggtagaaaatggccgatgccgaggatatccagcccctcgtctgcgacaacggaactggcatggtcaaggctgggttcgctggcgacgacgccccgagggccgtcttccccagcatcgtggggcgcccgcgccacattggtgtcatggtcgggatggggcagaaggacgcctacgtcggtgacgaggtgcagtccaagaggggtatcctgaccctcaagtacctcagcttacacatcacattattccccacattacagcaatcagtgcaacaatcagagcatttatttaggttctgcaaaccgatcatgacaaaaccaaaggtagctttgaagccgcagactctgtctccacaacctgaagcccaagcacctcatgatcctcaaacaccagagcaacaacaaagcgggactggtgtaggcgtgtagctggtgagccgggtagtgaaggaggtgtgtaccaggcctccagtgagcaaatgggcatggtgccggatgcatctgcggccggtggcaggaaggtcgagctggatggggacatgcgatggacatcacagaagacgaaatgaatcgcaaggggaaactaacatgcgagagaggaggagctagccacaaccaaagagcttggttcaatacttcaatggctagaataatgaacgatatgaagatcaggtagcattatatatgtcaataagaagcagaggagagaagcagcccacatcgcaggagacaaggacttcacttgtttggccagttcaggacttcaggatgttgtcgatgatgtccatgctatattccctcgcttcatgcttaacaatgagggagagactaagtgaggggctgaaggccgttggtgctgtcagaatgtttttttggagttttggtggatgatgctcagtgactgcaatgcaaaggatccttctgttttgtatattgaatgagattacatcactgtttttttcttagcgatatgttgagctcatgtgctcgtttatgttagtcgatctctggctcttgtagtaacttggaaagcttgctgctttttttaagggcatacatgcctgtgatgtgtggtcatgatcatttttttctcctgttattttagttgtcgtatcataaatgccatgtttgcattggtgttccaacatgtcaatattattgaataaatgtttgcattggcggcagcggggacgacgctaagtcgagcaatggcgaagcggcccgtggtggcagtaacggtggagagaagcagggggatgaatccaacggtggcgggatacttagcgctgtggcttccaggattggcgtggtcgtgtccagcgccaacggggaccgcagcggcagcgctgaggatggtgccaagacgagcgctggcgacgctggtcacggtagcaagggcgaggagaaggggcgtggtgtgaacggtggtagaatagtcgagcagatcatttccaatctgccctcagatgatcaggcgcctgatgccgatgaagcttccttgctcatcgccattatcgaagattagctccatgttccgaaggctctctaggtcgtcctcaacgccaggatcaaatcatcagctgagccggagactgaaaacaataaagaaaagcaagcagctggtcatagtaaacatcatgtagcgaggcttagcagattgcttttttttcccgttagaatcagtccacatgtcctcgacacgggctagatttgttctaggattatttttccagtagtaagccatgtatccatggacagtccacagcgcgacgtctaatgtaacatcatcaaggttcttttgactatcccataagaaaccattccttaagacaaccgatattgtgagttgataacc

SEQ ID NO: 151192 - DNA, 2322 bp, Zea Mays
cgcgatctcgctcgtgatattccagccccgccgccgccgtccccgcccccatccgtgacaccccaccatcaccgccgcgccacgcgcgacaactccatcccccgtccgcacccctaccccgagcatcgcagcgcctcccgcacgaggtcgttgcgcttgtcgatctgatggcggcccatggcaaaggagcaggtagaaaatggccgatgccgaggatatccagcccctcgtctgcgacaacggaactggcatggtcaaggctgggttcgctggcgacgacgccccgagggccgtcttccccagcatcgtggggcgcccgcgccacattggtgtcatggtcgggatggggcagaaggacgcctacgtcggtgacgaggttctgcaaaccgatcatgacaaaaccaaaggtagctttgaagccgcagactctgtctccacaacctgaagcccaagcacctcatgatcctcaaacaccagagcaacaacaaagcgggactggtgtaggcgtgtagctggtgagccgggtagtgaaggaggtgtgtaccaggcctccagtgagcaaatgggcatggtgccggatgcatctgcggccggtggcaggaaggtcgagctggatggggacatgcgatggacatcacaggttggcccctccagtgatccatctcaaacactagccaggtttcctcctttgccaccctcctttggcagttctcttcctaacgtcgccgtaggttcccttccctgctgtttttgtctcccatagctcttaaaattttaagttccctgtttgcataaaggccataggaaaaacgttgaatcaaagcaaacttgatgcttaccgaaagcatgttcgatgagttactcagattcatggcccaggaattgaatctacacggtttaataactatttgcatggctctaaatgcttaattaggtttgctcatcgttcctcagtgctacttcatcttgattttctgctgagtatacaagggatgaatgaggctgctcatggtggacagaacagaagacgaaatgaatcgcaaggggaaactaacatgcgagagaggaggagctagccacaaccaaagagcttggttcaatacttcaatggctagaataatgaacgatatgaagatcaggtagcattatatatgtcaataagaagcagaggagagaagcagcccacatcgcaggagacaaggacttcacttgtttggccagttcaggacttcaggatgttgtcgatgatgtccatgctatattccctcgcttcatgcttaacaatgagggagagactaagtgaggggctgaaggccgttggtgctgtcagaatgtttttttggagttttggtggatgatgctcagtgactgcaatgcaaaggatccttctgttttgtatattgaatgagattacatcactgtttttttcttagcgatatgttgagctcatgtgctcgtttatgttagtcgatctctggctcttgtagtaacttggaaagcttgctgctttttttaagggcatacatgcctgtgatgtgtggtcatgatcatttttttctcctgttattttagttgtcgtatcataaatgccatgtttgcattggtgttccaacatgtcaatattattgaataaatgtttgcattggcggcagcggggacgacgctaagtcgagcaatggcgaagcggcccgtggtggcagtaacggtggagagaagcagggggatgaatccaacggtggcgggatacttagcgctgtggcttccaggattggcgtggtcgtgtccagcgccaacggggaccgcagcggcagcgctgaggatggtgccaagacgagcgctggcgacgctggtcacggtagcaagggcgaggagaaggggcgtggtgtgaacggtggtagaatagtcgagcagatcatttccaatctgccctcagatgatcaggcgcctgatgccgatgaagcttccttgctcatcgccattatcgaagattagctccatgttccgaaggctctctaggtcgtcctcaacgccaggatcaaatcatcagctgagccggagactgaaaacaataaagaaaagcaagcagctggtcatagtaaacatcatgtagcgaggcttagcagattgcttttttttcccgttagaatcagtccacatgtcctcgacacgggctagatttgttctaggattatttttccagtagtaagccatgtatccatggacagtccacagcgcgacgtctaatgtaacatcatcaaggttcttttgactatcccataagaaaccattccttaagacaaccgatattgtgagttgataacc

SEQ ID NO: 151193 - DNA, 847 bp, Zea Mays
cgcgatctcgctcgtgatattccagccccgccgccgccgtccccgcccccatccgtgacaccccaccatcaccgccgcgccacgcgcgacaactccatcccccgtccgcacccctaccccgagcatcgcagcgcctcccgcacgaggtcgttgcgcttgtcgatctgatggcggcccatggcaaaggagcaggtagaaaatggccgatgccgaggatatccagcccctcgtctgcgacaacggaactggcatggtcaaggctgggttcgctggcgacgacgccccgagggccgtcttccccagcatcgtggggcgcccgcgccacattggtgtcatggtcgggatggggcagaaggacgcctacgtcggtgacgaggtgcagtccaagaggggtatcctgaccctcaagtacctcagcttacacatcacattattccccacattacagcaatcagtgcaacaatcagagcatttatttaggtatcctgcaagtagtagtagtgttatgcgtgttctaatattctatgtcacaaatgtaaatcattttattaattgggcacaaaattatttaacattgctgcactgattgttgttcctgaatttaagaaaatctttatgtgatacaagttccagatgttgttgtggtgttaatgccaatatgtgaggcttttgggtcaacaccaccgcctcctaatcacaagtctaccattcatggtgaaatatctgtttatagagtcttctcttgtgcatttctttgtcttcttcgcttgtggaagttttatagacctcctcaagagtattgtattgctggtcgtggaggctcagtaaagctggaactgactctgga

SEQ ID NO: 151194 - DNA, 261 bp, Zea Mays
atggcgcggatgacaatcgctgatgagccaggcgcgcgggaggcctgcacgcgggactgcgggaggcactcaaccaatcagcggcatacatattacaggccgctagatacagttacaggaatgatcacaataacaagagcaaaaacagcacctagcatgatttttgtgaacccagtattcactgggtacagaacactcatgcagtcatgcttccgcatcattgcagtaatccacttctctttccccaacccatggctatga

SEQ ID NO: 151195 - DNA, 1877 bp, Zea Mays
agatcccattttctgtctggtttctttccccttggccaagcccaagcccaaacccgggaaccccgtctttaaaaagtacaccctcgactcgtcctccgcattccccgtttgccttgtttaccattcctccccaaaacacatcctgcgatcctcgaagcctccgccgagcatcgatcatgtcggcctactgcggcaagtacgcggatgagctcatcaagaatgctgcctacatcggcacccctggcaagggtatccttgctgctgatgagtcaactggcaccattggcaagcgcctttccagcatcaatgtcgagaacgtggaggagaaccggcgggctctccgtgagctcctgttctgctgccctggtgccctccagtacatcagcggtgtgatcctcttcgaggagaccctctaccagaagaccaaggatggcaagccttttgtcgatgtcctcaaggagggaggcgtcctccctggcatcaaggtcgacaagggcaccattgaggttgttggcaccgacaaggagaccaccacccagggccacgatgacctcggcaagcgctgcgctaagtactacgaggccggtgcccgctttgccaagtggcgtgctgttctcaagattggccccaacgagccgtcacagcttgccattgacctgaatgctcagggtctggctcgctacgccatcatctgccaggagaacggtctggtgccaattgttgagcctgagatccttgttgatggccctcatgacattgatcgctgcgcttacgtcactgagacagtccttgctgcctgctacaaggctctcaacgagcaccatgtcctcctggagggtaccctcctgaagcccaacatggtgactcctggctccgactctaagaaggtgacacctgaggtgatcgcccagtacaccgtccgtaccctccagaggaccgtccctgctgctgtgcctgctgttgtcttcctctccggtggacagagcgaggaggaggccaccctgaatctcaatgccatgaacaagctcagcaccaagaagccatgggccctgtccttctccttcggccgtgccctccaggcgagcaccctcaaggcctgggctggcaaggtggagaacgtggagaaggctagagcggccttcctcgccaggtgcaaggccaactccgaggctaccctcggcacctacaagggtgatgctgccgccgacaccgagagccttcacgtcaaggactacaagtactgagttgcttctctttgcgatcccgttgttttggaactcctgcctgcgagtaggttgctgagtgttgtttgcttgttagagcttttatattcggacatgaaaaaaacatgcttcctatgtggatgatggttatctttatattcgtatattaactactagtctctgttgttaatttccgtgtaatttgctcctcccagatgggagaatcgaacgccgcttttttgttctatctgatattctgtatgctggagtcctattctttgggggtgtttggtttatagggactaaactttagtccctccactttattccatttctgttcataaattgttaaataaggaaactaaaatatagttttagtttctatatttaataatttagggactaaaatggaataaaatggagggactaaacattagtccctataaaccaaacacccactttatattgacctttggtatcggcaaaagccatttatatgctgagtggagaccaacttgttggatcatattttgctgagacgagaaactcacgagcacccactttttaccacttttaattgagttggttccgaacataccgatttacctattagtttatagatattagattcttaattttttaaaaaacaagaag

SEQ ID NO: 151196 - DNA, 657 bp, Zea Mays
atgcagccgtctcatcttcaccatgtggtggccgccggggagaccacgtcgtcgggggctctgggttcttccattgccgtgcgccagatgccgaacagccgcctccctacctcgccctggaacctgcagcactgccagggcccagcccaagctgccagcgtggatctcgccctgaccgtgcgtttggggcaccgtcgtaagcctctgggcgcgctcaccagcgccggttacgtccgtcgcgccgtgaccaggtgtgaggatgagtgccgccgggtggattttggagcgcccgccaccactggctcgagatctcaccggtactgtgaactcggcgggattcgacgacgggcagtggtgcttgctgtggtgcggcgtgcgcgggggttgttcaaggcacgcgaacctcctcgacggactccattcaccaccgccggaccgctctttgtcatggtctggacgcgtcgccaccccaaacactggtacgtagccttcactgagttatgcgcttgcgtctcatcgggtagtagcaaatttggttctgcggggattcaagcgcagattatccagtggcgcggcggattggactcccccggcgaagtccggctgccagagttcgtggccgtcgtgtgtgcatctggcgaggaagaaaggggttga

SEQ ID NO: 151197 - DNA, 2106 bp, Zea Mays
aaaggccaccgaggcagcccaaatcaacccgttcgttcctcccttctcccccctctccccacatcgggcagcctcccccctctctctcaccgctcaggtcaggccaggcccggcgggagagagatccggcgagagacgcggcctcttgctcccctcaacccccttaaagaagcgcatagaagcttcggaaggtgcccctccgcggctcgaaggaggggaggggacgccgcggacaatgacggcgatggaagccgccgtcgacgctatgctcgccgccgcgagccgtgccttcacgagcacctttgccatcgccatccagatccaggggtgcatgatctgtttagtccttgctctcgggtgggcggctgcttcaattgtcagaaaaggggttataaagaacatgaggcgcaacattgtagatggaaatagttttgcatttctttgtgacaacatagatgagcttgagcactctgttcaggagaatttacctagagtctctgtagtcatgcctttgaagggctttggcgaacataatttgcaaaattggcgaactcagattacatcactttatggtgggccactggaattcttgtttatcgtcgagagcaaagatgatcctgcttatcatgctgtttcccgtttgatcacagagtacaaggacaatctggaggcaaaggtggtcgttgctgggttgtcaacaacctgtagccagaaaattcacaatcaattgatcggtgttgaaaagatgcacaaggataccaagtatgtattgtttcttgatgatgatgtgaggctgcatcctgggactatcggagctctcacaaaagaaatggagaagaatcctgagatatttatacaaactggatatccccttgacttaccttctggcagtttgggcagctattgcatatatgaataccacatgccttgttcgatgggatttgcaactggtgggaagactttcttcttgtggggtggctgtatgatgatgcatgctgatgattttaggcaagaccggtacggcattgtcagtggattaagagatggcggttactcagatgatatgacactcgctgcaatagcaggacagcacaaaaggctcatattttcaccacctgttgctgtgtttccacacccccttgccagtgatcttagcttctccagatactggaattacctcaggaaacaaacttttgttctcgagtcatatgtatcgaatgtaaactggatgatgaaccgtgcattatttacaagccattgctatctgtcatgggggtttgtctggccatacattatggctttggtccatgttttagctgctcttcgggcaccgtacagcaaagttgtaaaggaagcatccgattcatcttggggtttgttcctggtgggcctcttgttcacatgcactctgatcgagctcgtttcaatgtggaatttgactaaggtggaaattcaactgtgcaatatgctgtctcctgaaggaccgaaagtatctcttgattcatacaactgggggctcgtgttcatcgctgtgttggtagacaacttcctctatccagtatccgcaatccggtcgcatttctcccaatcaatcaactggtctggcatccggtactacttgagggacgggaaaataagcaagatcgagagagagaacagttcgaagtacactgatcttggagggaagcatctatacggcaagaggacataccctcctaacaaatcgttgctcggttacctgtcaagaactctagtgcaatggcatcagccaaagaaatatgacgtataggaaggtcgaccgggggagattcagccctcgattgtgtggggggcttcttgttgtacacctcttttggtttcaactttctttcatgcctctctctctctctctctcctctctgattgtttagtggttattaggttcattcatattaaattttgtggtgttcaatcggcgccaccactttgaaagggttgcattgcacctcatagttctttgtaacactagagatatgtaacgatttggctgaagaagtgaaatgttccatgttggtgagacggtctctttggttcatttgctgattcatcgactctttaagagttgac

SEQ ID NO: 151198 - DNA, 1378 bp, Zea Mays
aggcatacctttctcggccttttggctaagatcaagtgtagtatctgttcttatcagtttaatatctgatatgtgggccatgtgtccactttgatattaaatttattttttatatgggggagagtctactgccagtggcttgccattggaggctctcaagcgtcgtccagctattgcactgctggccggaccaggcgcacccccaacaaaaaaaaaattagctttttgtggtctggtttcttggttaaactcctcctgggcttaacttggcccaactaatactatttttaagtactgcttcaaagcccagtcaaagagcctgcaggtctgatggactcgaaaaggcctaccagcgatcatgatcccggctcacccagcgtagcaatcatccttcagagcgtgcacttgtgcagatgtaggcatttagccagctgccagccggaagtgtagacacagtccctcaggtggttgcaaatgtagacgatgcaagcagcgacatgtggacacgattcaaatcggtgatcaagcggtggcggacacaggatacacgcccacaatcccaggctgggagccctacccgcaccgcattgcattggcacacgagagcagagcatgcggctgccttccacctgctgcgctgattctgctgggtgctgccggcacatgcgccgtggatcgggcacgagccggcccggcggtgcgccgagagtgagagtggtgcgctaccggcatttctttagcaacatgagttagatctccttcaatttctctcaatccatctctaacccaacaatccaatccataagcaggttccctgtccaaccttttcagctcatcgcaagctgccagttttctatacatgcttggttgccgttagacagtaaacctgctgccgcctgtatttgtcaaattgcagcacgaaacagaacgtgttcgcaagtagagctcatcgcagctgaaagtctgaaatccaagcgaccgcaaatcgctctaccatttctggattcagtacacgacaagctggtggagaaacggggctatgccccactagattctgggcaaaataaaacaagagtttacagattatctttggaattctcaactgtattgctggtctcaagaatagggatatgtacagactacagagcaataacacaaggaattactgtctcacactgtcactggtattatatttacccgttcacagtaatctacaccatgtatttatctttatcatctgatatcctatcgtttgcaaatgccttgattcgattgaccgaatgcaagtccttgaaactcagcagttagactgaactggaaccttcgctgtgtcgcagtcgctcacgcggtcaagaaactgaaaaaagaaaaacgaaaa

SEQ ID NO: 151199 - DNA, 627 bp, Zea Mays
ttattttctggtatcccaatcgacatttttggtcccagacttttggttgtcctttcgactccaacagatctgcctgtacaggtccaaggctagctacaactagattaatctcaccaatgaaagaatatcttttttatgcctaagaagtgaagctacaacatgctagagctatcgtgctcgtggcaagacgaatccttcttctgtgatgatggaatccaacctgttcccccacattctaaggcatccttacggagttatgttgctagatggctaatgcaacggtatgcatcttactttgcaacgagaggctcaccttgaggctatccaagttggaccagtgcgtgcaactgaagctcacagcggcgctcgccgacctcgactcgtcgaacaattggtgggcaagtcagttgccacacttggggtcgacatcttccaagggttgctctctgtgttcaaggacaatgggctcaagcaggagatggtgacacagatccccatcaaatttatttaccgtctgcaacgtgtccttttttcatgaacactatgacatgttcttttgttatagctctttagagttttgagacacaatgtgcaaaaaacagaaatgatttctccatggcatataaa

SEQ ID NO: 151200 - DNA, 1787 bp, Zea Mays
ggtcctcgccagcctcagtaaaccactctcgcatgttggccgcgcgttgcctgcctccctcgctctctattgatggaagggcgcaattcagggaagcctctgcagccgccctgccattctcgccctcgcccaacactccgccctgccattctcgccctcgcccaacactccatcgatggaagggcatggttccagggattgcctccccagcagatcccacaatcctcgccccgcctgctcgccgccaccatcctcgccgccaccatccacaaggcaacaccatgcccccgctcctctaccatccacgccatcctcgccccacgcccgcccacacacctcgccatccttgccctcctccgcgcaggtcctcggtgccccttcccccacccctgtcgtccccgcatattcggatccggggttcgctcgggttgcctcgcctcgccggggacccaccatggcggtcagggagcatggtgggtgggggagatggggaggagcggaggaagcacgacgtcctctaggaagaagcacagccgcagccgcccgcaggctatggacgatgacatcgacagctcctgctccacccccgttcgccagcgcgccatccagccccggacgtccccacgccatcggccgcagatgcccgtgatgacgtcctcctcggtatcccctccagctgggtggctccgcaccgcatccggccccggccccggatccgacgcaactcacacatcgccaggcacccgcaaaatcccacccgacgccatcagcgcccgccatgccatgccccagaagcccgtccgcggttgctgctccaatcccttccgcggatgccgcataatcccaactgacgcagctccgcctcaagtcgtccttctcaggcggcgggtccggccgtccgggtgcgtcggcttgggcggcaccgacgggtcctccttggacaaagcgctaattggaatgcctactcgcactatgctgctgcctgagccttgaattatttccaggctatataaacatatctggtaaaaggccttgggattttttctgagataaggggatcttacgaagcggatccacaagctgcaatcaccaagtttttctggctgcaccggctacatctgcatatcgcgatgtttatatagacagctggtttactgcactagcaaatggttaatttagtaaagatggcaaagaagaatttaatgaagtttaacctataagcagacaatggcttccaatacatgtgcacataatttacagaagcaggaaacacattttcaactcgtgagaaccaagggcaccaaattaccagacgacataaagcgtacctttcctgatttgattacgcttgttgggagggagtcctaatagatagtttcagtaacccttcttttaacggtagatatagaagggactggactagagtttccattctgctttgctgctggaccgagctttgttggtgaagtcctcgctggtgttggtgaactcttataaagctttggtggtgatcttctttctgtagcagattcctttttgctctcctttggcatttgcttcttgactacagcacaaccatttggactaggtgaagcgccaccattcttgcgtgtgtccttgctaatttcttgctttgtggaaactaacttagtattacccagtagatgtattatttggcgttcctgaaagtaatcatcaaacattgttttttaacctttttagaaaatatggatagttttttttggttcaaaccgttgtttgtataaaattcataagagctcacaaat

SEQ ID NO: 151201 - DNA, 743 bp, Zea Mays
agtcattactatatcttctgtatcgtgatcttgctattcggaacccttgtaggaattcgcggaagcggattcattcttttgcttcgtcgagttgcttagtgggttcagagacaacttctgccagaaactggacaacagtgctgttggcattcgaggtacactagccaagttatcacagcttgtagcaaagtatgatggagaactccagcaacatctggaaataactacggaagttaatccccagttctacgcattcagatggataaccttactgctgacccaggaattcaacttcgccgacaccattcacatctgggacacactattaagtgatcctggtggcccccaggaaaccttgctcagaatatgctgcgcgatgctgatccttgtccggaagcgcctcctggccggcgacttcacctccaacctcaagctcctgcagaattacccaccgacgaacatcagccacctcctctacgtcgccaacaagctgcactgaaccggtctcttctgcgctgctgcgtttgttcagccaaaactgtggcccgagtcccggcattgcaacagaaacacaccgttgcggccatggcttgtgtatcatgtccattaatctgactccctgcattttgtaacttgtattgtatgttcacctgacaaggagttctagtatcccagttaatcaatgtggcatgattatagtgtctaagcatgtctgctgagcgctgaacattctccactttttt

SEQ ID NO: 151202 - DNA, 1363 bp, Zea Mays
tcggatgcatatctggccaacctgcacgtttctgaagcgacaaccacacgtccacacggacgggtgcatcccgacgcccaaatccatggcgagctcgccgcgatctcctccgccggcgcctacgccggaattcgagatctctcggcagtcccgcctctttgtggcgctgtccaagaaggtgatagatctcgatgaactgaggatgctggcggctcagggagtcccagacgcggcgggcgtccgagcaactgtatggaagctgctactgggctatctgcccaatgaccgctcgctgtgggagcaggagctggcaaagaagagagggcagtacgctgctttcaaagatgagttccttacaaaccctgtagaaagagcgcaacaggtgccaacagaaggccaccacaacgtaagtgcagagcatgttgacaatggcttcctgcacaggtcagaggtaacccgagaggagcaccctttaagccttgggaagaccagtgcttggaatcagttttttgagtactcagagattatggagcagattgaccgcgatgtaaagcgcacccaccctgacatgcagttcttctgcggcgactcgtcttttgcaaagtccaatcaggaatctttgaaaaatgtactgttaatctttgccaagctgaatgctggaataagatatgtacaagggatgaatgaagttttggcacccctcttctttgtatttcggagtgatccggatgataaaaatgctgtatggagaattcgcggaagcggattcattcttttgcttcgtcgagttgcttagtgggttcagagacaacttctgccagaaactggacaacagtgctgttggcattcgaggttaatccccagttctacgcattcagatggataaccttactgctgacccaggaattcaacttcgccgacaccattcacatctgggacacactattaagtgatcctggtggcccccaggaaaccttgctcagaatatgctgcgcgatgctgatccttgtccggaagcgcctcctggccggcgacttcacctccaacctcaagctcctgcagaattacccaccgacgaacatcagccacctcctctacgtcgccaacaagctgcactgaaccggtctcttctgcgctgctgcgtttgttcagccaaaactgtggcccgagtcccggcattgcaacagaaacacaccgttgcggccatggcttgtgtatcatgtccattaatctgactccctgcattttgtaacttgtattgtatgttcacctgacaaggagttctagtatcccagttaatcaatgtggcatgattatagtgtctaagcatgtctgctgagcgctgaacattctccactttttt

SEQ ID NO: 151203 - DNA, 1531 bp, Zea Mays
tcggatgcatatctggccaacctgcacgtttctgaagcgacaaccacacgtccacacggacgggtgcatcccgacgcccaaatccatggcgagctcgccgcgatctcctccgccggcgcctacgccggaattcgagatctctcggcagtcccgcctctttgtggcggtaaggcctcctgctgtttgcgtgttgcttggttttggtttgttggcttctaactcaggggtcattgagggtgatgtacccttctagctgtccaagaaggtgatagatctcgatgaactgaggatgctggcggctcagggagtcccagacgcggcgggcgtccgagcaactgtatggaagctgctactgggctatctgcccaatgaccgctcgctgtgggagcaggagctggcaaagaagagagggcagtacgctgctttcaaagatgagttccttacaaaccctgtaggtagaaagagcgcaacaggtgccaacagaaggccaccacaacgtaagtgcagagcatgttgacaatggcttcctgcacaggtcagaggtaacccgagaggagcaccctttaagccttgggaagaccagtgcttggaatcagttttttgagtactcagagattatggagcagattgaccgcgatgtaaagcgcacccaccctgacatgcagttcttctgcggcgactcgtcttttgcaaagtccaatcaggaatctttgaaaaatgtactgttaatctttgccaagctgaatgctggaataagatatgtacaagggatgaatgaagttttggcacccctcttctttgtatttcggagtgatccggatgataaaaatgctgtatggagaattcgcggaagcggattcattcttttgcttcgtcgagttgcttagtgggttcagagacaacttctgccagaaactggacaacagtgctgttggcattcgaggtacactagccaagttatcacagcttgtagcaaagtatgatggagaactccagcaacatctggaaataactacggaagttaatccccagttctacgcattcagatggataaccttactgctgacccaggaattcaacttcgccgacaccattcacatctgggacacactattaagtgatcctggtggcccccaggaaaccttgctcagaatatgctgcgcgatgctgatccttgtccggaagcgcctcctggccggcgacttcacctccaacctcaagctcctgcagaattacccaccgacgaacatcagccacctcctctacgtcgccaacaagctgcactgaaccggtctcttctgcgctgctgcgtttgttcagccaaaactgtggcccgagtcccggcattgcaacagaaacacaccgttgcggccatggcttgtgtatcatgtccattaatctgactccctgcattttgtaacttgtattgtatgttcacctgacaaggagttctagtatcccagttaatcaatgtggcatgattatagtgtctaagcatgtctgctgagcgctgaacattctccactttttt

SEQ ID NO: 151204 - DNA, 1538 bp, Zea Mays
gtgaaagatgaactatgcgaaccgggtcctacgttagcacgaaaagtcagcggacgatctggacggtggattattacaggggccgcaagtcgacggttcagagattcggatgcatatctggccaacctgcacgtttctgaagcgacaaccacacgtccacacggacgggtgcatcccgacgcccaaatccatggcgagctcgccgcgatctcctccgccggcgcctacgccggaattcgagatctctcggcagtcccgcctctttgtggcgctgtccaagaaggtgatagatctcgatgaactgaggatgctggcggctcagggagtcccagacgcggcgggcgtccgagcaactgtatggaagctgctactgggctatctgcccaatgaccgctcgctgtgggagcaggagctggcaaagaagagagggcagtacgctgctttcaaagatgagttccttacaaaccctgtagaaagagcgcaacaggtgccaacagaaggccaccacaacgtaagtgcagagcatgttgacaatggcttcctgcacaggtcagaggtaacccgagaggagcaccctttaagccttgggaagaccagtgcttggaatcagttttttgagtactcagagattatggagcagattgaccgcgatgtaaagcgcacccaccctgacatgcagttcttctgcggcgactcgtcttttgcaaagtccaatcaggaatctttgaaaaatgtactgttaatctttgccaagctgaatgctggaataagatatgtacaagggatgaatgaagttttggcacccctcttctttgtatttcggagtgatccggatgataaaaatgctgaattcgcggaagcggattcattcttttgcttcgtcgagttgcttagtgggttcagagacaacttctgccagaaactggacaacagtgctgttggcattcgaggtacactagccaagttatcacagcttgtagcaaagtatgatggagaactccagcaacatctggaaataactacggaagttaatccccagttctacgcattcagatggataaccttactgctgacccaggaattcaacttcgccgacaccattcacatctgggacacactattaagtgatcctggtggcccccaggaaaccttgctcagaatatgctgcgcgatgctgatccttgtccggaagcgcctcctggccggcgacttcacctccaacctcaagctcctgcagaattacccaccgacgaacatcagccacctcctctacgtcgccaacaagctgcactgaaccggtctcttctgcgctgctgcgtttgttcagccaaaactgtggcccgagtcccggcattgcaacagaaacacaccgttgcggccatggcttgtgtatcatgtccattaatctgactccctgcattttgtaacttgtattgtatgttcacctgacaaggagttctagtatcccagttaatcaatgtggcatgattatagtgtctaagcatgtctgctgagcgctgaacattctccactttttt

SEQ ID NO: 151205 - DNA, 784 bp, Zea Mays
aactcctctgaggccaaaagagaatcccggcccgtgtccagaagacgcctcagccaccgcaaaatccccaaatccgcggcggagaggagagagccggagagaggggcgcagccagagagatcggagaaggggaagaagatggtgcgggtggcgacctacttcgcgatgaccttcggggcgttcctcttctggcagtccatggacagggtccacgtctggatcgcccttcaccaggacgagaagaaagaaaggatggaaagggagctggagataaagagaatgcaggcagagttactggcccaagctaaagagaatgaatcatgattgtcatttgtccaatggtttcaggcagttcctttatcgtatttcctctgctgtattttccatgcaatatcttgactgatgtatgctcatgctcagcacctccaataaagcgagacatgctatagcattgttgaatgcaagtgggtatgcagtttgcagtatgcttatgttgaattgatgtaacttagccgaactgaaagaggctgccccagcttgattggaacagaggaatttgctgctgtttttgttcttattacggaacaacacaagtcaactctaaaaaaaaattgtttatgagtctggttataaggtgttgttttgtactgagatttcattgttcacttgaagaaacctctgtcggaggagcagaatgcttggtgctgtttaagttggctcgtgttatattgctcatgttctaagtatacatatccaacatgtcagtcacttttctgttgtgcca

SEQ ID NO: 151206 - DNA, 249 bp, Zea Mays
attgataaggtgaagattctgggtagccatgcctactgcgtattgggcacgcgcacttggagttggaaggagagttcagagttaccgatgagttggaactggttggtatcatcaccttcctggacctggaggctgttgtccctcagtccctggctccctgcagacgtcaacgcagccagtgatgaagccattgaaccttggggtgcattggtagagcattgcacaggccaggctctcacgaatggatcc

SEQ ID NO: 151207 - DNA, 719 bp, Zea Mays
atgccacaatgttcgtctccccacgtgaagagggtcaacccaggagagggactcctggcggccggcgtggagagcgaaggtgcaagtctgtatgtaggcattgaggagatcgaatccaaaggcacaaacatcgatgaggagggtggggcactccatgaagaacacccggtggtggctagagttggggaggaagaagctgtgatagtgagacgtggggagaagaagcgctgttccgctgaaagccctaagattctggatgctctggtgtctggaggtgttcctgctgctgcagaagctagcaagctaactttcatggctgcaaagatatgtaacaacatggcaatggcaatcagcatgcttggggtctccgaggcctttgctcttggccagaaccttgggatcaaagcaaccactgtcacagacattttcaactgttcaagcgctcgctgctggagtagcgatacatataatccagttcctggagttatggaaggtgtaccatcatcaaggaactatagtggtggtttcacttccaaactaatggtacaaactgacatagaattttccttgatcaaattattctgtaaattattaagtagattacttctcctaaggatgagttgatgtgtctaaaaagataatcttatcaataaaactgagttgcttgggaacaatgtttgcttgtattaaatacctccgtttcaaattgtaagtccttc

SEQ ID NO: 151208 - DNA, 792 bp, Zea Mays
atggccatggagaccagcagtgcgcccgccgccgccaccgaggccggctggtacgtgcttggaccgaaccaggagggtgtcggaccctatgcgattgttgagcttcgaggtggttgtttccttcactctcctagcaattcaacgcgtttcaaggctgctaggtcagggcatggggcctctatcccgcaattatcttctcagagcagcgcacctcagtactcctcttatggtggatatcagggtacaagcaaaaagattgaaattccaaatggaagggttggtgttatcattggaaaagccggggaaactattaggtatatccaacttcaatcaggagcaaagattcaagtcacaagagaccatgaagctgaacctggtgcactgacaaggcaagttgagctttctggcaaacctgagcagctaagcaaagctgaacagttgatcaaagaagttctggcagaggtattactcattatgctcacagccttttgttttgttctggtgatacttcaactgatcagtgaggttaccagtgaggttaccattcgtgctggtgatacttcaactgaaagaactgtgcatattgatgatactcaagaacaaattgaagctgcaaagcaactgatcagtgaggttaccacatacaaggagaagggcaaggtccccgacaggttcaggaagctgcagcacgcgcaccatggcagagccgagttcaccggctgcgcgtcgcccaccggattgctggattccagggacccctacgatctccaacaacctcagatcggtgagtga

SEQ ID NO: 151209 - DNA, 258 bp, Zea Mays
atggcaacaactgcatccagccatggcaccctatttatttcaattactgttgatagaagacaccaggggtatattttttccatttatctgctaacatttctctcaagggtccaatttcttcgccaattatccactgctcttttcactgtagccctggcctctaagatctccgcgtctgtgaatttgtgctccacaattcctattggacccggctggagaacgtggattacagtctcaacatcttgctccacctgcctg

SEQ ID NO: 151210 - DNA, 1648 bp, Zea Mays
atggcaacgacggaggccaccacgctgacggcgctgctcaaggaggcggcggccgccttcccgacccaccgcgccgttgccgtaccgggcaggctggagctcacgcacgccgccctcgacgctctcgtcgacgcggcggccgcacgactcgccgccgacgctggagttctcccgggccacgtcgtcgcgctctccttccccaacaccgtcgaggaggagttcgagttctacctctccgactcggaggcgcgcctcctcgtcaccaacgcggagggcaatgcggcggcgcaggcgaccgctgccaagctcgggctcgcccacgccgccgccagcctccacgacgcggccggtcctgtccacctcgccggcctcccggtcccggctctggagaacgggtctcatggcggcggcgcggcgggctctctctcccccaacgacccgtcggacgtggccctgttcctgcacacctccggcacgacgagccggcccaagggcgtgccgctgaagcagcgcaacctggcggcgtcggtgcagaacatccggtccgtgtatcgcctcgccgagacggacgccacggttgtggtgctgccgctgttccacgtgcacgggctcctctgcgccctgctgagctcgctggcttcgggcgcgtccgtggtgctgccggcggcggggcggttctcggcgtccacgttctgggccgacatgcgggcgtcgggcgccacgtggtacacggcggtgccgacgatccaccagatcatcctggaccggcacgcgtcgcggccggaggcgtatccggcgctccggttcatccgcagctgcagcgcgtcgctggcgccggcgatcctggagcggctggaggcggcgttcggcgcgtcggtgctggaggcgtacgcgatgacggaggcgtcgcacctgatgacgtcaaacccgctgccggaggacgggccacggaagcccgggtcggtggggcgcgcggtggggcaggagctggcggtgctggacgaggaggggcggctcgtggcggcggggagccccggggaggtgtgcgtccgcggggacaacgtgacggcgggttacaagggaaacccggaggcgaacgaggcggcgttccggttcgggtggttccacacgggggacatcggcgtggtggacgaccaagggtacgtccggctggtggggcgcatcaaggtcaaggagctcatcaaccgcggtggggagaagatctccccgatcgaggtggacgccgtgctgctgggcctccccggcgtggcgcaggcggtgtcgttcggggtgcctgacgacaagtacggagaggagatcaactgcgcgttgatcccgcgggacgggtcggcgctgcgggaggaggaggtgctggcgcactgtcggcggaacctggcgtccttcaaggtgcccaagaaggtgttcatcacggacgacctgcccaagacagccaccggaaagatccagcgccgcatcgtggcgcagcacttcgtgcagccgaccagtgcctgatcgttgatcctagtgcttggctgcttgccaagtcatgggtcgacggattggggttttgctacactacctagcattttgccgttgttcccgcattgcgaagtggacatggcctgaatgggcctccctgaataaacaa

SEQ ID NO: 151211 - DNA, 1881 bp, Zea Mays
gctctagtgcagctagctgctgctggctcactctgatctcaagttacagtcgcatagctagcagagccagcagctacctcgtcaatttcattcggcaaccagggcagaaatactcgtggataagagctcagagcccaagccaatttcgggtctccagcagctgctggagccatggaggtggaggaggccgtggagtcacactcacacggcggcgccgaccgccgacaacgcaagaaggaccgccgcgtcttctgggcctgcgtcttcatcctcgcgaacaactgcttccagttcatcgcctacttcggcgtgtcgacgaacctggtgaactacctcaaggaccggctgcacgagggcagcaaagccgccgcgaacggcgtcaccaactggatgggcacgtgcgccatcacgccgctcgtcgccgccttcctcgccgacgccttcctcggcagatactggaccgtcgcgctcttcctggccatctccgtcgtggcctacgtggtgctcgcggtgagcgcggcggcggcggcgcaggggagcgccggcttctacgcggggctgtacctgctggcgctgggcagcgcgttgcagccggtgctgtcgtcgttcggcgcggaccagttcgacttcgacgacgacgacgacgaccacgacgacgagcgcgggcgccggcagagctccttcttcaactggttctacctctccatcaacgtcggctcgctggtgggcggaaccgtgctggtgtgggtgcagtccagcgtcggctgggggctcgggtacgccatacccgtgctcttcagcgtgctggccgtcgcggcgttcctggccggcaccgccacgtaccgccgccaccagccgcccgccggcagcccgttcactagggtcgcgcaggtcgtcgtcgccgcggtcaggaagtgcggcgtcgaggttccggaggacgcgtcggcgctgcacgagtgcgaggacgccgacggcatgtctgcgatacagggcagccgccggctcgcgcacaccgatcagttcaggttcctggacaaggccgcggtggagacggcggacgacaagtcgcggcggcggccggcgagcgcgtggcgcctgtgcacggtgacgcaggtggaggagcttaagcgcatgctgcggctgctgccggtgtgggcgagcggcatcgtcttcgcggcggcgtacacgcagatgaccaccaccttcgtcctgcagggcgacacgctggacccgcacgtgggcggcggattccgcgtgccggccgccgcgctctccgtcttcgacaccctcagcgtcatgctgtgggtgccgctctacgaccgcctcgtggtcccgctagcgcgccgcgccacgggccaccgccgcggcttcacgcagctggcgcgcatgggcgccggcctcctcgtgctcgccgctgccatgctcgccgcgggggcgctggaggtggcgcggcgccgcgtcgtcgcgcgccacggcgtgtactacgacacccacacgggcgccggcggggacgcccgttacctgccgctctccatcttctggcaggtgccgcagtacgtggtggtgggcgcgtccgaggtgttcacgctcatcggccagatcgagttcttctacgaccaggcgcccgacgccgtgcggagcctctgctcgggcctctccatcacgtccttcgcgctagggaactacgtcagctccgcgctcgtcgccgtcgtcgcgcgcgccaccgcgcgggccggccgggatgatgggtggattcccgacgacatcaaccgcgcgcacctcgactacttcttctggctgctcgccatgctctgcgtcggaaacttcggcgtctacctgcttatcgcacgctggtacacgtacaagaagaccgtggattag

SEQ ID NO: 151212 - DNA, 115 bp, Zea Mays
accctctgctttcttcatcttgctgtggatttcctctactattggttttagccttgtaggtttttttggccttcctttctgtttcactgcttcagggttcttcagaatttcaact

SEQ ID NO: 151213 - DNA, 314 bp, Zea Mays
tttgacttcatgagacttattttagaaacttgatctcacaaactttctcttatttggtctctgtatgatggaattatgtcattttataatctctgttcattcagtcaatcgttgtgaactctcttctaatcgctcactttattggtcgtgttgtattaagacatatttgcatggagtaaacaacaacatcagttagccaaatcaaaaaatatattatacagagagcggagacaatcaataaaaaatcttgaatttttttatggatagtttacgtgggtattgttgtaagccgtcgcaacgcacgggcaaccgac

SEQ ID NO: 151214 - DNA, 1946 bp, Zea Mays
ctctccctctccgctccccattgccgcattgctctccctcggctcggtccctctccggctctccctcacggcctcgcccactgcgccttcgaggagctccgaatcccgatcgcctcggtccccgcgagctcacatggtgggggcgcgcaccagaggctagggttcccagttcccatcattctcctgctgattaaaaccgtggggttttggagagcctgaggctgtggcggcggcaggaatgaacggggaggtggaatgcagcgtgtgccatgcgaaggtgccggtgccgccgccggtgtcgaaagcgtacgacagccaccggagcactgtgtcgtcgcggcaacgtgcgctaaacgtgctcctcgtctccggcgactgcgtccttgccggcctccagcctatattagtgtacatctcaaaagtggatgggaaattcaaatttagcccaatcagcgtgaatttcttgacagagattacaaaaattatgtttaccattgtaatgctattcatccaggctagacgtctaaaggtgggagacaagccactttttacagtttcaatatttatgcaggctgctcgcaataatgttcttctttcagtacctgcttttctctatgctatcaacaactatttgaagttcataatgcagttatattttaatcctgctagcgtgaaaatgctgagtaatctcaaggttctggtaatcgcagtgcttcttaagatgataatgaggaggcgattttccgtaatccagtgggaggcccttgcccttttgttaatcggaatatctgttaatcagctgaaatcattgccagaaggttctagtgtgctaggtcttcctgttgcagctggagcctacctatatacattgttttttgtaacagttcccgcattggcttcagtttacaacgaaaaggctcttaaaagccagtttgataccagtatttaccttcagaacttgtttctgtatggttatggtgcgatatttaactttattgggcttgttgtcactgctatcatccaagggcccagtagttttaacattctagaaggccactcaaaggccacgatgtttcttatctgcaacaatgctgcacagggcatattatcatcatttttcttcaagtatgcagatacaattttgaagaagtactcatcaacaattgcgactatcttcaccggagtagcctctgctgtgctgtttggccacacactgacgataaattttgttcttggaatttcaatagtaatcatatctatgcatcagtatctttctaaccaaattaaggacgaagtgcctagcagcaaagttgaaatggctgaagctcatgatcacagaaaagaacctagttatgtcaacgtgcctgattcaggggcaagtgagtctaaacaccgccatggatctgacgagaggcagccacttcttcccgtatgattttgtagaagaggcgcactgtttcctcaacagagcagcatgtaaagagagtatttttagcgggtatttgacctaattgtctctgaagcaacattggtgccatgctgttggcggggtaaagtatatgcatattcggcggcagtgacgagcttcgtgaagtacactaatagagtaatggtctttggatgaatgagtcgatacctttagcctaatgggtggtaaaactagtgtgataagatcagcgaggaataaagtcaccaccattttttcctgtcttgtgagttggtgagttgatattgatacagccatcagccgtggttctactctctctctctctttctcgcggcaccatgtaaatagaaatatcagttcatttctgatggcgcgtgccacggtgccaaccagagattttattcttgtatgtgcgtgttgcatgagagatactacggcgtgtttactgatcactgagctttgcatgtcttctgaattacagcaaaacgcctaattggta

SEQ ID NO: 151215 - DNA, 1949 bp, Zea Mays
ctctccctctccgctccccattgccgcattgctctccctcggctcggtccctctccggctctccctcacggcctcgcccactgcgccttcgaggagctccgaatcccgatcgcctcggtccccgcgagctcacatggtgggggcgcgcaccagaggctagggttcccagttcccatcattctcctgctgattaaaaccgtggggttttggagagcctgaggctgtggcggcggcaggaatgaacggggaggtggaatgcagcgtgtgccatgcgaaggtgccggtgccgccgccggtgtcgaaagcgtacgacagccaccggagcactgtgtcgtcgcggcaacgtgcgctaaacgtgctcctcgtctccggcgactgcgtccttgccggcctccagcctatattagtgtacatctcaaaagtggatgggaaattcaaatttagcccaatcagcgtgaatttcttgacagagattacaaaaattatgtttaccattgtaatgctattcatccaggctagacgtctaaaggtgggagacaagccactttttacagtttcaatatttatgcaggctgctcgcaataatgttcttctttcagtacctgcttttctctatgctatcaacaactatttgaagttcataatgcagttatattttaatcctgctagcgtgaaaatgctgagtaatctcaaggttctggtaatcgcagtgcttcttaagatgataatgaggaggcgattttccgtaatccagtgggaggcccttgcccttttgttaatcggaatatctgttaatcagctgaaatcattgccagaaggttctagtgtgctaggtcttcctgttgcagctggagcctacctatatacattgttttttgtaacagttcccgcattggcttcagtttacaacgaaaaggctcttaaaagccagtttgataccagtatttaccttcagaacttgtttctgtatggttatggtgcgatatttaactttattgggcttgttgtcactgctatcatccaagggcccagtagttttaacattctagaaggccactcaaaggccacgatgtttcttatctgcaacaatgctgcacagggcatattatcatcatttttcttcaagtatgcagatacaattttgaagaagtactcatcaacaattgcgactatcttcaccggagtagcctctgctgtgctgtttggccacacactgacgataaattttgttcttggaatttcaatagtaatcatatctatgcatcagtatctttctaaccaaattaaggacgaagtgcctagcagcaaagttgaaatggctgaagctcatgatcacagcagaaaagaacctagttatgtcaacgtgcctgattcaggggcaagtgagtctaaacaccgccatggatctgacgagaggcagccacttcttcccgtatgattttgtagaagaggcgcactgtttcctcaacagagcagcatgtaaagagagtatttttagcgggtatttgacctaattgtctctgaagcaacattggtgccatgctgttggcggggtaaagtatatgcatattcggcggcagtgacgagcttcgtgaagtacactaatagagtaatggtctttggatgaatgagtcgatacctttagcctaatgggtggtaaaactagtgtgataagatcagcgaggaataaagtcaccaccattttttcctgtcttgtgagttggtgagttgatattgatacagccatcagccgtggttctactctctctctctctttctcgcggcaccatgtaaatagaaatatcagttcatttctgatggcgcgtgccacggtgccaaccagagattttattcttgtatgtgcgtgttgcatgagagatactacggcgtgtttactgatcactgagctttgcatgtcttctgaattacagcaaaacgcctaattggta

SEQ ID NO: 151216 - DNA, 958 bp, Zea Mays
gaacctgagaacctgacgcggcatcatgcaaacaaaaccgagcagagagatggcggccgtctcctccaccgccaccgcctcctcgcagccggagctgccgacctccaccgcccaccctaccgccaatgccgccgccaacagcaggctggcgcggcggccgcggcgaaacaacagcttcgtgatggtggaggaggcgtcctatgccagcggcggcggcgacggcggggtggccaggacgaagagcctcacggaggacgacctggaggagctcaagggctgcgtcgacctcggcttcggcttcgcgtacagcgagatacccgagctctgcgggacgctgcccgcgctcgagctctgctactccatgacccggaggttcctcgacgagcagagggcgccgggacaggatgaggaggaggaggagcctgcgtcgccgccgctcccaaattggaggatctttgcaccgggtgacgatccggaggaagtgaaggccaggttgaagtattgggctcaagcagtagcatgcactgtcaagctctgcagctgaaccagaggctggttttaactgctgtctgttctgttagcgtatgctgcgacgggccgaaccgagggcctgttggaggttgaacagtctggttgtatgtgttttgggattcgggggagcgaagaactctcttcataggtttcttctctggctgcttctgcaagaacttgggagggcggaggagggatcatgatccgggacagcgacagaccccgattgagatccatggtttgagggttctacgccgcaagcctttgcaaaatgcaggacctgctgtttcgttgttaataataataatgatgatgatcactaggtgttctaactgtcgtagtcctgtaataattaatgacgcactgaatggaagtttcgagttttggctactaatccaagggttgattagctccaatttttgatcta

SEQ ID NO: 151217 - DNA, 4110 bp, Zea Mays
acagcgactgcggtgaggcgaccgttgcggtgccgtgcattaaaccaccctgccccccctgtcccccgcccccctctgcccccgctcctcgccgtcggcacccgcacccgcgcggcacggcggcgtccggggtccggtgggctgggctgagtcgacgagcgcttgagctgagccgtcccagtgcgggggcgatcgcgtcgcctccggcctactccaggagcttcaactgatcgggcaatcggttgtcttcgtcccgcgttgaagtagattcggtcaaaaagtcaaaccgacgtgaggggaatttttctggtttggtttggtttggtttggtttggtctggatccgaaatgctgtgctggaaagcggttggtcagtaaatcgccgctgctaaagtttctgctccctgagctcagttggatcggagagttttagttcagtgtgcccatcctaaaacagggcgagttctgccgtgaatttgttggcttgtgttgtttgatcacaactgtattaaaaaaaaaggatcgatctttgcggctacaagagagtgacaacaaggaggcttggtcagctcgttcctttcacctgtttggcgagtgcttgaggaagaagacgacctgctcagctcctcctttggttgctcatcgaatcaaagaagactagggaaatgggggtaatgtcccggcgggttctgcccgcctgcagcagcctttgctacttctgcccatctctgcgggcgcgctctcggcagcctgtcaagcggtacaagaagatcatagcagatatctaccagctgcaaccggatggagagccaaatgatagaaggatcgggaaactctgtgattatgtctcgagaaatccaacacgcataccaaagatcacagagtatcttgaacagagattctataaagatctaaggcatgagaattttacgttggccaaagttgtgccatgcatctataggaaaattctatgttcatgcaaggagctcaggccattgctagccacaagctcattaagcaccattcgcactcttcttgatatgaaagcgcatgatgatctacaagttctgggttgtcttatgcttgttgacttcctgaatggccaggttgatagcacacatatgtttaatttggaaggcctcataccaaaactttgcaaaattggtcacgaattaagagaagatgatgaagggctccgtcttcgatctgcagctcttcaggctcttgcttctatggtccaatacatgggcgaccactcacacatttcaatggaacttgatgaagttgtctcagtgatcataagctgttacgaggctaatcaaacactctcaataaaagaggtagtcagatttcaagatgatgatgatttggtcattaatgggaacttggctgtgttaccagtgtctggacaaaatagtgccaaagtggcatctgatacaatgtctgcatctgaaaatccagcatactgggcaagggtttgcttgcgaaatatggctaatattgcaaaggaggccacaactgtgcggcgtattcttgaccctcttttccgcctttttgacagccacgactattggtctcctgaaagtgggattgccctttccgttctgcaagaaatgcagaaactgatggacaaatcagggcaacatggtcatttgttgttatctttcactataaagcacatagaccataaaagtattgccaagaattctgtcaagcaaatcaatattgtaaaagttgcttcacatcttgcaaggcatgcaaagttgaaggcatcagtgacgatagcaagtgctatcagtgacttaataaagcacttgcgcaaatgtatgcattttgctattgaagcatctaatgcaaatgctgattgtgacaagtggtacagtgcactttatgtggccttggaggagtgcctagtgcagttgacagaaaaggttggggatgttggtcctattcttgatatggttggggtaatgcttgagaatctctctcatactgctaccatcgcaagaacaacaatttcatctgtttatcgcacatcacaaatagcagcatctgtctacaagtcatcataccatcagaaggcatttcctgaagctttatttcaccagcttctcttagcaatgttgcactcagacaataagacaaggattggttcacatcgtgttctatctaccattgtagcaccttcaatggcgtgtccatggtcggacatcagctttcctatcccaatgaagggtgatgattcacataacttgcatttgttggttctctcagctttctcttctgaggccataatcaatgaaacacggaccaaaaacaagatccaagaatccttgcaagaaaacaacaaatcagaagctatagtggatcctgagaatggatacacacagacagaaccagataaaaggaagtattcaggggggccatgtctaaatgagcattatcgtacagcttttaatgatgaaaacttaaagttcatgaagttgaacgaccaccagattgttctccttctttcatctatttggagtcaagcatctctggatgacaacttacctgcaaattttgaagcaatgggccttgtctacagcattgctttattatgttcaaaaccaaaaagctccagtcatgtgacacgtattcgttgtttccagttggcgttctctctcaggagaaactctcttagccctgaaagtgatttgaagccatctcgtagaaggtgtctgtatacgatggcatcagcgatgctcatcttttcagcaaaaattgctgatctccaccagataattcctcttgtgaaagccgcagcaccagagaaaatggtttgtcgattcccatgtttactttctagccgttgtagcattgttcgcaactttctgtgaatgcagtttatatctagtaatgttcgagttgcacttactcttttgttgattttgcaggttgatcctcatcttcgcttgatggatgactgccagcttgttaatacctctgcagagtcatctaacagcgagatggtttatggttccgaggaagatgaaagtgatgcactggcttttctttcagccatcaacaagcctgacacagagttaatagaaaccgtgatgtgccacttcagggagaagttcgaaaatttaccagagaaggttaacgggatagaagagcaacttcttcaagagttttccctggatgattcgtttcctcttggtgctccactattcatggagatgccacactcttgttcaatgtatgcagaaaaggatgaagaatgttttgacgaggacactgttccttctgagctagacgatgacgacatcatctttgagcatagtgggtctcaatctgaccggaaaacgtcaggttccatggcttcgtcagatgttctaactgtcaaccaactaatagaatctgtatgtaccttatctactgacctccacacggccacacctatgtctgttagcttcagaacatgtgccatcacgttttcatgcggtgctgtttgccatgcaggttcatgagaccgcaaggcaagttgccaacgttccagttcccgccaaccctgtaccgtacgaccagatgaagagtcagtgcgaagccctggtcatggagaagcaacagaagatgtctgtcctcttgagcttgaagcattcgaggactgactcacatggttcagccggtgtggatgggcttgaaacgaatgagtcttctctgctgtctgagcctgagttacagtcaacaaggaaggggcgcatgcgccgctgcgattcagcgtccagcgaatctgactgttcgttcaggctgccacctgctagcccatatgacaagttcctgaaggcggctggacggtagcctgatgcggttgcggcagcttggcgcttcagttttcaactctctcaagtctgcatgagagttcagtacaagtgattcatcggcactctctcgttctcggagtccattctttcaagtgtatattatatttacatccctcgacacaaggtgtataaagttctgttactgtttccttcagaataaaccgaagtgtataggcactagcggatgatcatgttcaagacggtatttgttcatttgttgatcgtgaaaagaaaacattttacac

SEQ ID NO: 151218 - DNA, 3893 bp, Zea Mays
acagcgactgcggtgaggcgaccgttgcggtgccgtgcattaaaccaccctgccccccctgtcccccgcccccctctgcccccgctcctcgccgtcggcacccgcacccgcgcggcacggcggcgtccggggtccggtgggctgggctgagtcgacgagcgcttgagctgagccgtcccagtgcgggggcgatcgcgtcgcctccggcctactccaggagcttcaactgatcgggcaatcggttgtcttcgtcccgcgttgaagtagattcggtcaaaaagtcaaaccgacgtgaggggaatttttctggtttggtttggtttggtttggtttggtctggatccgaaatgctgtgctggaaagcggttggtcagtaaatcgccgctgctaaagtttctgctccctgagctcagttggatcggagagttttagttcagtgtgcccatcctaaaacagggcgagttctgccgtgaatttgttggcttgtgttgtttgatcacaactgtattaaaaaaaaaggatcgatctttgcggctacaagagagtgacaacaaggaggcttggtcagctcgttcctttcacctgtttggcgagtgcttgaggaagaagacgacctgctcagctcctcctttggttgctcatcgaatcaaagaagactagggaaatgggggtaatgtcccggcgggttctgcccgcctgcagcagcctttgctacttctgcccatctctgcgggcgcgctctcggcagcctgtcaagcggtacaagaagatcatagcagatatctaccagctgcaaccggatggagagccaaatgatagaaggatcgggaaactctgtgattatgtctcgagaaatccaacacgcataccaaagatcacagagtatcttgaacagagattctataaagatctaaggcatgagaattttacgttggccaaagttgtgccatgcatctataggaaaattctatgttcatgcaaggagctcaggccattgctagccacaagctcattaagcaccattcgcactcttcttgatatgaaagcgcatgatgatctacaagttctgggttgtcttatgcttgttgacttcctgaatggccaggttgatagcacacatatgtttaatttggaaggcctcataccaaaactttgcaaaattggtcacgaattaagagaagatgatgaagggctccgtcttcgatctgcagctcttcaggctcttgcttctatggtccaatacatgggcgaccactcacacatttcaatggaacttgatgaagttgtctcagtgatcataagctgttacgaggctaatcaaacactctcaataaaagaggtagtcagatttcaagatgatgatgatttggtcattaatgggaacttggctgtgttaccagtgtctggacaaaatagtgccaaagtggcatctgatacaatgtctgcatctgaaaatccagcatactgggcaagggtttgcttgcgaaatatggctaatattgcaaaggaggccacaactgtgcggcgtattcttgaccctcttttccgcctttttgacagccacgactattggtctcctgaaagtgggattgccctttccgttctgcaagaaatgcagaaactgatggacaaatcagggcaacatggtcatttgttgttatctttcactataaagcacatagaccataaaagtattgccaagaattctgtcaagcaaatcaatattgtaaaagttgcttcacatcttgcaaggcatgcaaagttgaaggcatcagtgacgatagcaagtgctatcagtgacttaataaagcacttgcgcaaatgtatgcattttgctattgaagcatctaatgcaaatgctgattgtgacaagtggtacagtgcactttatgtggccttggaggagtgcctagtgcagttgacagaaaaggttggggatgttggtcctattcttgatatggttggggtaatgcttgagaatctctctcatactgctaccatcgcaagaacaacaatttcatctgtttatcgcacatcacaaatagcagcatctgtctacaagtcatcataccatcagaaggcatttcctgaagctttatttcaccagcttctcttagcaatgttgcactcagacaataagacaaggattggttcacatcgtgttctatctaccattgtagcaccttcaatggcgtgtccatggtcggacatcagctttcctatcccaatgaagggtgatgattcacataacttgcatttgttggttctctcagctttctcttctgaggccataatcaatgaaacacggaccaaaaacaagatccaagaatccttgcaagaaaacaacaaatcagaagctatagtggatcctgagaatggatacacacagacagaaccagataaaaggaagtattcaggggggccatgtctaaatgagcattatcgtacagcttttaatgatgaaaacttaaagttcatgaagttgaacgaccaccagattgttctccttctttcatctatttggagtcaagcatctctggatgacaacttacctgcaaattttgaagcaatgggccttgtctacagcattgctttattatgttcaaaaccaaaaagctccagtcatgtgacacgtattcgttgtttccagttggcgttctctctcaggagaaactctcttagccctgaaagtgatttgaagccatctcgtagaaggtgtctgtatacgatggcatcagcgatgctcatcttttcagcaaaaattgctgatctccaccagataattcctcttgtgaaagccgcagcaccagagaaaatggttgatcctcatcttcgcttgatggatgactgccagcttgttaatacctctgcagagtcatctaacagcgagatggtttatggttccgaggaagatgaaagtgatgcactggcttttctttcagccatcaacaagcctgacacagagttaatagaaaccgtgatgtgccacttcagggagaagttcgaaaatttaccagagaaggttaacgggatagaagagcaacttcttcaagagttttccctggatgattcgtttcctcttggtgctccactattcatggagatgccacactcttgttcaatgtatgcagaaaaggatgaagaatgttttgacgaggacactgttccttctgagctagacgatgacgacatcatctttgagcatagtgggtctcaatctgaccggaaaacgtcaggttccatggcttcgtcagatgttctaactgtcaaccaactaatagaatctgttcatgagaccgcaaggcaagttgccaacgttccagttcccgccaaccctgtaccgtacgaccagatgaagagtcagtgcgaagccctggtcatggagaagcaacagaagatgtctgtcctcttgagcttgaagcattcgaggactgactcacatggttcagccggtgtggatgggcttgaaacgaatgagtcttctctgctgtctgagcctgagttacagtcaacaaggaaggggcgcatgcgccgctgcgattcagcgtccagcgaatctgactgttcgttcaggctgccacctgctagcccatatgacaagttcctgaaggcggctggacggtagcctgatgcggttgcggcagcttggcgcttcagttttcaactctctcaagtctgcatgagagttcagtacaagtgattcatcggcactctctcgttctcggagtccattctttcaagtgtatattatatttacatccctcgacacaaggtgtataaagttctgttactgtttccttcagaataaaccgaagtgtataggcactagcggatgatcatgttcaagacggtatttgttcatttgttgatcgtgaaaagaaaacattttacac

SEQ ID NO: 151219 - DNA, 1446 bp, Zea Mays
atggggagcacggggcgcgagccggaggtgacccgcgccaacttccccgacggcttcgtcttcggcgtcgccacctccgcgtaccagatcgagggagcgagaagagagggaggcaaaggagacaacatatgggatgtatttacagatgacaaagaacgtgtcttagacagaagcaatgcagaaattgcagttgaccactaccatcgatacaaggaagacattgagctcatggcaagtctaggttttagcgcatacagattttctatatcttgggcacgtatatttcctgatggcttgggggaaaaggtcaatgagcaaggagtcgccttctataatgacctcatcaactttatgatttcgaaaggtattgagccttacgcaacactgtatcattgggatcttccaaacaatcttcaaaaaactctggggggctggatttctgacaagattgtggagtactttgcattgtatgcagaagcttgctttgcaaatttcggagatagagtaaagcgttggataacaatcaatgaacctctccaaaccgcaatcaacggttatgggattggaatttttgcgcctggaggatgccaaggtgaaactgcaagatgttacttggccgcccatcaccaaatcttggctcatgctgctgctgttgatgtttatagaagaaaattcaaggctgcacaaagtggtgaagtaggcttggttgttgactgtgaatgggcagagccattttctgaaaaactcgaagaccaaattgctgcgcaacggaggattgactttcaacttggatggtacctagatccaatatattttggtgattacccagaaagcatgcgtcagcgactgggcagtgatcttccaaccttctcagagaaagataaaaaattcatcaagaacaaaattgattttattggactaaatcattatacttcgaggctcattgctcatcaccaaaatcctgatgatgtttatttctacaaagtgcaacaaatggagagagtagaaaaatggagtagtggtgaaagcattggtgaaagggctgcatctgaatggcttgtcatagttccttggggccttcacaaattgcttaactatatagtgaagaaatacaacaacccagtaatttatgttactgagaatggcatggatgatgaagacgatcagtccgcgacgattgaccaggtcctaaacgacacgaagagagtcggctacttcaaaggatacctcaattcggttgcacaggcgatcaaggacggggctgatgtccgtgggtacttcgcgtggtcattcctggacaacttcgagtgggctatgggctacaccaagaggttcggcatagtctacgtcgattacaaggacgggctctccaggcaccccaaggcatcggccctctggttctcgcgcctcctcaagggcgaggctgccgaaaacagctatagctag

SEQ ID NO: 151220 - DNA, 1116 bp, Zea Mays
attaatcaggcccttgaacggttaaaccctagacggcctagagagaaaggaaagaagtgctccggggaagcaccgtgacacccttgctcgcccgcatctctctaaccgccggcgccggcgccggcgccggccatcgttcacatggctgcgatgccaccggccttcacgggcaacctgaagaaagcacttgcaggtctgagaagaatcaatttagatgggcttcgatggcgcgtatttgatgctaagggtcaggtgctgggacgattggcttcccaaatagccgttgtgcttcaaggcaaggataaaccgacctatgcgccacatgtggaaaatggagacatgtgcattgtacttaatgcacaggatatcagtgttacaggaaggaaaatgacagataagatttactactggcatacagggtatgttggccatttgaaggaaaggaggctcaaggaccagatggagaaagacccaactgaagtgattcgcaaagctgtgctgcgcatgcttccccgcaacaaactgcgtgatgatagggatcgcaagctgcggatattttctggaattgagcatccattccatgaccgccctcttgaagcttttgtgatgccaccacggcaagtacgggagatgcgaccccgtgcaaggcgtgcaatgttaagggcccagaaaaaagagcattcaaacagggccaaggaggaagaagatgctaagaatgccacagctgaggtcactgcataggctcctcatgtgaatttgcatgatgcaaatttgctcgatgctgttttaggcctatcttttttgcttggtagccttttccagtggaataggcactagaggctcggaatgtgccaacctcgttctgaatcacctttttatttccattgcaatttgtaactggaaccctgcctgtcacagctgctttcttttgtaagcgaataagaccgtctgaattgttgaacttctgatctcatgagtgcacaagaatgtctccagggacatcttctatcctttctttacgtgtcactaggtgagtgtccgtacgttgcaacggaaacatatataatactaagataatttatgtgcgaatgtgtgttatactgttgattgacttct

SEQ ID NO: 151221 - DNA, 1648 bp, Zea Mays
attaatcaggcccttgaacggttaaaccctagacggcctagagagaaaggaaagaagtgctccggggaagcaccgtgacacccttgctcgcccgcatctctctaaccgccggcgccggcgccggcgccggccatcgttcacatggctgcgatgccaccggccttcacgggcaacctgaaggtgagtgcttaaaagatccccatctgccattgcccggttcggttcgggtcacactctgccggttccggcgcactgcgggcgcggcatcaacaccacccatggccaccacccccatccacaagcgacgtcgcaggtttctacgcgggcgcgttgcgtctccagccgtcttccgccattcaaagaatcctttgttcctccggccccatccgcctaccttcaatctcctccggaggggcatggatgatttgccgccgagctgtgctgaatcggggggctggcgtccgtggcattcagagctccattttgcgcttagcagtagattcagttctctgcagtcaatagctccaacactcctggacatggatattgggttaacgtgactgcgaacaatggcggacccagaaatacaacctatgcaagattattaactgctaataactataggcgggattatcatctgggttcaaatatttggacttatgtgctcctttgaggcggcgaggcagccacacccacacgcagtggcctgtggcgcctgggcgaaagcacttgcaggtctgagaagaatcaatttagatgggcttcgatggcgcgtatttgatgctaagggtcaggtgctgggacgattggcttcccaaatagccgttgtgcttcaaggcaaggataaaccgacctatgcgccacatgtggaaaatggagacatgtgcattgtacttaatgcacaggatatcagtgttacaggaaggaaaatgacagataagatttactactggcatacagggtatgttggccatttgaaggaaaggaggctcaaggaccagatggagaaagacccaactgaagtgattcgcaaagctgtgctgcgcatgcttccccgcaacaaactgcgtgatgatagggatcgcaagctgcggatattttctggaattgagcatccattccatgaccgccctcttgaagcttttgtgatgccaccacggcaagtacgggagatgcgaccccgtgcaaggcgtgcaatgttaagggcccagaaaaaagagcattcaaacagggccaaggaggaagaagatgctaagaatgccacagctgaggtcactgcataggctcctcatgtgaatttgcatgatgcaaatttgctcgatgctgttttaggcctatcttttttgcttggtagccttttccagtggaataggcactagaggctcggaatgtgccaacctcgttctgaatcacctttttatttccattgcaatttgtaactggaaccctgcctgtcacagctgctttcttttgtaagcgaataagaccgtctgaattgttgaacttctgatctcatgagtgcacaagaatgtctccagggacatcttctatcctttctttacgtgtcactaggtgagtgtccgtacgttgcaacggaaacatatataatactaagataatttatgtgcgaatgtgtgttatactgttg

SEQ ID NO: 151222 - DNA, 1513 bp, Zea Mays
aaaaacccttccattcacccgcagctcccatcctctcgctcgccaggagaagcagccgccgttgctgctgccgcgtccacagaatggggggtttcgtgaagactcataagaccaatgcgtatttcaaacgtttccaagtgaaattcaagagaaggcgggctggcaagacagactacagggccaggataaggctgattaaccaagacaaaaacaagtacaacacacccaaatacagatttgttgtgcgatttaccaacaaggacatcactgcccaaatcatatctgctagtatagcgggtgatatggttcttgcttctgcctactcgcatgagttgccacgatatggtcttgaagttggtctgaccaactatgcagctgcctactgcactggccttctgttggctcgccgtgtgctcaagatccgtggtttggatcaggagtacgagggcaatgttgaggccactggtgaggacttctctgttgagccagctgatgagaggaggcctttccgtgctctcttggatgttggccttatcaggactacaacagggaaccgtgtctttggtgccctcaagggagcattggatggaggcctggatattcctcacagcgagaagaggtttgctggattcaagaaggacgacaagcagttggatgctgatacccaccgcaggtacatctatggtggccatgttgctgactacatgaagaaccttgctgaagaggagccagaaaagtaccagagccacttcagtgcgtacattaagaagggagttgaggctgatgaaatagaagcgctgtacaagaaggtccatgctgccatccgtgccgatccttccattgttaagtcaaccaagcagccaccaaaggagcataagaggtacaaccccaagaagctgacatatgagcagaggaaggccagcctcattgaaaggctcaaccaactcaactcctccggtggtgctgatgacgacgatgaggacgacgagtaaagttaattgccatcgaagtagtgctatctcaatccagcgatcagcaattgtgtactgtcttatgcggggacctgtagtactgcaataggcatttttgtttaagttttgcgaggtgaacaaaactgtttctgttagtttcgagcttgagctctcaatgtttactctttacattgaaatgctgccgtttggacatgttttttctgagttctacacctgcttgtcttgcttatgtgacggtgcagtattgtgcctttaatatcaacctaaacattgactggttcataccaagataaataaagaaaagaaaaatacagtgtatagcggtaggagggatatggaaaacgagattgtgttagactgtctccagcaacgtcctctatattcatcctctatatctgtcctttacagtctcctctaaaagatttcatcctctatatctcatttctctccaacaacgttctctaaatcacgttctctatactcaaatacccatattaaagacattttttaattttattttt

SEQ ID NO: 151223 - DNA, 1441 bp, Zea Mays
aaaaacccttccattcacccgcagctcccatcctctcgctcgccaggagaagcagccgccgttgctgctgccgcgtccacagaatggggggtttcgtgaagactcataagaccaatgcgtatttcaaacgtttccaagtgaaattcaagagaaggcgggctggcaagacagactacagggccaggataaggctgattaaccaagacaaaaacaagtacaacacacccaaatacagatttgttgtgcgatttaccaacaaggacatcactgcccaaatcatatctgctagtatagcgggtgatatggttcttgcttctgcctactcgcatgagttgccacgatatggtcttgaagttggtctgaccaactatgcagctgcctactgcactggccttctgttggctcgccgtgtgctcaagatccgtggtttggatcaggagtacgagggcaatgttgaggccactggtgaggacttctctgttgagccagctgatgagaggaggcctttccgtgctctcttggatgttggccttatcaggactacaacagggaaccgtgtctttggtgccctcaagggagcattggatggaggcctggatattcctcacagcgagaagaggtttgctggattcaagaagaaccttgctgaagaggagccagaaaagtaccagagccacttcagtgcgtacattaagaagggagttgaggctgatgaaatagaagcgctgtacaagaaggtccatgctgccatccgtgccgatccttccattgttaagtcaaccaagcagccaccaaaggagcataagaggtacaaccccaagaagctgacatatgagcagaggaaggccagcctcattgaaaggctcaaccaactcaactcctccggtggtgctgatgacgacgatgaggacgacgagtaaagttaattgccatcgaagtagtgctatctcaatccagcgatcagcaattgtgtactgtcttatgcggggacctgtagtactgcaataggcatttttgtttaagttttgcgaggtgaacaaaactgtttctgttagtttcgagcttgagctctcaatgtttactctttacattgaaatgctgccgtttggacatgttttttctgagttctacacctgcttgtcttgcttatgtgacggtgcagtattgtgcctttaatatcaacctaaacattgactggttcataccaagataaataaagaaaagaaaaatacagtgtatagcggtaggagggatatggaaaacgagattgtgttagactgtctccagcaacgtcctctatattcatcctctatatctgtcctttacagtctcctctaaaagatttcatcctctatatctcatttctctccaacaacgttctctaaatcacgttctctatactcaaatacccatattaaagacattttttaattttattttt

SEQ ID NO: 151224 - DNA, 1306 bp, Zea Mays
aaaaacccttccattcacccgcagctcccatcctctcgctcgccaggagaagcagccgccgttgctgctgccgcgtccacagaatggggggtttcgtgaagactcataagaccaatgcgtatttcaaacgtttccaagtgaaattcaagagaaggcgggctggcaagacagactacagggccaggataaggctgattaaccaagacaaaaacaagtacaacacacccaaatacagatttgttgtgcgatttaccaacaaggacatcactgcccaaatcatatctgctagtatagcgggtgatatggttcttgcttctgcctactcgcatgagttgccacgatatggtcttgaagttggtctgaccaactatgcagctgcctactgcactggccttctgttggctcgccgtgtgctcaagatccgtggtttggatcaggagtacgagggcaatgttgaggccactggtgaggacttctctgttgagccagctgatgagaggaggcctttccgtgctctcttggatgttggccttatcaggactacaacagggaaccgtgtctttggtgccctcaagggagcattggatggaggcctggatattcctcacagcgagaagaggtttgctggattcaagaaggacgacaagcagttggatgctgatacccaccgcaggtacaaccccaagaagctgacatatgagcagaggaaggccagcctcattgaaaggctcaaccaactcaactcctccggtggtgctgatgacgacgatgaggacgacgagtaaagttaattgccatcgaagtagtgctatctcaatccagcgatcagcaattgtgtactgtcttatgcggggacctgtagtactgcaataggcatttttgtttaagttttgcgaggtgaacaaaactgtttctgttagtttcgagcttgagctctcaatgtttactctttacattgaaatgctgccgtttggacatgttttttctgagttctacacctgcttgtcttgcttatgtgacggtgcagtattgtgcctttaatatcaacctaaacattgactggttcataccaagataaataaagaaaagaaaaatacagtgtatagcggtaggagggatatggaaaacgagattgtgttagactgtctccagcaacgtcctctatattcatcctctatatctgtcctttacagtctcctctaaaagatttcatcctctatatctcatttctctccaacaacgttctctaaatcacgttctctatactcaaatacccatattaaagacattttttaattttattttt

SEQ ID NO: 151225 - DNA, 1509 bp, Zea Mays
aaaaacccttccattcacccgcagctcccatcctctcgctcgccaggagaagcagccgccgttgctgctgccgcgtccacagaatggggggtttcgtgaagactcataagaccaatgcgtatttcaaacgtttccaagtgaaattcaagagaaggcgggctggcaagacagactacagggccaggataaggctgattaaccaagacaaaaacaagtacaacacacccaaatacagatttgttgtgcgatttaccaacaaggacatcactgcccaaatcatatctgctagtatagcgggtgatatggttcttgcttctgcctactcgcatgagttgccacgatatggtcttgaagttggtctgaccaactatgcacctactgcactggccttctgttggctcgccgtgtgctcaagatccgtggtttggatcaggagtacgagggcaatgttgaggccactggtgaggacttctctgttgagccagctgatgagaggaggcctttccgtgctctcttggatgttggccttatcaggactacaacagggaaccgtgtctttggtgccctcaagggagcattggatggaggcctggatattcctcacagcgagaagaggtttgctggattcaagaaggacgacaagcagttggatgctgatacccaccgcaggtacatctatggtggccatgttgctgactacatgaagaaccttgctgaagaggagccagaaaagtaccagagccacttcagtgcgtacattaagaagggagttgaggctgatgaaatagaagcgctgtacaagaaggtccatgctgccatccgtgccgatccttccattgttaagtcaaccaagcagccaccaaaggagcataagaggtacaaccccaagaagctgacatatgagcagaggaaggccagcctcattgaaaggctcaaccaactcaactcctccggtggtgctgatgacgacgatgaggacgacgagtaaagttaattgccatcgaagtagtgctatctcaatccagcgatcagcaattgtgtactgtcttatgcggggacctgtagtactgcaataggcatttttgtttaagttttgcgaggtgaacaaaactgtttctgttagtttcgagcttgagctctcaatgtttactctttacattgaaatgctgccgtttggacatgttttttctgagttctacacctgcttgtcttgcttatgtgacggtgcagtattgtgcctttaatatcaacctaaacattgactggttcataccaagataaataaagaaaagaaaaatacagtgtatagcggtaggagggatatggaaaacgagattgtgttagactgtctccagcaacgtcctctatattcatcctctatatctgtcctttacagtctcctctaaaagatttcatcctctatatctcatttctctccaacaacgttctctaaatcacgttctctatactcaaatacccatattaaagacattttttaattttattttt

SEQ ID NO: 151226 - DNA, 1398 bp, Zea Mays
aaaaacccttccattcacccgcagctcccatcctctcgctcgccaggagaagcagccgccgttgctgctgccgcgtccacagaatggggggtttcgtgaagactcataagaccaatgcgtatttcaaacgtttccaagtgaaattcaagagaaggcgggctggcaagacagactacagggccaggataaggctgattaaccaagacaaaaacaagtacaacacacccaaatacagatttgttgtgcgatttgtatcctttgattatttgaccatctggtttctacctattgctatggtactttgagctccagaagcatatattgtatctcttaactagatattcttagaccaacaaggacatcactgcccaaatcatatctgctagtatagcgggtgatatggttcttgcttctgcctactcgcatgagttgccacgatatggtcttgaagttggtctgaccaactatgcagctgcctactgcactggccttctgttggctcgccgtgtgctcaagatccgtggtttggatcaggagtacgagggcaatgttgaggccactggtgaggacttctctgttgagccagctgatgagaggaggcctttccgtgctctcttggatgttggccttatcaggactacaacagggaaccgtgtctttggtgccctcaagggagcattggatggaggcctggatattcctcacagcgagaagaggtttgctggattcaagaaggacgacaagcagttggatgctgatacccaccgcaggtacatctatggtggccatgttgctgactacatgaagaaccttgctgaagaggagccagaaaagtaccagagccacttcagtgcgtacattaagaagggagttgaggctgatgaaatagaagcgctgtacaagaaggtccatgctgccatccgtgccgatccttccattgttaagtcaaccaagcagccaccaaaggagcataagaggtacaaccccaagaagctgacatatgagcagaggaaggccagcctcattgaaaggctcaaccaactcaactcctccggtggtgctgatgacgacgatgaggacgacgagtaaagttaattgccatcgaagtagtgctatctcaatccagcgatcagcaattgtgtactgtcttatgcggggacctgtagtactgcaataggcatttttgtttaagttttgcgaggtgaacaaaactgtttctgttagtttcgagcttgagctctcaatgtttactctttacattgaaatgctgccgtttggacatgttttttctgagttctacacctgcttgtcttgcttatgtgacggtgcagtattgtgcctttaatatcaacctaaacattgactggttcgtcactgtaacattctcgtttgattggt

SEQ ID NO: 151227 - DNA, 1364 bp, Zea Mays
atcttcctttccttccctttcccctcctctctcacgggcttctctctcacatctcgtcatgccgcatcgtcccacgcgtccctccttccgtggtctcaccggcgaccccctcagcacagcaccttgcccggccggctgcccctccgcagtgccttggccccatcgttgcccgagctgcatctcccgcaccctcgtcgcctgagccgccactgtgccttggccccacgagccgtcatgcctagccccgtgtgcagccgtgctcctagtccgtcgtcgtgccttggccctacgtgccgctgtgcctggctcgcgcctgcctgtattcgccaaccactacggcgaagactagtggttgcttgagatcagcgctggttgcctcggctctaggcaaccgtttgtcatggagacagtgaaagatgatgatgctgcaaaactgggtttgatatcaggtaaacatctgctattcgacacttctgtaatagtaagcagaaaggagcaagtcctcattttttatatgtgcaatgttgctttcatgctacacgagaggggtgaatgctagttataaaacaatggattatttgacataatgtagatgagattttcgcaactattcttatgtactgcaatatttgaaataaacagcccttgcaagatgttagggtcctcctaaaacatatgaatgaccattggattagtctaacattactctttaggcttcctagaccatgtaagcagtctttcacaagtccacgatgactttatttaaacatggagttagcacacataggtagagatagtaatggagtggtagttgttaattcttgaactattgaatttggcaaggacatcggttattgaatttggcaagcaaagatttatccctgatttggcaaggacatgttgcagaaatttacatggcgtccgttttcccatattactatactggtaaactaaagctacaaaaatggaggcaagcatattaactcgtttaatgccacgttcacaagtgatatcctagaactttagttttaaatgttaccggtgccagcttccaatgtttattatacttgtttgcatattgatatatttgttcaagttcttcaagctgatggtggtaagtgtgctaccttcctactttcaagcttacaaccttgtttaaatggaattgttttgcgcatgaggtctgcttttggaaacatcttcagtgctaatttgagacaagctcctgcaaggcaagctgcactgggcacagggatactaaacactgttgtttgtgctttttatgattgaggaatacttgaagaagagtacttgtggtctttatcttgtgctgagatgcatgttctttacctaccgaacatcag

SEQ ID NO: 151228 - DNA, 1463 bp, Zea Mays
atcttcctttccttccctttcccctcctctctcacgggcttctctctcacatctcgtcatgccgcatcgtcccacgcgtccctccttccgtggtctcaccggcgaccccctcagcacagcaccttgcccggccggctgcccctccgcagtgccttggccccatcgttgcccgagctgcatctcccgcaccctcgtcgcctgagccgccactgtgccttggccccacgagccgtcatgcctagccccgtgtgcagccgtgctcctagtccgtcgtcgtgccttggccctacgtgccgctgtgcctggctcgcgcctgcctgtattcgccaaccactacggcgaagactagtggttgcttgagatcagcgctggttgcctcgtgtgaaggatgttgatgtcgaatggattggctaggcgggcgttaacctaccagactgatacactgttgctcttattattaggcactagcatagctaaaggctctaggcaaccgtttgtcatggagacagtgaaagatgatgatgctgcaaaactgggtttgatatcaggtaaacatctgctattcgacacttctgtaatagtaagcagaaaggagcaagtcctcattttttatatgtgcaatgttgctttcatgctacacgagaggggtgaatgctagttataaaacaatggattatttgacataatgtagatgagattttcgcaactattcttatgtactgcaatatttgaaataaacagcccttgcaagatgttagggtcctcctaaaacatatgaatgaccattggattagtctaacattactctttaggcttcctagaccatgtaagcagtctttcacaagtccacgatgactttatttaaacatggagttagcacacataggtagagatagtaatggagtggtagttgttaattcttgaactattgaatttggcaaggacatcggttattgaatttggcaagcaaagatttatccctgatttggcaaggacatgttgcagaaatttacatggcgtccgttttcccatattactatactggtaaactaaagctacaaaaatggaggcaagcatattaactcgtttaatgccacgttcacaagtgatatcctagaactttagttttaaatgttaccggtgccagcttccaatgtttattatacttgtttgcatattgatatatttgttcaagttcttcaagctgatggtggtaagtgtgctaccttcctactttcaagcttacaaccttgtttaaatggaattgttttgcgcatgaggtctgcttttggaaacatcttcagtgctaatttgagacaagctcctgcaaggcaagctgcactgggcacagggatactaaacactgttgtttgtgctttttatgattgaggaatacttgaagaagagtacttgtggtctttatcttgtgctgagatgcatgttctttacctaccgaacatcag

SEQ ID NO: 151229 - DNA, 1547 bp, Zea Mays
atcttcctttccttccctttcccctcctctctcacgggcttctctctcacatctcgtcatgccgcatcgtcccacgcgtccctccttccgtggtctcaccggcgaccccctcagcacagcaccttgcccggccggctgcccctccgcagtgccttggccccatcgttgcccgagctgcatctcccgcaccctcgtcgcctgagccgccactgtgccttggccccacgagccgtcatgcctagccccgtgtgcagccgtgctcctagtccgtcgtcgtgccttggccctacgtgccgctgtgcctggctcgcgcctgcctgtattcgccaaccactacggcgaagactagtggttgcttgagatcagcgctggttgcctcgtgtgaaggatgttgatgtcgaatggattggctaggcgggcgttaacctaccagactgatacactgttgctcttattattaggcactagcatagctaaagatttagtggtcaggaacgatcgtggataggggatgctgaacatggtagctggccttctagagagcacaactacaattagcagcggctctaggcaaccgtttgtcatggagacagtgaaagatgatgatgctgcaaaactgggtttgatatcaggtaaacatctgctattcgacacttctgtaatagtaagcagaaaggagcaagtcctcattttttatatgtgcaatgttgctttcatgctacacgagaggggtgaatgctagttataaaacaatggattatttgacataatgtagatgagattttcgcaactattcttatgtactgcaatatttgaaataaacagcccttgcaagatgttagggtcctcctaaaacatatgaatgaccattggattagtctaacattactctttaggcttcctagaccatgtaagcagtctttcacaagtccacgatgactttatttaaacatggagttagcacacataggtagagatagtaatggagtggtagttgttaattcttgaactattgaatttggcaaggacatcggttattgaatttggcaagcaaagatttatccctgatttggcaaggacatgttgcagaaatttacatggcgtccgttttcccatattactatactggtaaactaaagctacaaaaatggaggcaagcatattaactcgtttaatgccacgttcacaagtgatatcctagaactttagttttaaatgttaccggtgccagcttccaatgtttattatacttgtttgcatattgatatatttgttcaagttcttcaagctgatggtggtaagtgtgctaccttcctactttcaagcttacaaccttgtttaaatggaattgttttgcgcatgaggtctgcttttggaaacatcttcagtgctaatttgagacaagctcctgcaaggcaagctgcactgggcacagggatactaaacactgttgtttgtgctttttatgattgaggaatacttgaagaagagtacttgtggtctttatcttgtgctgagatgcatgttctttacctaccgaacatcag

SEQ ID NO: 151230 - DNA, 606 bp, Zea Mays
atggtcgagctgggcgagctgaggaagaagaagcgcgcgcacggagccaagctcgacaggacgcggcgactaggaactctagccgggcgagctcgagcagagggccagaggcgcgcaggctgggaacacggcagggcgtacatcgcggggaagatgagtagaggaaaggagagatccgtgcgcagggaagcttcagggaggaacttgacggcggccatggcagagaaggagttcgacgaaaatgagcgcaccagccacggtgagcagaggctgcgcgcgacgggattttatccccgagctaaagcagcacggcgtgggaaaagaagggatcaagggaggctgggcacggcgtgctgggagataagcaccacgcgcccaaaagatcaacagaacggtggcaggaaaatcagagcagaggcagctggatcttcttctatcagcggcggtgacagattttttttttttgaagaacctaggggcggcggttgggcgttggggctggaattggagcagcagtcggcggcggcatacaagagagcagtgagtgcgcagaggataaggaagaagcagacgtccgtgctgtacttgaggaggatttttttttag

SEQ ID NO: 151231 - DNA, 4171 bp, Zea Mays
atgaaaagcggcgtcatggttctcggtgtcggcagccctgaagaggcccctgaccgcaacgatgcggagccacggcgcgatatgggccaatcgcagatgcaggtcggtggccccgttgttctcaaccgatcagctgagctcgggtcaggtgattttatggctatcgatgacgctccagttcaagcaccatcgggccagccggcggcggcaaaacatcagtctcctgctgctctgacggacaccatcatggaggtgcagaagcaactgaagcgaaagagggcttctaataacccagtgattgctgccgcggacaaggacgctctcgctgccgggtgccggcaagagcttgagggtctcttccagttttacaaggaggtttctgaccgtaaggtgcagcttgacggtggtaacctgtccgtcaacggaatggttggctgcttgcttgaggagagcagccttgggctgaccaagttggtggacgggatatatgaaaagttgaagggattggatggtgtgtctgtggcttcagtccgtggctctgtgctgctcgttgggcagaggatgatgtacgggaaatcatccttggacgctgatgtgttggaagatgatacagagtcggctctttggtgctgggagacaagagatctgaaattgatgcctgtgaaagcacgcagtgttcttagtacacggaggtctgtcagaaagaaaatccatgagagaatcactgccatctattcaactctatcggttcttgaaaacccaggagtttacgtccaagtaaatgatctaaaaaaggcatcattaagattaaacaaatcgctgaacctggaagggatcagatcaatggtggaaagagtggcacaaaagaacctagaacggggtgtgaaagttgctggatcagcaattaaggaattgaagcaagagacagaaaaaaatgaccaaaatcttagaagacttgaggatactagcgtctctgagctgcagaatggaaattcgcctgataatgaaaaagaggttcaaaaggcacaaaaacaggtggagaaggaaataaagcgccaggagaaagaagaagctcggatgaaaaaactgcaaaagaaacagcaagaagatgtcctaagagaacagaagagacgtgaaaaggaggaagctgaagctaagaaacaacaaaagaagcaggaggaggaagcactgaaagaacagaagcgtcgtgaaaaggaagaagctgaaatgaagaaacaacataaaaaacagcaagaggaagctgagaaagaacagaagcgccttgagaaggaagctgcacaactcaagaagcaactagccgtgcaaaagcaagcttctatgatgcaaagatttttcaaaagtaagaaagacaatggaaaacttcaaaaatctggagagaacaactcagctgatggtccgtgcaatgacaacaaagagaccgtaccatcaaccacatcaaaaattgattattcattgtctcaacaagagagctgggttttggaggatctttggaggttgcagatcactggttggaagaagctatctagccacaataggtcctccagatggggtgtaagatgcaaacccaagacgaaagcatttaatgaactgaagcttcagaaatcctcagatgatatggttgatgaaatactttctactccaaataaagatggctgccacacttcaagtcaggaaaatgaacatgctacgcttgaaagtgacattgacatgctacaagctattgaggtgcaatgtcatgacaccaataaccctaaacctctgcaaactagattaattagaaggaaacttctgcaatttgacaaaagtaacaggccagcgtattatggatcctggaggaagaaaagtgttgttattggtccaaggtgtccacttaagatggatcctaatcttgactatgaggttgatagtgatgatgaatgggaagaggaggatcctggtgagagtctttctgactgtgagaaggataatgatgaatttatggaagaagattccaaaattacagatgaagaagatgaagatagctttgttgtgcctgatggctatctatcggacaatgagggaatacaaattgaaagcctattggatgataaagatgaggaagccagtagctcaccaactggtcagtgtgcagaagttgaagagttcaggtctctactgcgccaacaaagagtcctgaacattttaaccgagcaagctctccggaagagccaacctcttattatatccaacctaaatcatgaaaaagctgaattactgactgccgaagacctcaaggggacagcaaagatcgaacagctatgtttgcaagttctttcaatgcacatctgtccaggaggcgcagttgttgatgtgcctctaactgacagctcatctgcaactgttgaagaaattaaccagcccaatccgaaggatggttctcctggggctgcatctgctataccagaaacagatctgccagaaattgtccaggtgataagatcatgtcgagatggtatccataaggtggtggaattactgcagcacaagtttccaaatgtttcaaagactcagctgaatcgcaaagtgagagagatatctgactttgttgacaatcattggaaggtaaagaaagaggtgcttgacaagctgggattggattcgtcaccagtgaaatccaagaagaataaaagcatagccatgtacttctcgaagagatgtttacctcctgaagaggctgtcaatgctctgtctgcttctcctgagttgcggttgaaatctagaaccattcaaaatggcaatggtggcaccgaagctcctcagatcaatctgttcccttcaaagcagtagagtttgtaacaggacaccctgaaagtcggatcaggtataaatgaggctatgcacccaggtgagcacaaagctcagaggtccatgtccctcccatggctatggaagtgcgtgcaacttggttttgcatatggatgatctggatcgattatgtttccagtgacatgttgtaattttagccagaaagtaggtttgttcatgaaggacattcagttcaaatgtttgacctattgttaaggcaaggcattgttctctgcaacatgtggtgttatgaacattatgtgcactcgtgattctgccaaataagtaatgtgtcctgtgactggtcaattgaagcgcatctcttgagagaagtggagaaatttgctatttgtcactctcggttttggtttccatctcgtgtctagtgcaaccatctgtgataatggcaatggtaaaattgccaatggctcggtgcgactggggcgagcaaatatatttttcacttgtggcttatcaaatgacagattttctcagaaatttgtttttacaacctgtttgcatcaaatctgatgaatgtgcatgcaagtagtagcaaaggcaacaaaaagcaatgtatatttgctttggcatttaacaattttggttgaacaggcacagtagtaccaaaaaaaagcaatagtacatactaacagacggcaaagaatcaacgaatcttgttcatatatcattctgaaggagctaacaccagcggacgatcagacatggtacggctgccggttcttggcctggaggtcgtcgtcgtcgtcgtcatcgaggcggagggagaaggcgagcgcgagcgcggcccactcgaggacgaagatggcggtgccgaggcccccgaccatcttgaggatgacggcgccgtcctcgtcgcggacgtaggactgaagctcggccaggaagtcggaggtgcgggtgaacgcgagcagcgcgacggccccctggaagatggcggtgagcgcggcccccgcggtgtgcgcgttgtgccactgcgcgggcgtggcgggcgccgtgaaggagcccgagcagccggccgcggagaagacggcggtgagggcgtggaggaagagcaggaggaggccgcacggggacggcagcaggcgcagcgacagcgtgaggaagatgcagctggaagcggcgcccatgaggacgtagttgcacaggaggaacgccttgcgcgtgtgcgacttgcccgccattcgactcgacgccgccggactccgcttggaagcttaccgagggagcgggatggcttgcggtcgaaggggcgaggtcgagatcgagagagggaggtttggagtgg

SEQ ID NO: 151232 - DNA, 2469 bp, Zea Mays
aaggaaagaggccatggccaggaggtgctgcggtctgtcgacgcctgtaaacagctagctagaccgcgcgctatggccttgagagcggtcgtgtgtgcacagacgggcatgattttgtgaggggtgttataccagcgagcataataaagagggtcactgactggaaggagattaggagaaggactgcattgcagctctggtgaagtgcgagcaagatcttggagaggttgtggcatgtgggactgagggctgtaaacaaggcctccctccctggcagtgagaaatgttaaaggacggtagcaaggagaaatgttaaggcggagatgggtaagaagggaaattggttcactgcgctcaagaaggccttcacctcaagccccaaggagaagccaacaaatgtgcatcagctggtagcgcagtacccgtctactcacgcgcacggctgggagaagaagcgatggggaggcttcgggcggtcgcggccgcacgcggagccggcgtccccggcggcgggcgcgctgatcaacatcccgctgtaccgcgagccgagcagcatcgagaagatcctcggcgacgcggagatggaccagcagcgccagtactacgccgccaccagggcgcagtaccagatcacgcccgcgaggcccaccaccgccgtcgccggtagtgctgcttctgctgctgccgtgccgctgccgcagccggtggtgggagtgggaacagcacgtgagcgcgagcgcaggagagaagacaagccggccgccgtggtgctcccgctgccgccgccgtcccctcccccgctgatcaggaggttcgaccatgacagggagcagcagaagaagctgcagctgcagccgcagagctgcagggccgagacggagtggcggcggcagcagcagcagccgaggcggcaccgcgcggcgaggcagagcgccgcgccgccggaccgcgcgcgcgccgcggccgtggcgatccaggccgcattccggggctacatggcgcggcggaactaccggtcgctgcgcgggctgatccggctgcagggcgtgatgcggggcgccagcgtgcggcggcagacggcgcaggcgatgcggtgcatgcagacgctggtccgcgtgcaggcgcaagtgcgcgccagccgcgtggaggccatggagcggcgcaaccggcagcaccacggcgccatgctcagggacggcggcaggtggcgcgccagctctcaggacggcggattttgggacgccagccggctgacgcgggaggaggcagacgcgcggacgaagcggaaggtggaggccgtgatcaaacgcgagagagccctcgcctacgcctactcccatcagctgctgaaggcgacaccgatggcggcccacgcgatcctggcggacctgcagtcggggcggagcccctggtggtggacgcccatcgagcgccgccacgagccgggggcctaccgccctgcggatcccgccattagaaagcccctgccggcgctcgccatcgcccaccgcgacatgacgacgacgcctgtggcgatgacggcggcgacgacaccggcccggtcggtggtctcggcctactctaagacaagggccacgaggcctgtgatcagggtgggagccccgccgccttcgaaccatagccacgtggggagcatccgcgacgacgagagcctgacgagctgcccggcattcggcggcgtgcccaactacatgacgcctacgatgtcggcgtccgccaaggcacgggcacgggcgcacctgcaggagcagcagaagaacaaggcggcccaggagaagcccaggttctcgttcgggctgggccagagcatcgggagctgggccaagagcccgttctggaaggccgctgtgccgtcgtcgagggtggccacgccggcggcgtcgatggccggcgggcgacaccgatcgacgcggtcgatcagcgggcttagcacggactccaccgtgtccatgccagccaggctcggcacgaggtcctttaagtagatacacatgtcggactcatcgttgcttacattgcattgcattcttcttatatctcttctcgacgcatttgtgcttggaagtggtacacatgtgattgatggtgtggcttgttgtgggataccatcgtgtttgctgatttattattgtgccttactagctccctggttgctagctcctttgttcacagccttccgtgggtttttgagaggggccagagttgtagcatgtaaaatctgtgactccatcgaacaaccgtacatgcgttaagttcgtgctttttgccaattaccatggcatgtgatgcatatccatttaagttgaacgtgacactgaggtgaaaaaaggagtagaaacattcatgttgttgggagggacgatataggtttaatttgtactttattgaaatgctaaaagcatgacggcctctagttaggtttaagtgattaatgataacacaaaaaaa

SEQ ID NO: 151233 - DNA, 461 bp, Zea Mays
cggagcagccagcagcagagcacacggcgcactctgttcgtcgtcgtcaaggagcctgcctgatcgagacgcgtacagcgagctgagccggcagagattaagtcaccagcagccatatgggccaccgtgcaacgctcgtcgccgtcgccgtccttctcgccgccgtcgcggcgctgagcctggcggcgcggtgcgcggacgccgcgaggcccgtgccgccgagccccgcgtactacgagtcgctcgtgtccacgctgatggcgatgctcccggaggggcctagcgacggaggcgcggggcactgaagactgaacacgtaccgcaagggtcaaagttgaaaccttggagtaattgtttgtagctaggggttctttggtttgtttacctctccatatatctctttttttttggctttcgctttgagcctcccatgggttctcaactcaagagatagtgagata

SEQ ID NO: 151234 - DNA, 1512 bp, Zea Mays
gggaatcatccgacccgagatcgctttccattcccatcgcttctcttctccacacgaactcactcttgagagatagagcgaaacacaaagcaggcaaaaaaaaaaaggatagagagaaaaaatcattctcgtttctctcactccgctatacccccgcccgaatcgatggagattagggctccgccaacgagcctcagtctcgcgccgccgcccgcctccgccagcttccgccgaacaccgcttaggaccttcttccttaacggcagcgtttcacttaaagttgtgcaagtacgacaatcaaatgtcaacagatttaagtgcaatagcatacaaagtaacctctttgatagactaacgagggttgccaggtcctacgcaaatgcagttctaagttcatttgaggaccctgagaagattctcgagcaggcagttctcgagatgaacgatgacttgacaaagatgaggcaggccacagcacaggtcttggcgtctcaaaagcggcttgagaataaatacaaagctgcagaacaagcttctgctgattggtatcgaagggctcaacttgctcttcaaaagggtgacgaggatcttgctcgcgaagcccttaagcggcgtaaatcatatgctgacaatgcaagctccttaaggtcccagcttgatcagcagaagggtgtagttgaaaatctgatttcaaatacccgggttcttgagagcaagatagcagaggccaagcagaaaaaggatacgcttaaagctcgtgctcaatcagcaaagactgccacaaaagtgagcgaaatgttgggcaacgtgaatacaagtagcgccctttctgcatttgagaaaatggaggaaaaagttatggcgatggaatcccaagcggaggcactcggccaattagcaactgacgatctagaaggaaagtttgcactgctcgagaattcatctgtcgatgatgatctttcacagctgaaaaaagaactctcgggaagctctttgaaaggggagctcccatcaggcagaagagcggccagcaactcaggcgccgggcgccctttccccgacctagagattgagagcgagctaaacgagctgcggaggaaggccaaagaatactagagagtagagactctccaccaaccatccttcccgggcctgacagaatctctcatttccaagtacatatagcacagctgcagatttgctccatcgcgccttggaaagttggaacagaggtgcgcctttgactgtcactgtcaaagggtatatggagtcgccgagtttctcggcattttcccgtcgacggacatttgtacagctagccataaattgttgtaaatcactacgctccctagagcccttttttttgcgtactacgtatatagtcaaagtttgaagtttccgcgtcgtggtttttacccccattttttccgtgccataacatgtgttttgtgactggagacttgggatcctcagccaggtcgatcaaatactccctttttttcttcttcttct

SEQ ID NO: 151235 - DNA, 1544 bp, Zea Mays
atcgcttctcttctccacacgaactcactcttgagagatagagcgaaacacaaagcaggcaaaaaaaaaaaggatagagagaaaaaatcattctcgtttctctcactccgctatacccccgcccgaatcgatggagattagggctccgccaacgagcctcagtctcgcgccgccgcccgcctccgccagcttccgccgaacaccgcttaggaccttcttccttaacggcagcgtttcacttaaagttgtgcaagtacgacaatcaaatgtcaacagatttaagtgcaatagcatacaaagtaacctctttgatagactaacgagggttgccaggtcctacgcaaatgcagttctaagttcatttgaggaccctgagaagattctcgagcaggcagttctcgagatgaacgatgacttgacaaagatgaggcaggccacagcacaggtcttggcgtctcaaaagcggcttgagaataaatacaaagctgcagaacaagcttctgctgattggtatcgaagggctcaacttgctcttcaaaagggtgacgaggatcttgctcgcgaagcccttaagcggcgtaaatcatatgctgtatgtgtcattgatgatgtgtagtacaatgtgcttgttttaggttttcttaccacattgattcgaatagaatttatgttacattatctatgcgacatgttttttttcaacagtctatgctgttgaatcaacatatcaaattgtattgcgtgattgtttgcttaggacaatgcaagctccttaaggtcccagcttgatcagcagaagggtgtagttgaaaatctgatttcaaatacccgggttcttgagagcaagatagcagaggccaagcagaaaaaggatacgcttaaagctcgtgctcaatcagcaaagactgccacaaaagtgagcgaaatgttgggcaacgtgaatacaagtagcgccctttctgcatttgagaaaatggaggaaaaagttatggcgatggaatcccaagcggaggcactcggccaattagcaactgacgatctagaaggaaagtttgcactgctcgagaattcatctgtcgatgatgatctttcacagctgaaaaaagaactctcgggaagctctttgaaaggggagctcccatcaggcagaagagcggccagcaactcaggcgccgggcgccctttccccgacctagagattgagagcgagctaaacgagctgcggaggaaggccaaagaatactagagagtagagactctccaccaaccatccttcccgggcctgacagaatctctcatttccaagtacatatagcacagctgcagatttgctccatcgcgccttggaaagttggaacagaggtgcgcctttgactgtcactgtcaaagggtatatggagtcgccgagtttctcggcattttcccgtcgacggacatttgtacagctagccataaattgttgtaaatcactacgctccctagagcccttttttttgcgtactacgtatatagtcaaagtttgaagtttccgcgtcgtggttttt

SEQ ID NO: 151236 - DNA, 1799 bp, Zea Mays
caacttgcacgctccggcagcgaagctcccccctccctgcctccttccccggcgccccgctcttcctccttccgctccggcgatgggcactggccgccgcggcggcggcggcggcggcgtgttccaccgcctcctcgccctctcgtcgctgctgctcctcgcttccggcgaggtcgtcttcgaggagcgcttcgaagatggttgggagactcggtgggtggaatccgactggaaaaggagtgaagggaaagcaggaaggttcaagcacacagcggggagatactctgcagatcctgatgacaaaggaatacaaacaacaatagatgccagacattttgctatctcagccaagttcccggaattcagtaacaagaaccggacgcttgtggtccagtactccattaagtttgagcaggatattgaatgtggcggtggctatattaagcttatgtccggttatgtcaaccagaaaaaatttagtggggacactccgtacagcttgatgtttggaccagatatatgtggtactcaaacaaagaagctccatcttatactctcttaccaggggcagaactatcccatcaaaaaagatctagaatgtgagacggacaagttaacacacgtgtatactttcattcttaggcctgatgcatcttatagcctgcttgttgataaccgtgaaagagaatctgggagcatgtacactgattgggatattctccctcctcgtaaaattaaggatgttcacgccaaaaggcctaaggattgggatgacagagaatatattgaagatcctgatgaagttaagccagagggctatgattctatcccaaaacagattcctgatccgaaggacaaaaagcctgacacatgggatgaagatgaggatggaatatggaagcccagaatggtatcaaatccagcatacaagggaccttggaaacgcaagagaattaaaaatcctaactacaagggtaaatggaagaccccatggatcgataatccagagtttgaggatgatccagatctttatgtgctgaagcctttgaagtatattggaattgaagtttggcaggtaaaagctggttcagttttcgacaacattctgatttgtgatgaccctgagtatgcaagaaaggttgttgaggaaacttggggtgcaaatagggaggctgaaaaggaagcttttgaagaagctgaaaaggagaggaaagctagggaggatagggaaggtcaaaaggcaaaggacgatggtggccggcatcgaatacacaggcgtcataaaaaacactacagagatcactgggacgactaccatgatgagctataaaagtccccaaatattgcattcctcaaaagcataagctggaagttgcttcggacattgtgggtgcttttcaataataataattgattcgcctggtcagaacaacctgaagtgtttcttgctatgcgccaacaaattattgaactacaggatttgatatgtaatggacaaccgaagatctgcagggcattccagcgaaaacttggctctggtactgaaatagaggggacgagagactgtagtttgtgtctgtacaacggtgccggccatgtgctagctttgtaatctcaaaacattgtctttgcatgaataatgtaagttacccaaaaattactgcataccaagttacaaagtgttgtagctgacatatgaggaacactttaattttaatcttcatatatatacttctgtaatcttcaaaaaggatacgatgcaattggtctatctctgtcatcaccttgcataaatgaac

SEQ ID NO: 151237 - DNA, 83 bp, Zea Mays
gctgcccagtgcccgtccagggggttccagacggccgcggttggggaggcaactgcactactgtcaactgcagcaaggagagg

SEQ ID NO: 151238 - DNA, 919 bp, Zea Mays
ccagaggcccagggtttcgctgtcaccgcacacctcagcgagtctggtgccggcggctgtgacgaggacagcagcaatgcaatggcgagaggaactggaggacgggtaagcgagggcacgtgaagccgttggacgcagggtggaggctatacataacagcttgatacaattggaagagagcattcggtcacctcaaggaagacgagccagttgtgagctccggaaccgaatcctctccgaaggtggtaaccaggcggggtcccatccaagcacactgcaacgcgatgaagcaggccacggcgatcagtatccggctccagacgtgccgccgatcggaaagaaaaaggaggctacggttagtttgaccgaatacccgctcccttcccccgagcgccggcgaggagtgtcaagtcaacgagcctcgatgagctggccggtgccgccaccggtgagcgggagaaggcgacagcggccaggaggagcgcgtgcaggggcgcggccacgacgacggcgagagcgcgtcgacgctgctggtgcgggatgagcggcgacagtagctcggtggccatgaccgtcgcgcgcgggaggagctagtagctagaggaaaagtgtggaagccatgcttgaaagcccgaacccacctactaccatgccatgccatgccagtttgcgagaagtatcaggctggaagaggtcaaactgatgcgcagtttctccagaaaaaaaaaacagatggttgagtggttccaaactactatatgcagtatagaaatcgttggtgtgccaatcgagagtgacgaattacgacaagctacggtcctcctgttttcagacatgtggttcaactccgatctttcttgccgagattcttaccatgtcggaccccgaatctcctgacgggcgacgagacgacagaaat

SEQ ID NO: 151239 - DNA, 1419 bp, Zea Mays
cccacagcttgcgtggtctgtggtctcatctcactcacactcactctctctctcggcgacgtctacgccgagtgcccaggcattcttcaggcgcaggtcgctgccgccctacgccaggtgccccggtcttctttcgtcccttcgccggcgacgaccaccgccagtatagcggatggcttcgtcggtgcgggcgccatcggggtcggtgatcgccgtggcatcgtcctcttcctcagcagccttggccggggtgtgcggcacgggctcgccgtgcgccgcgtgcaagttcctgcgtcgcaagtgccagccggactgcgtgttcgcgccctacttcccaccggacaacccgcagaagttcgtgcgcgtgcaccgcgtcttcggcgcgagcaacgtgaccaagctgatgaacgaaatccacccgttgcagcgcgaggacgccatgaactcgctcgcctacgaggccgacatgcgaattcgcgaccccgtctacggctgcgtgggcgtcatctccatcctccagcacaacctacggcagctccagcaggacctcgcccgcgccaagtacgagctctccaagtaccaggcggcagcggcggcagcatccgcgtcgacggcgccgaccgggccgcaggcgatggcagagttcatcggcagcgcgatgccgaacggcgccgcgcacaacttcatcaaccttggacactcggcggcgctcggctccctcggaggctccaccgccatgttcgggcagcaggagcagttcggcagcaacgcgcagatgctgtccaggagctacgacggcggcgagcccatcgcgaggatagggatgaacaacggcggctacgagttcggttactcgagcgcgacgacgatgggcgggtctgcaggcgctgtctctggcggcctcgggacgctcggcatcagcagcccgccgttcttgaagtctggaaccgccggcggcgacgagaagcccagcggcggttactgacgcgatgaagaaacggggaggaaaaaaatatccatgaaacgcgtgcaaggacttatcctagacgtccgccgttgtcaggagggggctaatttccagacgattttacatggaaaaagtgcgtcgcttgcgtgcgtgcgtgcttgcttttgttgctagattcattgcttgtttgttaattaccacgctatctaccctccccatccacatcatccacgagatcgtcagatattccatgccagcgtccacagagtggcctatgttcttgttattagttgctgtactgcgaagggagggggacaaaatgcatgcttgtccggcccggacctttttttttaccccactcggaagactagcgcccatttgtactccatgtattattgctaggttggctgtaatatatgaagttgaccttttgagaagaggtgcagttgctt

SEQ ID NO: 151240 - DNA, 1742 bp, Zea Mays
cccacagcttgcgtggtctgtggtctcatctcactcacactcactctctctctcggcgacgtctacgccgagtgcccaggcattcttcaggcgcaggtcgctgccgccctacgccaggtgccccggtcttctttcgtcccttcgccggcgacgaccaccgccaggacagtatagcggatggcttcgtcggtgcgggcgccatcggggtcggtgatcgccgtggcatcgtcctcttcctcagcagccttggccggggtgtgcggcacgggctcgccgtgcgccgcgtgcaagttcctgcgtcgcaagtgccagccggactgcgtgttcgcgccctacttcccaccggacaacccgcagaagttcgtgcgcgtgcaccgcgtcttcggcgcgagcaacgtgaccaagctgatgaacgaaatccacccgttgcagcgcgaggacgccatgaactcgctcgcctacgaggccgacatgcgaattcgcgaccccgtctacggctgcgtgggcgtcatctccatcctccagcacaacctacggcagctccagcaggacctcgcccgcgccaagtacgagctctccaagtaccaggcggcagcggcggcagcatccgcgtcgacggcgccgaccgggccgcaggcgatggcagagttcatcggcagcgcgatgccgaacggcgccgcgcacaacttcatcaaccttggacactcggcggcgctcggctccctcggaggctccaccgccatgttcgggcagcaggagcagttcggcagcaacgcgcagatgctgtccaggagctacgacggcggcgagcccatcgcgaggatagggatgaacaacggcggctacgagttcggttactcgagcgcgacgacgatgggcgggtctgcaggcgctgtctctggcggcctcgggacgctcggcatcagcagcccgccgttcttgaagtctggaaccgccggcggcgacgagaagcccagcggcggtcagtaggcggttccatccgtgtgaccgatccttctatccatccatccatccatcagtcttgtcaggtttggtttggttttgcatttgcatgctgcctgcacagtgttctagtctgttgtgttttgccttgtgcttccgattaattcgcgagtctggtggactactgttagtcagtttattttctaggtagaggcactaatgaagcatgactaaaataagggtttcattccatttccagggctaaataaataccttttgttgcatgatgctagttggagcgtccttgttcggaacaaaacattgtagtagaactgtttggatccataatatatattatcaatgatgactaggtgcatgcatgcatgcatatatatgtgtgtacttgaacactagagcttttctgagcttctttctgatcgacggaacgcgcagcatctgttttgtcaaactgttttgcttttagatcgggtggtacatgcacacgggcgtgttgaacagatctcttttcggtttttgcgtcgatcgtgtgtgtgcctgtgtggtcactggtgaacctaagcttccgtttcttttcttttcttttctttgacaagtgcgctcctggcctgctaaatctgttgaaacagaagagacgccattggctagcaaatcctggagctgttcttgtttgtatatatactatctcttggcagcacggtcctctaacaattaaccaagtgtattttttgtaaattaaaaaaaaatgtctatacgagggc

SEQ ID NO: 151241 - DNA, 1515 bp, Zea Mays
atggccgcgggcgcgggagaccccgggcagctcgaccaactcttgctgctcgacccctacgccgaggacgacatcaccaactactgcgtcgagttccataatgctgtcgtcattaccatctactcctccatcatcatcaagccggagacgggcagcagtagcagctcttccttcgcgtgttcgaccaaatgtcctagccaggcactgcacaacattgcactgaacgtcatggttcagcagctgcttgtttctgttggctcccctagcaatgctcttgtgctcaagattccaattcagggtgttgtggatgcacttcataggaaaacacttcagggcacaggtctgaatgaagagcaaatgagacaggctagcgtcgcagacaatggtcatcgtcagctaaacaagataattgttgacttggatcaagataacattactgctaagaattatgcaattgcattttacacagagaagcacattcagattccatgcttgggcggtgaacacgaagttactttcttccatgagtatagagattcagttgaacgggtgtttgttgatcatccctcgtatcacagacctggaaatttatatggagctaaagttgttcttcttgggttccaacattatccggtcatgcttggtacaactgtgatcataccaactgcacttgttccacaaatgggaggaaaatatgaggacaaagttgtggttatccagacactgatgttcgttgtaggtatgaacaccctacgtcagagtttcttgggtaccaggttgcctgcagtgactggcgggtcatacgcttttgttatgtataccatttctatcatccttggtggacgttctgctaatgaacctagttcacacattaaatttctcggcatcatgcgtgggacacatggtgcgttgattgtggcttcagctttacagattatagttgccttcagtggcctttggtgtaatgttgccaggtatctgagttcactttcagctactgctttggtggcactagttgtatttggactgtatgagttagaaattccaagagcagggaaaataaaggctttgtccgttgatgcagtaatagtgtttggatcacaaaggattcctcaggaggaaagacaatgtacaaagattagctattccggtgccgcgggctccgccgccgcctccctcgtccgttgcctcggcgagcgcggtggcgccgacgcaaggcccgcaggcgcgctccacctaggcctccaggtcgtgggcgccacggcgcagagccggcccacggccaccgcggcggccgccagcacggccacgacggccagcatggagatcaccgggccgtacgagtacgacggccctctccccgccgctcccacgggcgcgcctccggtggcgtacgccaccggcatcagaagcgccggcggcatgggcgtcgacattgcccacgggctagatgccgctgagcgtgtttgctcgaaccgcgcgcgtgcagctccagatgagatggcagctctctag

SEQ ID NO: 151242 - DNA, 675 bp, Zea Mays
aggcagccgcagccttcccttctcatcctcgactgctgatcggagaaagaaagctctccgatcggaggggtcaacaggctgtctgaaactctgaatgagctttgcggccggcagctccgaggatcaactcaactcgtcgccgctcgccatggaccggagaccggcgaggacgagaagcgaccctcctcacagcagcaggggcgcggtgcacgatgccgttgccgtcgagcagaagcagcaccggcggccgcaaggaacgggggcaccgccggtgtacttcaccgcggagctggtgctggcgtgcctgttcgtggccgtgtcgctggcgctcctcccgctcgtgctgccgccgctctcgccgccgccgtccctgctgctgctggtgcccgtgggcctgctggccgtgctcctcgcgctcgcgttcgtcccgctcgacgcgcacagccacctcgccgtcggctcctcccgctgatcccgtccgtacgcgggaggtggaggctggagatggagagggttaggcccgacgtacatagaatcagattagtttagtgacgaatacttactttttttcggggtgattttgagatatatttgctgtaaactggtcggatcaggtggattggaaccttgttttatttggtcccgcgcacttgacccaattgcagggaatgaaca

SEQ ID NO: 151243 - DNA, 1249 bp, Zea Mays
gcgcgaggcgatgctgcagtctccgcctccattccggcctggtgtccaccctttgtcgcttcttctctgcgaccatcgtcaccaccagccaccatcaccatccctcccctcggcctcgcggtcgcagcggtcagagcctccgagatggagctccgcctctgcctccgtctccacgcgcgcctccctcctgccacgacgccaccgcctttccaggcgaccgcggtgctcccggcctcccgccgccttcggacgggtggtagctacggggttgctcttaggcggcacacgaggcgttcgagtccggcaatctgcgcttcaataaccgacggcgagcagggcgtggctgtgaaggagaggagcgtctcggtgatcctcttgtccggagggcagggaaagagaatgggggcgaatatgccaaagcagtatctacctctactaggactaccaattgcattgtacagtttaaaaacattctgtcaactgaaggaagtcaaagaagttgtggtagtgtgtgatccagactacagtgatgtatttgaaggttctattgacaacttgcaaataccccttaaatttgcacgcccgggaaaagagagacaagactctgtttttaatggacttcaggaaattgatggggattcagaactagtttgtgtccatgattctgcaaggcccttagtttcttctgaagatgtaaaaaaggtcttagaagatgctgcagtacatggagcagctgttcttggtgtgcctgtgaaagctacaataaaggaggccaatactaattcttttgtagtgaaaactcttgaccggaaaactctctgggaaatgcaaactccacaggctatgaagcccaatttactcagagatggttttgagctcgttaaacgggatggccttgaagtcactgatgatgtatccattgtagaatatctaaaacaccctgtgtatatcacggaaggctcttatacaaacattaaggtgactacgcctgatgacttgctactagctgagcgcctgatgaatgaggaatagaggtgataggcaaaattagctctttgcctgattttacagacaagtacgattttgtaggacggcatttatctacacttctacagttttcaaaaaccaaaataattatggagctcatgctcgagatatctgagctctctgtagacattatgtcattctttctatattatatatcaatgaaaaaatggccacgctttctgccgagttcatgctttggcgg

SEQ ID NO: 151244 - DNA, 1229 bp, Zea Mays
gccactctgcgcccatcgcggccactctatattatctctctttcgcccacctgatcaggcgtcgccgccatccaccggacgcggcagccatggcgccagcggtgaggctcaagcgctcctccacccagactatcacactgccgccgcccgacgcgcggctggctgtgcgcgatgtcatgcggtccacgatcccgtcgcggcccgccgaggctccggcgtccacggagaggccggcgcccgccgcggcgctgcaggggttcctgtgcctggaggaggtggacgggaggcgctggagctatgtggtggacggcgggtccgcgaaggggaggggcagtggcggggtcgctgtccccgctggcgcctccgtcagggccgtaccgctgcagtcgccgcttccgcctgccgaggaaataatgtcattcataagatcatatgttgtgcctgaagggtttccagacagtgttactccttcatatgtaccttacatgaactggagggctctgaagcatttctttggtggtgccatgggggtgtttacgacaagaaccttgctgagttctgttggagtctctcaaagcaaggtaataccaggtgccattgctatcaactggatcctcaaggatggtgctgggcgtgttggaaaaatgctttttgcacgtcaaggaaagaagtttgacaatgacctaaagcagttgcggttttctagtgatctcttgttggaaataggagctgggatagaattaactactgctgcattccctcagtttttcttgcctatggcctgtgtagccaatgttgtaaagaacgtcgctgctgttacatcaacttcaactcgcactcctatctataaggcctatgctagaggagaaaacattggagatgtcactgctaaaggcgaatctgtcgggaacattgcagatctgcttggtactggtttgagtatctttatctcaaaaaggaacccgtcactggtgacttcgtttgccttcctttcctgtggatatctcctgagttcatatcaagaggtgagatctgttgtgctgaataccctaaacagagcgaggttcaccgtcgcagtagattccttcattaaaactggtcacattccctccttgaaggaaggaaactcacaggagacgatatttaatccaccttggcggcacgagacagtcgccataggtttgtgcaagtgcaagtgttattcaaattgtgttcctttcttgagatac

SEQ ID NO: 151245 - DNA, 1190 bp, Zea Mays
gccactctgcgcccatcgcggccactctatattatctctctttcgcccacctgatcaggcgtcgccgccatccaccggacgcggcagccatggcgccagcggtgaggctcaagcgctcctccacccagactatcacactgccgccgcccgacgcgcggctggctgtgcgcgatgtcatgcggtccacgatcccgtcgcggcccgccgaggctccggcgtccacggagaggccggcgcccgccgcggcgctgcaggggttcctgtgcctggaggaggtggacgggaggcgctggagctatgtggtggacggcgggtccgcgaaggggaggggcagtggcggggtcgctgtccccgctggcgcctccgtcagggccgtaccgctgcagtcgccgcttccgcctgccgaggaaataatgtcattcataagatcatatgttgtgcctgaagggtttccagacagtgttactccttcatatgtaccttacatgaactggagggctctgaagcatttctttggtggtgccatgggggtgtttacgacaagaaccttgctgagttctgttggagtctctcaaagcaaggatggtgctgggcgtgttggaaaaatgctttttgcacgtcaaggaaagaagtttgacaatgacctaaagcagttgcggttttctagtgatctcttgttggaaataggagctgggatagaattaactactgctgcattccctcagtttttcttgcctatggcctgtgtagccaatgttgtaaagaacgtcgctgctgttacatcaacttcaactcgcactcctatctataaggcctatgctagaggagaaaacattggagatgtcactgctaaaggcgaatctgtcgggaacattgcagatctgcttggtactggtttgagtatctttatctcaaaaaggaacccgtcactggtgacttcgtttgccttcctttcctgtggatatctcctgagttcatatcaagaggtgagatctgttgtgctgaataccctaaacagagcgaggttcaccgtcgcagtagattccttcattaaaactggtcacattccctccttgaaggaaggaaactcacaggagacgatatttaatccaccttggcggcacgagacagtcgccataggtttgtgcaagtgcaagtgttattcaaattgtgttcctttcttgagatac

SEQ ID NO: 151246 - DNA, 588 bp, Zea Mays
caggacggttgctcaatcaaaaggcaactcctgtttacatggaaaaggtgccccggatctatctgctcgttagagcttaacaggaatggagacagagtacaggtgattttgtgagcaaaaagtagccggcctgtgttggggtagacatgttacacgatgtacgaagttgcctttcaaattacaagctaacaattctagacagcatgtacgcttcctcgagctccccggccaaaccatcgtaccatacctgtaaattcatcacattggttcttgttatgtactggtccaatgcaccatcccctcggagaattttagccccacaacctggcctatcaacggaaccaatcgcctcctcatccaccacaacagcgtcaactcgctcatttcctgttttttcgtctggaacctgcttaacaggagattcagaatgtatggctcaactttgctcttcttgtgtaacagttcaagaggcatacctcatacatggcctccaaaagaacagtttccaagatggctcttaaaccacgagcaccagtgcttttagctatcgccttcttagctaacaatctaagtgcaccatcagtaaag

SEQ ID NO: 151247 - DNA, 1928 bp, Zea Mays
tgcccagaacataatcaagcttccactcgtgcattgatttatgggtaatagtcatatacatcacactaccatagtaccatgggtactgagtatccaatcatttacaactccagcacacaagatcgatgacataaggattcaggaaataaaaatataagcatgggtatacacagaaggggcataaactagatcaggtcctaaacttacaaggtcttccacaagtgtgtagttccaaattacaagcagccagtagtacatctgctgctgggcatcgcataatatgcccgcctgtggcaacgtgggctggggcagttgtacttgtactactagctcgatcacgtcatctcacaggtgtcccagcacaggccatggagtcactccgttggcaggaagcataggttttatgataggagttcgccgcgccaccgtcatggattcattcagacgtgatccttggcccttgaattgggagaccttctgcagagacgcacaagcccagggggaaaaaagtttcagtcagtaagggagaataagcattgcaaaccgaaacagaggtaatcaataaaggatgggaaacatggataaggatcaattagagcatctaaccccagcattccaaccaatgactcgttgaatcgtcgatctaggaatactctgatattacatctgctctgccattcataatctgttcacgttctacaacgaagtcctataagttgaagcaaccgcagatgcaattgtaggagtattttgtttcttttctgtgatttggcttcagcacaaacagcacaagggcatctccaaagacagtcagctaccgtgaccgtgaggcatgacatcgtttattcagtgaaggaaaaaaaaatgcaacgagcagctaaggtcgcaagtacccaagctagtcatcgctaagctgtaagctgagagtatgtatcagtttctacagacgactgtggaagaaccaacaagcgcgtgaagaaggcgagatccacaggtgaggagcaagacgcgtgcagggaagatgatgggaaggcgtcaccttctcgtcgaggacgaggcggacgcgcgcgacggccttgctctggcggcgcatccggtacagccggcgcccgagcacggcgaacccgagcagcgcgacggcgagcggcaccgaccagacgctcctggccgcgcgcagcgcccacacccgcagcacgtccagcggcagcctccaccactgggccggccctcctcccttcgccacggccccctcgcccgcgtcagccgccgccgtgaccccggcccgttccacctgatcggcggcctcaacctcgacctcgacctcgggcctctccccgtcggaggacgagtgcgaccagagcgccgcgcggtcgcggccggggaagagaaggtcgtcggggtccggctccacccagcccgcgttgtccgacgccgcgaaaggcccctcctccgcacactcctcctcgcttcccttcgacggcgacgccctccgggggtacttggcgtcggagccgaggtcgaagtagtcgtgcttgatggcgccggcgtcgacctccccgtctcctccgccgccggcgtacggctcggccggcgccgccttgggggacgcgaggaggagctcccagtcctcgtccatctcgcggaggccggctagggttcgcgggcgggattccgagggcaaataggaggggaaccgttggatgaaggcggactggagcgagtggtgtgccgtgtcgggtcggggaacgggggccgcagattcgcgagctgcaaggaaacggtggttatttcgcgcttgcttgcttgattgcttggagtttagcgtgtgtggggaagaagggggcaggaattcgattcctttttttgtttgtgcacgagtcatcaacagcgattcggttggtcgcgagtaaaccagcaaattttacaga

SEQ ID NO: 151248 - DNA, 1778 bp, Zea Mays
atgaggccgcgcctccctccaaatgttccctccctgccttcgtctttgtcgttgctcgcaaactccctgtcctcccctgttacaaatacccccacccgcccggacagcttccctgcatacttgcagctcgcacatctcatggtgtcgcaggaacgacaagagccagctgtgcctagcagcagcagcagcagcgccaagcgcgcagccacgtccatggacgccagcccggccccgccgctcctcctccgcgcccccactcccagccccagcattgacctccccgctggcaaggacaaggccgacgcggcggccagcaaggccggcgcggccgtgttcgacctgcgccgggagcccaagatccccgcgccattcctgtggccgcaggaagaggcgcggccgtcctcggccgcggagctggaggtgccgatggtggacgtgggcgtgctgcgcaatggcgaccgcgcggggctgcggcgcgccgcggcgcaggtggccgcggcgtgcgcgacgcacgggttcttccaggtgtgcgggcacggcgtggacgcggcgctggggcgcgccgcgctggacggcgccagcgacttcttccggctgccgctcgccgagaagcagcgcgcccggcgcgtccccggcaccgtgtccgggtacacgagcgcgcacgccgaccggttcgcggccaagctcccctggaaggagaccctgtcgttcggctaccacgacggcgccgcgtcgcctgtcgtcgtggactacttcgtcggcaccctcggccaggatttcgagccaatggggtgggtgtaccagaggtactgcgaggagatgaaggagctgtcgctgacgatcatggagctgctggagctgagcctgggcgtggagctgcgcggctactaccgggagttcttcgaggacagccggtccatcatgcggtgcaactactacccgccgtgcccggagccggagcgcacgctgggcacgggcccgcactgcgaccccacggcgctcaccatcctcctgcaggacgacgtgggcgggctggaggtgctggtggacggtgagtggcgccccgtccggcccgtcccgggcgccatggtcatcaacatcggcgacaccttcatggcgctgtcgaacgggaggtacaagagctgcctgcaccgcgcggtggtgaaccagcggcgggcgcggcggtcgctggccttcttcctgtgcccgcgcgaggaccgggtggtgcgcccgccggccagtgctgcgccgcggcgctacccggacttcacctgggccgacctcatgcgcttcacgcagcgccactaccgcgccgacacccgcacgctggacgccttcacccgctggctctcccacggcccggcccaggcggcggcgcctccctgcacctagcgagccgggccaaggccgtctctttcgccccacgtgcgcgcccagctgggcaggtggccagacacgcggcccgcgggccccgcgccgccttgccattttttgacgctggccctactgctgtgctactagtgtacatatgcaagagtacatatatatatatatatatacgtattttctatatattatatataaaagcaaggcggcccggtgcccttctcttgttttgtccacaactgtttgatcccattattctatggaccatggatacttcaatgtttgtactaagaccgtgaacgtgggattcttttccttcctctgtgttttttctgagaaaaattaaactgatttctgtgaaatttctttgttttaacaagaaaacagaaaaa

SEQ ID NO: 151249 - DNA, 1360 bp, Zea Mays
atgaggccgcgcctccctccaaatgttccctccctgccttcgtctttgtcgttgctcgcaaactccctgtcctcccctgttacaaatacccccacccgcccggacagcttccctgcatacttgcagctcgcacatctcatggtgtcgcaggaacgacaagagccagctgtgcctagcagcagcagcagcagcgccaagcgcgcagccacgtccatggacgccagcccggccccgccgctcctcctccgcgcccccactcccagccccagcattgacctccccgctggcaaggacaaggccgacgcggcggccagcaaggccggcgcggccgtgttcgacctgcgccgggagcccaagatccccgcgccattcctgtggccgcaggaagaggcgcggccgtcctcggccgcggagctggaggtgccgatggtggacgtgggcgtgctgcgcaatggcgaccgcgcggggctgcggcgcgccgcggcgcaggtggccgcggcgtgcgcgacgcacgggttcttccaggtgtgcgggcacggcgtggacgcggcgctggggcgcgccgcgctggacggcgccagcgacttcttccggctgccgctcgccgagaagcagcgcgcccggcgcgtccccggcaccgtgtccgggtacacgagcgcgcacgccgaccggttcgcggccaagctcccctggaaggagaccctgtcgttcggctaccacgacggcgccgcgtcgcctgtcgtcgtggactacttcgtcggcaccctcggccaggatttcgagccaatggggtgggtgtaccagaggtactgcgaggagatgaaggagctgtcgctgacgatcatggagctgctggagctgagcctgggcgtggagctgcgcggctactaccgggagttcttcgaggacagccggtccatcatgcggtgcaactactacccgccgtgcccggagccggagcgcacgctgggcacgggcccgcactgcgaccccacggcgctcaccatcctcctgcaggacgacgtgggcgggctggaggtgctggtggacggtgagtggcgccccgtccggcccgtcccgggcgccatggtcatcaacatcggcgacaccttcatggtaacgaaacgaaagcgctcgctcctctgttttccttggccgctcttgtcctgtgtgtatattcagttgagctctctctgtgctgttatttcccgaatcctagtggacctaaacgggcaggttattacagcacgcacacgtaggcatgtcatgtagctagtacatacatagcgatgccgatgcaaatgcaatagagacatgcgttcgagttggttcctatctcggcgggctacggcaggtacac

SEQ ID NO: 151250 - DNA, 392 bp, Zea Mays
atgaaccggtgcgcagtatgcagagcaccacgagtaaacgaccgacctcccgtcgcccctcctgtcttcctcttccctcgtgtattccctctcggtcatgctgctcggctgtacgcgctgctcggactacagcggcgaggcaacttcttctgctccgtgggagggggcagcaacagggacgacggcgaagcagtcgagctcaccatcgttgacagctacggcgaccttgaccagagcataggatgcttggagctcatgtaccgtgaggcgacctcgtgggacttgggcggggaggagcgacggcggaggatctcgatgacggggacgatgaagtcaagcacgggagtgaactcgacgcgcgagtgaaacagtgcatagcgagcgacagcgag

SEQ ID NO: 151251 - DNA, 935 bp, Zea Mays
accccagaggcaccggggtccggggcatagaggcatcataagacgggacaataatcttgcagagttatggcctcaaggtttcatggatagtgttggaatcaaagatgccatttatagatgaaaggagcgaagaagattatactacagccagcaaaaggttcgcagcgaagagagaatgaaaaggaagaggctggctgcagcagcaaagctggaagatggcttcccagttgtaatgcgagctggtgttgccccacaagtttcacaaccacccataacaaacaacatcacataccagattatggacagaaccaggggtttaaattttttgacagggctcgtgaaacgagctccagtggaattcctgatgacggcaacagaaatattggcgagatcaagaagaaaagaaaacctgaatacgatgttgtagatacacaagctaacctaccaaaggctcccttaccgcatgggagagaagcaaaagccttctaagcctgctgacgaggccagtgctggtagcctgccctccacgtcgacaactcaaactgtgcttggcctaccctaccatcggtgcttggtcataaccaacaacctaactgatcatttcggcatattgttggacatttggttatccttataggctcttttcagctgctgtacaaaattatggcatttccatgtgttcagcatccatggtcaaggccatcacctttccgagtcgagaggatatttgaccatttgcaattttctagcattgcttggttcctttggccaggttatctgtgccacgctgataaatatggtcagatgcagatttgcacccctacaaatatcggttgtaattatgaatcgtttctgagacatgcgttcatattgtgcgatttaaaatctcattcagcgaggtgcagatttaatatcattgacaaccgcacaaaaca

SEQ ID NO: 151252 - DNA, 387 bp, Zea Mays
atgcttgcattctctgtgatgactctcagagtccgcattacttgttttgtggctctgttctccagatcctgcatgttaaattccacccctgcccctgcaacccgtcggctctgtcgtagcgcagtaccatgttttgtggcaccccttgaccgcttggggaggacaggagcagcaaggagctgtgaaggtgccattgttatcttagccatgaatgatcttcttctagattccatagaagataatggatccaatgaggagtcacatgaatccccaaaattctgcctggaactgtcatcagaggctaccacctcatgcctgagtggaacagttgagtctgcgtcagccctcctcgctgttccattgtactctaataataatggcccctga

SEQ ID NO: 151253 - DNA, 685 bp, Zea Mays
aactgatgaacctggcggatcggcaaatgtcgctccaaagaaaaggagaagaaaggatgcatcaagtacttatctggagactaatcatcttgctccagttgattattttgatattggctatgtacctggaaaatcctctgcaagaggtactgcgaaggtgggaaaacaattagctagtagcaacataggttcttatggtcaataccacgaagacaatagagtggtgaagaataaaaccagtggtcctggaggagcccctagaagaaaatcttctgaattctcggttggtgatgctgcagcacgcgctaaggttattaaggatgtctcagatgctcctttggagctaagagacttggaaaagcaaaaggctgcaccaccacctgtttcctatgcacataagtcaaaaaccagtgaggcatttgattatgcttatccagctgacagggataaaggcacttcagcacaacttggtttccaacaaagaaagcacccagttgttggtagggcaggttcatgtattaaacccaaaggcaccaggcttgagcgaggtattcgtgacctccagaagattgctgcagaatacagaccaccaacaattgatattaatgaggttgatccaaatggccaggcagcagttaaaagacggttgcctcctgaagtaaagcaaaaggttgcaaggttatcg

SEQ ID NO: 151254 - DNA, 1070 bp, Zea Mays
gattttttaaatttttttaactcatgcaccatgtactcatgcaagcaaccaaacaacatctcttgtgaaccagactggccacatacacacaaccaaacacgctatactgcatgcactcagccagtccagtctgagccaggctcactagatacgagccaggctcacccatacaagtaaccaaacgccccctaagagaacctggaaccggctgcgtctgggagagtggctgggtgccgtcgtgtacgaactccaactatacctatactccagaaatcttcgtgagaggaagtcgagcgccgggagcggcgctcaactcatccgctcaacggggttctaacactatccatggaagaccccgtggcggcgccctcttcgtcttccgccgccccagctgcttccgcagcggctaggatttcggcggcggcggcggcggcggtaacatctgccgttacctctgcgccgcccgctctcgctccgctgcagccgtctggcaccgccgctgcggtccctgaagccgcgtcgacgtgccggaggcagctgttcacggtggagctgcggccaggggagtccacaatcgtgtcgtggaagaagcttctcaaggaggccgggcacaccgccacggcaccgccagtggcgccggagccaaagttcgctgcacatgcgggcccatctggtgctgtaagcagtcattttgcggttgttgcgtgttggttggttacttggttacctgctgcatcgatgtaatctgtgcgctatctagcttagccttttgagttcatgaaaatagaaggattccctgctgactgaaggtaagatctggaagatggaacgtgagggccgtttgtgtttggtaggtagcaatagcaacatgtccatccctcctaaaattacacctttagggaacctgttcatagggatggcgatgacaacgttgatcttttttttgtaggtgcctgtgctctatcttccagagatgttctacagcgagtatcagttcctcttgtaatctgccaaaaccttgaaagcatataggtccaaatcaatgacacctcatcgtgatggattgttgt

SEQ ID NO: 151255 - DNA, 2300 bp, Zea Mays
gccaagttgccagtcactcgctcgatccgactgacaggttggtcccacgagcacccactccacgggcgcttaaaacacacacgacacgactaaacgataacacgagcacattggcatcgccgcctcccttgagttgagctccgctttcgctttgcatcgggttctcgtccgctcgcccaccgggatggcggcggtgtggaagtggaagcatgccgtcttcctcgtcctcgtcaccatgatgcgcccgcaggcggccgaggccggtggcgccgccaacgccacggcggcgtgcccgctcgacctgggctacgtggccacgctcccgtgggaccgcgcgccgtgcgagccgcccgtgaccaacggcaccgcctgctgcatgacgctcctctcggtgttcgccgtgggcctcgcgtcgcggctccgcgccacgggccgcttccgcctcccgtccgcgcgggcctcggcggcctgcctccgcgccttctcggcggcgctcgccgcgccgccgctctcgctgccggcctccctcgtgccgggctgcttcccggtccagtcccagttcgccatctccccggactactgcgccggggtcaccaccgccgcggagtacgtcgcggtcgccggaaacgcctccgccgccggtctcaacgcctcctgcggcgccgacgtcacctccatgtcgctctgcaaccgatgcctcgccgccggggtcgacgcctcggcgcgcctcaccgcggccgccggcaacgaatccaagtccctcaactgcttctacctcaccgtgctctacgcggccgggatctccagctccgccggccccgagtcccccgtcactgcgaggtgtgccctcggcctcgctctctccacgcctcccccaacctcgtcgccaacctctagctccgccacccacaccaccaacatcgcagtagccgccaccgtcccgatcgcctcgctcctgctcgtctccctcgtcgctctcctcgtctggaggtataggcatgagctctccaaggacagacggagcatccaaatctcggaggagcggcgctcgcgcccgcggccaaacaccggctccgtcatgttcgacatctgcgagctggcgaaggcgaccggcggtttcgccgagcgcaacctcatcggccgcggcggctttggagtcgtgtaccgcggcgtgctcgtggacggcaccgtcgtcgccgtaaagaagatgctcgagcccgacgtggagggcggcgacgaggagttcaccaacgaggtggagatcatcagccacctccggcaccggaacctggtgccgctgcgcgggtgctgcattgtcgacgccgacgctgaccccgaccccgacgagggcaagcagatgttcctcgtgtacgactacatgcccaagggctcgctggaccagtacatcttcgacgacgcccaaggcaggcggcggccagcgttgtcgtgggcgcagcgcaggaccgtccttctggacgtggccagggggctcgagtacctgcactacggcgtcaagccggggatctaccaccgggacatcaaggcgacgaacatcctcctggacgcggacatgcgcgcgcgcgtggcggacttcggcctcgcccggcggagccgcgagggccaatcgcacctcacgacgcgcgtcgccggcacacacggctacctctcgccagagtacgcgctctacgggcagctcaccgagaagagcgacgtgtacagcttcggcgtgctggtgctcgaggtgatgagcggtcgccgcgcgctcgacctgtccgacccgtccggggtcgtgctgatcaccgactgggcgtgggcgcacgccaaggctggccggccgggggatgtcctcgcccaggcgctgcggaaggagccgagcaccagcgtggcggccatggagaggtacgtgcttgtcgggatcctgtgtgcccacgtcacggtggcgttccgcccgaccatgccggaggcactgaggatgctggagggggatatggacgtgcccgacctgccggacaggccgcagccgttcggccagaggatcgcgttcgacgaaggcgaaaccaatttcagcgcctcatcgattctgagcggcggcggcccattcgtggactttggagacatgctcaggtgatgcacgatggcagcggcgacgatggttgcgtgcaagatgagtatccacagttttcacatgctgtgccacactgccgcaagtgtatggttaactggatttcagagtgatgtatagcgtttcagctaatgtaaatggattgtatgcaacatatagtgaaaagctaacagcgtgt

SEQ ID NO: 151256 - DNA, 914 bp, Zea Mays
aactcagagcacgcgctcttcgccacagcgtcgatggcggagaatgaagaatgcaaggtcctcattgaccaacaagggagcaacgatgtcgccgacccacacccaccgtgcgaggaagaagaagacgacgacggcgacgaagacgatagctggagcttcatcgtggtcctcaacctcgtcctcggcggcacggcgcgcctgaacgtgctcctcccgaccgccaccatcctggccttcgccatcttcgcccctctcctgaccgacgacggcaagtgcagcacccggttgaaccgcatcctgacggcggccttcgtggccctctgcgccgcgtcctgcgtcttcttcacgctcaccgacagcttccgctccgcctcgggccggctccggtacggcgtggcgacgccggcgggcatccgcacgttctgcggcggccaccggaggaggaggaaggggccgagggagccggagctgtacaggctgcggtggtcggacctgttccacagcgcgctggcgctggtggcgttcgtgacgttcgccgcctcgcaccacgacatggtcctgtgctactaccccggcgtgccccgcaaggtggtcaacaccgtgccgctcgtggtcggcttcgtggtgagcctcctcttcgtgctgttcccgtccaggaggaggggcatcgggtaccctttcctgctccgcaccgacctcgtgtacctgcgccggtgaaacttgacgggccgcgcggcggctgtgcgcctgcacgatccggagaagtctgaccgtgatttgtactccagttcacatacacggaaaactctacatggtttgcattgtttctcttctgaatttgtttctcattcagcgctaagctgcaaagaatggcagggagagacaagtgtgtcccagaagcagtctggagcgta

SEQ ID NO: 151257 - DNA, 1657 bp, Zea Mays
ctccccacatttcgttgtgtaccgcaaacagcagagagaaaacggaatcccagatccacccctccccatctccatccgcggccatggcctccgccgacgccggcacttgcccgtgggatgccctcccgttgcacctccaggagcgaatcctctccctcctccccatcaccgaactacttcccgttgccgccgtgtcccgcgccttccaccgccttctgcgctccccgaccttccatgccctcctctccccgcatcgcctcgacgccttcttcctcctttccccacggctcgccgtccacccgctgtcccgccgcgtccgcactatgcccgcgttcgccgcgctctctcctccttcctacccgctcgtctcctccccgtccccatcactccttatcacctgcgcctcactccagttcctcccgccgatccccgacggagcctacctcctatccgctatcgtcccatcgcgcggctcctccacctcctgcacccttgtcgccgtcatcaccggcgcagccgcgcgttcttacaccctggacaccggcgatccctccccgcagtgggcgtctagaggcgatctcccgctgtctctcacgctcctggaaaacgccgcggtctccggtgaccgcagcaaactcttcgtcctcggccgtggccccgaggcgctcttggtttttcatctcgtgacggggacatgggaggtgctgcatgttgtgatgccacaaggtctcactacggcgcacctgtttctttttgatgggagcctattcttagtaggtggtattgagagctttggagtagtggatcgggtggtggtctggcggttggacgacgataaggtggaggaggtgtggtggagggaggtgagcgtgatgccgacggaggttttcgatgagttgctagctggtaggtttggcagattctggcattttcaggctgcagacagattggggattgtttgcttgtacaatgctgtggatcggaggctggtcatgtttgatgcggctgatggcatgtggacagtgctgccacgattgtccgcgttggatgcatgcgagagcttcaggtggtttggacatgtcttggagccaggagttgaaatcttgatgggactacgttgacatcccgatgaagatttcatgctaacatcattaaattcataaagctagagttactagaagagctgtatgcaaatccctgaaaaagaaggaaaaaaaactggtggagcaaggaagtctcataatccgaaagataacaagtgatatctacaacaaagctcatggatggaagccggtcgatagacgcattcagtgatattttggctgttgttctgtctttttgggttcatctgttttgttagatgtaatctggctggctctttagtttggtaaaatcttagctaagttcgtcgctgaagttgtcagaaccaggctgcctttggttgggttgttttggtcccttcggttgaacatcagttttcaggcggtctgaaaacatttcctgctatggaaatgttcctctattttagctgatagttgcgtatgtcttgtcggcttgtagttgatgttggcttgtatggttgtgtaagaactttgtccttgtctatttcctaatgaaataggggtgctctcctgtgtcaaaaaaaacagattttgtt

SEQ ID NO: 151258 - DNA, 1577 bp, Zea Mays
ctccccacatttcgttgtgtaccgcaaacagcagagagaaaacggaatcccagatccacccctccccatctccatccgcggccatggcctccgccgacgccggcacttgcccgtgggatgccctcccgttgcacctccaggagcgaatcctctccctcctccccatcaccgaactacttcccgttgccgccgtgtcccgcgccttccaccgccttctgcgctccccgaccttccatgccctcctctccccgcatcgcctcgacgccttcttcctcctttccccacggctcgccgtccacccgctgtcccgccgcgtccgcactatgcccgcgttcgccgcgctctctcctccttcctacccgctcgtctcctccccgtccccatcactccttatcacctgcgcctcactccagttcctcccgccgatccccgacggagcctacctcctatccgctatcgtcccatcgcgcggctcctccacctcctgcacccttgtcgccgtcatcaccggcgcagccgcgcgttcttacaccctggacaccggcgatccctccccgcagtgggcgtctagaggcgatctcccgctgtctctcacgctcctggaaaacgccgcggtctccggtgaccgcagcaaactcttcgtcctcggccgtggccccgaggcgctcttggtttttcatctcgtgacggggacatgggaggtgctgcatgttgtgatgccacaaggtctcactacggcgcacctgtttctttttgatgggagcctattcttagtaggtggtattgagagctttggagtagtggatcgggtggtggtctggcggttggacgacgataaggtggaggaggtgtggtggagggaggtgagcgtgatgccgacggaggttttcgatgagttgctagctggtaggtttggcagattctggcattttcaggctgcagacagattggggattgtttgcttgtacaatgctgtggatcggaggctggtcatgtttgatgcggctgatggcatgtggacagtgctgccacgattgtccgcgttggatgcatgcgagagcttcaggtggtttggacatgtcttggagccaggagttgaaatcttgatgggactacgttgaaaaagaaggaaaaaaaactggtggagcaaggaagtctcataatccgaaagataacaagtgatatctacaacaaagctcatggatggaagccggtcgatagacgcattcagtgatattttggctgttgttctgtctttttgggttcatctgttttgttagatgtaatctggctggctctttagtttggtaaaatcttagctaagttcgtcgctgaagttgtcagaaccaggctgcctttggttgggttgttttggtcccttcggttgaacatcagttttcaggcggtctgaaaacatttcctgctatggaaatgttcctctattttagctgatagttgcgtatgtcttgtcggcttgtagttgatgttggcttgtatggttgtgtaagaactttgtccttgtctatttcctaatgaaataggggtgctctcctgtgtcaaaaaaaacagattttgtt

SEQ ID NO: 151259 - DNA, 1633 bp, Zea Mays
ctccccacatttcgttgtgtaccgcaaacagcagagagaaaacggaatcccagatccacccctccccatctccatccgcggccatggcctccgccgacgccggcacttgcccgtgggatgccctcccgttgcacctccaggagcgaatcctctccctcctccccatcaccgaactacttcccgttgccgccgtgtcccgcgccttccaccgccttctgcgctccccgaccttccatgccctcctctccccgcatcgcctcgacgccttcttcctcctttccccacggctcgccgtccacccgctgtcccgccgcgtccgcactatgcccgcgttcgccgcgctctctcctccttcctacccgctcgtctcctccccgtccccatcactccttatcacctgcgcctcactccagttcctcccgccgatccccgacggagcctacctcctatccgctatcgtcccatcgcgcggctcctccacctcctgcacccttgtcgccgtcatcaccggcgcagccgcgcgttcttacaccctggacaccggcgatccctccccgcagtgggcgtctagaggcgatctcccgctgtctctcacgctcctggaaaacgccgcggtctccggtgaccgcagcaaactcttcgtcctcggccgtggccccgaggcgctcttggtttttcatctcgtgacggggacatgggaggtgctgcatgttgtgatgccacaaggtctcactacggcgcacctgtttctttttgatgggagcctattcttagtaggtggtattgagagctttggagtagtggatcgggtggtggtctggcggttggacgacgataaggtggaggaggtgtggtggagggaggtgagcgtgatgccgacggaggttttcgatgagttgctagctggtaggtttggcagattctggcattttcaggctgcagacagattggggattgtttgcttgtacaatgctgtggatcggaggctggtcatgtttgatgcggctgatggcatgtggacagtgctgccacgattgtccgcgttggatgcatgcgagagcttcaggtggtttggacatgtcttggagccaggagttgaaatcttgatgggactacgttgatacgcacagaaatcccgttttccggcgggccaagcgcacatgagccacactacgcttatccagctagccaatcaggcgcatagtgatggcctcgggacactatagaatatatggcgaacacttaccatcattttttgtactgaaaacgagccatacattcttctgacatgttcagaaatgcatttgtattgcttattcttcaaactgctaaaccaggagttagtttaagggaaatgtcacaggcactgcatccactaggcacagtgtatcaatttggttattgatatgctcgtgatttcagctggccattaaggtagatatgtggacatgtatatagtagattggtgtagctgttttagcttttttttttgttagtggcaaatcgatggatcaagtaaagttcacttcatatggaccaagttgtgaatattttctattgttctcttctcttttcttttctttattttttgcttagtctagttctacaaaaaaaattcatcatacagattttg

SEQ ID NO: 151260 - DNA, 1509 bp, Zea Mays
ctccccacatttcgttgtgtaccgcaaacagcagagagaaaacggaatcccagatccacccctccccatctccatccgcggccatggcctccgccgacgccggcacttgcccgtgggatgccctcccgttgcacctccaggagcgaatcctctccctcctccccatcaccgaactacttcccgttgccgccgtgtcccgcgccttccaccgccttctgcgctccccgaccttccatgccctcctctccccgcatcgcctcgacgccttcttcctcctttccccacggctcgccgtccacccgctgtcccgccgcgtccgcactatgcccgcgttcgccgcgctctctcctccttcctacccgctcgtctcctccccgtccccatcactccttatcacctgcgcctcactccagttcctcccgccgatccccgacggagcctacctcctatccgctatcgtcccatcgcgcggctcctccacctcctgcacccttgtcgccgtcatcaccggcgcagccgcgcgttcttacaccctggacaccggcgatccctccccgcagtgggcgtctagaggcgatctcccgctgtctctcacgctcctggaaaacgccgcggtctccggtgaccgcagcaaactcttcgtcctcggccgtggccccgaggcgctcttggtttttcatctcgtgacggggacatgggaggtgctgcatgttgtgatgccacaaggtctcactacggcgcacctgtttctttttgatgggagcctattcttagtaggtggtattgagagctttggagtagtggatcgggtggtggtctggcggttggacgacgataaggtggaggaggtgtggtggagggaggtgagcgtgatgccgacggaggttttcgatgagttgctagctggtaggtttggcagattctggcattttcaggctgcagacagattggggattgtttgcttgtacaatgctgtggatcggaggctggtcatgtttgatgcggctgatggcatgtggacagtgctgccacgattgtccgcgttggatgcatgcgagagcttcaggtggtttggacatgtcttggagccaggagttgaaatcttgatgggactacgttgacatcccgatgaagatttcatgctaacatcattaaattcataaagctagagttactagaagagctgtatgcaaatccctggtgagtaccaatgcattagagctcatgaaggttctttttactcagcttatcatctttttcagaagcgcaagctgcattaatagccacctttcagatttattcacggagtgaaattcttattgtcctttcctttgagagagaagaattttcatggttagaatgtgtaacttatctatcaattgtcatatctctcttttatttttttaactacgatgtacccaactttgatctgtagtagctcctctgttgggacatagataaaaatcaaatatattgataaaaccatgttaaatttattgtcctacatgc

SEQ ID NO: 151261 - DNA, 103 bp, Zea Mays
taactttttgtcatttgccgtttataattctctgctgtaaaagctgatttccataacatgtggaattttgtagacatcccgatgaagatttcatgctaacatc

SEQ ID NO: 151262 - DNA, 1502 bp, Zea Mays
caccagccaaacccaccgcccacgccacgatccagcttgtcgcacccccgtctcccggatttatatacacgcgacgcgccggcgttcgctgccgtccactccacagtcacccaccgccgcctcctccagcgtccggcccgtacgccgcgcagccaacccagcgggcacgatgcaggcccacggcatcgccatccgcgcccgcgggccggtggcggcgacgcaggcccccgcgcgccgacggcaatgccgcgtgtctgcggcggcggtcggcgcgcccgccgcgcgagcccgcgtgacgcactcgatgccgccggagaaggcggaggtgttccgctcgctggagggctgggcggcgcggtcgctgctgccgctgctcaagcccgtggaggagtgctggcagccggcggacttcctcccggactcctcgtccgagatgttcgggcacgaggtccgcgagctgcgcgcccgcgccgcggggctccccgacgagtacttcgtcgtgctcgtgggcgacatggtcacggaagaggcgctgcccacgtaccagaccatgatcaacacgctcgacggcgtccgcgacgagaccggcgccagcaactgcccctgggcggtctggacgcgcgcctggaccgccgaggagaaccgccacggcgacatcctcggcaagtacatgtacctatccggccgcgtcgacatgcgcatggtcgagaagaccgtccagtacctcatcggctccggcatggatcccggaacggagaacaacccgtacctgggcttcgtgtacacgagcttccaggagcgcgcgacggccgtctcgcacggcaacaccgcgcggctcgccagggcgcacggggacgacgtcctggcgcgcgcctgcggcaccatcgccgccgacgagaagcggcacgagacggcgtacgggcgcatcgtcgagcagctgctgcagctggacccggagggcgccgtgctcgccgtcgcggacatgatgcgcaagcggatcaccatgcccgcgcacctcatgcacgacggccgcgacatggacctgttcgagcacttcgccgccgtcgcccagcgcctcggcgtgtacaccgcccgggactacgcggacatcgtcgagttccttgtcaagcggtggaagctggagacactggagagcgggctctccggcgagggccgcagggccagggacttcgtctgcgggctcgcgccgaggatgcgccgggccgcggagcgcgccgaggacagggccaagaaggacgagcccaggatggtcaagttcagctggatctttgatagggaagccgttgtttaggcacttgttgctaactgtgatatgtgctcagatcatgtcgctagctgtcagtgtctttgtcacattgtgtttatgtgtttgaaatgccgtaagagtgtttttttcctgctattatcacaaaattctgcagaaatatatgttctagaatgctgactacaatattacgatttggaacccagattggagaatt

SEQ ID NO: 151263 - DNA, 2518 bp, Zea Mays
tcggaccactcccactcttcaagcccacacagagctctgcacaagaaaaggggaggaaggacgagccggagccactcagccgccacctcaccccccccatcggccgcctgcgtcccaccacccgctcctgctgccgggcctgccgcccgttgctctcgccactgaagccctcgccgccgcctccgcctccgcccgcttgcttgccctcctgccggctgcctcccggatgagaagcggcgcaacctgggcagcggaagcgtggtcggcctgagccttcgccggggtttctgccgagaaggatcctggagattaagcgcatgggttccttggaggcccggtacaggccggccggggcagctgaggacacagctaagagaaggacccaaaaaagcaaaagtttcaaagaggttgaaaaatttgatgtttttgtgctggagaaaagttctggttgcaagttccgatcgatgcaacttttgctcttcgctatcatgtctgctgcatttctaacaatcctatacacaccatctgtgtatgaacatcagttgcagtcaagctctcggcttgtcaatgggtggatatgggataagaggagttctgatccccgatatgtatcttctgctagcattcaatgggaggatgtatataaaagtatccaaaatctgaatgttggtgaacagaagctcagtgttggactcctgaattttaacaggactgagttcgacgcttggacacacatgctcccagaaagtgatttttcaatcataaggctggagcatgccaatgaaagcattacctggcaaactctctatcctgaatggatagatgaggaggaagaaactgagataccatcttgtccttcgcttccagatccaagtgtcccaagagcaacgcattttgatgttattgctgttaagctcccctgttctcgtgtggctggttggtcaagagatgttgcaaggttacatttgcagttatcagcagcaaaattagcagcgaccacagcaagaggcaatagtggaatccatgtgctgtttgtgactgattgcttcccgattccgaacctcttctcttgcaaggacctagtgaagcgtgaaggcaatgcttggatgtacaaacctgacgtgaaggcgttgaaggagaagctcaggctgcctgttggttcctgtgagcttgctgttccactcaacgcaaaagcacgactctacacagtagacagacgcagagaagcatatgctacaatactgcattcagcaagtgaatatgtttgcggcgcgatcacggcagctcaaagcattcgtcaggcaggatcaacaagagacctagttattctcgtcgacgacaccataagtgaccaccaccgcaaggggctggaatctgcggggtggaaggtcaggataatacagaggatccggaaccccaaagccgagcgcgacgcctacaacgagtggaactacagcaaattccggctgtggcagctcacggattacgacaaggtcatcttcatcgacgcggatctcctcatcctgaggaacatcgatttcctgttcgcgctgccggagatcacggcgacggggaacaacgcgacgctcttcaactcgggagtgatggtcatcgagccttcgaactgcacgttccggctactgatggagcacatcgacgagataacgtcgtacaacggcggggaccaggggtacctgaacgagatattcacgtggtggcaccggatcccgaagcacatgaacttcctgaagcatttctgggagggcgacgaggaggaggtgaaggcgaagaagacccggctgttcggcgcgaacccgccggtcctctacgtgctccactacctggggaggaagccgtggctgtgcttccgggactacgactgcaactggaacgtggagatcctgcgggagttcgcgagcgacgtcgcgcacgcccgctggtggaaggtgcacaaccggatgcccaggaagctccagagctactgccttctgaggtcgagcctgaaggccgggctggagtgggagcggcggcaggccgagaaggcgaacttcacggacgggcattggaagcggaacgtaacggacccgaggctgaagacctgcttcgagaagttctgcttctgggagagcatgctgtggcactggggcgagaagagcaagagcaactcgacgacgacgcggaacagcgccgtgccggcaacgacaacgacaacgcctgctgctgcgagcctgtcgagctcgtgagacttgtagatagctctgtctgccgagagtagtataccagtaccagatacagaacttctgaagctccatacatacatagcgacagctctgtaaaggtagctatgtaggccttttccttccccgaatgactatataccttcgtcttcgttcgccgtcacagctgcaggcagctccctccctcccgctggtttccgatggttaacaattcttttgtttttgccaataattcatcagtataggatgtcaggctatgttgcctcaattcccagtggcta

SEQ ID NO: 151264 - DNA, 285 bp, Zea Mays
atggagggggcctccatcacgacgagcttcgacgggctccacaacctgctggcggccaagatctcgctccgccaccgcggctacaggggctccgtgtccgtccttgggggctcccacaacaccaagccctcggtgtacccggtggtgggcggcaccggcgattttctgtacacggaggggtacgtccggtcgtcgccggtggactcggaccggccaaaggtgatatacaagttggaaattcacttgtactggccaccgtacactaaatttgctccatttccatag

SEQ ID NO: 151265 - DNA, 1120 bp, Zea Mays
atggcttgtgttattgaatctagaaaaagaaaacgtcatggtcatgcagcagtaggacacattagttatggtccaatttatgagagagatagaaaaaggatggagtatcttgataaaatttggaagagtgatgtcacttgtgttaatatgcttagacttaatagatcatcattcttccgtttttgtcaacttattaggaatcgtggtctattacaagacaccatacatatgtgtgttgagcagcaaattgctatgtttttacacacaatcggccacaatgttaggaataggttagtaggcactaattttgctaggtctggtgaaactgttagtcggtatttcaacaaagtacttcatgctgttggggagttacgacatgacttcattaagccaccatcatcagcaacaccgaccaaaatcactggaaacccacggtgggatccttactttaatgattgcatcggggccattgacggcacacatgttcgtgcctctgttcctaaggaaatggaggctgcattccgtggtagaaagagtcaccctactcaaaatgtaatggcagcagtagattttgatctaaggttcacttttgtaatggccggatgggagggtacaacccatgatgccctcattttaagagatgctttagaatgagaaaatggtcttcgtgtccctgaaggcaaattctacctagttgatgcgggatatggagccaaaccaggttttttaccccctttttgtggtgtgaggtaccacttgaatgagtgggggcaataatccagttcaaaatgagaaggaattgttcaaccataggcactcatccctcagagttacagtagagcgtgcctttggatctttgaagaggcgattcaaaattttagatgatgctataccatttttccccttcccaacacaagtagagattgttgttgcttcatgcattatacataattgggtcatagaagatgggggtgatgagttcattgtacctgaggccgaagatgagctacctagtattaatcatcaaagatcatcacatggacaagcaatggaacatgcctttatggttaactttagacaacaaattgctaatgccatgtgggaagatcgtcagcaatac

SEQ ID NO: 151266 - DNA, 838 bp, Zea Mays
tagccacgctgccaattggagccgggagcactatggctggcgccagagtaatcaatacaagctagaaaccaggaactgagacaatcacgtatcgaatccaaatcgaagcccacgcatggaggcaagaaataaaaggaaaccaccagcaggctacgcgaaaactagttccgaaacaaaatgctccagatgcagcacagatcaaagcacccgaagtcacctgaacgcgatcgggacggggccacgaagcgcggacccgacggattcccaattcgcggcgccaaacccaatcgccctaaacctaagcagaggactccccggatttcagcaaggccgcaaccacagcagctcaatcgccagcaaattcgatccggatttagctcaattcgcggccacaggcgccgagaattgggaagcgagcgaggatacgcacacgctccaatccaaccacaggcaggtcttatcaccgaacgaagcaaacctaagttggaccccggcaaagcgtcccaccctgagaaaacaagaatccccaagccgaccatacacgaggcaggaacggagcggaattaaacctaggcagcgattagggctgcggccaccggacgggaggcgcctggacccagccaccgaccttgcggcagccgcgagctcgagctagcgccagcctcgcgccctaacccgcacggcaccgctaggcggcggccccgatcagcgcgattgcttcctggggtccaatgaggcgtggagagcattgggatggcgtcgcgcgtggagctgctcgaggaaggaagggggagagagagagagagagagagagagggcaggctgaggccggtgcggg

SEQ ID NO: 151267 - DNA, 1005 bp, Zea Mays
actccactgtacgccacgcacgattacgtgggcccgacatttgctccgtcccctctggtgcacaaagaccaggcgcacctgatcgtgcttcacctcgaaggaatcgaccccatcaccatcctcctcgttatctcgcagctaccgccgccgccgcaaaccctaacctgagttccgatccggttaatcgacgacgaggaagacgacggtgcgttgcagatctgaggggatctgacgacggcggcggagggggagatggtggtcaacggccggccgctgaagagggcgagggcgcgggtcgaggccagggacttcgcgaggttcccggcggccggagactgcggggcggccgggacgttcagggaggcggtgagagggttcctcgcaaagcatgcgaggctgctcccgttgccgtccatcttctctccggcggccgcggccgccccgccgcacctgctgatctggagggtgtccctaagggtcggggaggccggggaggaagagagcggcggcggggtagagctcaacgtcgttgaggaggatgtgctccgatcccgatctgtgtattgtgaccagtgcagagtcgtgggctggagtggacacccggtctgcgtgaagcggtaccatttcatcatcgagaacgacagtagccacctttctggccgccggcgcacctgctgcctccgctgcggaacacccatggccgctggagaatcaaggtgagaggcacatttcagaaagaaaattatataccttctcacacaacagcgaatgggggaaatggaacatgcttgtgcgttcgatgtctataatgccgaatgttaatacatgaccaactttatgccaacgtgctgtgccattgatgcctgtaatgatctggatcacccaatctgaatgtaagatgagtgcttcatataggtctgtgtttggatggggcgtgcttgcttgcatttgtaatataagatgagaattcagaagtgtttctattactatattcataggcagcac

SEQ ID NO: 151268 - DNA, 1687 bp, Zea Mays
gcaggcggcccgggcagatagcaggcgtgttgctcgcgcctcggcacataaatcgtctccgatctccaggtgcccggccaccctggttcgtcgaagcaccctagtcgtcgtagcggcctacgggctcttgggcagagagagaagctgcatagcctgcatatgctccagctgctgcgcgcaatgatggcactgacggagcggcagccgcagctggagaagaagccgacgcgcgggagggcgccgctgtccgggaaggccgtcgcggcgctgtgcgtgacgagcttcgttgtggggctgctgcttagcggcaacgtgtcgctcatgtcggcctcggcgtcaccgtcgtcctcgagcacggacagcgagaagagcattcgtgtttccggttgcgacaatgagcgtaaactcggagagaaccaccccaaggatctcctgaacgaggtgtcgagaactcatcaagcaatccagtcgctggacaaggcggtgtccaccctggagatggagatggccgtggaacgcgctaggggcggtggcggcggcggcggcgccgcgtccatggcgtccagcaggactcctcagaaggccttcgtcgtggtcggcatcaacacggccttcaccagcaagaagcggcgcgactcgctccgcgacacctgggtccccagaggggataagctgaggaagctggagcgggagaaggggatcgtggtccggttcgtgatcgggcacagcggcacgccgggcggcggcgcgctggaccgcgccctggacgcggaggaggccgagaccagggacttcatgcggctggaccacgccgagggctaccacgagctgtcgtccaagaccaggacctacttcaccaccgccgtcgccacctgggacgccgacttctacgtcaaggtcgacgacgacatccacctcaacctcgggatgctggcgagcaggctggcgaaacacaggacgcgcccgagggtgtacgtcggctgcatgaagtccgggcctgtcctgtcacagaaaggagtcaagtaccacgagccagagtactggaagttcggcgacgagggcaacaagtacttccgccacgccaccggccaaatctacgccatctccaaggacctcgccgcctacatctccatcaaccagccgatcctgcacaggttcgcgaacgaggacgtctcgctgggggcgtggctgatcgggctcgaggtcgagcacgtcgacgaccggagcatgtgctgcgcgacgcctccagactgcgagtggaagaagcgagccgggaacgtgtgcgtggcgtccttcgactggtcgtgcagcggcgtctgtaagtcggtggaccggatgcgccacatccacaaggcgtgcggcgaaggcgaaggcgccgtctggaacgccgccacatgagacgagattgccattctcgtcggaacacttgttgtatgcggagcttcacttgatgaaaacgcgaaggcgagagggaagcgcctgcgccactgtttggcatgacacattccgcatggcaagcgtggttgtttcacttgagacggcatgctatgatccacgtaaaagcgcatggattattattggtgtgtcaacgtgatcctttttggatgaaaaaaaaaaattgcacggtggcccttggatgtcttttttaaccccgaaacatagtaaaatatttaaaaagtatattcat

SEQ ID NO: 151269 - DNA, 2365 bp, Zea Mays
ttaatatgagcgtgctttggaccaaaaggacctcgctggtgcattatagcaaacactagtatatattgatgtttctgtacctcgccctctctctcctctaccccttttcctctaacctttagctttcctccctccctcctctctttctctcctctaacaagaacttagtcccggcagttcagatcctaagttgctgaccttgctgctgattgttggagatagatttgctgcttctaagttggaaataccatgagtccaccgagtgtgatggggcagtttggggacacgacctacaccaaggtttttgttgggggactcgcgtgggaaacccagaaggagactatgaggaagtatttcgagcagtttggagagatcctggaggctgttgtcatcactgacaagaacactggcagatccaagggctacggatttgttaccttccgggactcggatgcggcaatgagagcttgcgttgatcctgcaccggtgattgatgggaggagggctaactgtaatcttgcttcccttggggttcaaagatctaggcctcctactccccagcatggaggggctaggaactttaaagtgatgaaatctttcagccagcaggcaggaatccaaggtggactgggcgcagcttttccttctcatgccaccttccctcattatgccatcccacaaggcctcccctaccatatctatgggtactctccatataccctagactacggttatccaacaaacttttataatatatatggaggacctcagtacacattttatggaggaggagctggcatggtgacaggaacaagtcccttttatccatatttccagtttgggcaatcaggaaacactactaccaactatacaagtggacaaggctacaacttgcaatacccacaaatgttccacttctcaactgtatcatctacagctgcagctgtgaacggctttgctcagcagtatggaggaccattgtcactagcagcaagtcctcaagcccaagcagtgtgtatccccattaaacaggcatgactatggcactcgcagctccaaccatgccaactccaacacaggctgctcatccttaccggttgattccctcagtgtccactgctccagagcaacccttggcctaaccatggtctcccttctcgtcattgctgtactgtctcgtttccaacttgtcgagtccatgcatccatctctaacaccaaaaggcactattgtagatcatgtttatcagccaaagtgctcacatccatatcccacatggtcatgtggtaactggatattagctttagccccaggatgggcacaaagcttcatgccccgaggatggggcgttctaacagacaagtacaaaccctaaccattctaaatatagtccaaggaaggactttatctgggagagttaatttcagctgtagcgagacaaggctgtaactaaaagatactaacagtcaagcatgacccaaggagggttcatgctgatactagtcaaattggactacaatgacagctaaataactgaactagcatgccactcccacatttcatcggtagaatcccaactgtacctagcttaggcctgacatttcttgttgaagcataaaccatttaggcaaacctacccttctatagtcctgctgttacggtgttacctagaccaaatgcatatgatatatgaccagcgactagtgtaaccaactcatcttttctttgcaaaagattagatgcaccaactaacaatttatttgatctttcagttgatagcttgcatctaggtggtcaaggctctaaggagagcctgtgcccctaatcagaaacaggttcagagtagtgccaatgtttgtttttagcacttggcactaccccctgtccctcgaaacacagcattggggactccaaagaaggctttggagtaaccaagcactgctgtgtaactcattaacacaatggacccatagatgaatttttgttgtcttgggtcaccccactcatgtagatgtcattacttctcagtgtcactaccatggttaggtccaggccccccttcactccctccctctctctctgcacagggcagagaccttagcactctttaatctactattaccaggcatggtggttgtaataataaattagcgctatgctacttgtaggacacgaagaactctgttattccacccttcatatgtacttaatatcctgtccatttcagttcagtagttggtacttatttccaaattccaaccattgtagtgcaccatataatgttgtgtaatatatgtccactgtgctgcacatttcttaatcatctgtcgttcagttgcatatattccaggtgaatgtactatta

SEQ ID NO: 151270 - DNA, 2345 bp, Zea Mays
ttaatatgagcgtgctttggaccaaaaggacctcgctggtgcattatagcaaacactagtatatattgatgtttctgtacctcgccctctctctcctctaccccttttcctctaacctttagctttcctccctccctcctctctttctctcctctaacaagaacttagtcccggcagttcagatcctaagttgctgaccttgctgctgattgttggagatagatttgctgcttctaagttggaaataccatgagtccaccgagtgtgatggggcagtttggggacacgacctacaccaaggtttttgttgggggactcgcgtgggaaacccagaaggagactatgaggaagtatttcgagcagtttggagagatcctggaggctgttgtcatcactgacaagaacactggcagatccaagggctacggatttgttaccttccgggactcggatgcggcaatgagagcttgcgttgatcctgcaccggtgattgatgggaggagggctaactgtaatcttgcttcccttggggttcaaagatctaggcctcctactccccagcatggaggggctaggaactttaaagtgatgaaatctttcagccagcaggcaggaatccaaggtggactgggcgcagcttttccttctcatgccaccttccctcattatgccatcccacaaggcctcccctaccatatctatgggtactctccatataccctagactacggttatccaacaaacttttataatatatatggaggacctcagtacacattttatggaggaggagctggcatggtgacaggaacaagtcccttttatccatatttccagtttgggcaatcaggaaacactactaccaactatacaagtggacaaggctacaacttgcaatacccacaaatgttccacttctcaactgtatcatctacagctgcagctgtgaacggctttgctcagcagtatggaggaccattgtcactagcagcaagtcctcaagcccaagcaggcatgactatggcactcgcagctccaaccatgccaactccaacacaggctgctcatccttaccggttgattccctcagtgtccactgctccagagcaacccttggcctaaccatggtctcccttctcgtcattgctgtactgtctcgtttccaacttgtcgagtccatgcatccatctctaacaccaaaaggcactattgtagatcatgtttatcagccaaagtgctcacatccatatcccacatggtcatgtggtaactggatattagctttagccccaggatgggcacaaagcttcatgccccgaggatggggcgttctaacagacaagtacaaaccctaaccattctaaatatagtccaaggaaggactttatctgggagagttaatttcagctgtagcgagacaaggctgtaactaaaagatactaacagtcaagcatgacccaaggagggttcatgctgatactagtcaaattggactacaatgacagctaaataactgaactagcatgccactcccacatttcatcggtagaatcccaactgtacctagcttaggcctgacatttcttgttgaagcataaaccatttaggcaaacctacccttctatagtcctgctgttacggtgttacctagaccaaatgcatatgatatatgaccagcgactagtgtaaccaactcatcttttctttgcaaaagattagatgcaccaactaacaatttatttgatctttcagttgatagcttgcatctaggtggtcaaggctctaaggagagcctgtgcccctaatcagaaacaggttcagagtagtgccaatgtttgtttttagcacttggcactaccccctgtccctcgaaacacagcattggggactccaaagaaggctttggagtaaccaagcactgctgtgtaactcattaacacaatggacccatagatgaatttttgttgtcttgggtcaccccactcatgtagatgtcattacttctcagtgtcactaccatggttaggtccaggccccccttcactccctccctctctctctgcacagggcagagaccttagcactctttaatctactattaccaggcatggtggttgtaataataaattagcgctatgctacttgtaggacacgaagaactctgttattccacccttcatatgtacttaatatcctgtccatttcagttcagtagttggtacttatttccaaattccaaccattgtagtgcaccatataatgttgtgtaatatatgtccactgtgctgcacatttcttaatcatctgtcgttcagttgcatatattccaggtgaatgtactatta

SEQ ID NO: 151271 - DNA, 641 bp, Zea Mays
ttaatatgagcgtgctttggaccaaaaggacctcgctggtgcattatagcaaacactagtatatattgatgtttctgtacctcgccctctctctcctctaccccttttcctctaacctttagctttcctccctccctcctctctttctctcctctaacaagaacttagtcccggcagttcagatcctaagttgctgaccttgctgctgattgttggagatagatttgctgcttctaagttggaaataccatgagtccaccgagtgtgatggggcagtttggggacacgacctacaccaaggtttttgttgggggactcgcgtgggaaacccagaaggagactatgaggaagtatttcgagcagtttggagagatcctggaggctgttgtcatcactgacaagaacactggcagatccaagggctacggatttgttaccttccgggactcggatgcggcaatgagagcttgcgttgatcctgcaccggtgattgatgggaggagggctaactgtaatcttgcttcccttggggttcaaagatctaggcctcctactccccagcatggttagatatttatcatctttcagaaatcagaactgtacaaggcagcacagaagaaataattagcttgcttgcttaa

SEQ ID NO: 151272 - DNA, 105 bp, Zea Mays
aaagacagagagagagagagagagagagagagagagagagagagagagagagagagagagagagagagagagagagagagagagagagagagagagagagagaga

SEQ ID NO: 151273 - DNA, 1655 bp, Zea Mays
ttccgattccaccccgcggcaccggcaacggcctaccctacgctgcgtcgccgccacctgattttctcgtccggtcgtgctgcactgcatcacaccgattcccacgtgattgcggcgcggccgcgcgaggagtgctcgtagccctcccccccgcccgcccgcccagattcggtcgcccatggcgagggacccagcccgcaccgtcttcataggtaacttggacgaaaaggtatctgagagaatcttgtatgagattcttattcaggcaggccatgtagtagacctgcatgtacccagtgacaaggagagtaacagtctcaaaggttacgcttttgttgagtatgaaaccgaggaaatcgcacaatacgctgttaagcttttctcaggacttgttcggatcagtggtaaaacgcttaagttcatgattgctggttatgacaaaccgtcttcaaatgtcaatacctcagtaatgctcaatcctgtaccctcttcaaatggcaataatccacatatcaggtggtaaacgggaggattggaggttatgtcttttctctcactccttatccatatggttttcaagctttatcaggtggacaagtacacggccatggccagcctttgcacatcggacatacttgaaggcttgaagctgtcgtccttacagtctcatcgaccgatgccacagcgacacatgcacgaacaagagcacctgcccgactgagcgtgcacgacctcgcgccgatcagggccaagaactcacccccgtcgtgtgtgccgatggaggtggaggccgacgggatccaggaagccaccgcaggcgcaggagacggcggcggcgtggacgatgtcttcttctgcgtcgccgcgacgtccaggggcaacaagaacagcatctcctacttccacaccaacgcggtcggcgaggacgccgagtcggcgctcgcgctcgccgcgctctgcctcgaccacgcccccgaccaccaccggtggcaccaccacaccgtcgccggggcgaagacgttcgcgttcctctcggccgacgacggccgcacgtacttcgccgcggccgacccgagccccggcgccgccgaggtggtccggttcctggagcgcgtccgcgacgcgtgcgacgccgcgcccaggaagcgcctgcgcgacgaggcggtggcccccgtcgctcgccagttcgccaggacgctgcgggcggcggcggcgggcccgagctcaggcgcggagctaccggaggcctcgctgcaggcgaaggagccgtccacgccgctggcgccggtctgcgagaaagacgaggaggagcgccagagggccggagagcgacgtcgcgccttcttgcagccggaggaaagcgcaagcgcgcttccggggtggcgcccgtggtggcgccacgcgtcggtcgtgatcgtcgtggatgtggtgctgtgcctcgtgctgttcgccgtgtggatgggggtttgcaaaggcttcgggtgtctgacgcgatgaaaatcgcccgagagcatgcaattgtaaatttgtaatcacatccatgctgtgtgcatggttcgcgttctttatgttaatttgcttgtcagatatcacatctacaatttgaaggaaaaaaacggtttaagaaacgaagacgcatgccttcaatgcacaca

SEQ ID NO: 151274 - DNA, 1191 bp, Zea Mays
ctgcatcacaccgattcccacgtgattgcggcgcggccgcgcgaggagtgctcgtagccctccccctcttaataggtaacttggacgaaaaggtatctgagagaatcttgtatgagattcttattcaggcaggccatgtagtagacctgcatgtacccagtgacaaggagagtaacagtctcaaaggttacgcttttgttgagtatgaaaccgaggaaatcgcacaatacgctgttaagcttttctcaggacttgttcggatcagtggtaaaacgcttaagttcatgctttatttacgtttttgcagattgctggttatgacaaaccgtcttcaaatgtcaatacctcagtaatgctcaatcctgtaccctcttcaaatggcaataatccacatatcaggtggtaaacgggaggattggaggttatgtcttttctctcactccttatccatatggttttcaagctttatcaggtggacaagtacacggccatggccaggtaagcaaccgtacctatgattacaataggcaggaatttggttctgttctgagcattgtccatggaggtcctgttatgaatttcctttgcccatggagttgcgaattgaaccagtcgatcatgtacccttcctaggtgcagaagaatgtagtatgtttacagtaggcaggttccagctccacataggttcttgacatggtcacgtctagattttggtaatagtcatgcccaaacatgtaaatatggttgtcatatcctctagatcttcagaagaacgctgcactatccttggaaggcaaaaatcctgtcctgttgtgttctccattgtcccaactctgaagccagcagatgttactaataaaaagagagtgaagaactctaccatgttcgtgccagccacactagtgaatctaactcgttcgggttggattgcagttgcaggaacaacagagagttcctgaatgtaggcaggcatggccaattagttttgatgttgacattgcagaccgaaagcctactagatgacaaggaaactcagttgcagtctggcacttaatatgttaattcgtacactagtgatgcaatggttctgtgtgtcatctttcactgctagcatgatcttggttgccatttggcctttatttttttagttaggtgagattgcccggtgcctgaatacatagcctgttttta

SEQ ID NO: 151275 - DNA, 1302 bp, Zea Mays
ttccgattccaccccgcggcaccggcaacggcctaccctacgctgcgtcgccgccacctgattttctcgtccggtcgtgctgcactgcatcacaccgattcccacgtgattgcggcgcggccgcgcgaggagtgctcgtagccctcccccccgcccgcccgcccagattcggtcgcccatggcgagggacccagcccgcaccgtcttcataggtaacttggacgaaaaggtatctgagagaatcttgtatgagattcttattcaggcaggccatgtagtagacctgcatgtacccagtgacaaggagagtaacagtctcaaaggttacgcttttgttgagtatgaaaccgaggaaatcgcacaatacgctgttaagcttttctcaggacttgttcggatcagtggtaaaacgcttaagttcatgattgctggttatgacaaaccgtcttcaaatgtcaatacctcagtaatgctcaatcctgtaccctcttcaaatggcaataatccagtaacgcctaagctcaaccctataccattaccaaaacagactcaaataatgtgttgtagtgacatgcctgtctctcgtaccctagcatatcaggtggtaaacgggaggattggaggttatgtcttttctctcactccttatccatatggttttcaaggtgagatactttcctgagcctgttaatacatgttccaaactgcagttatataaacatgatcatcgtatgtttcctctttatgaccagctttatcaggtggacaagtacacggccatggccaggtaagcaaccgtacctatgattacaataggcaggaatttggttctgttctgagcattgtccatggaggtcctgttatgaatttcctttgcccatggagttgcgaattgaaccagtcgatcatgtacccttcctaggtgcagaagaatgtagtatgtttacagtaggcaggttccagctccacataggttcttgacatggtcacgtctagattttggtaatagtcatgcccaaacatgtaaatatggttgtcatatcctctagatcttcagaagaacgctgcactatccttggaaggcaaaaatcctgtcctgttgtgttctccattgtcccaactctgaagccagcagatgttactaataaaaagagagtgaagaactctaccatgttcgtgccagccacactagtgaatctaactcgttcgggttggattgcagttgcaggaacaacagagagttcctgaatgtaggcaggcatggccaattagttttgatgttgacattgcagaccgaaagcc

SEQ ID NO: 151276 - DNA, 996 bp, Zea Mays
ttccgattccaccccgcggcaccggcaacggcctaccctacgctgcgtcgccgccacctgattttctcgtccggtcgtgctgcactgcatcacaccgattcccacgtgattgcggcgcggccgcgcgaggagtgctcgtagccctcccccccgcccgcccgcccagattcggtcgcccatggcgagggacccagcccgcaccgtcttcataggtaacttggacgaaaaggtatctgagagaatcttgtatgagattcttattcaggcaggccatgtagtagacctgcatgtacccagtgacaaggagagtaacagtctcaaaggttacgcttttgttgagtatgaaaccgaggaaatcgcacaatacgctgttaagcttttctcaggacttgttcggatcagtggtaaaacgcttaagttcatgattgctggttatgacaaaccgtcttcaaatgtcaatacctcagtaatgctcaatcctgtaccctcttcaaatggcaataatccacatatcaggtggtaaacgggaggattggaggttatgtcttttctctcactccttatccatatggttttcaagctttatcaggtggacaagtacacggccatggccaggtaagcaaccgtacctatgattacaataggcaggaatttggttctgttctgagcattgtccatggaggtcctgttatgaatttcctttgcccatggagttgcgaattgaaccagtcgatcatgtacccttcctaggtgcagaagaatgtagtatgtttacagtaggcaggttccagctccacataggttcttgacatggtcacgtctagattttggtaatagtcatgcccaaacatgtaaatatggttgtcatatcctctagatcttcagaagaacgctgcactatccttggaaggcaaaaatcctgtcctgttgtgttctccattgtcccaactctgaagccagcagatgttactaataaaaagagagtgaagaactcta

SEQ ID NO: 151277 - DNA, 1440 bp, Zea Mays
agtcctctaatcctctctcgctcgctctctagtctcttttcttctctggtctcgcgttctccctcctctgttcgccgctttataccgcccgcccgcccaccagaacgacatacatcctcctcccccgtcccctccaatggggaacccgccggagctgtaccacaagatcctcaacatccccaaggacacctctccgcaggaactccgcgccgcgtacaagagcctcgtcaagaaatggcaccccgacaagcacccgccgtcgtccaggccggaggccgaggcgcgcttcaaggccatcagcgaggcctacgaggcgctcctggaccagcaagagaacagggccgtgttcgggccgtgcaacggcgaccgggcgggtggaggcgccggggcgcgcgtggagaggacgcgcagtgacggtttctgcgcgaggagcgcgcccggcaccccggccagggagttgaagaaggtgtacagcgccggcaaccccggcgggcgccgcgccttcgccgagttctccagttccatcgtgcgcaaggcgccgccgctggagcgcaggctcgagtgcaccctcgaggagctctgccgcggatgcagcaaggaggtcacgttcacccgcgacgtcgtcaccaggaacgggtcgatcgtgaagaaggaggtgacgcagacggtgcaggtgaagccagggtggaggaaagggaagcaggtggtgctggaaggcatgggggacgagcggccggggtgcctgccgggcgacgccgtcctgacggtgtccgagaggaggcacccggcgttcaagcgggtgggcgacgacctggtgctcagggcggaggtgccgctggcgggcgcgctcaccggctggtccctctcgttccggctcctcggcggccggaaggtgacctgctcgttcgaggacgaggtcatccgccccgggcacgagagggtgatccgcggcgagggcatgccggtccccgggcggaaggacggcgcgcgcggcgacctcagggtgaagctcgaggtcgtgttccccacggagctctccgacgagcagcgcgccggcctcgccgagatcctcagagggtcctgctgatcggtcggtgtcgccgtcggtccaattaagtcctatcgtatcaagttttcttgggcgtgtgaccgtgtccgatgagtaactgagtacataaagagagatggtcgacgttcgttgtacatacgggttgtctatgtatatgtcgatatatatgaaacgtgaggcaagccttgtgtagttgtgtacctgcctgcatacatagggtattagggatggtagctgtgggtatggatactagcgagtttcgtatctggtggatatgaataatggtagacaaactcacccgcgggttctattgggttggatacccgaaatacattggatcggatatgagatatcaatatacatctttaaat

SEQ ID NO: 151278 - DNA, 504 bp, Zea Mays
aatattaaaatttttatgtggtacttgttaaaaggagtagtgctgacaaaatataatttagcaaaacactatttaaggtagcagtaagtgtggcttttgtaatttggataaaatcaattagcatttatttattgactgttatgttgctcattttatgtggcggttgatatccaactgtttcggtttgtcgggtcctagatctgtcaaacattgctttggaagatggttgatggggtggatttaaatactaagaatcttattattacgggtgtctcagtattgtgctgggctatctggataagtagaaatggcttagtgtttaataaagcacaaatgtttacttatttgcaggttctattcagaggaactcattggctcaaactatgggcgcagctgcaaagaagtgacgattcagcggatctgttaagaagagcttgtcgatatctggagacgatggccatgcagttttttgcttatcggggttggaggttttttaataggatt

SEQ ID NO: 151279 - DNA, 1299 bp, Zea Mays
catccgctccgctctccccctctggcctctgcacgtagccataagcccatacgcccataccacaccgcacggtgcacacggttgagtcgacggtactcgtcgtcctcgtccgtgcagagcttgcaccaacacgccaccttaagcttcgctttgcccgcactcgcacacagttgcgaccgcattgcatcgtgcgcggctgcagcacgaagacgaagctctggtacatggcgagcagcgcggaggagcgcttcctgaggcagctgagcgcgagcaacggcggcgacgaaggggtctgcggcggccagcagctgggccacaaggagtactgcgcggagaggaggggctcccggcggtggtccaggaagcgggccgccgccgcgaggggctactgcggcgggtacgacgactacgacgtgaagcagcaggcggaggccgcctctgccgccgcgaggaagcgggtgatagtggtggtggacgacacctcgggctccaagcacgccatgatgtgggcgctcacccacgtcgccagcaagggggacttcctgacgctgctccacgtcctgctgccgcactccgcctccggcggcggctgtagcaggggcgaggaggcctcctccctcgccaactcgctcggcacgctctgcaaggcgtccaggccagaggtggaggttgaagccctggtgatccaaggccccaagctgggcaccgtgctcagccaggtgaagaagctggaggcctccgtgctggtgctcggccagggcaggccgtctccctgctaccgctggctaagctgtttcttgcggagcagcagcgaggagttcgtggagcagtgcatcgaccaggcggagtgcctgacgctggcggtgaggaagcagagcaaggccgtcggcgggtacctcgtcagcacccggtggcagaagaacttctggctcctggcctgacagccattttacttgctacacgatcgatcatattttattactcccacatatctctgctaccatttcgtgtaaccaagtgcgtcacaactgttctctatctctctgtgccatgccgtgtatgcgtccgccatggatcgtcctgccagcctcctcccgttgtaaagccaaaaagagccccagatctctgaccgccctcctataaacctgtattctttcttcattttccctgcgacgagtcttgacttcttgagcgtgcgcgtgtctgtacgggtaaccatcatgtaatgctgcatctgcatatctgttgtacacggtgcttcttttgtttgctggagactggagttggctttaggctctc

SEQ ID NO: 151280 - DNA, 432 bp, Zea Mays
gacgagaggaggaccccatttctattattgtcataacagaaatacaaagtggttcagatagtttccacattaccaacgcaaaataacaggaagaacccacaaacagaagcgctgacgagccaatccgcatcggatgactcagaacagccgggtcccctaccaggcaacatgccaaccgacgagtttagagttttacatcacacaagtaccagaccatacgacataacagacggcagcaaaatagagcgagttcctgacaaagctaacaccaggcgagcagtcacgtcatgactcaacgcccgtgtggctgcagcatcccttccatctcatcgcccgacccgaggatccgatttcctctagcacttgcagcacgcaccagcatcttggcgccctcttgcagaaggtcctggagctctttcttgctaagccctg

SEQ ID NO: 151281 - DNA, 1190 bp, Zea Mays
tggattgatgtgcctttgtaggaatgtcgtagccctttcgactactgtgatgttgttacgtcaactactcacaagaatcttaggggccctagaggtggtataatattcttcaggaaagggaaaaatttaaggaaacgagctggatctttttctcaaggagatgagaatgaatacgacttcgaggataggataaattttggtgtttttccttcaatgcaagggggaccccataataatcatattgctgccttggctattactctgaagcaagtcgcaactcctgagtataaagcgtacattcaacaagtcaagaaaaatgctcaggctctggcatcagcgttgctcagaagaaaatgcagattggttactggtggcacagataatcacttaatactttgggatctcagaactcttggcttgactggtaagatctttgagaaggtctgtgaggcatgccacatatctatcaacaagacaccaatttatggggataatggctcaatatcccctggtggtgtgcggatcggaacacctgcaatgactactagaggttgcctagaagaggacttcgagtcgattgcagacttcctcataaggtctactcagattgctagcaatgttctgaaagaacatggcaaagtgcaaaaggagtttctaagaggcctaatgaacaataaggatgttatggaactccgaaatcaggttgaggcatttgcgtcacagtttgctatgccaggttttgatgtatgaatgtgcatatatactgtagtcagcaattatccagattcacagcaacattgtcatccgctcagttcctcgaatactagcaagtcttgctctcgactgcacaacgattaggagagtttttattaggttgtagagggtcttgactcttgattttgattcaaacaggaaagttgtgatgagttatgtatgtcaaccttggtatcacgagttactatagtctataggagacctgttgtggccttcggagacctgttgctgccgagactgaataagcttaccatatgatttctggctaactattaggcgaagggatgaggttaattgtactggggcgtaccgtcagtttcgtatgtttgcaaacacatcaagaatcaggtgctcatggcttgttgcatcaactgtttagatttattaggcgaagtgatgctgcactgtttagattt

SEQ ID NO: 151282 - DNA, 1486 bp, Zea Mays
cgacaccgtctctggccggttccccgtccaggttcttcctccggatcgtcgcattaccccgatcctgtattcccatcgaccacacctcatggctcacgcgaataccacaccacacctcacggcgtccattcgttcccgtctcgtcttccgctgcttgcctccgactcccccacgcgtcgtctcgtgcttcccaatccccatagagccggttgatccccaaaggcccatggttttctccgacgccgcgtcgcctctcgtagccactgccgctgactctgcttcctcctgcgtcgcccacctccgctgctgctgtcgcgttagttgttgctgttgttgttgaagacgcgttgctcgctagggttcgtgatttctcgccgatcgattcgggaactggtaagctatggatctctcgcggcccgcatcgtcagacctctcgctcgggctgcactcgcatgcccacgcccacgctcgcgtgcacgcggcagccgcgccgctgcgcctgttcgacgacgcgaagccggagcgcctcgtggccggtgaggccgacgcggagagggacgacggggacgggggcgaccagcacttctccctcctcgggcactccctctgcgtcaagcgcccgcgccgcgccgtcaacggcggtgggggtgggggcggagagacgtcatcctgctcgtccacgtccccggcgctgcgccccgccaagcggcaggcggcgggggaagatagcggcgcggatctggagacccgccgcgccgcggtccgctcctggggcaaccagtcgctggcggaggccgacccggatgtgcactcgctgatggagcaggagctggcccgccaggtgcggggcatcgagctcatagcgtcggagaacttcgtctgccgcgcggtgctcgatgcgctcggcagccacctcaccaacaagtactctgagggggccccgggtgctcgctactacggcgggaatcagcacatcgatgccatcgagcggctctgccatgagcgcgccctcactgccttcggtctcgaccctgcctgctggggcgtcaacgtgcagccgtactcgtgcacgtctgccaatttggctgtctacactggtcttcttcaacccaaggaccgcatcatggggctggagccaccgtcgggcggccatgttagccatggttactacacgcccagtggcaagaaggtgtcaggtgcctctattttcttcgagagcatgtcgtacaaggtgaacccacagactgggtatattgattacgacaagctcgaggagagagcaatggatttccacccgaaaattctcatatgtggtgggagctcttaccccagagagtgggactttgctcggatgagattggttgctgataagtgtggtgcagtgcttctttgcgatatggcacatatcagtgggcttgttgcagcaaagttagttcattgtatcctgcttaacaatgtgcacaagagtaattggagtacctcttag

SEQ ID NO: 151283 - DNA, 1764 bp, Zea Mays
atggagcacgtcgtcgtcatggttgcagctttgcttttgtcgtcgtggagcctccaccagcgccgtgtagcagaacaatggaaccaaaatacaggacattttcctacttcacgtctggatgccatccaattaatatcttctctacgatattgcaatggaagggactgctcttatgtgttattggtgctattccgcttgtacggccaacgaaataggtcctactacacaagggaaatagaggataccatactcttagcttcacagaagcctgaagtgtatgatgacattgctcgcgatacgtgctgcaaatttgggatagatagacctcaagttgtacctgtgcaaggactacctcagagtaagttctagcaactggccttttgattgtattcaggtttgaaccatacttatggaatgcatgtaagaggtttgtgttggagcaccgggctggcgagaaccgtgctccaatcatttcagatgatagccccaacaaagatatcaacaatgccttctataatatcgtgatgatgaaaaagtagatactactaccccaatatatcttatatttctcttctttatttccttttcagttttagtagaagaaaatgttgttggcttgtgatttagcatggttcttggattctacaaagtgattgtcttcaccaatcctttgataaattctatgagaatgcttaattgcaagatatgcaatgatgtaattcttgctccagtcctaatgaaccagttgttcacaataggctaaaccatcagaaagttaactactaactacaatcaaactattttttacgaagcagttattattttgttacaactttcaatacagaagacaaaacacatgaaatttgataaatgtaatcctcacatttgaaccatagtattgcagtgccacaagaatagtttcattttatctgcaaagtcattccttatagttgtcaatgaactatcatgcgaagatagaataagaactttgtgattgcttgtttatttatgagattgaataagagggttactacaaaatatttgtcatatcttttcaatttcctttcttgtgtaatcatggcctagatgtttagattactgattagcagtttttctatgtattattttgagtttgtagacaacagacattgagtgtcttttgatattaattttcaggtcaaaggtcagttttgtggaaaacatacaatatgttggtatcttcaatagtataagatcatgtaccacacgtcgacatcaatattgactaatttctttcaataggatgggagaatgttgaatgcttcttcagatactatttcttggtctgtcaaatctgcttgacccaaatgcaagttttgttcaaatgtggcaaaaaatgattgtctcaccaattgtcagcacgttttcttccagcacgtttgcttccagcaaagttgtcagttcttatgattagatgaaaaatctagaattattctatcatttacacatccatatgacctttgtgatatgtgatgatgtgaggtattcaaccgtgtctaactactaattattgccttcttctatttgttgtataggaaaagatgaaatggaactcaaattttagtggtcgcacaagtgtggagccagttgatgaccaagtttttcaattagtattttagtttgaatttagagtacacatatgtatgagttatttgacaatgcttgtttatgagagattgaatgatacctatctatattatattaattataatgttattaaataaa

SEQ ID NO: 151284 - DNA, 2225 bp, Zea Mays
gtcttctccctctcccctagatccttcgacgccgccctccctcagctcattccctgccgccgctcatctgctggccttgtctcactgccgcccaaccattttcctccctcaagctagcacgcagcctcaactcctctcccacctcacgcacgtctctcccagccgttccttcatttctctggctcgtccttctccatggggtcgcgccctgctgcgccgtcgtgctggtcgccggctgagcccccttcagtgcctgacgccgcatctccctggtgctcacctctgtttccccctgcgttggacgacctcgcactccctccctgctctagatttctccatggccgcccctttccttgccccgggtggcgagctcgcccctgcattcctgctcgcctaatctccacttccctattccagccacctcccatggacgccagccctcagccatggatgccgaaccccctctctttagtgcctttctttacagcccctgcgtcgccgtgcgtgtaaggtgtttgtataaatgctcaagaggagtgccgtgtcatggccaactcttttggcgtcgtcggatgtttgatgttttgtgcatcccgtctacgacgccgtcgaccatcggtgaggattcgttcttgctttgtcatttcatcgatcgacgtctatttgctaatatgaattgtgtttatgtgcctatgtgtgttgaggagcgaaatccgtgaaatctaggtgaagaagagatggagcacgtcgtcgtcatggttgcagctttgcttttgtcgtcgtggagcctccaccagcgccgtgtagcattcaggaacaatggaaccaaaatacaggacattttcctacttcacgtctggatgccatccaattaatatcttctctacgatattgcaatggaaggtgtagatagatgcaagtatacattcaatgttcttatgatagaggaaaggcatagctgcagatgggtttgatgttttatcttttcattcatgcatttcatcccatgcgcataaacaatttccaagtagcttgtgtatccaaacttggttcttttgttcactcagccaggttgtactgtctcattcagaattcggatttttcagccattaacccgcattttctattggatcgttttagattcatttgttttatctattagaccgtactctatattgtttcatttgaggacatttcaaatggttgttgtaggtatgtgatagatgactagaagaaaattataaaaggatgttgaataagattgtgcttattttctcgtgacgaaggttttttctatgcttagggactgctcttatgtgttattggtgctattccgcttgtacggccaacgaaataggtcctactacacaagggaaatagaggataccatactcttagcttcacagaagcctgaagtgtatgatgacattgctcgcgatacgtgctgcaaatttgggatagatagacctcaagttgtacctgtgcaaggactacctcaggtttgaaccatacttatggaatgcatgtaagaggtttgtgttggagcaccgggctggcgagaaccgtgctccaatcatttcagatgatagccccaacaaagatatcaacaatgccttctataatatcgtgatgatgaaaaagtcaaaggtcagttttgtggaaaacatacaatatgttggtatcttcaatagtataagatcatgtaccacacgtcgacatcaatattgactaatttctttcaataggatgggagaatgttgaatgcttcttcagatactatttcttggtctgtcaaatctgcttgacccaaatgcaagttttgttcaaatgtggcaaaaaatgattgtctcaccaattgtcagcacgttttcttccagcacgtttgcttccagcaaagttgtcagttcttatgattagatgaaaaatctagaattattctatcatttacacatccatatgacctttgtgatatgtgatgatgtgaggtattcaaccgtgtctaactactaattattgccttcttctatttgttgtataggaaaagatgaaatggaactcaaattttagtggtcgcacaagtgtggagccagttgatgaccaagtttttcaattagtattttagtttgaatttagagtacacatatgtatgagttatttgacaatgcttgtttatgagagattgaatgatacctatctatattatattaattataatgttattaaat

SEQ ID NO: 151285 - DNA, 101 bp, Zea Mays
acctgtgaaggccctggcgctgcggaagcctccgccgttggctccgccgtaggctccgccgcggcctccgctgcagtttccgccgcctccgccgcggaacc

SEQ ID NO: 151286 - DNA, 101 bp, Zea Mays
gtttgtttatttttttattcatgtgaagctctttgtcagaatcatttagccaagcgattcagttgcccactaaatttaatatatgcacactaactttaagc

SEQ ID NO: 151287 - DNA, 1958 bp, Zea Mays
ctttgtggataaatatttatttgccgttcttgttttctcgttaatgtatctcatatattttgtatagacctatcactatcactataacggattggaacaatatcacgatccttccaacatgccttagtactatcactatgattcgagataaacatgatcaaattaggcaaccaggcggagtgaataagagccaatattttttatgctcagacaatcttaacttgtttcccaatgctacacctaaacctctaaaactccaaaaatacaaaagagatatccacactgatcacttcaccaagttgctttgtcttgatgcacctttcatgatggctcctatgggtggcaatgggtacgagtatgagcaagtctgtccctacattggtgtccgacgcataccggcagtgcgtgacggtagaccaaggtggccaaccaggtgctcaacacgcttttcaccattgtatgagtgttcgagcaaccacgactcttctacaagatcacaacctcgtgcattcatgctccttttcgggtggcacaatacgaagcttacactgctaagcttccgcgacatctactacaagaacaccgccaagcaacacgacaactactgtgtgcgctcttcttcatcttcaacaaccaagcacaccgagactggccgggtcgttagcttctgcaatgataaggaagagcgtagacgacggctcctcgcgcatgagcgcgtagagatatggcggggattcaaggtcctctcgcttgctgaccgggtttttcgattcacggtttcttccaaggatgttgggttccacatttacaactctagatgcattgtccgtccggaattcaaagccttcttcaacttgtggaactctggtggaccaaattggaattatgaactcagattattccttcaagaggagaatgccaactggtggctgagggatttgctggtgactcttggactgttcaatgtgaaattattcagcaactcatgcttgggcggccaagcacaggatgaggaccccatccccccggcctccgaggatggccaccagctccccctggtcttcttcgggctgggccagcccgtgcccccggcagggtttgacctaaatttccctccggagcctgcgggtggcgagcagccggctcagcaggaggactttggccagggagattgggaccagtggattgtgaatgaccagcccaatcagcaggctccgctgcccatagtgccagaagagcaacacgttcagcaggatgaaatacaactcagtaaccagcactctagcttatcatctgatagctccattggtgctggtcagcttgcacctcttccgaatgggcattttgtagaaaatggacatatgttgcttggggatgcccctctctttgggcctcaggaggttgatggaccggaatggctgcctgaccccgttttccagatgtttgaggaaagaaaaagagctgcacagttctctagactctgggccaaatactttgatcctgctgggtcggctgaccactcggtggacatccctaagaagtgggcaccctttttccttttgaatctgcttcagcctgatactttcaattggtcgaagacctttctgctgtcagatattccctcaactttgcaggagcaggaaatgaaatccatcccttttgtggtccctaaggaatgtccgaatgattcctccctggaggatgtcatttctgggatctccaaggattctggcggttgtggtgggccgtcaccaatcattgtggagtcggagctcagaagaagcaaacgtttgaaagaatcacgtgttgggttcaggcagggggcctgcccaaaaaggaactgcctcatgtgccaacataacttcgatggccccccccgctatcctccaaggtgctgcggaatatgggctctaggttttgtaacctgtctgaggatgacctttctgagcagaggctaa

SEQ ID NO: 151288 - DNA, 2436 bp, Zea Mays
ctgagatttattttaataacaaaaaaaaaaacaagcaagactcatactacactctagaagctacaaaccacgagcatttccgcggcgccgccttcctccggctccgacccccttgcccgttgcagctgcattggttttggttctcttcaagccagccaccgcaaagcgcgcagcaaagctggcctcactcatacagctcaggtcctcccaagctcctccctatatctctctcctcccatcccccaaaccctaatccccggcgtaacagtataacacaactgtctctctcctccctccccctcactctttccctctctctctctgaagcgcgcagctttcaaagcgttgggagagatggcagaggagacgcagccagaggccgcagccgaggccgaggtggtcgtgaccgagccggcgccggcgccggcggaggcggaggtgcctgcggcagcagatgccgaagccgtgaccgaaacggagaagaaagccgatgagccggcggtcaccgccgatgacgcgggaaaggggaccggctcgttcaaggaggagagcaacctcgtggaggacttgcccgacccggagaagaaggtgctcgacgagttcaagcacctgatcgctgccgctctcgccgccggtgagttcaacctgcctcccccgccgccgccgccgaaggccaaggaggaacccaaggccgaggagacgaagacggaagaatccaagaccgaggatccggccgaagaagagcctaaggcggagtctgcggcggaggagcccaaggccgaggtagctgcgaatgccccggatgaggaggtcaagacggaggtgccgccggtcgaggaggccaaggctgagacagtggctgtggaagccaagcctgccgagcccgagccgcaggagaagaccgtcgtggtcgctgaggaggagcctgccaccaagacggtggaagcaatcgaggaaagcgtcgtgtccgccgacgaggcggccgcgcctgagcccgtgctggtctggggcgtgccgctggtgggcgacgacgagcgcacggacacggttctgctcaagttcctgcgagcgcgggagttcaaggtgaaggaggccatggcgatgctcaagtccgcggtgctgtggcgcaagcgcttcggcatcacctcgctcctcgacgccgacctcggcctgccggagctggagaacgtggtgttctaccgcggcgccgaccgcgagggccaccccgtgtgctacaacgtctacggcgagttccaggacaaggatctctacgagaaggccttcggcgacgatgagaagagggagcgctttctcaagtggcgcatccagctgctggagcgtggcatcctgtcgaagctggacttctcgcccaacggcatctgctccatggttcaggttaccgacctcaagaactccccgcccatgctcggcaagcaccgcgccgtcacccgccaggctgtcacgctgctccaggacaactaccccgagttcattgccaagaaggtgttcatcaatgtgccgtggtggtatctcgctgccaacaagatgatgagcccgttcttcacgcagcgcaccaagagcaagttcgtttttgctagcccagccaagtcagcagagactctattcagatacatcgcaccggaacaagttccggtccaatttggaggccttttcaaggaggatgaccctgagttcacaaccttggacactgtcactgagctcactatcaaaccatcgtcgaaagaaaccattgagatccccgtcaccgagaactccgcgattgtatgggaactccgggtgctcggttgggaggtgagctacagcgccgagttcacccctgacaccgagggtgggtacactgtcattatacagaaaacaaggaaggtgcccgctaacgaggaaccaatcatgaagggaagcttcaaggtaggcgagcccggcaagcttgtgctaactgtgaacaaccctgcatccaagaagaagaagctcctttacagatcaaaggtcaagagcatcagcgagtgagtgagtgagtgaggttgctgctagctgcctgggtcctagagttaaatgatgtaccacagttcatctcagcatgatagaagagaggagaagccttttggtttggttcgttaatttattgggttttgctggcttttggttcacattctatattttgtttggttaaaaccaaagcgagcttggttttgtgacagtagatggggaagtataatgacattctgatggatggttgttgaggagggcagggaagacgaaaggctggggaatgtctgctcctctgtagatgtgtctgtacattgcatctcttggattctcattgatatgtttaggttttaggagtactttgtcacatcattatgcaatccatgttactctctgcatgttcctctttctcttcgtgtcctttcccttgtt

SEQ ID NO: 151289 - DNA, 1125 bp, Zea Mays
cggcggatcaagcaagcgcaaggcaaggcatgcgagtctagcacgcacacgcactgccactgccatatatatgcgcctccctccctggcctgccatatcttcttccgtttccgtctcccctcttctttgttacaataaacaaccaatcgaagccccaggcaacatcgaccgactagagtagatagagctcagtggcggccgccaagaaacacctgcgccctaaggcgagcagcggcaggcataggatgggcaggtccccgtgctgcgagaaggcgcacacgaacaagggcgcgtggaccaaggaagaggaccagcgcctgatcgcctacatcaaggcgcacggcgaggggtgctggcgctcgctgcccaaggccgccggcctcctccgctgcggcaagagctgccggcttcgctggatgaactacctccgcccggacctcaagcgcggcaacttcacggacgacgacgacgaggtcatcatcaagctccacgccctgctcggcaacaagtggtcgctcatcgcggggcagctgccggggcgcacggacaacgagatcaagaactactggaacacgcacatcaagcgcaagctgctgacccgcggcatcgacccgcagacgcaccgcccgctgagcgccgccgccgccctcaccgccggcctcccgtcgcccgcgcgcccgcccaccgtgctgttcgcgcgcccggcgccgtcggaggacggcggccacagcagcggcggcgggagcgccgaccacgcgccgcggtgccccgacctcaacctggacctgtccgtgggcccgccgtgctcgccgcccaagacgccggcggccgccgcgtcgacgcccacgtcgcagcagcagcagcagcagcggacgacgaccatctgcctgtgctaccacctcggtgtccgcagcggggaggcctgtagctgcaagtccccctcgccggcggcggcggggttccggtttctccggccgctcgaggagggccagtacatataaggcaggcgtcgtcgatcacagtaggccggcagaagcaaacctgtaaaaacaaccacagaacagagtttctaatggagatgatgactgatgtggatggatgatgagagattgagagcatagcatc

SEQ ID NO: 151290 - DNA, 1884 bp, Zea Mays
cgattgtgccggcgccgcggcctacctataaaaccctaacgaccttcgacgacggcaggcaccatgtgtcatcggactagcaagggtcctctccctcgcgctgtgcagtgtcaacaagccatggtcgacaccgtcgccggcgccaccgactaccgcggtcagccagcctcgcgggccgccaccggcggctggaaaccgtcggttttcgtcatggcgatggagatcgcggagcggttcgcgtacaagggcgtggccgcgaacctcatcacgtacctgacggggccgctggggcagccgatggcgcgcgccgccgcgtccatcgacgcctggaagggcgtctcccagatgctgcctctgccgctcgcgtgcgtcgccgacgcctggctcggccggtaccgggccatcgtcctcgcctccctcatcttcgccgtgagcatgggcgcgctgtcgctgtcgtcggcgctcccggcgctgcgcggcggccacgtggccatcttctacgtggcgctgtacctggtggccctcggcgagggcgcgcacaagccgtgcgcgcaggcgttcgcggcggaccagttcgacgagaaggaccccagggagagcgtggcgcggagctccttcttcaactggtggtacttcggcatgtgcgccggcaccgccgtcaccaccatggtctccagctacgtgcaggacaacgtcggctggggcctcggcttcggcatcccctgcatcgtcatcgtcgcctcgctcgccctgttcctgctcgggaccaggtcgtaccgcttctacacgaccgcggcggccagccccttctctcgcgtcgggaaggcgttgctggcgttggtccagagctgggcgccgaagcatcgcaccagaaaactaggcgacagcgacggcgacgccgtcgccgtcgaggaagtgaagagcgtgctccgcctgctgcccatatgggcgtcgtgcataatctacgcgatcatcttctcccagacatcgacgttcttcacgaagcaggccgcgacgctggaccgccggatcggcgcgaggttcaaggtgccggcggcggcgctgcagacgttcatcagcgtcagcatcgtcgtcttcatcccggtgtacgaccggctcttcgtgcccctggcgcggcgctacacggggaggccgacggggatcaccatgctgcagagggtcggcgccggcctggcgctcgccctcgtcgccgtggccctgtcggcgctcgtggagatgaagcggctccgggttgcggcggaagccggcctggtgaatacccccaaggcgcagctccccatggcgctctggtggatggtcccgcagtacgtcctcatcggcgtcgccgacgtgttcgccatgatcgggctgcaggagttcttctacgaccaggtccccaacgcggtgcggagccttgggctggccctgttcctgagcatcttcggaatcggccacctcctcagcagcttcctcatctccgtcattgacaagacgacagcaaagagcgggacgagctggttctctaacaacctcaaccgcgcccacctcgactacttctactggcttctcactgggctctgcgccgtggagctcgtcgcctttgtgatcttctcgcgagtgtatgtttacaagagaaaggttggcaatgatggcggcaatggtgatttcgtataatagtatatgcaatttgagccgtactgatcacttgaggggtgccggtagctgtagttgtttgtacagtacccgtcttggaaaaaaacgtacgaagtaaggtgtgaccgtgtgactacgggattctgtgttaacgcatattttttcatcttcgactggttctatcttagacctttgaatgcatggggatcagaggagattagaccttgttta

SEQ ID NO: 151291 - DNA, 2180 bp, Zea Mays
aacggaaagtgaggagggggagagcgagagcgagagagagagagagagagaggagagagagagagagagaggagggagggagctcgagaggtcaacgagggggagctggcacgaaagctcagggctccttgctcctcctataaacccagcgcacccgccttccaggctcccattttctcgcccgggagccgcaattccatcctgctgctcgagttatatactcacccaatagaacaattctatgcctgatgattgtacttcttgaggtagaagatcatactgaagcagaactcgagcggtgttgaatcgaaatggaaggcaggatgacaagtttggaagccaccatgaaagtttcctcatcgatggcaagcagcatatcaaggaatgctgaccctgaccaacagactctacgccccaattcggtggagcagttttattttccaagacctggtcaatctttgccaggcattcctccattctttgggcctccctcctccagtttgtatcttcctaatgacaatgaagctaaatttggcaatcagtttgaatcaaatccttcacagaatacagattgggatccgcaggctatagtgagcaacctaaccttccttgagcagaagatcaagcaggtaaaagatattgtgcagtctatgagtaatcgagagaaccaattagctggcggttccagtgagctagccgcaaagcagcatcttgtaactgctgatctcactagcattataatccagctcatatctactgctggttccctgctcccttcaatgaagaatccacttcttagcagcaatccagcagttaggcagcttggcaacactcttggttctcctatgggccttggcatgaatgctaatcagagaccaagtgtagacagcaagactgatattcctgacacaggaaaaacttctgattatgatgaactgatgaatagccttaatcctgcccaagatgaaagagatgagatgatcaaatgtccaaatccctgtggtggggaagggtctgaaccgactcccatggaggaccatgatgtgaaggaaagtgatgatggtggtgagggagagaatctcccccctggttcatatgtagtcttgcaattggaaaaggaggagattttagcaccacatactcatttctgcttgatctgtggtaagggtttcaagagagatgctaaccttaggatgcacatgaggggccatggagatgagtacaaaactccagctgctcttgccaaacccacaaaggattcaggtgcagatcatgcacctgttacaaggtactcatgcccatttgtgggttgcaaacggaacaaagagcacaagaagttccaacctctcaaaacaatcttgtgcgtgaagaaccactacaagcgaagccactgtgacaagagttacacctgcagccgttgcaacaccaagaagttctctgtcatcgcggacttgaagactcatgagaagcactgtggtcgtgataaatggctctgttcttgtggaacaaccttctccaggaaggacaagctttttgggcacgttgcccttttccaaggccacacacctgcgcttcccatggaagatgtgaaggtatcagaagcatcagagcaacctcaggacagtgagccgatgaatgaaatggcgaggagtaatatgtatagcttcccctgtagttcgtctgatggtatatcgaacctcgacatgaaaatggctgatgatgtgcgtggttatttctcgccgctgaactttgatccttgctttggcgcgctcgacgatttcactcgccctgggtttgacatctctgagaaccccttctcattcctgccttcaggatcttgcagttatgggcagcagaacggagatagctgatggatgccgccatcgatgatgacgacaacagcactgccaacctttatttatgttgttgcatgatgctagcttggttcttcctctgttcaagagccatttgagattatgcctttatattttccctaaatgtacttacgtttgtggtcattaataatgatcaaggacttctagcatttcttagacccagatagccccaattttcagtatacatacgcaagtattgcttgttcattttgtctgaatcggcgtgatgcttgtagcactgacaatttatcataacaagctgctcagctattaatctggttctcc

SEQ ID NO: 151292 - DNA, 2217 bp, Zea Mays
aacggaaagtgaggagggggagagcgagagcgagagagagagagagagagaggagagagagagagagagaggagggagggagctcgagaggtcaacgagggggagctggcacgaaagctcagggctccttgctcctcctataaacccagcgcacccgccttccaggctcccattttctcgcccgggagccgcaattccatcctgctgctcggacatgatgttatgatcctgacaagcttggctggctggtgaacctatgagttatatactcacccaatagaacaattctatgcctgatgattgtacttcttgaggtagaagatcatactgaagcagaactcgagcggtgttgaatcgaaatggaaggcaggatgacaagtttggaagccaccatgaaagtttcctcatcgatggcaagcagcatatcaaggaatgctgaccctgaccaacagactctacgccccaattcggtggagcagttttattttccaagacctggtcaatctttgccaggcattcctccattctttgggcctccctcctccagtttgtatcttcctaatgacaatgaagctaaatttggcaatcagtttgaatcaaatccttcacagaatacagattgggatccgcaggctatagtgagcaacctaaccttccttgagcagaagatcaagcaggtaaaagatattgtgcagtctatgagtaatcgagagaaccaattagctggcggttccagtgagctagccgcaaagcagcatcttgtaactgctgatctcactagcattataatccagctcatatctactgctggttccctgctcccttcaatgaagaatccacttcttagcagcaatccagcagttaggcagcttggcaacactcttggttctcctatgggccttggcatgaatgctaatcagagaccaagtgtagacagcaagactgatattcctgacacaggaaaaacttctgattatgatgaactgatgaatagccttaatcctgcccaagatgaaagagatgagatgatcaaatgtccaaatccctgtggtggggaagggtctgaaccgactcccatggaggaccatgatgtgaaggaaagtgatgatggtggtgagggagagaatctcccccctggttcatatgtagtcttgcaattggaaaaggaggagattttagcaccacatactcatttctgcttgatctgtggtaagggtttcaagagagatgctaaccttaggatgcacatgaggggccatggagatgagtacaaaactccagctgctcttgccaaacccacaaaggattcaggtgcagatcatgcacctgttacaaggtactcatgcccatttgtgggttgcaaacggaacaaagagcacaagaagttccaacctctcaaaacaatcttgtgcgtgaagaaccactacaagcgaagccactgtgacaagagttacacctgcagccgttgcaacaccaagaagttctctgtcatcgcggacttgaagactcatgagaagcactgtggtcgtgataaatggctctgttcttgtggaacaaccttctccaggaaggacaagctttttgggcacgttgcccttttccaaggccacacacctgcgcttcccatggaagatgtgaaggtatcagaagcatcagagcaacctcaggacagtgagccgatgaatgaaatggcgaggagtaatatgtatagcttcccctgtagttcgtctgatggtatatcgaacctcgacatgaaaatggctgatgatgtgcgtggttatttctcgccgctgaactttgatccttgctttggcgcgctcgacgatttcactcgccctgggtttgacatctctgagaaccccttctcattcctgccttcaggatcttgcagttatgggcagcagaacggagatagctgatggatgccgccatcgatgatgacgacaacagcactgccaacctttatttatgttgttgcatgatgctagcttggttcttcctctgttcaagagccatttgagattatgcctttatattttccctaaatgtacttacgtttgtggtcattaataatgatcaaggacttctagcatttcttagacccagatagccccaattttcagtatacatacgcaagtattgcttgttcattttgtctgaatcggcgtgatgcttgtagcactgacaatttatcataacaagctgctcagctattaa

SEQ ID NO: 151293 - DNA, 416 bp, Zea Mays
cagtcacaatctacctgggagtttgacaatttgaccaccatgctacttgtgttatcgcaagatatgaggtgtcctcaattatatggattttatgtcattcacttctctattatagcagataatattttcggtactgctgtaacagctgatagtgttgaagaatctggatgtctgatcatgtgcagtgaccttttttttcttcttacggacagtggatacctactatcgccggtgcagcagtgctagttacgttggaaatgtgtcagttcccttgctttgtatcaatgctttggattatcccctttgcacaagggaggctattccttgggatcatgggatgaatgcaggtgatttttttcttgtgaaactcatggtcctcgtttctgagaagttctgtttatgtagtaatctttaat

SEQ ID NO: 151294 - DNA, 1614 bp, Zea Mays
cctctgctatctatctccggcggacgactggccaccgtgtgctagctagctagctagccaacaaggcaagccagtagctgatcgatcgccgtcgcagctcgcgcgcggccgatcgaagatgtcgaccaccgcctacaacatgtcgtcggcgtacatgccgaacccgagcatcggcataccggactggctgaacaagggcgacaacgcgtggcagatggtggcggccacgctggtgggcctgcagagcgtgccggggctggtgatcctgtacggcagcatcgtgaagaagaagtgggccgtgaactcggcgttcatggcgctgtacgcgttcgccgccgtgtggctgtgctgggtcatgtggggctaccagatgtccttcggccagaagctgctcccgttctggggcaaggccggccacacgctcggccagggcttcctcctcagccaggcggggctcccggcgaccacgcacttcttccacggcagcggcgtcgtcgagacgggcgagatcacgcccttgtatcccatggcgtccatggtctacttccagtgcgtgttcgccgccatcacgctcatcctgctcgccggctccctgctcggccgcatgaacttcaaggcgtggatgctcttcgtcccgctctggctcaccttctcctacaccatcggcgccttctccatctggggcggtggcttcctcttccactggggcgtcatcgactactccggcggctacgtcatccacctctcctcgggcgtcgcgggcttcaccgccgcctactgggtcgggcccaggctcaccaaggacagggagaggttcccgccaaacaacgtcctgctcatgctcaccggcgccggcatcctgtggatgggctgggctggcttcaacggcggagacccctacgccgccaacatcgactcctccatcgccgtggtcaacaccaacatctgcgccgccaccagcctcctcgtctggacctgcctcgacgtcatcttcttcaagaagccctccgtcatcggcgccgtccagggcatgatcacgggtctcgtctgcatcactcccggcgcaggcctggtccagggctgggcggcgatcgtgatgggcatgctctcgggcagcatcccgtggtgcacgatgatggtggtgcacaagcgctcccgcctgctgcagcaggtggacgacaccctgggcgtgttccacacccacgccgtggccgggttcctgggcggcgccaccacggggctgttcgcgcacccggacctgtgcccgctgttcctgcccgtcaccaactcccgcggcgccttctacggcgacggcatgcagttcctcaggcaggtggtcggcgcgctcttcatcatctcctggaacgtggtggtcaccagcctcgtgtgcctggtggtgcggctcgtggtgccgctgcgcatgcccgacgacgagctggccatcggcgacgacgccgtgcacggcgaggaggcctacgcgctctggggcgacggcgagaagtacgactccaccaagcacggctggtactcggacaacgacacgcagcacaacaaggcgcccagcggcgtcacgcagaacgtctgaccacagggtttgcggtgtctgggtctgga

SEQ ID NO: 151295 - DNA, 286 bp, Zea Mays
aaaggaaattgagattgagagattaaatgaattgacgatatcaggttggtttgcagcacaagagttaaatgaactggcacaaatgacattcaagcataaagatgatatcaagaatacaatcaatgacttcaaacaggtgatgtatttagctagatgttgtgtgttctgaactaatagcttcaaaagtggctttgaccttatcgcgcaaataagtagaagatcaggtgacacagttgattaaccaagtgcaagaactcgtagaccaaaaagcactggctatttctca

SEQ ID NO: 151296 - DNA, 1069 bp, Zea Mays
acaagtgtttgaaaaagttctatgatgtcacattacttttttctggcacttcatatcccactgcaaatcatttctttcgcaagttttctgagattaagatggctattgcaagatggtgtgagagcagtgatgtcataatttgtacaatggcattctctatgaaagagaagttcaataaatattgggacatgaacaatatggctttagcagtgggggcatttcttgatcctaggtacaaacacaaaatggtggagttgtacatgtctaagatgtatgatagtgagagggctgagctagagaagttgtctttcattaatgtcatcaatgagttatttgctttgtattcatcaaacatcaatgcaaaaacaaccaatatggcttctacctccaaggagagtgaacttgttccacacaaaaatggttctttcatggatgatgaggatgaggatgaggttgatcttgatgagttgtatgcagcagcaaacaatgtgaagaaggtttcagaattggatgtgtatatgagtgagggtttggtgaaggtcaatgaaggtgatgctccatttgatatcctatcttggtggagggggcaagtgacaaatcttcctatcctttcgacccttgctcgtgatgtgttatctatgcaagtttctactgttgcttcggagtcagcatttagctctagtggacgtattgttgatgcctttcgttcaaaacttaaacctgaaattattgaggccttggtttgtaccaaggattggaagattgcttcagagaaagatttagaaactgaaattagaaccataagtgaagatatgaatgcaatggacttggacgaagatgctattgcggcgacttgatacattgaaattagactcttcgctatgttgtttgcgcttttgtaataaactatgtagcatgttgtgtatctcttttaatgttgcggtgaacttgtgtgaaatatctactatctattatatatttgtggacttgtgaacttgtggattatacataaaagaggggatatgctgctgatttatttttaaaactgtgttgtttcttctataatgaa

SEQ ID NO: 151297 - DNA, 1833 bp, Zea Mays
atggacaagtacgaggcggtgcgggacatcgggtcggggaacttcggggtggcgcgcctgatgcgcaacagcgagacccgggagctcgtcgcagtcaagtgcatcgagcgcggctaccggattgacgagaatgtgtacagggagatcatcaaccaccgctccctgcgccatcctaacattattcgcttcaaggaggtgatacttacaccaacacatcttatgattgtgatggagttcgcagcaggtggagagcttttcgatcagatctgtgatcgtgggcggtttagtgaggatgaggcccggtatttctttcagcagttgatctgtggcgtgagctactgccattacatgtcatcagtgttgcattcaagacccaaatcagctgtgggaacaccagcatatattgcacccgaggtgctatcccgtcacgaatacgatggaaagcttgcagacgtatggtcctgtggggtgactctttacgtcatgcttgtgggagcatacccatttgaagacccagatgaccccaagaatatacgcaagaccattcagcaaataatgcaagtgcagtacaagataccagattatgtccacatatctacggaatgccagcaacttattgcccgtatctttgttgccaatccagtgaggagaatcacaatgaaggaaataaagagccatccatggtttttgaagaacctaccacgggaactcacggagactgcacaaggcatgtactacaggagggataacaaggtgccttcttattcagaccaaacgtcggaagaaatcatgaagatagttcgtgatgcaaggaccatgccgaaatcatccagatcaggctatgggtggagcgctgagtattcggatgaagaagagaaggaagaggaacacagactagaggaagatgaatacgataggagggtgaaggaggtccatgcaagcggagaactccgatccagtgggatgtatgcagttttggcttctgaattgcttgtgctcggtcaattttcatgtaacataattcaatacactgaggcagactaccatgtccttgtgttgacgtccaccacggagcgccgcacggccgtagccctagccgccaggcaccagcggccagccagaggcccggacgactggactgccaaagccgtcgtcgccacagggaagcgccggtacgccgctcggcccttctacaggtgttcatgtggcaaatggaatttaggatttggtagcaccatggtccatgtatgtaaatcacatcactgagatggaggatggtttaaatgatgatggaatggaatatccatttgagggtgatgctaataccagtaacaatgatcagatagtagaggaccatgctgatgatgcccctattgctagtggtgataatgccatcgtccaacagcaagttggtctgagaaagaagaaatacatgtatgtgaattaccatcgtgttgagcaacctgatggttccagtgttaagcaaaagtgggcaaaatgtcttcgatgttcacataaagctaagtctgatgcttcaaatggtacaaaggcttttagtaaccacttaaaattgaaacattgtcttgtgaagggtcaacaacagctaattcagagtggaaatgacatagcaacatataaatatgatgagaaagctagtgtgagacttctatattatgccatcattatgcatgaatatccattcactgttgccgaacacaagtattttgtgaaatttatcaaatcactacggccatcatttcctttcaagtctcgtatcactgttcgtaaagagatcatgcaactttataaagaggaaaagaatatgttgtatgc

SEQ ID NO: 151298 - DNA, 1749 bp, Zea Mays
cggttcaggcgaaacgggggctcacacgtcggatccgacggcgaatcgcagccagccaggcacggatgccccccgcttccgggtgcggtcacggacaccgacggcgggcccacccgacatcccctccggcctcctccccgtccctgtcctccggtcctccccttccctccttcacctcgcagtctcgcacacgctggcgcgggcaggcccccaccctgcgctcctaccacccaccagtccaccactataaaatccccgatcgcctcacgcacacgcaccgacccaccgtccgccgaggcgcaaccgccgcaacgcaaacccacaaaccctccgccgccgccgccgccgccgtaccacgtaccgtcccgcttctcctccgcccttgtgcgagcaggcaacggcagcagagcccgcacaggttgctcccggacggagggagaacgcgcggggctgggctagccgggggcggccggaggaggtacgtatggacaagtacgaggcggtgcgggacatcgggtcggggaacttcggggtggcgcgcctgatgcgcaacagcgagacccgggagctcgtcgcagtcaagtgcatcgagcgcggctaccggattgacgagaatgtgtacagggagatcatcaaccaccgctccctgcgccatcctaacattattcgcttcaaggaggtgatacttacaccaacacatcttatgattgtgatggagttcgcagcaggtggagagcttttcgatcagatctgtgatcgtgggcggtttagtgaggatgaggcccggtatttctttcagcagttgatctgtggcgtgagctactgccattacatgcaaatatgccatagagatctgaagctggagaatgttctcttggatggcagtccagctccacggcttaagatatgcgattttggctattccaagtcatcagtgttgcattcaagacccaaatcagctgtgggaacaccagcatatattgcacccgaggtgctatcccgtcacgaatacgatggaaagcttgcagacgtatggtcctgtggggtgactctttacgtcatgcttgtgggagcatacccatttgaagacccagatgaccccaagaatatacgcaagaccattcagcaaataatgcaagtgcagtacaagataccagattatgtccacatatctacggaatgccagcaacttattgcccgtatctttgttgccaatccagtgaggagaatcacaatgaaggaaataaagagccatccatggtttttgaagaacctaccacgggaactcacggagactgcacaaggcatgtactacaggagggataacaaggtgccttcttattcagaccaaacgtcggaagaaatcatgaagatagttcgtgatgcaaggaccatgccgaaatcatccagatcaggctatgggtggagcgctgagtattcggatgaagaagagaaggaagaggaacacagactagaggaagatgaatacgataggagggtgaaggaggtccatgcaagcggagaactccgtatggacactcttcacatatgaaagctagtggaagaaagttacatgtagataacttgttgttgttgatctgaaggatccagtgggatgtatgcagttttggcttctgaattgcttgtgctcggtcaattttcatgtaacataattcaatacactgaggcagactaccatgtccttgtgttggtaaatatgaagcatctacctgtctgtgtccattgcac

SEQ ID NO: 151299 - DNA, 1766 bp, Zea Mays
cggttcaggcgaaacgggggctcacacgtcggatccgacggcgaatcgcagccagccaggcacggatgccccccgcttccgggtgcggtcacggacaccgacggcgggcccacccgacatcccctccggcctcctccccgtccctgtcctccggtcctccccttccctccttcacctcgcagtctcgcacacgctggcgcgggcaggcccccaccctgcgctcctaccacccaccagtccaccactataaaatccccgatcgcctcacgcacacgcaccgacccaccgtccgccgaggcgcaaccgccgcaacgcaaacccacaaaccctccgccgccgccgccgccgccgtaccacgtaccgtcccgcttctcctccgcccttgtgcgagcaggcaacggcagcagagcccgcacaggttgctcccggacggagggagaacgcgcggggctgggctagccgggggcggccggaggaggtacgtatggacaagtacgaggcggtgcgggacatcgggtcggggaacttcggggtggcgcgcctgatgcgcaacagcgagacccgggagctcgtcgcagtcaagtgcatcgagcgcggctaccggattgacgagaatgtgtacagggagatcatcaaccaccgctccctgcgccatcctaacattattcgcttcaaggaggtgatacttacaccaacacatcttatgattgtgatggagttcgcagcaggtggagagcttttcgatcagatctgtgatcgtgggcggtttagtgaggatgaggcccggtatttctttcagcagttgatctgtggcgtgagctactgccattacatgcaaatatgccatagagatctgaagctggagaatgttctcttggatggcagtccagctccacggcttaagatatgcgattttggctattccaagtcatcagtgttgcattcaagacccaaatcagctgtgggaacaccagcatatattgcacccgaggtgctatcccgtcacgaatacgatggaaagcttgcagacgtatggtcctgtggggtgactctttacgtcatgcttgtgggagcatacccatttgaagacccagatgaccccaagaatatacgcaagaccattcagtcactcttcgcctgcagcaaataatgcaagtgcagtacaagataccagattatgtccacatatctacggaatgccagcaacttattgcccgtatctttgttgccaatccagtgaggagaatcacaatgaaggaaataaagagccatccatggtttttgaagaacctaccacgggaactcacggagactgcacaaggcatgtactacaggagggataacaaggtgccttcttattcagaccaaacgtcggaagaaatcatgaagatagttcgtgatgcaaggaccatgccgaaatcatccagatcaggctatgggtggagcgctgagtattcggatgaagaagagaaggaagaggaacacagactagaggaagatgaatacgataggagggtgaaggaggtccatgcaagcggagaactccgtatggacactcttcacatatgaaagctagtggaagaaagttacatgtagataacttgttgttgttgatctgaaggatccagtgggatgtatgcagttttggcttctgaattgcttgtgctcggtcaattttcatgtaacataattcaatacactgaggcagactaccatgtccttgtgttggtaaatatgaagcatctacctgtctgtgtccattgcac

SEQ ID NO: 151300 - DNA, 1045 bp, Zea Mays
agcccaataagcgattaccctggtggaggacggaacgaaggcaagggaagtccagcgacgacgaacacgatgccgccccaccgtgccggaggggccgcaggcggcggtgacacgagcgcgttcttcgcggcgacgctagtgctctgggctgtgtctgtggggttcgagatcggcgtccgggggcgacgcgagctggcgcccgtggccgccggcttcgccttcttccaggccgccaacgccgcggtccgcggctcggtctcacgcgacccgctcttcgtcaacaccgccgtatcgctcctccactcctccctcacatccgtctccgctgcactccatatttttgcatgtaaggaaagtgaggcgaatggttggatttcgagatttcgacagaacaatggtgaagctggaatggttactcaactggactacctttgtgacagcaagggtgatatgtcatatcttgataacttacaagctcgtcgctgatgctcacaaatttgggaagggcattgagcttccactagctcttcttggtatggcaggaatgaatctgctcaacatatttctagggcttgatctacttaaagcattcacacgagaaagaaaccagcagagccatcaggattgaatgtgcttttcttgatggtggtgtactcaaaattttgagaaggctgtagttccgttcaagtagggcagagagatatgtttaagtcttaattagcaactacactggaggcaatttttgtatgcattctttatgtataccaaaatgtactaatgctaagatctctaccagaaagggttgttgctagtattttcatccatgtaggtataatattcattagcagaatgcaggcgggtacctggatgcaggatttacatacatattgcaattagaaagaagtgtgtcaaaacctttggtctcaactccctaacctcatgtaaagtaaacccgaaagcaaaaccttgtggattggccctgtgaggctacaatgctcttatttatctttttaatagttgataatttcttgctgcaaagcaaata

SEQ ID NO: 151301 - DNA, 1323 bp, Zea Mays
agcccaataagcgattaccctggtggaggacggaacgaaggcaagggaagtccagcgacgacgaacacgatgccgccccaccgtgccggaggggccgcaggcggcggtgacacgagcgcgttcttcgcggcgacgctagtgctctgggctgtgtctgtggggttcgagatcggcgtccgggggcgacgcgagctggcgcccgtggccgccggcttcgccttcttccaggccgccaacgccgcggtccgcggctcggtctcacgcgacccgctcttcgtcaacaccgccgtatcgctcctccactcctccctcacatccgtctccgttatctttgttcttgtcaatcaatggcgtaataagggccttgagaacatgtttgagcatgaagaactatttggtggcagttggattggagcatattctgctttgtgcttttcttgtggctactttgcatatgaccaactggacatgctccgttaccggctgtacaatggatggattcctggaattctcatgcatcacttgatcctactcatttgctttacactagctctgtataggaatgtcacaatcaactacctaattctctcccttgtatgcgagctgcactccatatttttgcatgtaaggaaagtgaggcgaatggttggatttcgagatttcgacagaacaatggtgaagctggaatggttactcaactggactacctttgtgacagcaagggtgatatgtcatatcttgataacttacaagctcgtcgctgatgctcacaaatttgggaagggcattgagcttccactagctcttcttggtatggcaggaatgaatctgctcaacatatttctagggcttgatctacttaaagcattcacacgagaaagaaaccagcagagccatcaggattgaatgtgcttttcttgatggtggtgtactcaaaattttgagaaggctgtagttccgttcaagtagggcagagagatatgtttaagtcttaattagcaactacactggaggcaatttttgtatgcattctttatgtataccaaaatgtactaatgctaagatctctaccagaaagggttgttgctagtattttcatccatgtaggtataatattcattagcagaatgcaggcgggtacctggatgcaggatttacatacatattgcaattagaaagaagtgtgtcaaaacctttggtctcaactccctaacctcatgtaaagtaaacccgaaagcaaaaccttgtggattggccctgtgaggctacaatgctcttatttatctttttaatagttgataatttcttgctgcaaagcaaata

SEQ ID NO: 151302 - DNA, 1303 bp, Zea Mays
ccccgccatgcgcgcagccgcccccgcctccttctcctccttctccgccatgcgcgcagccgcccccttccccgccacgtggctgcagcgggacgcgatcgagcgcgccatcagggcgccgctgggcaccgtgctccgcgaccacgcgctcgtgcacctcccgccggccgccgccgcgcgcctccgcctcgtgcacccgtcgtgggcgcgggcgctcgcgtcgccgctcttcactgtcgcgcacgctgccaccccgtgtagggcctcgggcttcttctctgcgtccgcgagcttcctcccgctcgacgccgccgacatcgtgtcgtccccggcgctggccttcctcccagcctcgtcgccgcccgccgtgctgtcgtcctcgcacggcctcgcatgctgcttctccccggccgacgacgcctacttcgtgtgcaacccggcgacgggggcctggcatggcgtcccgtgcccgccgtgccagatcacctggccgcgccccgcggtcgtcgtgctcttcgacgccggcgtctacaccttccacggcgactacacgctcgtctgcgccttcgagtcggcgccggggtccggcatctatgaaagcacagcctattccacatatatgattttcgttttaagctacctatatgactgtattcagggaggaagaagatcatgacgatgagacagagaccgtccgagaaagttctaccaatgttaagcctgatgttgaagaatcggaaatgcttcttgaagcctacttcgtgcagattgacggcacgctgaacaagctcttcaatttccaagaatacgtggacgacaccgaggattatatcaacataatgctggacgagaagcagaatcagctactgcaaatggggcgtcctgctaacgacggcgaccgtggtggtcactgccggcatcgttgtcgtgagcttgttcggcatgaacatccggagacggatgaggaggcgaggatcaggaatttaaacttttgggaaaccaccttcggcacagtgtttgggtgtcttgcgatgtatctcctggcaatctatgcggggaagagaagccaaatactgcattgatgtcactgatgtctgacggtcgcccttctaagttcagagaacattggagaaagaggaagtgtcacaatgcgaactcggcagcacgagtcctctgttttggacggaccggcaagccgtgtatacgacggaataattgagatgattatgccctcgctattcttagcagtagatttagcacgtttgattctttttttgcgtgtgtataaactgcaccttttttt

SEQ ID NO: 151303 - DNA, 1413 bp, Zea Mays
cgctaggaggctagcgctagcgcaactcagacgctgcaggcaggtcggcactcggtgcgcacccgcaattcgcaaacccgcacaacctccccaccccccaaacccatccctcccgcgagatctctcaccggagtcaccgccccccagatccgcctcccctcgccggcgcgctcgcgtgttttccgctcgtccgccgccatgtcgcacaaccacggcgacacgatcccgctccacccctcgtcggcgcagtccgacatggacgagatcgagagcctcatccacgccgcgccatctccggccaccgttctccccgcgcggccaccgtctccgacgcgggcctccattcccgtatcctcctctccggcgttggcgccggcgcccgtccccacgaagccgcctctccccgccgcctccattccgatctccgtctctgtctcccccgttctaacgtccgtctccgttcccatcggcgctgacgggtttggacctccacccaacacgctcacagagccggtatgggacaccgtaaagcgagacttagcacgcatcgtcagcaatctcaagctcgtcgtcttccccaatccctaccgcgaggaccccggcaaggcgctcagggactgggacctgtggggtcccttcttcttcatcgtcttccttggcctcacgctctcctggtcagcttccgttaagaagtctgaagtatttgctgttgcatttgctgtcctggcagctggggctataattctgaccttgaatgttctgcttctgggtggacacatcatcttcttccaaagccttagtcttcttggttattgcctgtttccactggacgttggtgctctactttgcatgctgaaggacaacgtgatacttaagattgtcgtggtgacaatcacattggcatggagctcctgggctgcctatccattcatgagtgctgctgttaacccaaggagaaaagctctggccctatatcctgtcttcctcatgtatatctcagttggtttcctcataattgccattgattaacgggggggcaagcttcctagtaacatctgaatagttgtgactttcctcgtggatggttgaaccaccagaaaacatacaagtttgagtagacaatgcttctaccctgtagtctgaatcgtctcgtggggatttcggtctttacatgatccggaggcttaaggttgtaaaattagttgaaaatctatacctgttgtaaagggctgaacttttgaccactgaattgactgccaagcttcttatactgtgtgagagaaaatactgtgttaaatgaggtgttgagaggtgcatcgtgtgttaaagggctgaacttttgaccactaagtgctagtttgggaacctcaattttttaagggatttctatttttccataagaaaataaactaa

SEQ ID NO: 151304 - DNA, 1039 bp, Zea Mays
gcgttctttcacaagtggtcgtgtaggcgtgctgggctgtcaactgggcccactggcaggctaatcttccccttgtgaatcgtcttgtactgttctcgtgctaggcagtgggctgcgaccgaatccaacataagaggaaaggggcgtttgctttatattcgttctaacctgcgatctccgtccatccagccgagaggtcgtgtgcgcgtggatctctgcgtggaagcgatgaagattacggcgctcctggtgctgaagccgtcgacctctggagccgggagctcctcgtccggcggcgagtcgggcccggaggcggtggtgctcgcgaacgcgatagacgtcagccacttcggctacttccagcgcagcgccgcccgcgagttcatcgtcttcgttgcccgcaccgtcgctcagcgcacccagccaggccagcggcagtccgtccagcacgaagaatacaaggtccactcccacaatagaaatgggctttgtgcggttgcattcatggatgatcattatccggtacggagtgcattttctcttctgaatcaggttcttgatgagtaccagaaggcttatggggactcctggaaatctgtgactgcagatgaaactcaacagtgggctttcctgacagacgccttgacaaaatttcaggatcctgcggaagctgacaaattaatgaaaattcagagggacttggatgaaacaaaaattatcctacataaaactattgagagtgtccttgccagaggagagagattggatagcttggttgagaaaagctctgatctgagtgctgcttctcagatgttctacaagcaggcaaagaagacaaaccaatgctgcacaatactgtaaattttggctcttcactcatggttgcaagaaacaaaaacggtcgatatcgtgctaatttatttactgtaagttaagtcgccagtgaagcgtggacacgtggttgcaaggcccgagctcagtaaaggctatactgttcttcaagacctgccagaattggactgttttcttgtgagaattc

SEQ ID NO: 151305 - DNA, 1222 bp, Zea Mays
atggcccgcacgaagcagacggcgaggaagtccaccggcggcaaggcgccgaggaagcagctggcgactaaggcggcccgcaagtctgcccctgcgaccggcggagtgaagaagccccaccgcttccgccccggcaccgtcgcgctccgggagatccgcaagtaccagaagagcacggagctgctgatccgcaagctgccgttccagcgcctggtgcgggagatcgcgcaggacttcaagaccgacctacgcttccagagctctgctgtctccgcgctgcaggaggcggctgaggcctaccttgtcgggctcttcgaggacaccaacctctgcgccatccacgccaagcgcgtcaccatcatgcccaaggacatccagcttgcccgccgcatccgcgggtccatccagccgagaggtcgtgtgcgcgtggatctctgcgtggaagcgatgaagattacggcgctcctggtgctgaagccgtcgacctctggagccgggagctcctcgtccggcggcgagtcgggcccggaggcggtggtgctcgcgaacgcgatagacgtcagccacttcggctacttccagcgcagcgccgcccgcgagttcatcgtcttcgttgcccgcaccgtcgctcagcgcacccagccaggccagcggcagtccgtccagcacgaagaatacaaggtccactcccacaatagaaatgggctttgtgcggttgcattcatggatgatcattatccggtacggagtgcattttctcttctgaatcaggttcttgatgagtaccagaaggcttatggggactcctggaaatctgtgactgcagatgaaactcaacagtgggctttcctgacagacgccttgacaaaatttcaggatcctgcggaagctgacaaattaatgaaaattcagagggacttggatgaaacaaaaattatcctacataaaactattgagagtgtccttgccagaggagagagattggatagcttggttgagaaaagctctgatctgagtgctgcttctcagatgttctacaagcaggcaaagaagacaaaccaatgctgcacaatactgtaaattttggctcttcactcatggttgcaagaaacaaaaacggtcgatatcgtgctaatttatttactgtaagttaagtcgccagtgaagcgtggacacgtggttgcaaggcccgagctcagtaaaggctatactgttcttcaag

SEQ ID NO: 151306 - DNA, 1646 bp, Zea Mays
cataagatattgccatctccacgtgacacacaggccccccgtggatgtctctagagcgggacccttcccttcgtattccagccaagcagaacgcaggaatctccttcccacggatcactctgccacgatccgcgtgctcacccgcaaaactaatccacaccgtccgtcctcctccaatccaacgcacgaaacctcatttccctcacgaagtccccgctgctgttccaaaatttcactctctctcccgcccaccacccgtcccttatttaatcaccccgcctccgcactcaatctcacaccgcaatcttcaatctccccagcaatccctagcagaagccttccatcctcactcgctcgatggcccgcacgaagcagacggcgaggaagtccaccggcggcaaggcgccgaggaagcagctggcgactaaggcggcccgcaagtctgcccctgcgaccggcggagtgaagaagccccaccgcttccgccccggcaccgtcgcgctccgggagatccgcaagtaccagaagagcacggagctgctgatccgcaagctgccgttccagcgcctggtgcgggagatcgcgcaggacttcaagaccgacctacgcttccagagctctgctgtctccgcgctgcaggaggcggctgaggcctaccttgtcgggctcttcgaggacaccaacctctgcgccatccacgccaagcgcgtcaccatcatgcccaaggacatccagcttgcccgccgcatccgcggggagagggcctaagcgtcatattttctgtcatcagtgcccgatcagaagatgtagagatatgctgggttctgtagtttgggttactgtcgaatcatcgagtgttggctgttcactgctgtaacttaattatcatgatgcatatgaaatggcaatgaactctgttatcagttctcgaattttccgtttggatcccttcttgttcctctgtgcataatcattttatatttgtggggataacgggatgaatggtgagaaggatgaatcagcgttcaggccgagcgttctttcacaagtggtcgtgtaggcgtgctgggctgtcaactgggcccactggcaggctaatcttccccttgtgaatcgtcttgtactgttctcgtgctaggcagtgggctgcgaccgaatccaacataagaggaaaggggcgtttgctttatattcgttctaacctgcgatctccgtccatccagccgagaggtcgtgtgcgcgtggatctctgcgtggaagcgatgaagattacggcgctcctggtgctgaagccgtcgacctctggagccgggagctcctcgtccggcggcgagtcgggcccggaggcggtggtgctcgcgaacgcgatagacgtcagccacttcggctacttccagcgcagcgccgcccgcgagttcatcgtcttcgttgcccgcaccgtcgctcagcgcacccagccaggccagcggcagtccgtccagcacgaaggtaacctcagatctgatcggtttttggatctctataagatctggggtccgtactaaattgtccacgcgtgtggggaaaataatgctgtctgttggttcatctaatgtatgcaactgatcttactattgccgaagttgtttttggtcatctgaagagaa

SEQ ID NO: 151307 - DNA, 2156 bp, Zea Mays
ggaggcggagtagttcgcacctgctacagctgctagcgacggctgtggcccacaagcccatggaccacggctgccgcccgtgccccacccgccctgtcatccgacgaggacgcgtgccggattcggcaccgaaagcttcggtccggcagccgccctccgccaaatccgcccgctggagccctccgacagatttttatcatcgggcgcccacgcgtctccattgacccgggcaggggcgaggtcaagagggcgaaccgttggccgggtcgcccccgctatcatgccgtgctgtgacacggcggcaggcggcttcccaacgacgctgcgtgcgcacccgcgggccgcagccgccccaggcgcctgcataccagtccaaccaggcggcctcgtataaagaggttccccacttgggctgccgctctcccatttgtctcgcgcttcgctctcacgctcgcgtcaccggagctctccagaaccgaaccccaactgcccaagggcgagcgatccgaacccctcggcggcttcgtcaacgacgccgagaacactttgaggaatggctgaagaggatgtccagccccttgtgtgtgacaatggcactggaatggtcaaggcgggtttcgctggtgacgacgcaccgagagctgtctttcctagcattgtaggcaggccacgccacactggtgtgatggtgggcatgggccaaaaggatgcatatgtgggcgatgaagctcagtccaaaagaggtattctgacactgaagtacccaattgagcacggcattgtcggcaactgggatgacatggagaagatctggcaccacaccttctacaatgagcttcgtgtggcacctgaggagcaccctatactgctgaccgaggctcctctgaaccccaaggcaaacaggggagaagatgacccagattatgttcgagacattcaactgcccagcaatgtatgtggccatccaggccgtttctttccctgtacgccagtggtcgaacaacgggtattgtgctcgactctggtgatggtgtgagccacaccgtccctatctacgaagggtacacgcttcctcatgctattcttcgattggaccttgctggtcgtgaccttaccgacaacctgatgaagatccttactgagaggggttactccttcactacgactgccgagcgagaaattgtcagggacatcaaggaaaaacttgcctacgttgcccttgattatgaacaggagctggagactgccaggaccagctctagtgttgagaagagctacgagctgcccgatggccaggttatcacaatcggtgcagaaaggtttaggtgccctgaggttctattccagccatccttcattggcatggaatctgctggcatccatgaagccacgtacaactccatcatgaagtgcgacgtcgatatcagaaaggatctgtacggtaatgttgtcctcagtggtggctccactatgttccctggtattggtgaccgcatgagcaaggagattactgcacttgcccccagcagcatgaaggtgaaggtggttgctccgccggagaggaagtacagtgtttggattggtggttccattctggcctccctcagtacctttcagcagatgtggatctccaaggaagagtatgacgaatctggtccgggcatagtccacatgaaatgcttctgaatttctggagcagtatatctgttgcttgcattttcagttagttgggatgcaagtttgtcccgtggtctcgctagcattcttcgttctttctggatattgaagagctgttggccatggagcattgtgcaaggtggtaaagtcgattgatggtactacatgaagaaacatgtgcagtacttcagcagtatagatcgtcagggtgtcggctgtcgcccgtgcagtttgcgtctttgtgagatctgggtccgtttctgcactccagtacgtggaacaggtttcgcatttggtggccagtgccccagcgtggcgtgagtgttgatgatttgaacttggagctgtttgttctattcctttcatgaaacagatattatcgtttgtacagggataaataataaattgtttatccttcaaatgttttagatactgttggaacaaacttcgtttaattataatctcttggatttaattcg

SEQ ID NO: 151308 - DNA, 2099 bp, Zea Mays
ggtccggcagccgccctccgccaaatccgcccgctggagccctccgacagatttttatcatcgggcgcccacgcgtctccattgacccgggcaggggcgaggtcaagagggcgaaccgttggccgggtcgcccccgctatcatgccgtgctgtgacacggcggcaggcggcttcccaacgacgctgcgtgcgcacccgcgggccgcagccgccccaggcgcctgcataccagtccaaccaggcggcctcgtataaagaggttccccacttgggctgccgctctcccatttgtctcgcgcttcgctctcacgctcgcgtcaccggagctctccagaaccgaaccccaactgcccaagggcgagcgatccgaacccctcggcggcttcgtcaacgacgccgagaacactttgaggaatggctgaagaggatgtccagccccttgtgtgtgacaatggcactggaatggtcaaggcgggtttcgctggtgacgacgcaccgagagctgtctttcctagcattgtaggcaggccacgccacactggtgtgatggtgggcatgggccaaaaggatgcatatgtgggcgatgaagctcagtccaaaagaggtattctgacactgaagtacccaattgagcacggcattgtcggcaactgggatgacatggagaagatctggcaccacaccttctacaatgagcttcgtgtggcacctgaggagcaccctatactgctgaccgaggctcctctgaaccccaaggcaaacaggggagaagatgacccagattatgttcgagacattcaactgcccagcaatgtatgtggccatccaggccgtttctttccctgtacgccagtggtcgaacaacgggtattgtgctcgactctggtgatggtgtgagccacaccgtccctatctacgaagggtacacgcttcctcatgctattcttcgattggaccttgctggtcgtgaccttaccgacaacctgatgaagatccttactgagaggggttactccttcactacgactgccgagcgagaaattgtcagggacatcaaggaaaaacttgcctacgttgcccttgattatgaacaggagctggagactgccaggaccagctctagtgttgagaagagctacgagctgcccgatggccaggttatcacaatcggtgcagaaaggtttaggtgccctgaggttctattccagccatccttcattggcatggaatctgctggcatccatgaagccacgtacaactccatcatgaagtgcgacgtcgatatcagaaaggatctgtacggtaatgttgtcctcagtggtggctccactatgttccctggtattggtgaccgcatgagcaaggagattactgcacttgcccccagcagcatgaaggtgaaggtggttgctccgccggagaggaagtacagtgtttggattggtggttccattctggcctccctcagtacctttcagcagatgtggatctccaaggaagagtatgacgaatctggtccgggcatagtccacatgaaatgcttctgaatttctggagcagtatatctgttgcttgcattttcagttagttgggatgcaagtttgtcccgtggtctcgctagcattcttcgttctttctggatattgaagagctgttggccatggagcattgtgcaaggtggtaaagtcgattgatggtactacatgaagaaacatgtgcagtacttcagcagtatagatcgtcaggtcagtttagtttttttttcaacaacagtgccatattaggatgttcctgatgtgcgcagttggtctgggtttttacacaacgcaagggtgtcggctgtcgcccgtgcagtttgcgtctttgtgagatctgggtccgtttctgcactccagtacgtggaacaggtttcgcatttggtggccagtgccccagcgtggcgtgagtgttgatgatttgaacttggagctgtttgttctattcctttcatgaaacagatattatcgtttgtacagggataaataataaattgtttatccttcaaatgttttagatactgttggaacaaacttcgtttaattataatctcttggatttaa

SEQ ID NO: 151309 - DNA, 1085 bp, Zea Mays
gcgggtttcgctggtgacgacgcaccgagagctgtctttcctagcattgtaggcaggccacgccacactggtgtgatggtgggcatgggccaaaaggatgcatatgtgggcgatgaagctcagtccaaaagaggtattctgacactgaagtacccaattgagcacggcattgtcggcaactgggatgacatggagaagatctggcaccacaccttctacaatgagcttcgtgtggcacctgaggagcaccctatactgctgaccgaggctcctctgaaccccaaggcaaacaggggagaagatgacccagattatgttcgagacattcaactgcccagcaatgtatgtggccatccaggccgtttctttccctgtacgccagtggtcgaacaacgggtattgtgctcgactctggtgatggtgtgagccacaccgtccctatctacgaagggtacacgcttcctcatgctattcttcgattggaccttgctggtcgtgaccttaccgacaacctgatgaagatccttactgagaggggttactccttcactacgactgccgagcgagaaattgtcagggacatcaaggaaaaacttgcctacgttgcccttgattatgaacaggagctggagactgccaggaccagctctagtgttgagaagagctacgagctgcccgatggccaggttatcacaatcggtgcagaaaggtttaggtgccctgaggttctattccagccatccttcattggcatggaatctgctggcatccatgaagccacgtacaactccatcatgaagtgcgacgtcgatatcagaaaggatctgtacggtaatgttgtcctcagtggtggctccactatgttccctggtattggtgaccgcatgagcaaggagattactgcacttgcccccagcagcatgaaggtgaaggtggttgctccgccggagaggaagtacagtgtttggattggtggttccattctggcctccctcagtacctttcagcagatgtggatctccaaggaagagtatgacgaatctggtccgggcatagtccacatgaaatgcttctgaatttctgga

SEQ ID NO: 151310 - DNA, 1104 bp, Zea Mays
cgctcgtccttcccaataatacaccaccagtacgtacgtacgtccaccaccgcgttatacagctcgacaagatgagcgtcatcgaacagttgcacgcaaggaggctcctatcgcacgccgccgctgctgcgactgctccgtcgtcggctgcggagccggagccggcggccgtggccatgccgcaggcgcaggcggtgtctgcagcgcactcgcacgcagccgcagcgcccttcagctcgctgaacgcgacggtgatcacggcgctctcgctgctcctgtgcggcctggtggccgtgctcgcggtccacgccatcgtacgctgcgcattccgcgtcacgcaccgcgtgtgctacggccaggacgaggacgaggacgaacccgccgccgatgcgtcggcggcctcctgccaggccggtcccgccaggaggaagcgcgggccgcgggccgggctgcccccgtggatactctactcccgcgaggtcgagctcgccgggtgcggcgccggcgcggcggaatgcgccatctgcctcgcggagttcgtgcagggtgaccgcgtgcgcgcgctgccgcgctgcaaccacggcttccacgtgcggtgcatcgaccgctggctcgccgcgcggcagacgtgccccacgtgcaggcgggcgccgttcgccgctaaaccctcgctgacggagccggacagcgcgggggcgccggaggcagtgcagcttcaggtgcacgcctgaagccggggccgggcagcacgagaccctcaccaagtagcgtgaagccagatttcccaactgtgtagtcatagtcatagtgcatgtgagcagtggccagtgagtgcttttttcttcttctcgacgttctctcttctgtgatactggcgatactacggccttgatcggttttttttttacaaggctgtacaagtggcctgttgcgatggtatgagatagagtataattaacttcgattgcaaatatatatatgatggaatcctggaataagtagcgtctatatgtgtctacactgtatagttcaaaaaaagtagtactagcataagtattacacataaatactactaggtacgtgcccgtgcgttgccacgatagt

SEQ ID NO: 151311 - DNA, 86 bp, Zea Mays
ggacgcagatgtagagctagcctgcctgaacgaacaaccaaccacgactgatcatgatgggcctattgtgcattccaattggttgc

SEQ ID NO: 151312 - DNA, 1328 bp, Zea Mays
ggagaaaaccagcggcacacggcgccgccgacccatcatccgtccacagccgcaacgaacgagagacagccagccagcaacgccgcgcacgcaaacgcaacgcagcgaccgtgtcgatcgaccagcggagcggaggtttgtttgagtcgacgggcatggacttccaccacagcagcagcagcagcgtccacgcgcacgcggcagcggcgcggccgtggatcaaggcggaggacttcaaccccagcagcagcgtccacgcggcggggccaccggcggtaccggctgcggcgcggccgtggaacagggcggaggacaaggtgttcgagagcgcgctggttgcgtggcccgagcacacgcccgaccgctgggcgctcgtcgcggcgcagctccccgggcgcacgccgcgggacgcctgggagcactacgaggcgctcgtcgccgacgtcgacctcatcgagcgcggcgcggtcgacgcgcccagctgctgggacgacgacgacggcgaccaccaagtccgcggcgccggcgctgaccgggcgcgccgcgaggcccggcgccccgggataccctggagcgaggaggagcacaggctgtttcttcaaggtctggagaagtacgggcgcggggactggcgtaacatctcgcgcttctcggtgcggacgcggacgccgacgcaggtggccagccacgcgcagaagtacttcaaccggcagttcaaccccgccagccggaactccaagcgcaagagcatccacgacatcaccaccccttgaccctgcccgccgacggcgaaacaagcagtagccagccaagtagggagctttgctgtggacgatctgagaaacagaggcagggagttccagtcagcagctagcacatggtctaggctcactcgtactagtcattaaaatagagttaggattgttgaaacatctaatggagtctgacgtggcaccgtcgtgtcgagtctaggcggatgcagatcgtcaatggagtgagtcactgttaggatggatggtgcctttatagttttgtatgtatgccggcgtggcggtgtcgaagctgcagtggatagacttgcacagttgttgtctccgggcgttccttccaaagcaaacaggcagatgcatactccgatccacgcaggtggccaactcccatgtgtcactatcgctcgggaggggctccagctccagggcttgagcggcacgtggttggctgtttcaggacacttgtcgatgcccaactcccatgcttctgttttgtcttgagcccaccgccatgcactgaatctagtacatcacaagtaccaaaagtttattcgtcat

SEQ ID NO: 151313 - DNA, 1457 bp, Zea Mays
ttcagccttcaggcccatcagcttatccattctctccctcacgagtcacgaatgaatagtacacggcgctccctccctcctcgagagcgtgtatgcgcagctgcagctccgcaaggcagatgttgctgactcgtctgtccagcgtttcttgctcgtcaacagcgcagcagttgcatgcgggcgtcggcaagttcgccgccgccgcatgctggagctggaagaagaagcgcgaggagctcccctgcttcagggccagactggccggcaagccgccgcgcgcctcaccggcgaagggcggcattgtcccggccagcgacgatgacgacggcgttagcctcggcaccgtgaagctgccgggcaacatcgacaccgctcggttggagtccttgctcttccagtgggggaacagcctctgccaaggcgccaacctgccacttccggtgcctctcaaggtggacaaggttgagggcgggatcaggctagggttcgtcgcggtcgaggacggcgcgacgcggacgctggtgtacatcgattgcctggtctctccggccccggatggctctggtccggtgttccgagcgatcaggaacggtcctatgaaggacaaggagccacctggggagcccaggatcatgagaagcctccttcaggctctcgaaaagtctattcagatcgctcgtgtttgaccgtgtaaacgccacacgatcaagcgctgcatctctgtaactattaattaagagccctctaaaccctgctattctagttgtctcttgagtcttgaccattccagggaaaaaaataaaccaagaaagttacaggaaccagcaccgtggtacagcatttcttcattattgattaccattattacgcgattccagcagttgtgtcaattgatctaagaagagatgatggttacaggctcaaacagcaagaaattatgtcaactgaatctaacagctggtacatttccaacccgcagttcaagtatacaggaatccgtgtcaaaacaggctggaaaaaaaaaacagcctaaacctcaccagctaccaaccccttcccaaacatcatgaggaaacacggatcacactttatgatgtggaacaagcttcgagctttgggaggacgctgcgccatgcatccgcaatgtccttagctagcttagcctgacccttggcaaattcatggaatgcgagtccaatgtcagctgttttctgctcctggaaacgagagagctcttcgttcattagtcttactatgtgttcaaacttcttcgtagcctcctcactgtctgctttcaactgtaagaacagcaacacatcagcgaacaaaaacttctgtaaacctcgtccacaaggctatgtaaagaattcctcaatggaaagttacagcaacttgcccctctaaactcagattctgcttcggcatacttctcagggttcatgaacttcaatttttca

SEQ ID NO: 151314 - DNA, 611 bp, Zea Mays
gcaggatcgcaccaaagagcacttcaaagaagaagagagcgaccttctcccacggctagaacaagtaagacggatgcagcgggaggaggggaaggtttctggcaggtccagttctgcatgggcttcggaggcagtatctacaatggagatgacacactcgaagctcttccccttcttcatgactggtctccttcctcaggaggccatgcaatacttagacctagtgtgccgatgcacgaagaacacgcgccatctggtctccatgctcagatcccttgccgagcgcctggaagacgcgaacccgtcaattatacacaacaaccctaccaaactgtatgagcacctactcgtaaagtccccataaacctcgagtcccctatgtgcagcgacgcggcatgtgctaaaccgtgaattctaaccttttctttttcttgtgtgtagtgtagctaatgtatttggggggttttggacgattgtgaaagcgtggcgtgtatagctgattgtgttatccaagcgtgagtaactacacggaaaaaaaggaagtgattgaaatgggcattattgtttctgacctactttactctatttccggatgttctctgctgactgct

SEQ ID NO: 151315 - DNA, 1125 bp, Zea Mays
atggcccgtgctggtgctggcgagcagacggtattggatagggatggcaacgggttaaaaacccgcgggtacaaagattacaaactcatacccgcgagattaatgttaaacccgcacccgcgacaggtagcatatgttacccaaactcgctacccgcgggttgatggcacccgcggtccgtccggcccggtcccacccatccctccgccaacctcgcccgcaccccgacgcctctctcaccacctccgcctctcacattcccacggaagctcccccgcggccccgcgctcccactcgtccgtcgcgccgcacgccgcgcctccccagtcccacccactcccaaactcttctacccacgcactcccactcacttcgtatgggcaactgctccccgtctccgcggcgccgccgcccgacggagccaggctcgccgccgctcggcagcaccgtgtccggcccatcgtgacggtcaactccatctctgtctccccctacccgctcgccagatccccctccgtctccaccgctgcggtggacgccgaggacggcggcgtcgtgcgcgtttacggttccgacgggtgccccgtcgcgtggcgcctccgcgtctcgctcctctacaaggcggcggcgcccctccacttcacgccctcagaggcggctccactcggccgcccggtgctccgcctctccgccgccgacccggaggtatgcggcacccccgacgaactgctgcgccaggtggacgctcggttcgagggcaagccgcgcgtcgcgccgccggagaggccccgcacggggtcgccgtcggcggcggccgcagccgcggctgaggtcgccgagctggtgcggctgcagcaccgcagcgcggagaggcacctcgagggcgtggcggcgaaggtggtggagatggtcaagaaggggaagaagtccgggaaggggaggagcgttgtagagggtgctgaggtcaggagtctcggcaagtggtacggggacgcaatggaggtgatgctggagcacgcaaggatggaggagacccttatcttccctgacatacagagggcatcgtttccaggtcgacttgggtttgatcttatttatttgtgccgcattgcattatgctcttga

SEQ ID NO: 151316 - DNA, 1418 bp, Zea Mays
accggtcggtcccgagcgacacaacagacagaggaggaaggagaaggatatgggaggcgaggcgggaatggggctccgcgtccgcgcctcctccctcctgctgtcactggtcctcgagctcgccgtcgcgctcgtctcagtgtcggcgcagcacaagttcgggatcaactacgggcagatcgcgaacgacctcccggacccggcgcaggtggcgacgctcctgcagtcgatgggcgtgaacaaggtgaagctgtacgacgcggacccccgggtgctgacggcgttcgccaacacgggcgtcggcttcaccatcgccgtgggcaacgaggacctgcaggcgatggcggccagcccggacgcggcgcgccgttgggtggcggcgaacgtgcagccctacgtcccggccacgcgcatcacctgcgtcaccgtcggcaacgaggtcctgtcgggcaacgacacggcggcgatggccagcctgctcccggccatgagggccgtgcacgccgcgctcggcgacgcgggcctcggccagccggtcgccgtctcgtcggcgcactccgtggacgtgctcgccaccagcttcccgccgtcgtcgggcgcgttccgggaggacctggcggggtacgtgcgccccatcctcgacttccacgcgcagacggggtcgccgttcctcgtcaacgcgtaccccttcttctcgtacaaggcgagcccggggccggggccggggggcgtgtcgctgccgtacgcgctgttccagcccaacccgggcgtgcgcgacccgggcaccggcctcacctacgacaacatgctgtacgcgcagatcgacgccgtgtacgccgccatgcaggccgcgggggggcgcgcggacgtgggcgtcacggtctcggagaccgggtggccgtccaggggcgacgacgacgagcccggcgccacggcgcagaacgccgcggcgtacaacggcaacctcatgcggagggtcgccgcgggccagggcacgccgctcaggcccgccgtgcccgtcgacgtgtacgtgttcgcgctcttcaacgaggacttgaagcccgggcccacgtcggagcggaactacggcctgctctaccccgacggctcgccggtgtacgcgctcgacgccggcggtccgggcccgggcggctcgctcaacccgtactacacgtccatgttctcctcctcctcctcgtccggatcggcggtgggcgtaacctttttgacggagaaagtggtactatcactgctgctgcaagcaattgtaatactccgacgatcacattcgtactgttagactgttagtcagtgccatatactcttgtaatcttgtatacgaaaaatatgcatttcaattcaaccatagggtaggcctagattcgggaattttgcacgacggcggtgtggctgctccg

SEQ ID NO: 151317 - DNA, 1982 bp, Zea Mays
accggtcggtcccgagcgacacaacagacagaggaggaaggagaaggatatgggaggcgaggcgggaatggggctccgcgtccgcgcctcctccctcctgctgtcactggtcctcgagctcgccgtcgcgctcgtctcaggtaactccagtcgcagtcgccggctcggtcggtccctgctcgcttgtatgttgtatcactgtggattctccctctctctccttgctcgtgctctgctttctgccgtcattgctctctttgctgcgaatcggtgccgcgtccgcctgtcccagtgagacgacctcagttgctatgtcagttcttccgagttctggcacgacgttgcgtcccggtttcattctccgtatggacagcactgcaagaagccgcgaacgaagaacatggaggcgtgattgattcagctcggttgctaactcagctctgacacgcatccgtccatggccattacatgattttacatctctatctagctagctgtttcaatcatagcattttgcctctcccacagatgaatgatcattccgtctgcttccctatacattattattgagtgtagctatatacgaaagcgactttgcacctaaaacactttatgatcgctgtctgagaaaaaaaaagggaattcaatcccctcgaactaaaatatatacagaacagcatcaactcttcgagtgcgccagtaacgtattgccccgcgtgtgcgttaatctggcagtgtcggcgcagcacaagttcgggatcaactacgggcagatcgcgaacgacctcccggacccggcgcaggtggcgacgctcctgcagtcgatgggcgtgaacaaggtgaagctgtacgacgcggacccccgggtgctgacggcgttcgccaacacgggcgtcggcttcaccatcgccgtgggcaacgaggacctgcaggcgatggcggccagcccggacgcggcgcgccgttgggtggcggcgaacgtgcagccctacgtcccggccacgcgcatcacctgcgtcaccgtcggcaacgaggtcctgtcgggcaacgacacggcggcgatggccagcctgctcccggccatgagggccgtgcacgccgcgctcggcgacgcgggcctcggccagccggtcgccgtctcgtcggcgcactccgtggacgtgctcgccaccagcttcccgccgtcgtcgggcgcgttccgggaggacctggcggggtacgtgcgccccatcctcgacttccacgcgcagacggggtcgccgttcctcgtcaacgcgtaccccttcttctcgtacaaggcgagcccggggccggggccggggggcgtgtcgctgccgtacgcgctgttccagcccaacccgggcgtgcgcgacccgggcaccggcctcacctacgacaacatgctgtacgcgcagatcgacgccgtgtacgccgccatgcaggccgcgggggggcgcgcggacgtgggcgtcacggtctcggagaccgggtggccgtccaggggcgacgacgacgagcccggcgccacggcgcagaacgccgcggcgtacaacggcaacctcatgcggagggtcgccgcgggccagggcacgccgctcaggcccgccgtgcccgtcgacgtgtacgtgttcgcgctcttcaacgaggacttgaagcccgggcccacgtcggagcggaactacggcctgctctaccccgacggctcgccggtgtacgcgctcgacgccggcggtccgggcccgggcggctcgctcaacccgtactacacgtccatgttctcctcctcctcctcgtccggatcggcggtgggcgtaacctttttgacggagaaagtggtactatcactgctgctgcaagcaattgtaatactccgacgatcacattcgtactgttagactgttagtcagtgccatatactcttgtaatcttgtatacgaaaaatatgcatttcaattcaaccatagggtaggcctagattcggg

SEQ ID NO: 151318 - DNA, 1014 bp, Zea Mays
gtctgcgtctccattctccaccttcttcaaaggttcaactcagagaggagagaactagagaaagatccccacccccaggcgacgcgaccggcgagccccgaaaccctaggtcgcgcgacccgggcagcgcgcttctgcgtgactgcgtgtctttcggggaggggacagcgttaggacgcgacgaggttagcgaggccgtctggccgactataagcggaagaatctcctccgaagccttcctagagctgtgaagagcgcgtggatctcctggatttgcagactcgaggggagctgagacaagatggtgtgtttgttggagggtggccttcttcagttgaacacctgccaccaggtgaccccgcgatcatagattgcacgtgcgagctgccaaaaagctcgactatctctaacaatgcatatttgtgcattgctacctgggacacgagggctcctcagccatcacagattgagtctgccgtgcaatgggctgtgagaaagcggtcacagaacaagcctgtctatgtccactgtgcctatggtcatggcagaagtgtctgtgtgatgtgtgcgcttcttgtcgcattagggttcgctgaagattggaaagctgctgcacaaatgatccgtgagaagcgaccttctattagcatgaatactcttcaccgcaaaagcttggaggaatggtcaaaacatttgctctcctctaaaagaagtggggaatcagatgtgagttctgttatacattcggattataaccggaaataaaattgaaccagcaagggacaggcgtgttcagttgctgtgacattgaagatgcattacattcggtagtattgtttgctgctgtcctagtgaatgcctatggttcattttaaattatccttttgtggcatttgtgttgtaaaaactatatgtatcaaattatattagtactgtaggtttacccggctagttcttcaaggaagatgtactgtccttgtctccttttttctgataccagtgcccttgcctctc

SEQ ID NO: 151319 - DNA, 777 bp, Zea Mays
gtctgcgtctccattctccaccttcttcaaaggttcaactcagagaggagagaactagagaaagatccccacccccaggcgacgcgaccggcgagccccgaaaccctaggtcgcgcgacccgggcagcgcgcttctgcgtgactgcgtgtctttcggggaggggacagcgttaggacgcgacgaggttagcgaggccgtctggccgactataagcggaagaatctcctccgaagccttcctagagctgtgaagagcgcgtggatctcctggatttgcagactcgaggggagctgagacaaggtcatggcagaagtgtctgtgtgatgtgtgcgcttcttgtcgcattagggttcgctgaagattggaaagctgctgcacaaatgatccgtgagaagcgaccttctattagcatgaatactcttcaccgcaaaagcttggaggaatggtcaaaacatttgctctcctctaaaagaagtggggaatcagatgtgagttctgttatacattcggattataaccggaaataaaattgaaccagcaagggacaggcgtgttcagttgctgtgacattgaagatgcattacattcggtagtattgtttgctgctgtcctagtgaatgcctatggttcattttaaattatccttttgtggcatttgtgttgtaaaaactatatgtatcaaattatattagtactgtaggtttacccggctagttcttcaaggaagatgtactgtccttgtctccttttttctgataccagtgcccttgcctctc

SEQ ID NO: 151320 - DNA, 1886 bp, Zea Mays
acatcactactctactagctaattacctccgtttcggcgccgcatccagccccggcccacaacatatgcccgcgcgcgaccacgcggcaggtctcgctccccgtctaccaactcggtcgcttcgcttcagcggctcgtcgttgctatcacttcgtcgccgcgggtcgatagcaaagcttggcccgcttgcgcatcgcggctgccggacccggacgcacgcggccgcctggaggcgggcggctcccttccggcttccgcggcgcctgaggaggctataagcacgcgtcgcgttcaacaacgcatcagcagagagtgtcctaaaaggagccagtctcataggtcgactgagagatggcgtccgagatgagcaaaaacgtgaaggccctcgacgagcaggaggtcacctcgcagcactcacgcgcccagaccagcgacgctgccgaggagcagcagcagcaacagcaggcggtggacccgctggcgcggcagtcgtccattatgtcgctgacgctggaggagctgcagaactcgctgtgcgagccgggccgcaacttcggatccatgaacatggacgagttcatggccaacatatggaacgccgaggagttccaggccgccacagccggctgcaacaaggagggcgcggagcgtgagccggtgcccgtggcgacgacgacgggcacaggtgagaacggaggaggaggaggaagtgggaggggactggttcggcagggttcgttcgcgctgccgccgccgctgtcccggaagacggtggaggaggtctgggccgagatcagccagggcccggcggacttccaggccagcgcggcgccgcagcccgtggcgcagccccaggcggcgagcggcggcggcgtcgcggccagcgggcggcaggcgacgctgggcgagatgacgctggaggacttcctcgtgaaggccggcgtcgtgcggggcgccttcgccggccacggccacggcgtcggcatggtcccggccggcccgatgggcatgcagcacaacgcggctcctcccatgatgtaccaggtggcggcagcggcggcgccgccgcccggcgctgtatacccggtgatgggcgacggcatggggtaccacggcggcgggtaccccgggggcgtggcggtggtgccgcccccgccgccgtctcagtgcgtggcggccgccgccagcccggggtcgtcggacgggatgagcgccatgacgcaggcggagatgatgaactgcattggcaacggaggggtggtccgcaacggcggcggcggcgcgcggaagcgcgacttccccgaggacgggtgcaccgagaagaccgtggagcgacggcagcgccgcatgatcaagaaccgcgagtccgcggcccggtcacgcgcccggaagcaggcgtataccgtggagcttgaggctgagctgaaccatctcaaggaggagaacgagcgcctcagagcagaggagaggacgattctgctgtcgaagaaaaagatgctggtggagaagatgatggagcaggcaagggagaatgtgagcgccaagaaggtcggtcccggactgcgccggtggggcagcgccatgtggtgaacttgtgacgagtgagactcgcgttgtgcagttccagttcgattggcgcttgcttgcttgcttccatggaaagtgctgtacctgtcggtaccagaaccattggtaacagtacgcgatgtgattgacgcatacgtctctgagggactaatagatatatgggcaagagcttccgcgttggcctgctattgttcataagccttgggttgtacaaacaataaaccagctgtctttaagatagcaactcaacacaaagctatgtgttttcgtccatgtttatttgacatgggccatactga

SEQ ID NO: 151321 - DNA, 3371 bp, Zea Mays
gcatgaggtttacgcccctccccgctcgccgtcggcccatctcggcccctgaccctccaccgccactgactccctctcttgccaccgagggaattcggatctaggagcaccatgccactacagctctccctcgcccacgattggcccccggcccgggagatgccgacgcccatcgcgaccgcggttttctcccccatgtccttggcctcttcctccactctcatcctccctcctccccccgttctcggatgttctcgtcgcctccgccgcgcgttccgctctccccacagcccttgtccgccgcatcatcctcggtcgttctcggcgtcccgctccacgcccgccctcgcccaacgaccctcgccgcaccccctccctcgtcctcgatgactccccctctggccccatcctcgtcggcatcggagcctgctctctccgtcatgggggaggggaaagcaaaggaggaacaagagccaagcagttaagctagcccggtcgcttgccttccaccaagatcccccgagacctcatcgacgaggagatggagatggagtccagccccgccgcatcgcccttttcgtagagccgtcgccctgcgcctacgcttttgcagctcctcggcatcgcaatcgctacctcccgcgatgcgcccttggatccacttctcatgcgacgcctctgatcgacaagcacgtcgtgcgtccgcaccgcctccctgaccggcaagcacgtcatggctccaggcacttgcagcctccacgcttcttcggccagcgagcacgcgaccacgcctcccactgttcagtcgtggtggctccaggtgcttcttgcctctgtgtctccctgactggcaagtgtgtaaggagggacctcccctgccctagctccaaacagaattagggaatacggtcaacctcccatggctactgccgtgtaggcgatctgacagtccacaaaaacctaagattcggcaccaagtcactaaccgaaggaaggtcgagatgaggaaggatgtgatttgatctcgaatatcaactacatctgtctagcgtcgagacacatctacgccagaagctgatggttgtgggtaaaacatttttgttctgtaatccccaggctagcaagtttcacttaaacaaaggttcaggctttcgttgtttgcaaggtactataggttgtagcacaacttatactattttgtactgactcatgcggagggcccgtgatcagaggtgctgttgaatttttagttacacaaagtctactatttagcatccacatgttagtaattttttagcaagaatgcaatatcggtacatagtatgccatgaatttttttacctatctttctagcattccttttgatgaaaagagagagtaggagtgtgttgtgtgtgtgataggggtgtacagaggagaaaaaactcaaatgcacggctcaacaactcttgtcatgtgacttttatcttcttgccttatagaatgcagattctagaggcgatcactgcacactgcacacacagccttcccctctgtatagctaatccaatcgacaaatccagtgtctgcgctctctctttctcaaaactattgtctcttttttggattctaatattcacccaatcattgtttttgttttgtctcatgtaaatttcagaacatcgaatcctatgtttttgtaaatttactcttgcgagctcaaattatttgcataataaccagccgtccgggacggagctttacccatacgtatatgttcagctatgttgtgtggactgaatgaaaacgttctgagctctactaaaaatatatgttcaccatgctatcatgcttagtaactgtgatatggcattgttagaagtacaaaaatctaggacctcacatgagtactccctattgtctaaattttattttccagtacaaccagttagtgcactccgtgtccataaacatggcgcaaggacagatggggcaaggcaaacatgaatcactccaaagtacaaatagaccaatggaaatatttgtattaataatattaattatataagtggtaattctattggtctattgacaatatatcttatccatggaaacagttggctggaccttaagtttttttctctttcgtagataggactggacacgacttgtggctattttctctctatttataatattttgtagggatagattattcctccaactcattgtttcgattaaaaaaatatacctaacaatcttttatgtggcacctcttcagcataacctttatattcattcttgcacttgtcagagtattctacccttacaaccatggtgcaaaattaatgacattctttaaatgtttgtgttgagcttcattgttcagttgctccatcacaaatgtagatttgatatctacattatgctttcacatacctataaaggagttatttttcatattttggtatgttgttgttttcacttaacttcaagagattttaacaatctcataggttggaaagcagatggttctaggcacacttgaacaatggttgtcactgaacttaaggggttttaattgttactgaactttattgatgcatagtgaatttaccattctaattgttgtgaatgcatgatatcacaacaatgacatgcctttttagttgctgctgttatcgggttgggtggcgcaggagaaaacagtgatcccactgctcaatctatcgatctatgagccaaacaagacacaaaccatggaacaagtggattgtctgcatcttaccattaatgttgaagaatggttggatgacaaaggccaaggagaatgctgcagctatgttattcagattatatgtggtccatgacaataaaaaagataatgaatgatccagagaatgtgaatgtatgcatagccttttattcgagtcagctattaaacaggctaaactattgttcaagtgagtagaggtattttgcaacacttaaataatgggtagtgccttatcgttatagtttcctaacatatttttatgtaccatgcataatttcttatctgagttgtcacctgcaagtttctcagcagcttatctcttcatcattgagtcaaccttgtacattatgcagaaaatggttgtcttttttatgcgataaggctgtctggaatgctatcacaaataattagtgtttttatatcaatgtacattatcaatatattatcaatgtattcttaatgatgaagaggtacaacgtggaatgcacgaggtggaaggctagcacaccgaggtcaaatttatcctccaggttcaaccatggaagtgaatcttctgatgatatttgcctatcattaagaattttatattgactcttttgaaataatttgtgcgata

SEQ ID NO: 151322 - DNA, 107 bp, Zea Mays
ggtgaaaagaagtaggttaaagcaaccgattgagattgtaaacgaaagaaagaaagtatacaaactgctggagcgatctataaatttgaacggtcacatcagcgaca

SEQ ID NO: 151323 - DNA, 1120 bp, Zea Mays
atcttcttccgcttccaacttccgttccgcaaattgaaagctcggcgttgccctgcgcccctgcctcgagctcgaaggactttgtccctatacgtcgttgtccagctcctcgcatattgtggcctggtgcagattggagatccgcccggacttggatcgagtcctccttgctccattcattgagacagcatgcctaagataaagacaagccgtgtcaagtatcctgaaggatgggagcttattgaaccaacaatccgtgagttggatgccaaaatgagagaagctgaaaatgatccacatgatggaaagagaaagtgtgaagctctctggcctattttccgcatttctcatcaaaggagccgctacatatacgatctttattacagaaggaaggagatatcacaggagctttatgagttctgcctagaccagggttatgcagaccgtaacctgattgcaaagtggaaaaagccaggttacgagcgcctttgctgcctccggtgcatacagacacgtgatcacaacttcgcaacgacatgcgtctgccgcgtccccaagcatctgagggaggagcaggtgatagaatgtgtccactgcggctgcaggggttgtgccagcggtgactaatcttgtcatcatgtcgttcggctcacgactcaccatcgcaaccttaaccggatgaggtgccctgctgtaaacatggatccggctgcggtgattagcattagtttattgggtaaactagttgggggaggactaaatttcctcacgtttggatgtttctaactgttatgtactactatgacgttctcgtgtcacaaatgcttgcgttaaattagtagcgcttttgcattttattgagtctgttaattggctactgttgtgggttctaacaatattttttttgataagacaggaggggcgagcccctattggaaattttattaaaactttaaaataacagagttagaagcagacagaaaagaagattacaaaggataaaacaacctaactacaacggaaaaaggaaaagagacgaggtctactgctaaagctgaagtcggttctaacaatattaaattttgtatttttcaacgatttttcaaaaattcagcaaaaa

SEQ ID NO: 151324 - DNA, 1199 bp, Zea Mays
ccattcggacttccctttattccccttcctatataatcccatcgactgccatcttcagatcttcttccgcttccaacttccgttccgcaaattgaaagctcggcgttgccctgcgcccctgcctcgagctcgaaggactttgtccctatacgtcgttgtccagctcctcgcatattgtggcctggtgcagattggagatccgcccggacttggatcgagtcctcctgtctttggacattcattggagtgctccattcattgagacagcatgcctaagataaagacaagccgtgtcaagtatcctgaaggatgggagcttattgaaccaacaatccgtgagttggatgccaaaatgagagaagctgaaaatgatccacatgatggaaagagaaagtgtgaagctctctggcctattttccgcatttctcatcaaaggagccgctacatatacgatctttattacagaaggaaggagatatcacaggagctttatgagttctgcctagaccagggttatgcagaccgtaacctgattgcaaagtggaaaaagccaggttacgagcgcctttgctgcctccggtgcatacagacacgtgatcacaacttcgcaacgacatgcgtctgccgcgtccccaagcatctgagggaggagcaggtgatagaatgtgtccactgcggctgcaggggttgtgccagcggtgactaatcttgtcatcatgtcgttcggctcacgactcaccatcgcaaccttaaccggatgaggtgccctgctgtaaacatggatccggctgcggtgattagcattagtttattgggtaaactagttgggggaggactaaatttcctcacgtttggatgtttctaactgttatgtactactatgacgttctcgtgtcacaaatgcttgcgttaaattagtagcgcttttgcattttattgagtctgttaattggctactgttgtgggttctaacaatattttttttgataagacaggaggggcgagcccctattggaaattttattaaaactttaaaataacagagttagaagcagacagaaaagaagattacaaaggataaaacaacctaactacaacggaaaaaggaaaagagacgaggtctactgctaaagctgaagtcggttctaacaatattaaattttgtatttttcaacgatttttcaaaaattcagcaaaaa

SEQ ID NO: 151325 - DNA, 1707 bp, Zea Mays
cgcgcccacttcgccactcggacactgctcggccggtcggcccggatcggtcgcacggacacgccccgcgcgtcgcgggctctcacctctctcctcctcctctgcctgattggcgtgcccccatgcggatgcggtggctccgacccagctagcccccaggctggggctgcgcccgcggcggcgatgaagcggccgctgcggcgctccttcgcggtgctcatcttcgtcgggctcgtcggcgcggcctccttctccaccgcgctccgtcgcgccgtggcgcccgcgcccgcgcaggagcccccgccgctcgacccggcgcgcctcaacgccacgctgctccgcctggccgcagccgatccgtcggaggcgtcgctgcgccgggacgtggacggactcctcgagggccgcctcccggcctccgcggcgcgggcccgcgcgtggcgccgcgaccgcctcctccacccgctccacctccaccgccaccgcagcttcccgctcccgcgccgcggccgctacccggacgacgaccacgacatcctgctccacccgctcccgcgccacgagcagctccacatcgaccccgccctgcgccgcgacctccgctcctggcaccgcctccgccgctacgaccctgccgtcctcgccaccctcccctccctgctctccatccccgggcgcatcccctcctgcgccgtcgtcggcaacagtggcatcctcctgcgcgcgaaccatggagccctcatcgattcccacgcagccgtgttccgcctcaacaacgcccgcgtctcaggctacgccgcgcacgtcggcagcaagaccaacttctccttcatcaacagcaacgttcttcacctctgcgcgcgccggcccgggtgcttctgccacccttacggccacggcgtccccatcctgctctatatctgccaggccgcccatttcgtcgacgtcgccgcctgcaacgccacctcgtcctcccgccacggctcccccatctccgtcaccgacgcccgcctcgacgtcctctgcgcgcgcatcgtcaagtactactccctccgccgattcgtcgccgagaccggccgcgcgcccgaggaatgggaccgcgcgcacgacgccgccatgttccattactcgtccgggatgcaagccatcatggtcgccgtgggagtgtgcgacagagtcagcgtgttcggcttcggcaagtcttccgacgccaagcaccattaccacagcaaccaaaaggcggagctagacctccacgactacgatgcggagtacgccttctaccacgacctctccgagcaaccgcaggtagtcccgttcctcaaggattccgggttcgccgtcccgcccgtcgtcttctaccattaggccagcttcgagagcgcgcgccatgtgctcgacgttatgtggaacggctgttttcctcgcttatttttccggttttgattagtgggtacgacatagtaaaatggggatatcgagatagtaaaattttcgtgctgttggagttggaaggtgtatattggggtttaggctactccactggtatagaagaagggattgtttgcccttttgatttcagcacgacagtaggcagtgcctggaattgtaacttcagactgatattttaatttattaagaaacagaatgtatatcttaccatcactttggaactgcgttcaggaatacgtggcattttattttcat

SEQ ID NO: 151326 - DNA, 720 bp, Zea Mays
agcttgattcgttgttcgatcccttatcgtttctgaattttgaccatgtacttgtcggttaatttctctaccccggtgaaactccggtctcgtcgttgtttgcagccgacaacctctagagcatggcgacggctgctgctgctgcaacagcgatgtgctccgttccaggcccgagcggcagcatgcggcgccgggcattctgcacatggaaaaaagccgatgctccgcgcgtcgcttcttcttccgtcgcgcgggtcgtcagggcgtccgcggcggccgtgcacagggtgaagctggtcgggcccgacgggtcggagagcgagctggaggtggccgaggacacctacgtcctcgacgccgcggaggaggccgggctggagctgccctactcgtgccgtgccgggtcgtgcgcgacgtgcgcggggaagctggcgtccggcgaggtggaccagtcggaggggtcgttcctggacgacgcgcagagggccgaggggtacgtgctcacctgcgtctcctaccccagggcggactgcgtcatctacacccacaaggaggaggaagtgcactagctagactgctgctgctgctgctatagaagataatatatattcgaatccgagattccgagtagcgcaggcaacatttgtaaaattgtagacagtggctactccaaccgtggatgttcagagcgacgtactgtttttatcaagttctacttct

SEQ ID NO: 151327 - DNA, 192 bp, Zea Mays
ccccccccccccccccccccccccccccccccccccccccccccccccccccccccccccccccccccccccccccccccccccccccccccccccccatgccccccccccccccccctgccccccccccccccctgccccccccccccccccccccccccccccccccccccccccccccccccccccccc

SEQ ID NO: 151328 - DNA, 192 bp, Zea Mays
cccccccccccccccccccccccccccccccccccccccccccccccccccccccccccccccccccccccccccccccccccccccccccccccccccccccccccccccccccccctccccccccccccccccccccccccccccctgcccccccccccccccccccccccccccccccccccccccccc

SEQ ID NO: 151329 - DNA, 216 bp, Zea Mays
cccccctctaggcgactttcaacctcccccagtcccccagacccatcccgcgcaccatcgacgccaccttgttccccaccaccttcgtccaggccgacaccacctcgttcaagcaggtcgtccagatgctcactggcgccgagcagccggccaacaacgacgcgacgacgacagaggtagccgctaccgccaacggggccggcgcccaggcggcct

SEQ ID NO: 151330 - DNA, 856 bp, Zea Mays
catctccaagggaataataattattcataattcatcttggagtattatcacaccgtcgccgtcgccaaggattgtttttgttgttgggccctactggagattaagtgcaaatgtagcatgggtcgccattatattggagtcgccctcgatcgctcgtcatgcacaatcgatgatgcagcccccaaattttgcttctctccttgcaactggtggtcttgggaacctgacccttgccacttgttgctggaacacgattcaacccttcttatcctgataattgttgggtgtgtcctctacagccggtcaatagagactggattgggcttaacccaactatcgttcctttaatcgggcccttgatcgggagggcccatgctaacctcggttggagcccccagacacacgatgctatatatataggactaaggggtcgcaggaaagactaacgctagtacctcgccccaaaaccctagtcctcagaggcccccatcgcctaggcgtcggagtgtttggaaacgcgacaacctacagcggctcggatcccaatgcctgctacttctctgcagggcgacggtatgaagatagcaacaacaacaaaggtgtgtttccccgttcctctcaatagatcagtagatcagatctacacgtcatcaaggttttactttcagttacggattggtattctagggacttaggaatcgatcctagatagaatagattctaacaatggtatcagaggcgtcctaagaaacctagatctcctaatccgcatcagtcttatgatccgcatcagtcttatgagatcacagaaaggtctcgaatcaatatgaatgaactcattttttttatcatcgtt

SEQ ID NO: 151331 - DNA, 1268 bp, Zea Mays
ctattccggtaccgcactgtggtcgccgtgcgggcccgaccggggtcgaagccgaaaatcctgcggctgtagacggcgaagctacgcagtcgacgtcggagaatggggctctccggcgcagcaccaactgcatccacttcctcacctcgccaccgtagccaccacaagcacctccatcggctcctcctcctcgatccgaggcggcgaccggctgtggtcgcgtcgccactgcgcgcggtgtgcggagcagcaaaaccttcatcgtcgtcgtcgtcgccttcctgaccacacacgcaccaagtccaagtgaggtcggccagtgtacgagttcagataataagcggtagtgcgagaattccagtttccttcactgaaatgaaaaggagagaagacctacagctacagcgccccgccctgccttccgtctttgctccctgcatggttgcacgcccggtgtcctgatctctcctctgccgcatttcaccaatacgtgtgggggttgtttatcaaatcaggcctgattgtttcctctcactcaattctttgtagcagttcttttttaaaagcataccggccacacagagatggaccgggttttcggtcttcttataataaccattcctttatttccaaaggcacacaatatttatttaagtaaaattatgcggtaacatttccggtgtcttgaataatgatgatagagaggcgtggcatgagatgtctggcttcacatggaagagtgatcagaggagtcttttcgttcccggctcactagaagctaaccaaattttgagatgttggaagtctgatacgtttacaatggtgttggtaatgcagattctgacccagacaagctctgaaagcaattcagaaaaagggtgacaccccagcaaagcttgtgaagatacttcagtgatgtactattggagattaaaaacctgacaaagctggtggagcacaaggccattgagtcaaatcgtacaacatatgggcatcggatgagtcagccgctgcgtgtggaacgcgaccgaatacacgaagccgggttcatagcgaagcacaggaccatacttacacaagaattcgcacagtttcgcaatatcggcggccgtttggtatccagtggatacgtggctgtttgtcacagcatcagatctcaagttcaaaccgtagttaatgcattcccttatcattttattatgtccacacttatttcacttccattttcatggtacaaaatttattgaaattggagacggatacttttc

SEQ ID NO: 151332 - DNA, 2687 bp, Zea Mays
gcaagagtccacctcactgcctccgcccgcccctccgccacggcgcccacccaccgccactcccctaaaaccctcaccaccgccacggcgccacccccgctttctagtaccattccctaagcgccgccgctcgcccgcggcggtaccccgtcctcgcgatgtcgtcgacctccggcgctctgccgcagcctcgccgcgggcgtcccggtccctggcccccggcgccgcccccgcagccgcaggcgcagccgctctcctgggctaagcgcacaggtttccagtcccgcgtctccggcgagtcactgccttcgtcttccgcccacaactccggtcaggcccccctccctcgccctgctgaggccccttccgatctggagtcgggcccgccggcccggcccagctccaccctcccggcccctccggccgccgcgggaaatggcgagcggcagcatcccccaccgccgcctcctcaggcgaggacgaggaggagggactccgatagcggaaggccgaatgggcagatagccgcgccttcgcttccgcagctacaggaggaggaggaggcgccggagcggccggctcatgtgaagtacgagctccgtgacactccaggaatatttcctctggtggtatacggattccagcattatatttccatggtcggttcaatcatcctgattcctctcgtgatggtccctgctatgggtggctcggctgatgacatggcggcagtggtatccacagtgttgctcgtcaccggggtgactacattgctgcacatgtttgttggaacgagactgccacttgtgcagggtccatcctttgtatacctggctcctgcgcttgcgatcatcaactcaccagaattatttgggatcaatgataataattttaaacacataatgaagcacctgcagggagctataataattggaggtgcattccaagtgtttttgggatacacaggcctcatgtcactatttcttaggttgataaatccagttgttgtctcgccaacagtggcagctgttgggctttcatttttcagttatggtttcacgaaaattgggacatgtatagagatgggaattctgcagttattgatggtggttatttttgcactttacctccggaaaataaagctatttgggtacagagtgtttcttatttatgcggttcctcttggattaggaatcacatgggctgttgctttcgttctcacagcaactggagtttatagctacaaaggttgtgatgcaaatattcctgcctcaaataatgtatcagccttttgtcggaagcatgtattgaggatgagatcttgccgtgtagacacttcgcatgccttaagatcttcaccctggttcagatttccctatccattgcagtggggaactccagttttttcctggaaaatgggccttgtgatgtgtgttgtatcagttattgcttctgttgattctgtcggttcctaccatgcatcgtctttgtttgtggctacccggccaccaacctctggagttgttagcagaggcattggtgttgagggtgtatctacagtcttggctggcctttgggggacaggagttggttctgcaacaataacagagaatgtacacacaattgctgtgactaaaatgggtagtcgacgagcagttggattcggtgctattttacttatactgctttctattgttggaaaagtcggtgcattcattgcttctattcctgatgttatggttgctgctctcctttgcttcatgtgggctatgctctgtgctcttggcttgtccaatcttcgttacagtgctactggaagctccagaaacagtattatagttgggctggctttattcttgtccctatcagttccttcttacttccagcagtacggtgtacatcctagcgcaaactcatcagtgccaacttactttcaaccatacgttgttgcatctcatggacctgttcacactggatcgggcggggtgaactatgtcctcaacacgatactttcactcaacatggccattgcgtttctggttgctctggtacttgacaacacagtccctggtggtcgtcaagagcggggattgtatgtatggtcagaagcagaggcagcgatgagagaatcgactttcatgaaagactatgaacttcctttcaagatcggacgcccgttcaggtgggtgaagtgtgttggtctataacacaattttgggtagtttgtagctgtggcaaactttgaagatctcaagctttcatgaatcatgactgatcgtttctcgacaaggctggtgtataggttatttagcatgtcttgattctgatgtatctaattttcagatacgtttgagactgctgtatatcatcgctgacggtcctattatttagatggttttagggatatcaatttgtacaggtccagttaaaaaaaaactgagctaccacacctgaactcatatctggtttgaagtcaatagttatcccgaaaccgcactttcataaagtacagccgtgcagaatttgcatctcatacagccgtgcagaattttcataaagtcggctttgcaaatgatcgttgtcacctctgaggctgtgacctgtcaataggaatgcaagttccagacttccaggggttttggataagttttgggtcatcaattgaagatttgctaaaataaacaaaa

SEQ ID NO: 151333 - DNA, 1520 bp, Zea Mays
aagcatcccacatccagcaagagtccacctcactgcctccgcccgcccctccgccacggcgcccacccaccgccactcccctaaaaccctcaccaccgccacggcgccacccccgctttctagtaccattccctaagcgccgccgctcgcccgcggcggtaccccgtcctcgcgatgtcgtcgacctccggcgctctgccgcagcctcgccgcgggcgtcccggtccctggcccccggcgccgcccccgcagccgcaggcgcagccgctctcctgggctaagcgcacaggtttccagtcccgcgtctccggcgagtcactgccttcgtcttccgcccacaactccggtcaggcccccctccctcgccctgctgaggccccttccgatctggagtcgggcccgccggcccggcccagctccaccctcccggcccctccggccgccgcgggaaatggcgagcggcagcatcccccaccgccgcctcctcaggcgaggacgaggaggagggactccgatagcggaaggccgaatgggcagatagccgcgccttcgcttccgcagctacaggaggaggaggaggcgccggagcggccggctcatgtgaagtacgagctccgtgacactccaggaatatttcctctggtggtatacggattccagcattatatttccatggtcggttcaatcatcctgattcctctcgtgatggtccctgctatgggtggctcggctgatgacatggcggcagtggtatccacagtgttgctcgtcaccggggtgactacattgctgcacatgtttgttggaacgagactgccacttgtgcagggtccatcctttgtatacctggctcctgcgcttgcgatcatcaactcaccagaattatttgggatcaatgataataattttaaacacataatgaagcacctgcagggagctataataattggaggtgcattccaagtgtttttgggatacacaggcctcatgtcactatttcttaggttgataaatccagttgttgtctcgccaacagtggcagctgttgggctttcatttttcagttatggtttcacgaaaattgggacatgtatagagatgggaattctgcagttattgatggtggttatttttgcactttacctccggaaaataaagctatttgggtacagagtgtttcttatttatgcggttcctcttggattaggaatcacatgggctgttgctttcgttctcacagcaactggagtttatagctacaaaggttgtgatgcaaatattcctgcctcaaataatgtatcagccttttgtcggaagcatgtattgaggatgagatcttgccgtgtagacacttcgcatgccttaagatcttcaccctggttcagatttccctatccattgcagtggggaactccagttttttcctggaaaatgggccttgtgatgtgtgttgtatcagttattgcttctgttgattctgtaagttgatgactcctctgaagtttgatcctaactacaat

SEQ ID NO: 151334 - DNA, 1126 bp, Zea Mays
aagcatcccacatccagcaagagtccacctcactgcctccgcccgcccctccgccacggcgcccacccaccgccactcccctaaaaccctcaccaccgccacggcgccacccccgctttctagtaccattccctaagcgccgccgctcgcccgcggcggtaccccgtcctcgcgatgtcgtcgacctccggcgctctgccgcagcctcgccgcgggcgtcccggtccctggcccccggcgccgcccccgcagccgcaggcgcagccgctctcctgggctaagcgcacaggtttccagtcccgcgtctccggcgagtcactgccttcgtcttccgcccacaactccggtcaggcccccctccctcgccctgctgaggccccttccgatctggagtcgggcccgccggcccggcccagctccaccctcccggcccctccggccgccgcgggaaatggcgagcggcagcatcccccaccgccgcctcctcaggcgaggacgaggaggagggactccgatagcggaaggccgaatgggcagatagccgcgccttcgcttccgcagctacaggaggaggaggaggcgccggagcggccggctcatgtgaagtacgagctccgtgacactccaggaatatgtgagtacccgacggaggaagagaaatgtgcacgggcgatgtgtgctatgggtaatgatggacggtgcattgatttaatcggttttaagctgcgttgcagttcctctggtggtatacggattccagcattatatttccatggtcggttcaatcatcctgattcctctcgtgatggtccctgctatgggtggctcggctgtgagttctggaattgaatttgttgtatctcgtgcaccattactgatttattgggtttcttactgaatactaggttatatttggtcgtgtttgggtcaggatgacatggcggcagtggtatccacagtgttgctcgtcaccggggtgactacattgctgcacatgtttgttggaacgagactgccacttgtgcagggtccatcctttgtatacctggctcctgcgcttgcgatcatcaactcaccagaattatttgggatcaatgataatgtatgcacgaatttttgtgtctta

SEQ ID NO: 151335 - DNA, 1173 bp, Zea Mays
aaagttcatttaaatccaagatacatactgtttaagtctgcaaaactatgcatcagtaatttaaacagtacaaagttcatttaaacaaaaatctgattcacttcacccaaaagatagtaatagcagcagctatcagtaaaacaaaaacagtaaacggccaggtgccaaaatatgtctgtaaatactgcagtacaaagttcatttaaataaaaatcattttatctcagattttttttgtgttgtaataaaccttttgggtgaactcaactgggcatctggtcgtgtatcaacaaacagtaaataaacattttatcagatatatttaaacaaaaacagtggttggatgcatcagtaatttaaacagtccaaagtttatttaaacaaaaactgtagtacaaagttcacccacatttagtctgacaaaatcaagaacaaagttctcgcaccttttgggaaacagtcgttggatgcatactggtgctttggataaggtattttatttttactaaatattactactaacaataatccgatacaaagctcttgtaaataaaaaattggtaaacggaaactgtaacgatccaccactctgttcatggagtcattactcattagctcaagtatgaacctccatgtttgattcttgtacaaaaattggtgaaagaaatccatgtgcaccttgtgactgaacaaaaggttttgttcatggagtcattactcattagctcaagtatgaacctccatgttgttacataccgtgaaacaacattgctatttgatgagatgcactctgcagctgccaataagcaacgggttgcagttgttgtagctcatgaattagctcatcaatggtttggaaattttgtcacaatggaatggtggacacatatgtggcttaatgagggctttgcgacttgggtgtcttacttagctgcagatcagttctttcctgaatggaatgtttggactcagtttctagaggaatctacaataggtttcaagttggatgctcttgcaggttcacatccaattgaggcagcaaatattatcactttgtatgatgtttccaatatctggcgcattcctttgttgctacatgaacaaaaggctcatgaggctattcttaaagttctgaatctggaaaggacggacaaaaggctcatgaggctttga

SEQ ID NO: 151336 - DNA, 273 bp, Zea Mays
ggaattttcatgtagtttggcagagaataaggtctcacaaatgcattatatttatgtttggcccaatgaagcagcccattgaactgctctgtttacctttattatgagcctggtatatatttctcgaagacctcttgtacttttctttgcttatatgactcttcagtcatcattgctgtcatgagagagttattgtgttctgaaaatgaagagtgatgtgactaggatatatccaaatgtctctctctcccttaccagagatttaggactctg

SEQ ID NO: 151337 - DNA, 1772 bp, Zea Mays
cgacacgaaattcccgcgcgcgcggaccatgatgcgcgagaccaggagcaggagggcaggcagggctccggcgagaactgccgcaggcaccaggaccacacagcctgacagacacccggcgatcggcgtgccacacacgtagaaaccactgcagaagtggccaaagcgctgtggccgcagcccgcttgcgaggcgcactggcactccgcagctgacgacgacccggcagtccggcacaccgcctctttccgtgtaggctggccgccgccaccagctcgaaaccatggaagtcgcggccgtggcgtgccgcgccgggctgcttgcgcgggcccgtccaagcagcagggcgcgtacgtgggccgttgccgtcggccccgccccgtccgccgctagaagaaggttgctcgtcgcgtcgctcggggtcggggagccactcccggcgcaatccctgggcgaggaggccgtggcgctggaggtgggtgaggaggaggatgatctgaactccattgtttccgtcgaaaacctgcctcccgctgctgctcacgttcctgaggcaaggaggacaacagtgcgcgtcaggttcgtgctgaggaagcagtgcgccttcggccaccagttcctcgtcgccggcgacgacgcggcgctcgggctttgggatccagctaaggcgatctccttggtttggtcagaaggccacgtctggacggcgaacacggatttgccggcgaacaggtcgatcgagttcaagttcttgctgcgagatgcctcggggcatgcgcattggcagcacggcgctaacagaactctgcgaattactactgaaaccccaaacaccgtagttgtccacgaagactgggatcacggcaacaaacagaaagtgtcagaggaggaagagctctccatcggggaagatgtgatgtttccagatgatcttgcgggaacagatggcgcaagcgcaatgccggcagataatcccgagaagcatcagaatgtggagactgacagtgacaggtcggctgcggtggttgcagatgctcctccgcagcaggaaatggtagcagcaaacggaacgggccaaccgcagctggtggtggacgggcacaagacgattcttgaagaggtccccggagaagaaaacggcaccctttctgccgccaattatgctggtaatggcagcatcgacgacgatgacgacgacgacactaccttgtatcagggaggtgatgtgctaccgaacaggccgacaagtatatttgagaacgacttggcttgggccgggaaagccatgcagcagctgctccgggtcctcggtttccagatcggcacaacaagaacgtgaggttcagcttcagatgccgttgtgtgtatatgttgcaaaccttcaactcacttctctacgcagaaagaaacgtcggtgctgaggattgtaactgaaactccagtaacagcagcaaacatcagctgtcttcccccctgcactgtgttgcatatagcaattactaggagataaacaactggcactgcaagtatgttcagtttagaaacaatgactaataaggtgagagtcatcgacttcttatccgcttgtcgtgaaggcaggctccatctgtactgtacaacatggcaaatgtaagttcggtacaaagtcgaatatgtggagcagtggatgtactcttctaaaagaaaagggtgatgcacttctggtaaaccaatgacatctgtaacggtgaaaatgagctgttggctgttgccctcacattctatccttcttg

SEQ ID NO: 151338 - DNA, 361 bp, Zea Mays
tttgcgcttcgccactgccttcagcgaagagttcatcatcaacgttgagggcgaaaatctttctccccaaggagccccttaaggctactacacaacaagttcatctgtcttgtctcctgatttgggattcgtccatgacttcaaagtatatccgttacatgttagtattatatttccttagatatctaggttgctgaataatttttctaggtagctaggacgatgaattaacatgagatgactatgttgtttatacatatagactgttgtcagtataaattaggtttgctgatgtagcctaattcacatgcttctgcaaacatggtgaatgatcagatttcaatgtatatggttatgactt

SEQ ID NO: 151339 - DNA, 168 bp, Zea Mays
caatattgatgcaatatgttatgtggaaccagagcaattgcatttgttgtcaaatgatgctaaggtatcaaaggaagctcccataggaaccattgggtttaggtgacaccaatgaacccattaactaaattaaatagccaggaaataaactaaactatacgagtgtag

SEQ ID NO: 151340 - DNA, 1912 bp, Zea Mays
ttccgatttgctagatctgagccgacctgttccgactttgttgtgcacggtaggtggggaggatggctggccagtttgccaagccaaggtccgaaccgttggaggagagggatggcgtcaagctgccaagctataggggcgacaacgtcaacggcgacgacttcaccgagaagagtcgcgtgccagacccgcagaggatgatccgcgcctactcgcagtcggtggcgacgctcaacctgctccgcgcgttggcgaccggaggttacgctgccatgcagcgcgtcacacagtggaacctcgatttcatggatcacagtgagcaaggtgataggtaccgcgaattggcccatagggtggatgaggctcttgggttcatgactgagcagggcttacagttgaccactgacgactactgacttctggacctcgcatgagtgccttctcttaccctacaagcagtctcttacccgtaaagactccaccagtggccttttctacgattgttcagcccacatgttgtgggttggtgagcgcactcgtcaactcgatggagcgcatgttgaattcctttgtggtgttgccaaccctcttggcataaaggtgagcgacaaaatgaaccccagtgacttggtgaagctgattgagattctgaacccttcaaacaaacctggaaggatcaccataattacaaggatgggggcagagaacatgagatacagtgatctcagcaataacaatctcaacggcgatcttccatatcagcttccaccaaacgtggttgaattaaatttgggcaagaaccacctaagcgggcagttgacggatatgttttcacagcttccaaagctctcaacattgaatgtggagagcaaccaatttagtggtcatatagatgttctagcgaaacttcctctcgaggatctggattatatttgggtgtatgctaacaggcaccgtatatggtggctacgacagtcccaagctaacatacagtgggcatgtgaagatgtggcaaggcagcaacaagaaattcagaaccaggcggcctccatgctcaagcatgaagcatcacttaagcgtgatgataagactataattctgcacctccacctaggccacccgcctgccagagtggaggacgagctcctcccgtgcctttgccagctatgtgctccgagcttcgccgcctgtctccctaggccacagggaggttgtgtgggggttgcatctgacaaggccaaggcaccgtcgacaggtgcctcacctagctcaccttgcagggcttcgacaggtgcaccatcagcttcggaaggatcggagaagagtcgaggcttttgggttcgtgcaattgttgtcaatggtctcctgcaaagggaggactgggaaacagcaataaaagtgccacttgggatcatttcagcaggtactggaaatggaatggcacgatctctactgcatgctgctggtgaaccattctctatatctaatgctgtgttcgcaatcatcagaggtcataaacgtgcccttgatgttacttctgttgtgcagggaaaggcgaggttctttagtgtcctgatgcttacatggggtctggtggctgatgttgatattgaatctgagaagtataggtggatgggaagtgcccgccttgatttttatgtatactctctacactaaaagcttatatcaagtagttgattttatttttcatatatgtaagtttctctctctttttatataatggagttaacagagagatattggctgatcttgcaccatcttggggcttggcagggtcgactcttgctttactacttagttgcaagccccaactgcaggaaatggtttttttggttactgtaaatggtgtatagctttacttagatgtgcattcatgcattgtaacaaccct

SEQ ID NO: 151341 - DNA, 1861 bp, Zea Mays
atgacccagttcttgaaggatgagggggtcgttttgtcgccggaggatgaaaataagagggagaaggtgatccgagagctcaagaagatagtgatgcattgggccaacgcggtggcttatgagcagagtgtgccccaggggctggccacagctaccgtcctgacatacgattcttacacattaggggtggggaggatggctggccagtttgccaagccaaggtccgaaccgttggaggagagggatggcgtcaagctgccaagctataggggcgacaacgtcaacggcgacgacttcaccgagaagagtcgcgtgccagacccgcagaggatgatccgcgcctactcgcagtcggtggcgacgctcaacctgctccgcgcgttggcgaccggaggttacgctgccatgcagcgcgtcacacagtggaacctcgatttcatggatcacagtgagcaagcccacatgttgtgggttggtgagcgcactcgtcaactcgatggagcgcatgttgaattcctttgtggtgttgccaaccctcttggcataaaggtgagcgacaaaatgaaccccagtgacttggtgaagctgattgagattctgaacccttcaaacaaacctggaaggatcaccataattacaaggatgggggcagagaacatgagatacagtgatctcagcaataacaatctcaacggcgatcttccatatcagcttccaccaaacgtggttgaattaaatttgggcaagaaccacctaagcgggcagttgacggatatgttttcacagcttccaaagctctcaacattgaatgtggagagcaaccaatttagtggtcatatagatgttctagcgaaacttcctctcgaggatctggattatatttgggtgtatgctaacaggcaccgtatatggtggctacgacagtcccaagctaacatacagtgggcatgtgaagatgtggcaaggcagcaacaagaaattcagaaccaggcggcctccatgctcaagcatgaagcatcacttaagcgtgatgataagactataattctgcacctccacctaggccacccgcctgccagagtggaggacgagctcctcccgtgcctttgccagctatgtgctccgagcttcgccgcctgtctccctaggccacagggaggttgtgtgggggttgcatctgacaaggccaaggcaccgtcgacaggtgcctcacctagctcaccttgcagggcttcgacaggtgcaccatcagcttcggaaggatcggagaagagtcgaggcttttgggttcgtgcaattgttgtcaatggtctcctgcaaagggaggactgggaaacagcaataaaagtgccacttgggatcatttcagcaggtactggaaatggaatggcacgatctctactgcatgctgctggtgaaccattctctatatctaatgctgtgttcgcaatcatcagaggtcataaacgtgcccttgatgttacttctgttgtgcagggaaaggcgaggttctttagtgtcctgatgcttacatggggtctggtggctgatgttgatattgaatctgagaagtataggtggatgggaagtgcccgccttgatttttatgtatactctctacactaaaagcttatatcaagtagttgattttatttttcatatatgtaagtttctctctctttttatataatggagttaacagagagatattggctgatcttgcaccatcttggggcttggcagggtcgactcttgctttactacttagttgcaagccccaactgcaggaaatggtttttttggttactgtaaatggtgtatagctttacttagatgtgcattcatgcattgtaacaaccct

SEQ ID NO: 151342 - DNA, 2345 bp, Zea Mays
ctcgcgttcccgcgcgaagccgaaaaccctttggcgctctgcgcgcgatcgcgcccctcccctccacgcccccgcccgcccttttcttccccacccgtctccgttccccgccatccacatccgacattcctcccccaagttctctcccatccccaaagtatcatccaatttccctccccgctagccacaatgccgactcttcgcagcgcgacggcgaacgcgtcccccgtggccaccccatcccctgccgcggcgagcacgccgcgcagcgtcaagcgccggctgacgccaggccgcgccggcgagtcgcccaaagcgtcgcggcacacctcccctcaccgatcccctcacgccggcaccggaactgtatgcattccgaagctgctctcggcgtcgcccaagtcctccaggaagcgtctctacggcgaccttgtcgcagccgagaagcccaagtggaatccccgagatgccgcgcagattagggctgtcaaggaggcgctgcacgtggcaacagtgccatcgtctgaattggtttgccgggataacgagctcaggcgtgtccttgagttctgcaaggtgtgcgtccaacaggagaaggctggtagtctctatgtctgcgggtgccctggcacagggaagacattatctattaacaaggtcaaggatagcttggtgtgttgggcagatgagatgggaatggagacacctgatgccttagcaatcaattgtacaaacctagcaaacacctcagagatttttggcaagatactaggcaaattgcagaaccaaaagaagggaagcagcaaattgttgccacttcagcaacttcagagcatgttttccaacaaggatttagctccaagaagaatgatgttggttattgtggatgagatggactacttaataacaagagaccgtgctgtgctacatgaccttttcatgcttacgacttatccattctctagatgcatactaataggaattgctaatgccatagatttagcagaccggtttcttccaaagcttgaatccttaaattgcaagcctcttgttgtgacttttcgagcatattccaaagatcaaataactgacatagttaagcataggctaaaggttcttgagtatgatgtatttgaaccactagctctggagttctgtgctagaaaagtggcggcagcctctggtgacatgagaaaagctctaggcgtatgcaggagtgctgtggaggttcttgaagcaaggctacatgattcgcctgatcaagaattaggaatagtgacatttgaccatatggatatggctttgtcaaaagcattcaagtctgctgtcgtagatagcatactgtgtcttccccagcaccaacagatggtgctgtgtgcgttggcaaatacttttcagcattgcaagaaaaaagcaactactctaggagagctcaacaaatcatacattgagatttgtagatcaacccaagttccagcagttggaatgcttgaattttctaacatgtgtatggttttgagcgatcaggggttcatgaaactagggcagtccaaggaagataagcttaggagagtaacacttcagattgatagttcagatatcacatttgcttttaagggaaatcgcttctttcaaaaatgtctggagcagccaagatgctaactagacccatagcagagagtagatcaatacacttactgttgtaatacattacagtattagtttattgacattatcaagtaccagcaatttcaacccctggatgtgctgctcaggtgactcactaaacaacaatccctttatgttacctcggttcttatttttttaatcaaatatacaagtgagaataaagcaggctgcatcatctgtttttttggccatgtattcaacaaactgcacttttttgcttcatgctggattccttacaaaagttttcctctttgcaggtggtttcattcaacatggtcaaacgtaccttggttacatcatgaagctctttcttgcagtgcagggataagtacgtgggacgagttatgatagtattatgtgacacaattctcccaaagatggctgagtgttgttatgatttctcaatttttggttcttccagaactgattgatcatgtagctaaacatttaacatacaagaacatttgtttacacatttcttgcctaaaggctaaatcagtaatgagaagctgcactaatttaatgtgtctgccagatcaattgcatgcttctgatactttatacagtgacagtgacattgttgatgtaaatgcttccccccttatgtggaaatggcaatagggatgcttctcgaataaagatcaaaacaattgaac

SEQ ID NO: 151343 - DNA, 1780 bp, Zea Mays
ctcgcgttcccgcgcgaagccgaaaaccctttggcgctctgcgcgcgatcgcgcccctcccctccacgcccccgcccgcccttttcttccccacccgtctccgttccccgccatccacatccgacattcctcccccaagttctctcccatccccaaagtatcatccaatttccctccccgctagccacaatgccgactcttcgcagcgcgacggcgaacgcgtcccccgtggccaccccatcccctgccgcggcgagcacgccgcgcagcgtcaagcgccggctgacgccaggccgcgccggcgagtcgcccaaagcgtcgcggcacacctcccctcaccgatcccctcacgccggcaccggaactgtatgcattccgaagctgctctcggcgtcgcccaagtcctccaggaagcgtctctacggcgaccttgtcgcagccgagaagcccaagtggaatccccgagatgccgcgcagattagggctgtcaaggaggcgctgcacgtggcaacagtgccatcgtctgaattggtttgccgggataacgagctcaggcgtgtccttgagttctgcaaggtgtgcgtccaacaggagaaggctggtagtctctatgtctgcgggtgccctggcacagggaagacattatctattaacaaggtcaaggatagcttggtgtgttgggcagatgagatgggaatggagacacctgatgccttagcaatcaattgtacaaacctagcaaacacctcagagatttttggcaagatactaggcaaattgcagaaccaaaagaagggaagcagcaaattgttgccacttcagcaacttcagagcatgttttccaacaaggatttagctccaagaagaatgatgtaataactgcctgtatccactatgactattgtgattttcttgctgtttttatcatgttatctgacttgcatgctgctgttgtaggttggttattgtggatgagatggactacttaataacaagagaccgtgctgtgctacatgaccttttcatgcttacgacttatccattctctagatgcatactaataggaattgctaatgccatagatttagcagaccggtttcttccaaagcttgaatccttaaattgcaagcctcttgttgtgacttttcgagcatattccaaagatcaaataactgacatagttaagcataggctaaaggttcttgagtatgatgtatttgaaccactagctctggagttctgtgctagaaaagtggcggcagcctctggtgacatgagaaaagctctaggcgtatgcaggagtgctgtggaggttcttgaagcaaggctacatgattcgcctgatcaagaattaggaatagtgacatttgaccatatggatatggctttgtcaaaagcattcaagtctgctgtcgtagatagcatactgtgtcttccccagcaccaacagatggtgctgtgtgcgttggcaaatacttttcagcattgcaagaaaaaagcaactactctaggagagctcaacaaatcatacattgagatttgtagatcaacccaagttccagcagttggaatgcttgaattttctaacatgtgtatggttttgagcgatcaggggttcatgaaactagggcagtccaaggaagataagcttaggagagtaacacttcagattgatagttcagatatcacatttgcttttaagggaaatcgcttctttcaaaaatgtctggagcagccaagatgctaactagacccatagcagagagtagatcaatacact

SEQ ID NO: 151344 - DNA, 1398 bp, Zea Mays
agaggcctccgccatctgctgaagctgaacccagtaatccgctagaaacgtcttggcggcgtccaggctagggtagtatggcggctccaggaacatttgggcgagcggatccatctcctccgccggcacgaacagcgcccggttgcccgacgcctccgccgtgcccatcaccgccgccaccagctgccggtacccgaagaagaatgctctcacggccacctccaccgcctggaaggcctggagcaggtccaccttgcctgcctcctcgccctcaccgcgcctacggctgtggtacagcttcatggccgcctcctgcacccgtgggccgccgctggggtccgcctcgacaccgagcacccagggcacacgcttcttgaggtccctagtggcgctagcgacgtgcaggagcgccgtggaccggaaacagaaggacgcggactcagaccccggcgccgctcgtacggcgagctggctcttgagccgtaggaactcgtccgggtccatcagcaggtggaggtcctcgacgtccgcgagcagcttccacacgcgctccaggatccagcagtcgccggccgccgcctcccagcacttgtcttcgatccgctcgtcgaggcgggtgagcagctgcgacgcgacgcggagccaggactcgagtatctggtacatggtgaacagagtctcgagctcccggttgcggtagccggacatgggctccggcgcagggtcgggcttcagcgcgtgcagctcgtgcgggcgcacgacgcggtcgtactcgagcacgggcttgccggcgaggttgggctcgccgaggccgagcgtgaaggcgcagccctgcatctggccctcgacggcgtacgtgatcctggccgcgagcgcctcagacttctcccacgcggcgaggcgcgggagcaggctggcctcgctggcccggcacacgaccgcggcggcgctcccgggcagctgccacaccaccacctcggacgcgctgcgctcccgcgggagcacgcccccggaggcgctcagctcggcgagcggcgcgccccggccgtcgccctcgcagagcgccgacaccagctccacctcccgcgccgcgagggactccagccggcgcgcgagctcgcggcggccggcgtgcccgcgcgggtcggagagcgccagggacgcgaggcggaaggtgacctccagcgcctgcagcgccggcttgaccaggccctcgcccgcccactccgggaagcatccggccgtccacaggctcgacagctccggcaggcgcaggtgctgctcgtacgcgtcctgcgcactcagaacggtcgacggggaggaggagggggaggatggcgcgcacggcttgtcgttgccgtcctgccgcaccggcgagaccggggacagcttgggcgt

SEQ ID NO: 151345 - DNA, 1693 bp, Zea Mays
atgtatcacataatagcaatgaagagcacttgccacagctaaaactggtgctaattaatttcagctcatcgcacgctgatcaccaccgcttcaccacagcgaaccaccatggaaagattctactacgtcgccgtggccaccttcgtgctcgtcttcctgctccaccacctcttgacgaggaagaagcagcaacgtctgccacccggcccgcggttcgcgtaccccatcctcggccacctccccttgctcaagaagccgctccagacctcgttcgccgacctcgtgtcgcgccacggcccaattattcacctgcgcctcggccgccgccacgccgtcgtcgtcggctcggcggcggtggcgaaggagtgcttctccggagagctcgacgtcgcgatcgccaaccgcccgcacttcccgtccgcgcgcgaggtcaccttcgactactcggtgctcacggccgtcaactacggcgcgctctggcgcaccatgcggcgcgtctccaccgtgcacctcctctcggcccaccgcgtcaacgtcatgtcggacaccgtgatcgcccgcgagctgcgcgtcatggtgcgccgcctcgcccgcgcctccgcctccgcgccgggcgacgccgccagagtggagctgaagcggaggctgtttgacctctcccacagcgtcctcatggagatcatggcgcagaccaggaacacctactccgacgacccggaggaggacatgtccagggaggcgcgcgacatgaaggacatcatcgaagagatcatcccgctcgttggtgcggccaacctgtggaactacgtgcccctgctgcggtggctcgatctctacggcgccaagaggaagctcgcggacgtggttaaccgaagggacttgatcttcgacaacatgatcggtgcagagcggcagaagctgaggcagctggaacgcaagaaaggcgaggcccatgccagcgaatcggataagatgggcatgatcggcgtcatgttatcgctgcagaaaacagagcctgatgtctacacggacacctttatcaacgctctcgtgtcaaatctgctggccgccggcacggagacgacctcgacgactctggaatgggcaatgtcgctcttgcttaaccacccagacgtgctgaaaagggcgcaagaagagatcgagtcgaacgtcggaagggaccgtcttctcgacaagaacgacctcccccgcctgccctacctccactgcatcatcagcgagactcttcgcctctaccctcccacgccgatgctgctgccgcacgaggcgtccaccgactgcaagatccacgggtacgacgtcccggcggggtcgatggtcctcgtcaatgcgtacgccatccaccgggacccggcgatgtgggaggacccggaggagttcaggccggagcggttcgagctcggcagggcagaggggaagttcatgatgccgtttgggatggggaggcgcaggtgccccggcgagaacctcgcgatgcgaaccatggggctggtcctgggggcgctgctccaatgcttcgattggaccagggttggggatagagaagttgacatggcaacagccactggcaccattatgtcttatgctgtcccactcgaagctcagtgcaagccgcgagcgaacatgtctgctgttcttcagaaaatctagagtgagattgtgatatttctag

SEQ ID NO: 151346 - DNA, 2548 bp, Zea Mays
gtttacaaatcgaattacttcgtagttttgtctatggattgtgtgtctttttctggttatcaaaccatggtcttctatggtgtgtttcgggaggtctgtccctccatatgtggctagtcgtgtgactacttcatgtaaaaacttttggtgtattggctaatcctccaaaagaggagaagctggacaagtatccattatctaaaaaaataaagtttgcctaaaagttggtgtcgccattgcagcactagcactggtaccagctactctcacgagctgcgtgctgaggttgactccttcccgatcctgaaatataaggctaccgctcgtttcctctctctccccgactccccctcccttccatctcttcccttgcatttagcctcccgcggttcaggaggcgcgggccattcccaaccatcgttgcagtggtggcaggtattggcctgtcgagacccatgggcattcaggtcgcggcggtggtgaccccgccgccgtgctcttccccctcctcctctccggcgtcgccttcgtcctcggccattgccacgtcgccgcggcacgccgttcttggcgccaggctggcgaggagccagtcgtcgctggcttgctggaacgccggtcttggccggcggcgcggcgggcagcacgcgatcaggcgcgctctcagcgcgagcatcgacagcgtcgggagcggcggcggggaggacgaggagttcctgaggaggatccaggagctcgcggcgggtcagcacccgggcgccggcggctgcgggtggccggcgagcgtggagcggagcgcgagcagcgtcgggctgccgctgtctctgcggatgctcaaacggaggaagcagcagcagcagctggagcaggggcggtggaacgagcggctgatcgactgcgccggcgagtccgcgcgcgccgcggtgggccgtgccttctcctcgatggtgctcatcatccgggagctccagagcttcacgctgcagatgcgggaggcggtcgtctacgaggacctgcagggcgtcctggcgcgcgtccacgccgagatgcacgcctccttcgtctggctcttccagcacatcttctccggcaccccggccctcatggtctccctcatgctgctcctcgccaacttcaccgtctactccatgggcgacagcgtcgcggcggctgccagcctcgtcccaccaccccaggcagccgtggagatggtggacatccagcagcaaccggagcaacagcaatcccattcccagcagcggttcgacacccccgcgctcaagacgttctccactggccgcacggcctcagtgggtggaaacggcgacgggggcggcaaagtgcggccagttgccggcgccaccggcgacggccagtcggacgagtcgtcgcatcggcaaaacggagcggtggtgctgccgcaggacgtgtcgcagtcgcaggcgacgccactggcgtccgtgtccgactcgatggccgtggaggatgcacaagcgcaacagactgtacacgacgacgagctggccatctggaaacggatatccgatgaagccgccaggatgcaggcgagcgtgcgtgcagaggagctgatggacccggaaaccctggagcagctcgtcgcgccggtggaggcgccaaagccagacacggtccactactcgccggagcacgtggccacggcgcagaggtacgaacaggccctgtccgaggagcccaacagctcgctgctcctggcaaactttgcgcagttcctgtaccaggtgcagggcgacctcgacagggcggagcacttcttcaagagggcggtgcgcgcggagcccgcggacgcggaggcgctggggcggtacgcggcgttcctgtggcaggcgcgcgacgacctcgcggccgcggaggagacgtaccaggaggccatcgccgccgaccccggcaacgcgcaccacgcggcagcctacgcgcacttcctgtggaacacgggcggtgaggacacatgctacccgctcgactgatgcgtgcgtgcgtgcgtccaccgccgctagcgtccagcacagatcatcggtgccctgccctcccataaaaacttcaaacgaaaagaaagagaaaatggtcactccgccgccctgctgaccgctgtccactccactccctcggcaagtccaggctcttctcacggcatgtgcttcagcggccgctcgggatttcctcttcctctgtgattgctcgttttggggtaagtagtgtggagcaatggccaacggaaatccgcggctcgctgctgcttcccgatctggaaacccggccggcgactgcgagttgagaggccgggaacggcggcagcgctcggttgtcggtggggcccgtccacttggcgtcgcacggatgtttcctggtggcacttttgcacgttgtcgtcgagatttgtgagacgccgctttgttcagtggagcaggaaagtatgcatacttatatactggcagcgatttgcttcttgtaactgtgtctgtgtagatcaataaaatgtataagaagctctccattttttttcattcaa

SEQ ID NO: 151347 - DNA, 2482 bp, Zea Mays
gtttacaaatcgaattacttcgtagttttgtctatggattgtgtgtctttttctggttatcaaaccatggtcttctatggtgtgtttcgggaggtctgtccctccatatgtggctagtcgtgtgactacttcatgtaaaaacttttggtgtattggctaatcctccaaaagaggagaagctggacaagtatccattatctaaaaaaataaagtttgcctaaaagttggtgtcgccattgcagcactagcactggtaccagctactctcacgagctgcgtgctgaggttgactccttcccgatcctgaaatataaggctaccgctcgtttcctctctctccccgactccccctcccttccatctcttcccttgcatttagcctcccgcggttcaggaggcgcgggccattcccaaccatcgttgcagtggtggcaggtattggcctgtcgagacccatgggcattcaggtcgcggcggtggtgaccccgccgccgtgctcttccccctcctcctctccggcgtcgccttcgtcctcggccattgccacgtcgccgcggcacgccgttcttggcgccaggctggcgaggagccagtcgtcgctggcttgctggaacgccggtcttggccggcggcgcggcgggcagcacgcgatcaggcgcgctctcagcgcgagcatcgacagcgtcgggagcggcggcggggaggacgaggagttcctgaggaggatccaggagctcgcggcgggtcagcacccgggcgccggcggctgcgggtggccggcgagcgtggagcggagcgcgagcagcgtcgggctgccgctgtctctgcggatgctcaaacggaggaagcagcagcagcagctggagcaggggcggtggaacgagcggctgatcgactgcgccggcgagtccgcgcgcgccgcggtgggccgtgccttctcctcgatggtgctcatcatccgggagctccagagcttcacgctgcagatgcgggaggcggtcgtctacgaggacctgcagggcgtcctggcgcgcgtccacgccgagatgcacgcctccttcgtctggctcttccagcacatcttctccggcaccccggccctcatggtctccctcatgctgctcctcgccaacttcaccgtctactccatgggcgacagcgtcgcggcggctgccagcctcgtcccaccaccccaggcagccgtggagatggtggacatccagcagcaaccggagcaacagcaatcccattcccagcagcggttcgacacccccgcgctcaagacgttctccactggccgcacggcctcagtgggtggaaacggcgacgggggcggcaaagtgcggccagttgccggcgccaccggcgacggccagtcggacgagtcgtcgcatcggcaaaacggagcggtggtgctgccgcaggacgtgtcgcagtcgcaggcgacgccactggcgtccgtgtccgactcgatggccgtggaggatgcacaagcgcaacagactgtacacgacgacgagctggccatctggaaacggatatccgatgaagccgccaggatgcaggcgagcgtgcgtgcagaggagctgatggacccggaaaccctggagcagctcgtcgcgccggtggaggcgccaaagccagacacggtccactactcgccggagcacgtggccacggcgcagagtcgctgacggaccgaccgggcgttcagggcggagcacttcttcaagagggcggtgcgcgcggagcccgcggacgcggaggcgctggggcggtacgcggcgttcctgtggcaggcgcgcgacgacctcgcggccgcggaggagacgtaccaggaggccatcgccgccgaccccggcaacgcgcaccacgcggcagcctacgcgcacttcctgtggaacacgggcggtgaggacacatgctacccgctcgactgatgcgtgcgtgcgtgcgtccaccgccgctagcgtccagcacagatcatcggtgccctgccctcccataaaaacttcaaacgaaaagaaagagaaaatggtcactccgccgccctgctgaccgctgtccactccactccctcggcaagtccaggctcttctcacggcatgtgcttcagcggccgctcgggatttcctcttcctctgtgattgctcgttttggggtaagtagtgtggagcaatggccaacggaaatccgcggctcgctgctgcttcccgatctggaaacccggccggcgactgcgagttgagaggccgggaacggcggcagcgctcggttgtcggtggggcccgtccacttggcgtcgcacggatgtttcctggtggcacttttgcacgttgtcgtcgagatttgtgagacgccgctttgttcagtggagcaggaaagtatgcatacttatatactggcagcgatttgcttcttgtaactgtgtctgtgtagatcaataaaatgtataagaagctctccattttttttcattcaa

SEQ ID NO: 151348 - DNA, 2455 bp, Zea Mays
gtttacaaatcgaattacttcgtagttttgtctatggattgtgtgtctttttctggttatcaaaccatggtcttctatggtgtgtttcgggaggtctgtccctccatatgtggctagtcgtgtgactacttcatgtaaaaacttttggtgtattggctaatcctccaaaagaggagaagctggacaagtatccattatctaaaaaaataaagtttgcctaaaagttggtgtcgccattgcagcactagcactggtaccagctactctcacgagctgcgtgctgaggttgactccttcccgatcctgaaatataaggctaccgctcgtttcctctctctccccgactccccctcccttccatctcttcccttgcatttagcctcccgcggttcaggaggcgcgggccattcccaaccatcgttgcagtggtggcaggtattggcctgtcgagacccatgggcattcaggtcgcggcggtggtgaccccgccgccgtgctcttccccctcctcctctccggcgtcgccttcgtcctcggccattgccacgtcgccgcggcacgccgttcttggcgccaggctggcgaggagccagtcgtcgctggcttgctggaacgccggtcttggccggcggcgcggcgggcagcacgcgatcaggcgcgctctcagcgcgagcatcgacagcgtcgggagcggcggcggggaggacgaggagttcctgaggaggatccaggagctcgcggcgggtcagcacccgggcgccggcggctgcgggtggccggcgagcgtggagcggagcgcgagcagcgtcgggctgccgctgtctctgcggatgctcaaacggaggaagcagcagcagcagctggagcaggggcggtggaacgagcggctgatcgactgcgccggcgagtccgcgcgcgccgcggtgggccgtgccttctcctcgatggtgctcatcatccgggagctccagagcttcacgctgcagatgcgggaggcggtcgtctacgaggacctgcagggcgtcctggcgcgcgtccacgccgagatgcacgcctccttcgtctggctcttccagcacatcttctccggcaccccggccctcatggtctccctcatgctgctcctcgccaacttcaccgtctactccatgggcgacagcgtcgcggcggctgccagcctcgtcccaccaccccaggcagccgtggagatggtggacatccagcagcaaccggagcaacagcaatcccattcccagcagcggttcgacacccccgcgctcaagacgttctccactggccgcacggcctcagtgggtggaaacggcgacgggggcggcaaagtgcggccagttgccggcgccaccggcgacggccagtcggacgagtcgtcgcatcggcaaaacggagcggtggtgctgccgcaggacgtgtcgcagtcgcaggcgacgccactggcgtccgtgtccgactcgatggccgtggaggatgcacaagcgcaacagactgtacacgacgacgagctggccatctggaaacggatatccgatgaagccgccaggatgcaggcgagcgtgcgtgcagaggagctgatggacccggaaaccctggagcagctcgtcgcgccggtggaggcgccaaagccagacacggtccactactcgccggagcacgtggccacggcgcagagggcggagcacttcttcaagagggcggtgcgcgcggagcccgcggacgcggaggcgctggggcggtacgcggcgttcctgtggcaggcgcgcgacgacctcgcggccgcggaggagacgtaccaggaggccatcgccgccgaccccggcaacgcgcaccacgcggcagcctacgcgcacttcctgtggaacacgggcggtgaggacacatgctacccgctcgactgatgcgtgcgtgcgtgcgtccaccgccgctagcgtccagcacagatcatcggtgccctgccctcccataaaaacttcaaacgaaaagaaagagaaaatggtcactccgccgccctgctgaccgctgtccactccactccctcggcaagtccaggctcttctcacggcatgtgcttcagcggccgctcgggatttcctcttcctctgtgattgctcgttttggggtaagtagtgtggagcaatggccaacggaaatccgcggctcgctgctgcttcccgatctggaaacccggccggcgactgcgagttgagaggccgggaacggcggcagcgctcggttgtcggtggggcccgtccacttggcgtcgcacggatgtttcctggtggcacttttgcacgttgtcgtcgagatttgtgagacgccgctttgttcagtggagcaggaaagtatgcatacttatatactggcagcgatttgcttcttgtaactgtgtctgtgtagatcaataaaatgtataagaagctctccattttttttcattcaa

SEQ ID NO: 151349 - DNA, 1979 bp, Zea Mays
gtttacaaatcgaattacttcgtagttttgtctatggattgtgtgtctttttctggttatcaaaccatggtcttctatggtgtgtttcgggaggtctgtccctccatatgtggctagtcgtgtgactacttcatgtaaaaacttttggtgtattggctaatcctccaaaagaggagaagctggacaagtatccattatctaaaaaaataaagtttgcctaaaagttggtgtcgccattgcagcactagcactggtaccagctactctcacgagctgcgtgctgaggttgactccttcccgatcctgaaatataaggctaccgctcgtttcctctctctccccgactccccctcccttccatctcttcccttgcatttagcctcccgcggttcaggaggcgcgggccattcccaaccatcgttgcagtggtggcaggtattggcctgtcgagacccatgggcattcaggtcgcggcggtggtgaccccgccgccgtgctcttccccctcctcctctccggcgtcgccttcgtcctcggccattgccacgtcgccgcggcacgccgttcttggcgccaggctggcgaggagccagtcgtcgctggcttgctggaacgccggtcttggccggcggcgcggcgggcagcacgcgatcaggcgcgctctcagcgcgagcatcgacagcgtcgggagcggcggcggggaggacgaggagttcctgaggaggatccaggagctcgcggcgggtcagcacccgggcgccggcggctgcgggtggccggcgagcgtggagcggagcgcgagcagcgtcgggctgccgctgtctctgcggatgctcaaacggaggaagcagcagcagcagctggagcaggggcggtggaacgagcggctgatcgactgcgccggcgagtccgcgcgcgccgcggtgggccgtgccttctcctcgatggtgctcatcatccgggagctccagagcttcacgctgcagatgcgggaggcggtcgtctacgaggacctgcagggcgtcctggcgcgcgtccacgccgagatgcacgcctccttcgtctggctcttccagcacatcttctccggcaccccggccctcatggtctccctcatgctgctcctcgccaacttcaccgtctactccatgggcgacagcgtcgcggcggctgccagcctcgtcccaccaccccaggcagccgtggagatggtggacatccagcagcaaccggagcaacagcaatcccattcccagcagcggttcgacacccccgcgctcaagacgttctccactggccgcacggcctcagtgggtggaaacggcgacgggggcggcaaagtgcggccagttgccggcgccaccggcgacggccagtcggacgagtcgtcgcatcggcaaaacggagcggtggtgctgccgcaggacgtgtcgcagtcgcaggcgacgccactggcgtccgtgtccgactcgatggccgtggaggatgcacaagcgcaacagactgtacacgacgacgagctggccatctggaaacggatatccgatgaagccgccaggatgcaggcgagcgtgcgtgcagaggagctgatggacccggaaaccctggagcagctcgtcgcgccggtggaggcgccaaagccagacacggtccactactcgccggagcacgtggccacggcgcagaggtacgaacaggccctgtccgaggagcccaacagctcgctgctcctggcaaactttgcgcagttcctgtaccaggtgcagggcgacctcgacaggtgagtcggcgccgactgctttgggtttacaaaatgcagtaatgctgtatggcgcgccgcgcgcgcgtgcagtcgctgacggaccgaccgggcgttcagggcggagcacttcttcaagagggcggtgcgcgcggagcccgcggacgcggaggcgctggggcggtacgcggcgttcctgtggcaggcgcgcgacgacctc

SEQ ID NO: 151350 - DNA, 84 bp, Zea Mays
gaaacagctgaagatcatgcttgctgtggagcctttgataccatcagagggaccaaagattggagagcacatttcggttacacg

SEQ ID NO: 151351 - DNA, 1997 bp, Zea Mays
gcaactcaccaagaacagcgcaatttcttaatcgcagagcctaaacccggtcctcctaattatatcgccacagtgctgtcacaaccaggcgcgatcacaaagcttaaaacgcaccggcatggccactaccgtactggatgccggtgaactgcacttgcacccctatgccgtcgccgcggcggcggcggcattggtgtcgatgtacatggtgtggttctgggcgctgacacgggggctgtccgggccgcggatgtggcccctcgtcggcagcctgcccagcgtcgtcctgaaccgggcgcgggttcacgactggatcgtcgacaacctgcgctccacgggggaagcggccacgtaccagacgtgcatcttgccgatgccgttcctcgcgcggcgccaggggctggtgaccgtgacgtgcaacccgcggaacctggagcacatcctgcgcgcgcgtttcgacaactaccccaagggccccatgtggcaggcggcgttccacgatctcctgggccagggcatcttcaactccgacggcgagacgtggctgctccagcgcaagacggcggcgctcgagttcaccacgcggaccttgcgccaggcgatggcgcgctgggccaaccgcatcatcaagtaccgcctgtggagcatcctcgcggaccattgcgaggccgccgcgagcgtcgacctccaggacctgctcctgcgcctcaccttcgacaacatctgcggcctcacgttcggcaaggaccccgagacactgtcgccggggctgcaggagaaccccttcgccaacgccttcgactccgccaccgaggcgacgctgcagaggttcctgttccccagcttcctgtggcgcgtcaagaaggcgctcggcgtcggcagcgagcggagcctccgcgagagcctcgcgaccgtggaccagtacatgacggaggccatcgcggcgcgcaaggcgacgccgtcggacgacctgctctccaggttcatgaagaagcgcgacggcagcggcagggcgttcccagaggacgtgctccagtgggtcgcgctcaacttcgtgctcgccgggcgcgacacgtcgtccgtcgcgctcagctggttcttctggatgctcatgctgcggcgcgacgtcgagcgcaaggtggtcctggagatcgtctccgtggtcagggagacgcggggcgacgacagcaggaggtggaccgaggagccgctggacttcgacgagctggaccgcctcgtgtacctcaaggcagcgttggcggagacgctgcggctgtacccgtcggtgccgcaggactccaagtacgtggtggaggacgacgtgctgcccgatggcaccgtggtgccggccggctcagcggtcacctactccatctactcggttggacggatggagagcatctgggggaaggactgcgctgagttccggcccgagcgctggctctcggctgacgggacccgtttcgagccgcccaaggacgcgtaccgcttcgtggcgttcaacggcgggcctcggacgtgcctgggcaaggacctggcgtacctgcagatgaagtccatcgcgtccgctgtgctgctgcgccactcggtcgagctcgtccctgggcacaaggtggagcagaagatgtcgctcactctgttcatgaagaacggcctccgcgtgcacgtcaagccgcgggacctcgccggctacgtcgcggcaccggaggacgcaccgcagctgggagcctttgtgatcccgaccacaactgcagcagctgcataagccttgcatgtgcccgcgcacattggctcgggcttcttcctgctgaacttttttctgctatgtgatgtgcctctgcatgccaaagtcgtatcgttttctctgcacccccttcattagactgttaggtttgtggctacctggcgttttatggttgtaactgtgtatttttgtgtggatggatgtggtggtggatttaggataaaggatgaatcatacaaaattattacatata

SEQ ID NO: 151352 - DNA, 2914 bp, Zea Mays
atgtcatcagaaactgcagctgcaccttctgaaactgaagcagctagagcgaatctcctaaaaagaaattcagatgatgttggatgggaatatggtgttcttgttgatgctaacaacaaagacaaggtgaagtgtaagttctgtgacaaggagatgaggggagggatttataggttgaaggagcatcttgcccatgttggaaagaatgtgaagaaatgcacgtctgcaacaccgcaggctctagaggctaaagaaaagtgcaagaaagcaatagaggctgcaaaaaggaagagggaggagaagactgttcgtgagctagaatttagagaggaagtgaatgtatctagggttggagaggagtcagaagaagtcacttgtgttggaagctcacagcctcacaaattagggccaattgacaaatggacacgtgctattgatcctaccaaggttgattcgttcaaacaacagcagctgaacaaggaactatggaaagaaagagagcatgaggtgcacaagtttattgcaagatgggcctataatcatggaatacctttcaatgcatgtgacaatgatgagttcaagcaaatgtgtgaagcaattggacaatttggaccaggacttacacctccaactcaagatgcctttcgaggtagtttgctggaagaagaatatgaaagaaccaagtgtttgctgcaggaacgtgaagccgagaagatgaaaaatgggtgctctattatgaccgatgcttggtcagataggaagaggagaagcataatgaatatatgcactaattgtgctgatggaacctccttcatcagctcaaaagagatgtcagatgtgtcacacacaagcgaagtcatttttgaattagtggacaaagcaattgaagacattggtgaagaaaatgtggtgcaagtagtcactgacaatgcctctaacaacatgggagcaaagaagctattgcttgagaagagaccacaaatattttggacctcttgtgcagctcacacaatcaacttgatgctccaaggaattggcaaattgcctcggttcaggaaagtgattgaccaagcaaagtcatttaccatatttgtgtatggccacacaagaacattggagtgcttgagatacttcacagaggggaaagagctagtgaggccaggagtgactaggtttgcttcatactttctcactttgaatagtatgcaagagaagaaggaccagttaaggaagatggtagttcatagcaggtgggactcattaaaggatgtgaaatcaaaaaaaggaaaagaggccacagctactatatgagtccagcctttggaaggatgtgaagctaatgttggctattttgagccattggtcaaagtcctccgtttagttgatggggatgtgaagccatccatgggtttcctttatggagagctactaaaggcaaaaagagagatcaaagaggcctttggcaatgttgagtctcgattcaaagatgttatggctgtaattgagaagaagatgaatggaagacttgattctccattgcatttgacagcttttttgctgaatccacactatagctatgctaacccatcaatatttgatgagcccaaaatgaatgaagccttcatatcttgtgtcgagcaattttattatcatgatgaggaccaacaagaacaggctgccaactttgaattgaaaaaatttcagaatagagaaggaccatttagcaagaagcttgcaagaacttttcaaaactatgattacaatccaggtagagcatcatggtggcggttatatggaactgaaacaccagctttacaaaagatggctacaaggatattatctttgacatcaagctcttctggttgtgaaagaaattggagtgggtttgaagggatacacactaagaagagaaataggctggctacaacccgcctcaacaagttggtctatattcagttcaataacaggctgatgaataacagagaaaagattaagtcaaagaaaatcactgatgttctcttgtctagtgatacaactgaagctcaaggttttctccaagagggtggagatgattgtgcacaagttgtctttagagatgagaggaagatgagatggaaggtacacggataccttggtctgttattggagaggcagtgggagcagaagaacagcttgagcctcgtagaagtgcaagagtgagagagctctatgaaggagaagagtttgagtctgaagaagaagagtatgaagatgaagatttgtgctacagtgaagatgaaatatgatctggaccatctccatctagtagtgaagccttttgtgatgccctggtcttatgaactgcagctgtgtcactttgtgtctgtgtgtcttcttttgtgtgagacctgaactaagaactatgtgcttgtgttgtcctttatttataaattgtgttctgcacttgtattactgtcctatccacttgtgttgtaattaccagctgctgatatggtgtgcagtgtgctcaactgctcatgaatgggaggctgctgaaatcatccagataagtcacaatttagtgttttctattttttttatgaacagctagttgtctattgactaatttactaactactagctgtcaaaatgtgttgcagccttgcaggagctaggaacatgcaagagtaagctcagctaggaatcagatatgtctactggccttctttttatacttactgtgactcatatagtcatatatagtagttatatacgtatatatagttatatacataatatatatatatataatttatggctatattgccaaaacgcctagaaaatcgcctagaagcgcctaagaccgagtactcccgactaggcgctaggcaatgggtcaccgcctagattccgcctagcgcctagctgaaccttg

SEQ ID NO: 151353 - DNA, 1138 bp, Zea Mays
atatagaagagcggaggccgatccgtgaccgtgagcactctgctctctgctgctcgcttctctcatccgatccatgccaccatagcggtcaaatagactaggtcgaccagcctttttctttcagagccttgtgtctccctttgcctctttttcttttctgctgtgttcccagctcgcagcccttccatgctcttgtcacatacactcgcacgcaggccggcctttgagctgagaccgccgagaggcatagcacaggcaccaccacacaccaccgcaccagcccttgccgcgtataaaacgtctcgtgcgtaggcggcggcgactagctaggctgtccccgtcacgcatacgctacgcgcacactatattgggggggttgcatgatcaggcatcatccgaccgacggcatgaggaggaaagggagcgactgtacacggatcagcccagccgagatcacgcccatgatctccctgccgtccaccaggcggtccgcgggccggacggcgtcggcgccggaccgggaccgggaggaggagcgacctcggcaacggcgagtgcgaggcgcgtgcggctctcgcctgctgcggaccgcgcggtggacggccgcgcgcttctacaggcgagcgcgggtaagcatcgccagggcgtttcggcccccgtcgacgacggcggccaagagagcacaagcaggcgccggcgccgcttcgcccgactgcggcacgccggcgaggcggcgtagtagcaggcggcagcagcagtcgtccgcgccgacgacggtcgtcgtcgtcgatgactcgcacaagagcgaagcggtggaggagtgcatcaggttcatgaactcgtcgtcgaggaagtaccggtagagtctctggaggttccgtgtgcgcgcggatgctagcggcctcgttcttgtatttgttccttcctcttttctatctctctctctctctttttgcctttcatctgtatgcgcatctgttctgatgtacttgagaaacatactggttactttcatcttttgcgtgcccggcctgaaatctcgtattgctagttctattttacatttgagcgaaacagcatttttcatcttattaagcagttatttgcattgtgtaactagcagatacttatttcagcc

SEQ ID NO: 151354 - DNA, 101 bp, Zea Mays
ccgtgttctgtttttctccccgtagcgctcaacgccttggaacccgcatagctctgttcgtctcgtcattaccttgctactgcctccggtgtggagcgatt

SEQ ID NO: 151355 - DNA, 1960 bp, Zea Mays
tcgcagcaaagacggcactgcccaaaccacctctttggccgtagtatcgcacaggcgcacagcacagcacgctctatccactcctccgctgccaccgctactgctgcatcagcagagcaagcggcaggcgctgcagcgcagggcaaccgaacacatggctcagatgatctccaccatgcccatgctggacgccgccccggcggccgcgtccaccattatgcccagactgcaggccgccgccgccgccgccgcctgcctggacgcgccgccctcgggcatcgccgtcgtgtcgaggcagcacgtccgcccggacgccgcgtcggcgccggcggtcggtgacctcgcgctgtccgtctccgacctgcccatgctgtcgtgccactacatccagaaggggctcttcttcccggcgcccgacctgcccatgccctcgctcgtgctgctgctccggtcgtcgctgtcccgggcgctcgccgccgtcccgcccctcgccggccgcctcgtcacgctgcccgacgacgacggccgcgtcgtcgtccgctgcaacgacggcgccggcgtggacttcctgcacgccgtcgcgcccggcctgtcgctcgacgacttcctcgtccctggcgccgacgtgccgaccaagctcaccaaggacctgttccccatggacatggaccggaccgtcagctacgagggccaccgtcgcccgctcgcgtcgttccaggtcaccgtgctcggcgacggcgccgtcttcatcggcatcgtcgccaaccacgccgtcgtggacggcacctccttctggcacttcttcaacacctgggcggccatctgccgcggcgactcgcccaccaggctgccggacttcagccgaaacttctttggcgagtccaccgccgtcctccgcttccccggcggcgtcggcccgtcggtgacattcgacgtggacgcgccgctccgtgagcgcgtctttcgcttcagcgctgacgcagttcgccagctgaaagcggtagccaaccgtcgtccgagccgtggccaagacgccgaggtttacggcaagatggcgcaggaccccaagaacgatcccctagtgcgcgggcgcggcggggaggagatctcgtcgttccagtcgctgtgcgcgcagatatggctcgcggtgacgcgtgcccggaaacgcctggatcccgacgcgacgacgacgttccggatggccgtgaactgccggcatcggctgcggccggccgtctcccctgcctacttcggcaacgccatccagagcgctgtgacgacggcgacggtgacggagctgctggcttgcagcgatctacggtgggccgcgggcaagctgaacgcgagcctcgcggcgtacggcgacggcgcgatccggcgcgcggcggcggcgtggcaggccgcgccccggtgcttcccgctgggcaaccccgacggcgcggtgatcacgatgggaagctccaaccggttcccgatgtacgagggcaatgacttcgggtgggggcggcccctcgcggtgcggagcggccgcgccaacaagttcgacggcaagatgtcggcgttcccgggacgcgccggggacggcagcgtggacatcgaggtgtgcctgaccccggacaccatggcggcgctgctccgcgacaccgagttcatgcagttcgtgtcgggcccgtcgcatctgttgtgatgtactgtgctgtaccggtgccatgcgtgcgggcgcgaatggggccatcgggtcgggcggcgtcagggctgctgttggatttgctcggtcgtccttgcctttagcgagaactagctagttggtgccaaagacattgtatctgtctcgcttcttcgcagtgctgcgtgaaatcgtgttagttagcaactactactagtacttggaatttggaaactactgttatgctgcagcctctgcaagcgatgcaacagcgtggagaatatgaaccgtgta

SEQ ID NO: 151356 - DNA, 249 bp, Zea Mays
atggctggctgcacagcagaggacggaaggcggtggcaggttcatgtatccgccgccttcgtcctcgtcctcgtcctcgccgggcgtcgcgaacgcatcgttgcagccagcggaaaccgatgcgacgctccttgcatgaggcaacaacgtattccatcatccaccattctcgcttgctatatctgcaggaagcgcgcagcaccattctcgacagaaaatgtaaagaaacgaaagcatcaatcaaattga

SEQ ID NO: 151357 - DNA, 1748 bp, Zea Mays
gacgtgcccaccgttgtagcctgtctcgtcgtctgacgcgttcgcggaggatcaccggcggctccggccggccgccgcgtatcagtctacaaaaggcctactcatacacacccgacctgagctgtatggcggttgacacgatggaatcggttgccgtcgtggccgtgccgttcccggcgcagggccatctgaaccagctgctccacctgtcgctgctgctggcgtcgcgggggctgtccgtgcactacgcggcgcccccgccgcacgtccgccaggcgcgcgcgcgcgtgcacggctgggaccccagggcgctcggctccatccacttccacgacctcgacgtgccggcgtacgactcccccgcgccggacctggccgcgccgtcgccgttcccgaaccacctcatgcccatgttcgaggccttcgccgccgcggcgcgcgccccgctcgcggccctcctccagcgcctgtccaccagctaccgccgcgtggccgtcgtcttcgaccgcctcaaccccttcgccgccacggaggcggcgcggctggccaacgccgacgcgttcggcctgcagtgcgtcgccatctcgtacaccgtcgggtggctggacccggggcaccgcctcctcagcgactacggcctccagttcctgccccccgacgactgcatgtccagggagttcgtcgacctggtcttccggatggaggaggaggagcagggcgcgcccgtcgccggcttggtcatgaacacgtgccgcgcgctggagggcgagttcctcgacgccgtcgccgcgcagccgccgttccaaggccagaggttcttcgcggtcggcccgctgaacccgctcctgctcgatgcggacgcccggacggcgccgcggcacgagtgcctggagtggctcgacaggcagccgccggagtcggtgctctacgtctcgttcggcacgacttcgtgcctccacgccgaccaagtcgccgagctcgccgcggcgctcaagggcagcaagcagcgtttcgtctgggtgctgcgcgacgccgaccgcgccgacatatacgccgagtccggcgacagccggcacgccaagttcctgtccgagttcaccagggagaccgagggcacggggctggtcgtcaccgggtgggcgccgcagctggagatcctggcgcacggcgccacggcggccttcatgagccactgcggctggaactcgatcatcgagagcctgagccacgggaagccggtacttgcctggcccatgcactccgaccagccgtgggactcggagcttctgtgcaactacttcaaggcagggctcctggtcaggccctgggagaaacacgctgaaatcataccggcgcaggccatccaaaaggtgatcgaggaggcaatgctatccgacagcgggatggcggtgcggcagcgggccaaggagctcggggaggcggttcgcgcctccgtggctgacggcgggaactcgcgtaaggatctcgacgatttcattggttacatcacaaggtgaaagtatgacgacgacgcatcacgcatgcatgggggatacaatacaaaaactttttgtgctttcagcggttaatcggagaactttgaatcgttcactgcaaataaaaatattactgtcgaaatttttaaatgatacgttgtgtcagagagatacattatagcagtattgtcttcgttctcgaatatcgtccgctgtttcatttttaactaaaataatacagtcacaaaatat

SEQ ID NO: 151358 - DNA, 833 bp, Zea Mays
gaaaccctagctcatttctgttctcctccccagccgccagaatagtatccagccgccaggaagcatggccgacggcgcccttctcatcctttctctgtttctgttcttgcactgccaggccgtgccctttcccactggtgatggcgagtagctcaactggcccttaccgccaacgagtgcgtccccatgtgagggtgcgcggtcgtcggtcggtggccggtgagagctcggctagcccaaaaaaaaacaaaaatatgtcggccatcgccttttgaaccttgcccgacgaccaaaaccggccgcctctcctctctgttcatgctctttctaatctctgtttctaagttccagaccgctcacccaagaaccggtcgccaggagcttgggccgaccgagctatccttttctccctgctccttttggccgttcgccccttctccttctttgtttctgttttttttatttctttctagcatctagccgctagttactctctctatttctgttttttttatttcttgttcttgaatctggcgctatttccctcgccttgcgcgggcaggtcttttccttcaccagagttggtcggccgattatggggcgccgtctttaacctttcgaaactcggatctagtccccgtttactcgaatcccttattgtgtgtgaatgaatgtatgagatggatctaatgtaatattcgggatcgagttatgagctgataaaacgtagatccgagaccttgcgttatttctgttattttctgtgatgattttctgtaccatttctaatttattctgtcatctaggccacagatttaaaatacctcgagcca

SEQ ID NO: 151359 - DNA, 1411 bp, Zea Mays
ggccgccccagctgcctgccactgcaactctgcgagtgccagaaaaaaaatactgccacccaccaccgcgccgccgcgccatggcttccccatccccttcctcgcccctccacccgcaccagcacccacctcctccgaatgttcaccaccaattccaatccctaccgccttcgatgccgccaccgccgccgtcaacggcgctgccaaaggcgctcgaccttgaggttaccgtcgtctgcgggaagcacctgaagaatgtcaactggcgccgtggcgacctccgtgcctacgtcgtggtgtaccttgacccctcccgccgcgccgctacccgccccgacgacggcggcgggtgcaaaccaacctggaacgagcgcctcgtcctcccgcttccgccccacctctccccgcacgacccctccatcctcctgtccctcgacgttttccactctaagccctccgattcgcccaagccgctcgtcggatccgcccgctctcctctccgcgacctcctcttccccgcaaaccctaaccctagccacgatcccgcagcctccgctctcgtcagcctgccactcctccgcccttccggccgcccacaggggaagatccggatccgcgtcgccatccgcgagcgctcgccgccgcctccggagccgcaataccctccgccttccagctccccgtactactttccaccgcctcctcccgcctactcggccccgcctcagtacggatctgaccagtactatcgccctagtggatactactctgcacctgcacctccaccacatccgtatgagtacaccggagggccctctgcaccggtggactacaacaggcaatatgagcagagagggaggactggggccgctggtagtggcagtgggaacggaaggtatggagcaggcactgggcttgcggtgggtgctgtggctggagccctcgggggtctagcaattgatgaagcggtgaagtacaaggaggataagggtgcagaacgggtggaagagaaggtggtacctgctgggagggatgattacagcgagtatcgtggcgactattgaaccgaagtttgtgtgagtgtggaagaaagcgctgtgagttgattcttcttccatgcctatgtgggaataaatccagtgttagtctatggctttccccatgtatgtatatatatttgtgatgttgtgaattattctgatacctataaactactccttcggttcttgtttatttgtcgctgtttagttcaaaaatgaactagcgggcgacaaatattcgagaacggaggtagtacaatgttttatgatgacagatttggtgtgtaacataaatatctcatggcttgctttgatggtgtacttgtgtcttgttgtcttgatgaatgatgatgggtgttatcttttccagc

SEQ ID NO: 151360 - DNA, 109 bp, Zea Mays
ccgaagtttgtgtgagtgtggaagaaagcgctttcaaaaatgaactagcgggcgacaaatattcgagaacggaggtagtacaatgttttatgatgacagatttggtgtg

SEQ ID NO: 151361 - DNA, 864 bp, Zea Mays
atgtacactgaactgaaacggatgccgcattgccgcccatggcgtcttgttctcgatgaacgcagtcgctcggagctgccgcgagctggcagctggacgacgaggctgtgccactcttcatcctcgtcacacgaagggcttcacgtccaccaccagggcgccggcggaggggttggtggtggccgcgggcggcgacgagcgcggggcgtcgcctgggaggttgacggtggtgatgtcgtggatgctggaccgccgcttgtccttgccgccggagctgagccggatgaagtacttctgcgcgtggctggccacctgcgtcggcgtccgggtcgtcacgtacttgcgcgagatgttcctccagtcccctctcccgtacttcctcagccccatcaagaaaagcttgtgctcctcctccgtccaggggacacccttcttccgctcctgcatctcctccgagccgcgcgcgcgcctgaacccgcggtcgccgccgccccagtcctcgagggcgaacccggacggcggcgggaccgagccgctgtagcgcgggaacggcacgagcccgccggcctcgatgacgcccacgtccttctcgagggcgtggtagtggctcctcacgtcgtcgaccgtcttccagggcagcaccgccgccaccttctcccacctgtccggcgcgttccggtcgatctgcgccagcgccttctcgaacagcttgttctcctccgccgtccacgcgtctcctctccgccacaaaaccgagtgcgtgtcctgctgccagaagcagggcgccgtcgccggcaacagcaccggcgtccacgcctccgccatcatcttggtagcgaagaagacgagggagagtcagagtag

SEQ ID NO: 151362 - DNA, 912 bp, Zea Mays
atggcagtattacttttgtatgctgaagctactttcctttttgatactggaggcaagaaaccatggtggatgctctgttgcaattgcaagtcattttttcctcacgaaaaaatttgctctagtttctttagcagatctctgagaactttgttcctggaagaatgtataattgccgatgaagggagcgaatggctccatgaactcgccgtcaacaattctgttctggtgacactgaacttctacatgacagaactcaaagtggagcctgccgatctggagcttcttgcaaggaactgtaaatcattgatttctctgaagatgagtgactgcgatctttcggatttgattggttttctccaaacctccaaggcactgcaagaattcgctggaggcgcttttttcgaagtcggagagtacaccaagtacgaaaaggtcaagctcccacctaggctatgcttcttggggggtcttaccttcatgggtaaaaacgagatgcccgttatctttccgtattctgcgtcgcttaagaaactggacctgcagtacactttcctcaccactgaagatcactgtcagcttatcgctaaatgccccaacctactggttctcgaggtgaggaatgtgattggggatagaggactggaagttgttgccgatacatgcaagaagctacgaaggctgagaatcgagaggggggacgatgaccccggccaagaagagcaggagagtctctcagataggcctgacagccgtagctgtcggctgcgggaactggagtacatagcggcatacgtatccgacatcacaaactctggtttttcacatcagagcgctattggaatcatcagcggctttggaggtgacgatttcagtggcatctttgtcgaagggatggcaaccgcgccagtctaa

SEQ ID NO: 151363 - DNA, 183 bp, Zea Mays
gttgatttggcaaacgatttctgcctacctctcgtcgtcgccggagcccgggaaccatatcccttctgttccgtaacaagaccaaattgcccttgcgtgctgggtttcctcagttggagccaccgaaaatatcgagccccacaaggtgtcacgaagtcattagtcgggccgaaatcgacgcag

SEQ ID NO: 151364 - DNA, 753 bp, Zea Mays
ggaagaacacatggtgcaaatgaggtatataagaatatgatgaaggatggttgcaaaccgaattctcatgtttacaatgcactaataaatggtttctgccgagcatgcaagattagtgatgccgttaaaatttacattgaaatgaccggcaatggttgttgcccaaccatcatcacatataacactctgatagatggtttgtgtaaggctgaaaaataccaagaagcttcaagcttaacaaaggaaatgttagagagaggttttaaaccagatatcagaacttatggttctttgattcgtggcctttgtcgagtcaagaagattgatgctgccctttgtatttggaatgaaattcttgatgcgggtattcaggttgatgtaattgtgcacaacatcttaattcatggtctttgttctgctgggaaagtaaatgatgccttttgtatatatttggagatgaaagaaaagaattgttccccaaatctagtgacctataacacattgatggatggattttatgagattggttctattgatacagcagcatctctttgggctgccattttagataatggtttgaaaccagatattgttacttacaatacaagaattaagggcctgtgctcttgtaataggacacctgaaggagtcctgttattgaatgaggtgcttgcaacaggtattatgccatctgtcattacctggagcatattagtaagagctgtaatcagatacggtccaattcagatatga

SEQ ID NO: 151365 - DNA, 1269 bp, Zea Mays
atggctgtcccactgataatgcaatccggacacgagcagccgaccaggcagctcgccaacaccaaagtaaaaacagccgcgcccgatcggaagccgcaggaggcgagggcgcctgacgacgcgatgccgccggcgcggcccgaccctgagccgccgcccatccaccgcctgctagagctgatcaagtccgagcgcgaccttgccaacgcgctctcgcgcctcgagctccttgtctccacccgaccggccttccctccgccgcagccgctcatcttccacctcctccgccgcctcgccactacctccccgtcgcacctcccgaggctgctggatctcctcccgcgcatgcgccgtcgaccgcgcttctccgagtccgcagcgctcgttgttctatcagccttctcccgcgccctcatgcccgatgcggccctcgccgcgttccgcgatctcccctccctccttggctgcaaccccggcatccgctctcacaacgccctccttgatgcgtttgtccgcgctcgtcggtactccgaggctgatgcgttcttcgcctccctctcccacggtgcctgcggccgccgcctcgctcccaaccttcagacctacaacatcatcctccgctctctttgtgcccgcggagacgtcgatcgcgcagtgtcgctcttcagttctttgcgtcgtcgtggagtggcccccgaccgagtaacctattccaccctcatgtcagggctcgtgaaacatgaccagttggacaacgcgcttgacctgctcgacgaaatgccggactatggagtgcaggctgatgccgtttgttacaatgcgttgctctctgggtgtttcaaaactggcatgttcgagaaagctattaaggtctgggaacagctggtgagggatcctggtgcaagtcctaacctcgccacttacaaagtgatgcttgatggcctgtgtaagcttgggaggtttaaggaggcgggggaggtatggagtaggatggtggctaataatcaccaaccagatacagttacttatgggatcttgattcatgggctctgccgatctggtgatgtggattctgcagcacgggtctactcagacatggtcaaggctgggcttgttcttgatgttgctgtgtataattcactcattaaggggttctgcaaagtgggaagaacaggtgaggcttggaaattctgggattctacaggtttctctggcattcgtcaaataacaacgtataatgtgatgatgaaggggctgttggacagtggc

SEQ ID NO: 151366 - DNA, 169 bp, Zea Mays
ttattttttcagcaagctatattgtagtactaatgtttgatttctccaacttttcttgccaggcaaagtaagaaggcttatcttcttatcgatttctctgaccatctccaaataagtgtgtgagtataccaactctttgaccctctatctaatatatgacttaatgaag

SEQ ID NO: 151367 - DNA, 225 bp, Zea Mays
ggtcattctaaaaaacagacgttacatgaaagaaaatgaacaaacttaggcattttatgaatatactcagtaattccatccttttaggctcagtcattcatgagagtaactacgtaataaaaaaatgaaatatatagcacgagtggttttagttttgttcacaaaaaactcaggaatacaaatatgaaattggttcagtggttaaatcttttaattgaaagatat

SEQ ID NO: 151368 - DNA, 128 bp, Zea Mays
gagtattttaagaagaagaagaatacaaagtccggaaagagaaatgcacatcattatattaagaagaatacgaggtccggaaagagaccaaaaaaacagaaggcaccttacggtggccaaaaacaaag

SEQ ID NO: 151369 - DNA, 2324 bp, Zea Mays
ccgggggccgatgacgacgctgcacatggacccgccggcgccgcccgcgcgccgctcagtgtcgaccagctgcgacctgcacccgggcgagacgttcaccggcttctgcgccgcgtgcctgcgcgagcgcctccacggtctcgaggcgtccgccgccgccgcctccgcgccggggcgcaagtccacatcggccatccggtccctgttcgccaggccgttcgccgccggcagctcgtctgcgtccggccccgcgcagccgccggacctccggcgctgcaagtcgttctcgtgcggccgcggcggcgacgctctggccgcggcggaggtcgccagggcggacgagccgcagcggcattcgtgtgacgtgcgggggcgcagcacgctgtgggcgctgttccaccaggacgaccgtgaccgcgtccgcgacggcacggcgttccgcgcattcccagcctcctcatccaccgccatggctgcgctcgccgtcgacgcggcaccgtgcatccctgacgatttcttggacgaagacatcccagtggtcatggagcccgacgagatagtcccggtggtcgaggagggccctgccgtcgtcccgatggacatttccggcgaggtggcagccgagagcaatgcggcggcccagggaggtaaggccatcaaggaccacatcgatctggagtcggcggagaacaagaaggcttcgcccaaagacctgaaagagatcgccgggagcttctgggccgcctccgtgttcagcaagaagtggcacaagtggcgccgcaagcagaagctcaagaaggaggctaccttgagcaagggcgcggcagcggcaatgccccctccggagaagcgctctaaagcgtcgttctttggccggagccgcctccgtggggaggcaggcaccgagctcgccggtgggcggcgctcgtgcgacaccgacccgcgtttctccctggacgcctcgcgcatgtccatcgatgacgccggcttctcgtgggacgagccccgcgcgtcgtgggatggatacctgttcggcgccggcgccggcgccggcattggcctcgggcgcgcgcctccgccgctctcccgcctccctcccatcctgtccgtcctggaggacacaccggccgacatcgtcgagcgctccgacggccaaatccctgtggaagacgacttcgaccccgagccgccaggtgggtccttgcagaccagagactactacctggactcctccagccgcaggcggcggagcctggaacgatcaagctccgtacgcaggccgtcattcgaggtgacggatccaaggcctatggcgcccgcggtaataaatgggagggtgtccccagttggcggttcagagttctaccacttccaccacgcggaggacttgctcgaccgcggcttcagctccaactccctcatcgaggacatctccgcgagcctggaggcggcgctgtccgggtccggccccgccaagaagccacggcggtggcgcaaggcgtggagcctctgggggctcatccaccgccgcgccgccgggcgcaggggcgggggcccgtcggacatcgccgaccgctccttctccgagccgtggccggacctgcgcgtccgcggagccaaccccaaggtgcagcggtgcaacagcagcctgagcgcgcgcagctcgttcagcagcaacagcggcgggctcggcagctccaggcgcagcagcagctacgtggacgccagcgtgaggcggagggaggagccgcacgcgcagctggagcggaaccgcagcgcgcgctactcgcccgggcgcgccgccacggcggacaacggcatgctgcgtttctacctgacgccgatgcggagcggcactgggcggccacgcggagccggcctgccgaccaaggccggcagcgtgctccgcctgtactaggaggcgccaggttcttttgtctaatctgcatgttcctcgtctggggttcgttcttgtgccataaatcttggtgtattgtaatgtaatctgtcgttcttgttcattttggggattggacatcatctcgcatgtccagtccagtcaagtcacgagggtttcttttccttccgtgagttatttgtggttccatcagcatatatggttcgacctaaatttggagggaaacacgttctaatcctgctgtcgggcctctctagtgtctctttccagacacaaggaccactttgtgtcaactctccatgctcttttggaccgtggggagagacggaggcacgacaacacaaggcggaggccaagaggtttgacacggccatggctggccggtctcgcctcgcgcggctccggc

SEQ ID NO: 151370 - DNA, 177 bp, Zea Mays
atgtacctggaccgcggggactacgcgcacaccgtcaagcgttgcttgcagctcacgctcaacgtgcccagcagcgagaacttgctcaccttcgacgatcgcgttctagaggaaaaatgcttgggtaaaggagtttggcttggaggctatgtggaagagcccgaatggcacaattag

SEQ ID NO: 151371 - DNA, 192 bp, Zea Mays
ggctccaagagtagtcggtcattcccatgttctgccaccattccggttctgccaccgttcccatccattccggttctgccactgttctcattcccatgtctgtcattctcattctttattctgtctttctcattccctcctcctgcagagcccatttccattcccccgtacagcccacgtctagctaaaatt

SEQ ID NO: 151372 - DNA, 1396 bp, Zea Mays
tgttgttacttttgttctgctacttaattggattggtatttacttatacttagtaattgctaataaaattttgacctactttaaaagcaatgttcagctctaaccatcctctttgtccagtctcaacatctgtcgtggcaggaagtttcaactgcagggggtgttagattgttttgtttctatctaagtgttaagggcctacaacccaacccatataacccactagtgttgggtatgtaatactcagcccactatcaatgaattagggttttctttcttccaacatgctctattgacttcttatcaagcttctagcagctttgagctgaaccatactttctagcaaggcccaagaataaaatccatagagtggtttcatactcttcagttcttcactgtgcattgcagataaattattctcttatctgtaacttcaatttgaatagatatgttttcattggcagaccatggcatttgcattgaacaagagaagctacctcttgaggatcaaatatctcagacatggttttgtgggaaatactgtaaagagatattcatagggctgcgtagtcatgtcgggacggataatattcttgacagtgacctttcatggtccatactgagatgcaacaatgacgggcagaagctacattctgttcagaagattgcctgtttggcagaatgtaatatgaaattagcagtggctcttactctattggaggaatgtatcattcgtatggtggatcctagaactggtgtggacatgataccccatgttttatacaacaagggatcaaactttgctcgtgtggattatcagggattctatactgtaatcctggagaaaggtgataaaattttatgtgtggcttctatcagagtacatggaactaaagctgctgagcttccttttattgctacttctgtagactttcgacggcaaggaatgtgccgaattctaatgagcatcattgaaaagatgctctgttcatttaatgttaagatgttggtcctttctgccatcccagagttggttagcacatgggtgtcaggatttggcttcaaacctatcgaagatgctgaaaggaaacaacttcataatgtaaacttgatgttgtttcctggaacatccttactaacaaagagattggatggatttattatggccacaaaaccaggcgcggaaaaggatatacatgaagtttctggagtacctaatcttaagcgtatgcctaatgggaaagcaagtgagcatttcaaactccatgaccttgatttgtccgggacagagtttaaagctgaggtttccgtgaatggtccattcagaacactgaaacatgaatgtggttcagcagcatggtttcagtctactaagttagctgttggggaagtgtga

SEQ ID NO: 151373 - DNA, 437 bp, Zea Mays
aagcaaggaacgagcatatggtgtgtcagccaaagtatttagtatgcatattgttcttgcgcatttgcggagtaaagagatcaggaagtgacacgtttcacgaaaatagaagaatgatgacatgtacatatccgacaattcaatcctactacagagtacagatctattgttggtttaaatttagacaatattatccacgtaacaagtacggggcttcccattatttctaaattctgactacctctagaacattataagcagtgccctgccctccatttcatcttcctatcagaactgatgtctttgtgcttttcctattcatggtgcatcgttgtcatgcggctcgggctcgggctcaggctcaggctcaacaacaggttcaataacttcttccctcatttcaagcgaaatgctgccataaaccacttagactggtg

SEQ ID NO: 151374 - DNA, 1116 bp, Zea Mays
gttgtcaggcaaagcgccactactcacagacagtcacagacacatccaacgagcccgaccgccagagctcgccgccgtcctccgcagacaatccaccatggcgatggtgctggggatggtgctggggaagatcccggtggagacgcccaagcacgaggtcctccacaccggcgccggctacgagatccgcaagtacccgcccagcatcgccgcggagttgacctacgatcccaaggagatgagaggagaccctgatggcgggttcaccgtcctcgccaactacatcggggtcctcggaaagccgcagaacaccaagcccgagaagatcgccatgacggctcccgtcatcaccaccggcagcggcagcggcggcgacggcgagaagatcgccatgacggcccccgtcatcaccaccggcggcggcgagcccgagcccatcgcgatgaccgcgccggtgattacggacgaccagcaggcgccgggcaaggtgacaatgcagttcctgctgccgtccaagtacaccagggtggaggaggcgccgcggccgacggacgagcgggtggtgatccgcgaggtgccggagaggaagttcggcgtggcgaggttcagcggggtggccacggacaggacggtgagggagaaggcgaagggacttaaggccgccctggagaaggacgggtacaccatcaaggtcccgttcgtgctggcgcggtacaacccgtcgttcacgctcccgccgctgcgcaccaacgaggtcatgttccccgtcgagtgatccggcaaggcgccggccaccgcccagctaccggccgcggttcttctgtgaaatgacggcttgaggttcaggaggaactgtgtttgtattttgtatctgtatttctcttgaagttgttgtagaatatgctttatgcaacgagttatggataaattttactactcttcgatcaatgaagaactaaaccctggtgtggatccgtatttcagacagtttttagttataaggtataaagcaatttacatttatattataaagtactatctcggactctcagttattgaatatttacgcttgctagtttatctttaaactaaatcacgataaataaaaagcggagg

SEQ ID NO: 151375 - DNA, 100 bp, Zea Mays
attgatttattcattgtttatgttggctttcaatcaggtgcaaattcatcgctgcatctccaccactaaagtttggttcctcccaactaaagattagtcc

SEQ ID NO: 151376 - DNA, 1804 bp, Zea Mays
gcgagcccacgtacttttacggaaacgcccacaccgccggctcgtcttctcccgaacccgaacccaccctccccgattcaaaccgtcgccgccgtcgccgagagagtcgtgactccccccagcggcggcctgcgaccacccgttacccagccgtcccttctccgcagacagcatttgcgcccaccccgtcccgtcccgtcccctctccctcgcggaggcccgagagctttgagctgcctcggttaagtcgtcgagtggtccacagggccgccgccgcggcggcggttacaaagcggggagggaattccggcgcgggatgccgcgatcccgctgcgatgcgcggatcagaatatgggtgtgacccaaccgggaagtagtggacactgctggtggaggactagggcctggagtgggagggagctgcggccgcgacgatgtacgtcgcgcgggagtctaccaagctgtggaggagggtgtgcgcggagacgacggcggagctgcagctcctgctccagaagtggcaactgctacttgcagggttggtatttcagtacatccatggattagctgctcgaggagtgcattacttgcatcagcccggaccactgctccaggacttgggatttatggcccttccagagcttggccaagagaaaggttatcttagtgaaagcgttttcactttcatcttcatttcctttctgttgtggagttttcacccttttatttatcatagcaaacgtttctacactgttctactatggcgaagggtgctggcatttctagtggcttcgcagtttttaaggattatgacattctattccactcaacttcctggtcccaattatcactgccgtgagggctcaaaactggccactctcccaccaccaaataatgcacttgaagtgctcctgattaactttcctcgtggagtgctttttggttgtggtgatctgatattttcatctcacatgatcttcactctggtttttgtgcgcacataccataaatatggctcaaacaggttgattaagctcctttcttggtttatggctgtaattcagagtcttcttataattgcttctcgcaagcactacactgtcgatgttgttgttgcttggtacacggttaatttggttgtattttttgttgataacaagctgccagaaatggcagaccgtacaaatggattgtctctgcttccagtaagcacaaaggataaagacggcaggatgaaggaagaactccataaacttgagaaggacgggaggatgatggatgagttccataaattgttaaatggaaactctatcgatgctacagattggcgacaacgagtgcagatgaatggaaagcacggagaagacacgagccacactgtcgctgatgccacctctgctgggacatgaccagcagcatttctctgtcaatatcgtcttcaatatccacagatggaatctgcgagcaaaaagaaaattgtgtggtgtgctgcctctatcattgtgtgatgaaaggcttctcaggtacccgcgaggttgcgacattcataacagagcgttttgttgtgctttccatggcacgatgacagtctgttgaagtagtaacggaatcaggaccttttcggcttttctatgaggccgcagctacagttttgcatccttcagacgtttcagtgtcgatgatgttagagagggagattgatgtttgatgtaaatattgattagattcagctgtggcaatgggtaatgaacgactaacttatgctgattggtaatttaacgtgagcagctgttatgaccgcttt

SEQ ID NO: 151377 - DNA, 954 bp, Zea Mays
gcgtgcgtcgttttcaactcgaactagaaacgcgtagaagaattcacatttggcttcaaaagttggaacggacaacgttggggggttgaacaattgttaacactcaagaacgttccgccatagaaaccggccaggctatctgtcagattcaatcgagtcagctcctaaataactaaattggcgttcctatggttggatctgcgctacggcgacggaaggggtcccctggagttcggagatgcccttctgaagcttgcggcgtcaagatctgagttcggtcgtcgcgctggaggagatttcactgagccggcgtgcccctcctattgccgctggagtcgctaaggtggcgcctttgagcattgtcgtccggatgttccttcctggcaagcgctaaagcttctgaagttattctcggaaccagcgactggcgccagaggtttggcactgttcgacagaaaagcaagtgacgatctcgagctgctctatccgccccgcatagcccggaaagcgcaatagatgcaggccgcacccaaggacaccacggtccacgacagtacctcatcgccgccgcacagccaagaatgaggtacatgttgtccggccccgacatgcttaacaacgccaggatgcaggatgccttgatgaagaagcggcggggccggccactgggcaacgccaaagaagcacaagcctttccccttccaagaagtcttgctagagaagggaagcagtaactcgaagcctcaccataagccgtccacacatgctgtgtaccttcgatatttagtggctttgtatggtaacttcatttcctggtttgtgtaaataaaattgttatgaaaagccatcggttactggaagacttgggaatgtacattgcctcgcgcaatctcatctcatcaaatgaatggcccttactggcaccaagacctttagggtgcagtgctttgcttt

SEQ ID NO: 151378 - DNA, 1931 bp, Zea Mays
gtttgaccacctcacctccctccactccgcaaggcctctcgccgtccttctccttcgacattctcgctgcgctggccgcctgcccccccctctccgtccgtaagctttggccggggcagataacaaaatctgatatccctggggcttcgctgcgccgggtcccctaccttctcacctcacgcaaagcagaagggggaggagttttaggaggtggcaagaggagccatcatcgtgtccgtccgtgctgcccattattgtttcttcttccagcggcaatttctggccacagtggcgggcgctatattactcacaggttcgtggccggtcccggtccgtccgagcaagcagagcggcgtgtcgttcatggcggaggagtgcccgcccactggcggcggcgtggagctctggcttccggacgagttcctggacgacgattttttctccgaggaggagaaggcggcggtcgccgccaggagcgagaacgacgacgaggaggaaggggctgacggcctcccgcgccgcagggctgggctcgtcgtcggcaacgcgaagggccagggggacggttcccctgcaaatgcggaggtgttggccggctcgccgcagtcgattctgtgcggcctgcaggactatggggaggacagccccaacggcgcggcgtcgaaggtttgctcgccgccgtcgtcgccgctggagcgcccgccggcggatccctgggacgttcttaaagaggcggctggccaggtggctcgcctgcgcacaaacagcacccccgtgccaacgaacgacgctgccgccaaccaaggactccccgtcacgccgccggcgaagaagctctccgcgccggcggagactgcgaaggccaaccactcccagccgccgaataactcggtggaagagcgacggattcagattgctcgttttaatgccctgaagcagcggcagctcctcaagcaccggcgggatcgggagctcgccgtcgccacggcggcggcgtggggcaccagtgttgctgggtctcatcgtgccgctgccgccgccgccggcgggtacggtgcgccggcgccggcgccggcgccacgtgtcctgagctcgtacgcgtggcccccgctacagaagcagcggcaggcgccggcgtccccggagggcgtgcgcgccctcttcctcgcccctcctcctggcgccacgcgcgagtgcgccggcaccggcgtgttcatccctcgccaggccggcgcccccgctgagcccaagaaaaggccagcgtgctcgcctgttcttctcccggtgcgcgtcgtgcaggcactcaacctgaacgtcgtggacctcggagcccgtcccatctaccctggcggtttcgttctcgatcacgatgcgctggtgagtcggagcaacgccctgctggcgagccgtccgtcccagctccaccatggcgcctcctctcgcgaggtgaatctcccccaggaatggacgtattgaaagcgccgaatcggcaccgctgacgatctcccctaggttgacgggtcatatttgagacaaaaattactgtcgctaatgctagggataggtaggaaggggtagcgtttgctcgcgtgggttagagcgagagtgtgcatagttgtttgactaggaagttggaggcagcaggggttgcatcatcttttgcggtgcagaaacgcatcaggctctcttgcttcttttgttcccgttgcttcaagggtaaggaatctccatctccaggacagaaatagaaccaaccacagtaggagtactaccactccagttttggctgcggcttcatcgttttttatgattgttggagtgcttggttcggttcggcgtggttggagttgggtgcaggaagaacaacaggtgggttgtttcagtgtacttcttgtgagtctagttgcattaacttgacggcttgtgtgccc

SEQ ID NO: 151379 - DNA, 1957 bp, Zea Mays
agtttgaccacctcacctccctccactccgcaaggcctctcgccgtccttctccttcgacattctcgctgcgctggccgcctgcccccccctctccgtccgtaagctttggccggggcagataacaaaatctgatatccctggggcttcgctgcgccgggtcccctaccttctcacctcacgcaaagcagaagggggaggagttttaggaggtggcaagaggagccatcatcgtgtccgtccgtgctgcccattattgtttcttcttccagcggcaatttctggccacagtggcgggcgctatattactcacaggttcgtggccggtcccggtccgtccgagcaagcagagcggcgtgtcgttcatggcggaggagtgcccgcccactggcggcggcgtggagctctggcttccggacgagttcctggacgacgattttttctccgaggaggagaaggcggcggtcgccgccaggagcgagaacgacgacgaggaggaaggggctgacggcctcccgcgccgcagggctgggctcgtcgtcggcaacgcgaagggccagggggacggttcccctgcaaatgcggaggtgttggccggctcgccgcagtcgattctgtgcggcctgcaggactatggggaggacagccccaacggcgcggcgtcgaaggtttgctcgccgccgtcgtcgccgctggagcgcccgccggcggatccctgggacgttcttaaagaggcggctggccaggtggctcgcctgcgcacaaacagcacccccgtgccaacgaacgacgctgccgccaaccaaggactccccgtcacgccgccggcgaagaagctctccgcgccggcggagactgcgaaggccaaccactcccagccgccgaataactcggtggaagagcgacggattcagattgctcgttttaatgccctgaagcagcggcagctcctcaagcaccggcgggatcgggagctcgccgtcgccacggcggcggcgtggggcaccagtgttgctgggtctcatcgtgccgctgccgccgccgccggcgggtacggtgcgccggcgccggcgccggcgccacgtgtcctgagctcgtacgcgtggcccccgctacagaagcagcggcaggcgccggcgtccccggagggcgtgcgcgccctcttcctcgcccctcctcctggcgccacgcgcgagtgcgccggcaccggcgtgttcatccctcgccaggccggcgcccccgctgagcccaagaaaaggccagcgtgctcgcctgttcttctcccggtgcgcgtcgtgcaggcactcaacctgaacgtcgtggacctcggagcccgtcccatctaccctggcggtttcgttctcgatcacgtctacagtcgcatgctcctgtcgtgatcttgcttcgtcagatgcgctggtgagtcggagcaacgccctgctggcgagccgtccgtcccagctccaccatggcgcctcctctcgcgaggtgaatctcccccaggaatggacgtattgaaagcgccgaatcggcaccgctgacgatctcccctaggttgacgggtcatatttgagacaaaaattactgtcgctaatgctagggataggtaggaaggggtagcgtttgctcgcgtgggttagagcgagagtgtgcatagttgtttgactaggaagttggaggcagcaggggttgcatcatcttttgcggtgcagaaacgcatcaggctctcttgcttcttttgttcccgttgcttcaagggtaaggaatctccatctccaggacagaaatagaaccaaccacagtaggagtactaccactccagttttggctgcggcttcatcgttttttatgattgttggagtgcttggttcggttcggcgtggttggagttgggtgcaggaagaacaacaggtgggttgtttcagtgtacttcttgtgagtctagttgcattaacttg

SEQ ID NO: 151380 - DNA, 954 bp, Zea Mays
gcgagcagtctcgagtgatcccccctgtagtccccggccccgtctctccgccgccgcctgcaaccgcttcacgtgcccctcgcaggtcccctttccgaccccaaatggagccgaagaaatcctccgtccagcgccagccccacgccatggagcccaacaagtcctctccatgcggcgccaccgccaccgctcccgccgccaccaccgaagccgagtccccgttgtgcagcttgttctacccgccggcgccggcgccgaccgcgatggtaaaccgcaatgggctccttccagaagtcgtgccgcgaatgcgaaggacggtaaacattcaccgccttatgactcagttgatacgtcgtgttttggatcgtctgtggattatggtggtcgagattatttctacggcagctctacgcccaagaaagtgacagaatcctccactgactacaaagggaacaagaaagatcccgccgcagattctcatggcgattggtggcaaggctcattttattactaagagaacccggtggcctctccttggacaacaaggaacagaaggagattctattgacagttcttctggaacagaagaacagaaagagaaaatagtattgtcggtgtcatagtgaacccgctttcgttcagtggtggtgccattatctagaagcatcatctcagatgtgcaagcaatgaagctgtaggacagtacgaattaggtcgcataagggtccttgtccattgtacgccagtaatatgaagggtttggtgtctaattattagtcaaatgtctgtacagttggatcgtcactccaaagcaaaaaaaaagtgctggagaagcggcggtggcttcacattgtacattttttttatcggatgggatttgactgaagtttggagactgttcttgtcaattacattatacaggtatcgacttcaggggaaaaaacttctatttcc

SEQ ID NO: 151381 - DNA, 1659 bp, Zea Mays
caccgtaaaacacaccgtccacggacgatgggtacggcacgttcccgttgcagatctgacagatcctccgccacgcgccgacccgagcgagggcaaagccaaaaacgcgccagccgtccattggctggccgtcgcgggatacggcggcaagcacgtccagctcagcccacgaccacgacccctttctccctccgcccccgcctccacggtcggcgcgcccattcccgtctcctccctcctccccaccccaccccaccccatcccacctcggatctgctgcctccaccgtttcaatccacatgcgagcggaaatcgagcgggcgaattgaatcccgtcccgttcgggctcggccagcgagcgagcggcgtccggccggctgggcattggttcgtgctcgctcgatcgatcagaaaatggcgcatcgtgtgaacaacgagtacgactacctcttcaagatcgtgctcatcggcgactccggcgtcggcaagtccaacatcctctcgcgattcacgcgcaacgagttctgcctcgagtccaagtccaccatcggcgtcgagttcgctacccgcaacctgcagatagacgggaagactgtcaaggcacagatatgggacacggcagggcaggagaggtaccgcgccatcaccagcgcctactacaggggcgcggtcggagcgcttctagtctacgacatcacaaagaagcaaagcttcgacagcgtccagaggtggctccgagagctccggggtcacgcagacgcgaacatcgtcgttatgatggtcggcaacaagtcggacctgaaccacctcagatcggtccccgaggaagacggccgtgcgttttcggagaaggaaggcctgtccttcctggagacctctgccctggaggcgataaacgtggagaaggcgttccacaccatcctgagcgagatccatcagacggtgagcaagaaggcgctcgccgcgcaagcgtccgcgtccaccaacgggcgctcgatgcaagggaccaccattaacgtcgctgagtcgtccaccgtcacgaaaggctcctgctgctctagctgaagagccgcttccgacaggcctcgtcggaagggttcgtttccgccgagctgcacatcgctgcgtgtaggttgtagatcgcttatttgcgttatctgcctgccttccaaagccattgattgactggtgattcgattctttgtcacatggaactccctctagcgtcatatactacatgtaacctgtcttcctgttgcatttgttgttcaacttacacctgtatacttggataaattgaagagcactttgtatgtactctgtaacacatccttctaataataatctccggtaccattttgacgacctggctgatccaacagttagacagaagcccacaacttgcaaatgtggcactcacagaccacgactcgtagcatcagtgttttttatcgctgtgctccgggacgaaaccgcgacgacgacgacaccagcagcgtagggtccgttccatagatgccatcgccgtcggggctgcttcaccgtggcctctcttccttgagactgtccgcaacgcacactggcttagggctcctctctcctattactgtgctcacacaaggggcaaaaatcaccccttcctcccacatcggcttcccc

SEQ ID NO: 151382 - DNA, 3056 bp, Zea Mays
ctaggtgttctgagacgcgacctctgatcaaatgggcgcgcaacaggtcaccgcagaggacgtctggcatttgggctggtggtacaaaaaaaaatctatcaaagcctgagaggccgtagcacaaccaccttccctgccctgccctcagtgccctgtcaaggatattttaggcaatgcgttgcccaattccacaggccacgtcacacgtggtgcggctctaaccgtatcgtccctgcccggtggggccgcggtcgcgtagcagacaccgacgggccgtcacgggccctgctcgccgcagacgatccaggggccaggcggcgcgcgggtgatctcgccacggcgcgttttgtgtggcccgcccgtgacgggaggcggaagagggaagaggcgacgcgacgcggctctataaaaccgcgcctccaaccagtactcccccggcaccctagagagattctgttttcgcaccagcgccggcacaggcaacgcagcaccgcaccgagccgagccacttagcgagcgagggaacagcctccacggcgaggagagaatggggagaggagggatcggaggcgcggcggccatggccatggccatggagaccgccgatcctgcccgtgcattcgtgaaggacgtcaagcgaatcattatcaaggtgggcacggctgttgtcactggcatgaatggccgattggccatggggaggctcggttctctctgtgaacaggtgaagcaactgaattttcaagggtatgaggtgattctggtaacctcaggagctgttggtgttgggaggcagaggctccaataccgtaaacttatccatagcagcttcgcagatctgcaaaatcctcagatgaactttgatggaaaggcatgtgctgctgttggtcaaagtgtcctgatggcgatctatgacacattatttagccaacttgatgtaacgtcatctcaacttcttgtgacggatcgtgatttcaaggatccaagttttggggaccagctccgtgagactgttttttcactgttagatcttaaagtagtacccttatttaatgagaatgatgccatcagtacccggagacagccatatgaggattcatctggtatattctgggataatgacagtctagcagctctgttggcagcagaacttaatgctgatcttcttatcatgcttagtgatgtggaaggactctatagtggtccaccaagcgatcctcagtcaaagattatccacacatatgtcaatgaaaagcatgggaagctaattagttttggagagaagtctagtgttggaagaggtggcatgcaagctaaagtgtctgctgctgctaatgctgcatcaaaaggtgtacctgttgtcattgcaagtgggtttgcaacggatagcatcattacagttctcaaaggcgaaaagatcggtacacttttccacaacgaagcaaatttgtgggcatgttccaaggaagctacagcccgagagatggcagttgcggcaagagactgttcgaggcgtctacagaagttgtcatcagaggaacgcaaacagattttgctagatattgctgatgctctggaagcaaatgaggatgcaattaggtctgaaaatgatgccgatgttgaggcagcacaagttgctggttatgaaaagtcgttggttgctaggatgaccctaaagccaggaaagataacaaatcttgcaagatccattcgtaaaactgctgacatggaggaccctatttcccatacattgaaaagaacagaggttgctaaagatctggtttttgagaaagcatattgcccattgggtgttcttctcattatttttgagtctcgtcctgatgcattggtccagattgcatctctagcgatccgaagtggtaatggtctccttttgaaaggagggaaagaagttatgagatcaaatgcaatattacacaaggtcataactggagttattcccgatactgttggcaaaaagctcataggccttgtgactagcaaagaggaaattgctgatctactagcgcttgatgatgtaattgatcttgtcattccgagaggtagtaagtctctagtttcccaaatcaaagcaacaactaagattccagttttaggtcatgctgatggtatctgccatgtttacattgacaaatcagccgacatggatatggcaaaacggatagtattggatgctaagattgattatccagcagcatgtaatgcaatggaaacactacttgttcataaagatcttaacaagagtgagggacttgatgatctattagtggaacttgaaaaggaaggagtagttatttatggtggacctgttgcacatgacaagttgaaagtaccaaaggtagactcatttcgtcatgagtatagctcaatggcatgcacagtcgaatttgttgatgatgtgcagtcagctatcgatcacataaatcgttatggaagtgcacacacagactgcatcatcacaactgatagaagtgctgcagaggcctttctgcagcaagttgatagtgccgctgtgtttcataatgcaagcacaaggttttgtgatgggacgcgttttgggctaggtgctgaggttggcataagtacagagcgcatacatgcccgcggacctgttggagttgatggacttctaactactcgctgcattttgcgcggtagtggacaagtggtgaatggtgacaagggagtggtttacacccacaaggatcttcctttgcaatgaggcaaataacctccgttgtggtcgtaacgaatggctggactccccttttaagtacccttttcttttattccatgctacaaagtttggtgtcgtaacaagcagaatgcctatttagtaggcattgatgtaatcagaccattttgtcgtggtgttccttgtcgtataaaacatccgagacatctgtattagaggcgcggtagctagttgatacgcgattgttctggatgaaatttggatctgttccaatgcaatgataatgcatgtgtgatgaggtcctaaaaatctctgaatcgggattttggctcaaggagaa

SEQ ID NO: 151383 - DNA, 3031 bp, Zea Mays
ctaggtgttctgagacgcgacctctgatcaaatgggcgcgcaacaggtcaccgcagaggacgtctggcatttgggctggtggtacaaaaaaaaatctatcaaagcctgagaggccgtagcacaaccaccttccctgccctgccctcagtgccctgtcaaggatattttaggcaatgcgttgcccaattccacaggccacgtcacacgtggtgcggctctaaccgtatcgtccctgcccggtggggccgcggtcgcgtagcagacaccgacgggccgtcacgggccctgctcgccgcagacgatccaggggccaggcggcgcgcgggtgatctcgccacggcgcgttttgtgtggcccgcccgtgacgggaggcggaagagggaagaggcgacgcgacgcggctctataaaaccgcgcctccaaccagtactcccccggcaccctagagagattctgttttcgcaccagcgccggcacaggcaacgcagcaccgcaccgagccgagccacttagcgagcgagggaacagcctccacggcgaggagagaatggggagaggagggatcggaggcgcggcggccatggccatggccatggagaccgccgatcctgcccgtgcattcgtgaaggacgtcaagcgaatcattatcaaggtgggcacggctgttgtcactggcatgaatggccgattggccatggggaggctcggttctctctgtgaacaggtgaagcaactgaattttcaagggtatgaggtgattctggtaacctcaggagctgttggtgttgggaggcagaggctccaataccgtaaacttatccatagcagcttcgcagatctgcaaaatcctcagatgaactttgatggaaaggcatgtgctgctgttggtcaaagtgtcctgatggcgatctatgacacattatttagccaacttgatgtaacgtcatctcaacttcttgtgacggatcgtgatttcaaggatccaagttttggggaccagctccgtgagactgttttttcactgttagatcttaaagtagtacccttatttaatgagaatgatgccatcagtacccggagacagccatatgaggattcatctggtatattctgggataatgacagtctagcagctctgttggcagcagaacttaatgctgatcttcttatcatgcttagtgatgtggaaggactctatagtggtccaccaagcgatcctcagtcaaagattatccacacatatgtcaatgaaaagcatgggaagctaattagttttggagagaagtctagtgttggaagaggtggcatgcaagctaaagtgtctgctgctgctaatgctgcatcaaaaggtgtacctgttgtcattgcaagtgggtttgcaacggatagcatcattacagttctcaaaggcgaaaagatcggtacacttttccacaacgaagcaaatttgtgggcatgttccaaggaagctacagcccgagagatggcagttgcggcaagagactgttcgaggcgtctacagaagttgtcatcagaggaacgcaaacagattttgctagatattgctgatgctctggaagcaaatgaggatgcaattaggtctgaaaatgatgccgatgttgaggcagcacaagttgctggttatgaaaagtcgttggttgctaggatgaccctaaagccaggaaagataacaaatcttgcaagatccattcgtaaaactgctgacatggaggaccctatttcccatacattgaaaagaacagaggttgctaaagatctggtttttgagaaagcatattgcccattgggtgttcttctcattatttttgagtctcgtcctgatgcattggtccagattgcatctctagcgatccgaagtggtaatggtctccttttgaaaggagggaaagaagttatgagatcaaatgcaatattacacaaggtcataactggagttattcccgatactgttggcaaaaagctcataggccttgtgactagcaaagaggaaattgctgatctactagcgcttgatgatgtaattgatcttgtcattccgagaggtagtaagtctctagtttcccaaatcaaagcaacaactaagattccagttttaggtcatgctgatggtatctgccatgtttacattgacaaatcagccgacatggatatggcaaaacggatagtattggatgctaagattgattatccagcagcatgtaatgcaatggaaacactacttgttcataaagatcttaacaagagtgagggacttgatgatctattagtggaacttgaaaaggaaggagtagttatttatggtggacctgttgcacatgacaagttgaaagtaccaaaggtagactcatttcgtcatgagtatagctcaatggcatgcacagtcgaatttgttgatgatgtgcagtcagctatcgatcacataaatcgttatggaagtgcacacacagactgcatcatcacaactgatagaagtgctgcagaggcctttctgcagcaagttgatagtgccgctgtgtttcataatgcaagcacaaggttttgtgatgggacgcgttttgggctaggtgctgaggttggcataagtacagagcgcatacatgcccgcggacctgttggagttgatggacttctaactactcgctgcattttgcgcggtagtggacaagtggtgaatggtgacaagggagtggtttacacccacaaggatcttcctttgcaatgaggcaagcaaataacctccgttgtggtcgtaacgaatggctggactccccttttaagtacccttttcttttattccatgctacaaagtttggtgtcgtaacaagcagaatgcctatttagtaggcattgatgtaatcagaccattttgtcgtggtgttccttgtcgtataaaacatccgagacatctgtattagaggcgcggtagctagttgatacgcgattgttctggatgaaatttggatctgttccaatgcaatgataatgcatgtgtgatgaggtcctaaaaatc

SEQ ID NO: 151384 - DNA, 1641 bp, Zea Mays
agcacccccgactccccgaggcctcccgtcccctcctcgacgacacccacaaacccatcccatctcccaacacctccgccggtccgccccagtctctcccactcccagcgcccaccggcaccgccgccgcacgcgacccctcgtccccgtcccccgccccgaccgcacgccggaatggctgcgggctcgtccgcggtgtgggccgcgcaacaccccgcctgcagcggcggcaagttccaccacctgtcgccgtcccactcccactgccgcccgcgccgcgccctccagacgccgcccgcgctccccgcgagacggagcggcgcctccccgccgcgcgccagcctcgccgccgccgcgcctgcggtggcggtgaggacggcttcggaggaggccgtgtacgaggtggtgctgcggcaggcggcactcgtggaggccgcgacgccacagaggcgccggacgcggcagccgaggtgggcggaggaagaggaggaggagagggtcctcggctggggcctcctcggcgacgcctacgaccgctgcggcgaggtctgcgccgagtacgccaagaccttttacctcggcacgcagctcatgactcctgagcggcgcaaagccgtctgggcgatctacgtgtggtgcagaagaactgacgagctagtggacggtcccaacgcgtcctacatcacgccgaccgctctcgaccgctgggagaagcggctggaggatctctttgagggccgcccgtacgacatgtacgacgccgcgctctcggacactgtgtccaagttccccgtcgatatccagccgttcaaagacatggtccaaggaatgaggctggacctgtggaagtcgaggtacatgaccttcgacgagctctacctctactgctactacgtcgccggcaccgtcggcctcatgacggtgcctgtcatgggcatcgctcccgactccaaggcctcgaccgagagcgtgtacaatgctgctctggctctcggcatcgctaaccagctgacgaatattctcagagacgtgggcgaagatgcgaggagggggagaatataccttccgttggacgagcttgcgcaggcaggtctcacggaagaggacatattcagagggaaagtgaccggcaagtggaggaggttcatgaagggccagatccagcgtgccaggctcttctttgatgaggcggagaagggcgtcacccatctcgactctgctagcagatggccggtgctcgcgtctctgtggctgtacaggcagatccttgatgccattgaggcaaacgactacaacaacttcaccaagcgtgcgtacgtcggcaaggccaagaagctgctgtcgttaccgcttgcatatgcaagggctgcggttgcaccatgaaccatccgtagatcacatcttttttttcttttcttttccaaacccaccttgttttgccccacccttccttttttttttgtatataatcagcttcagctgcctgcatggcataagccttgcctgttcagggtgattccatgtccctaaatactcaatcagctcttgttacaaggaatggagaattagaattcgagaagcgtatatatttttgtcaaggataacttatctctgcaacataataatattggaaaattgggt

SEQ ID NO: 151385 - DNA, 1171 bp, Zea Mays
tttttttattgtctttgaccatatgggcgcctgcgggtagcagcagccagcaggcagcagattcatgattgataacactgatatcttgtcatcggcatctctttctcctttctgagacgatatcacgtacgtacctcatcccggctcatgttttacgtttcaggcacgcagctcatgactcctgagcggcgcaaagccgtctgggcgatctacgtgtggtgcagaagaactgacgagctagtggacggtcccaacgcgtcctacatcacgccgaccgctctcgaccgctgggagaagcggctggaggatctctttgagggccgcccgtacgacatgtacgacgccgcgctctcggacactgtgtccaagttccccgtcgatatccagccgttcaaagacatggtccaaggaatgaggctggacctgtggaagtcgaggtacatgaccttcgacgagctctacctctactgctactacgtcgccggcaccgtcggcctcatgacggtgcctgtcatgggcatcgctcccgactccaaggcctcgaccgagagcgtgtacaatgctgctctggctctcggcatcgctaaccagctgacgaatattctcagagacgtgggcgaagatgcgaggagggggagaatataccttccgttggacgagcttgcgcaggcaggtctcacggaagaggacatattcagagggaaagtgaccggcaagtggaggaggttcatgaagggccagatccagcgtgccaggctcttctttgatgaggcggagaagggcgtcacccatctcgactctgctagcagatggccggtgctcgcgtctctgtggctgtacaggcagatccttgatgccattgaggcaaacgactacaacaacttcaccaagcgtgcgtacgtcggcaaggccaagaagctgctgtcgttaccgcttgcatatgcaagggctgcggttgcaccatgaaccatccgtagatcacatcttttttttcttttcttttccaaacccaccttgttttgccccacccttccttttttttttgtatataatcagcttcagctgcctgcatggcataagccttgcctgttcagggtgattccatgtccctaaatactcaatcagctcttgttacaaggaatggagaattagaattcgagaagcgtatata

SEQ ID NO: 151386 - DNA, 1703 bp, Zea Mays
agcacccccgactccccgaggcctcccgtcccctcctcgacgacacccacaaacccatcccatctcccaacacctccgccggtccgccccagtctctcccactcccagcgcccaccggcaccgccgccgcacgcgacccctcgtccccgtcccccgccccgaccgcacgccggaatggctgcgggctcgtccgcggtgtgggccgcgcaacaccccgcctgcagcggcggcaagttccaccacctgtcgccgtcccactcccactgccgcccgcgccgcgccctccagacgccgcccgcgctccccgcgagacggagcggcgcctccccgccgcgcgccagcctcgccgccgccgcgcctgcggtggcggtgaggacggcttcggaggaggccgtgtacgaggtggtgctgcggcaggcggcactcgtggaggccgcgacgccacagaggcgccggacgcggcagccgaggtgggcggaggaagaggaggaggagagggtcctcggctggggcctcctcggcgacgcctacgaccgctgcggcgaggtctgcgccgagtacgccaagaccttttacctcgcagccagcaggcagcagattcatgattgataacactgatatcttgtcatcggcatctctttctcctttctgagacgatatcacgtacgtacctcatcccggctcatgttttacgtttcaggcacgcagctcatgactcctgagcggcgcaaagccgtctgggcgatctacgtgtggtgcagaagaactgacgagctagtggacggtcccaacgcgtcctacatcacgccgaccgctctcgaccgctgggagaagcggctggaggatctctttgagggccgcccgtacgacatgtacgacgccgcgctctcggacactgtgtccaagttccccgtcgatatccagccgttcaaagacatggtccaaggaatgaggctggacctgtggaagtcgaggtacatgaccttcgacgagctctacctctactgctactacgtcgccggcaccgtcggcctcatgacggtgcctgtcatgggcatcgctcccgactccaaggcctcgaccgagagcgtgtacaatgctgctctggctctcggcatcgctaaccagctgacgaatattctcagagacgtgggcgaagatgcgaggagggggagaatataccttccgttggacgagcttgcgcaggcaggtctcacggaagaggacatattcagagggaaagtgaccggcaagtggaggaggttcatgaagggccagatccagcgtgccaggctcttctttgatgaggcggagaagggcgtcacccatctcgactctgctagcagatggccggtgctcgcgtctctgtggctgtacaggcagatccttgatgccattgaggcaaacgactacaacaacttcaccaagcgtgcgtacgtcggcaaggccaagaagctgctgtcgttaccgcttgcatatgcaagggctgcggttgcaccatgaaccatccgtagatcacatcttttttttcttttcttttccaaacccaccttgttttgccccacccttccttttttttttgtatataatcagcttcagctgcctgcatggcataagccttgcctgttcagggtgattccatgtccctaaatactcaatcagctcttgttacaaggaatggagaattagaattcgagaagcgt

SEQ ID NO: 151387 - DNA, 1744 bp, Zea Mays
gaggagaagccaatcgccagaagcggcaagccttgcctcgcgcaccggtctggttctggtgggtgccctcttcgccggtggccggaaggcgagggggaagccggaggacgctgagggcgggcgaggccgccgtccccagatctcacttccgccgcccgcccgccccgcttttgcagggattgagagaggaaggaaggaaaggaggtgcttcaatatgaaggcgctcattcttgtcgggggtttcggaacccgccttcggcctttgactcttagcttcccgaagccccttgtggattttgcaaacaagcccatgattctgcatcagatcgaagctttgaaagaagttggggtcacagaggtggttttggccatcaactaccgcccagaggtaatgattaatttcttgaaggactttgaggataaacttggcatcacaattacatgctcccaagagactgagcccttaggaactgctggccctcttgctctagcaagggacaagcttgcggatggatctggcgagccattctttgtcctcaacagcgatgtcataagcgaatacccatttgctgaactcatcaaatttcacaagtctcatggtggtgaggcaacaattatggtcactaaggtggatgaaccatctaaatatggtgttgtggttatggaggaggcaactggcagggtggaaaggtttgttgagaagccaaaaatatttgtgggcaacaagatcaatgctgggatttacttgctgaacccatctgtccttgaccgcattgaactgaggccaacatcaattgagaaagaggtcttccctcaaattgcagctgatcaacagctctatgcaatggtccttcctggtttttggatggatgttggtcagccaagggactacattactggattgcgtctttatctagactcgcttaggaagaaatcggctgccaggctagctgctggagcgcatgttgttggcaacgtgctggtgcatgagagcgccaagatcggagaaggttgcctgatcggtcctgatgtcgcaattggacctggatgtgtcgtggaggatggcgtgaggctttcccgctgcactgtcatgcgtggtgtgcgtatcaagaagcatgcctgcatctcgaacagcattatcgggtggcactcaactgttggacaatgggcacggatagagaatatgaccatcctgggcgaggatgttcatgtgtgtgacgaggtatacagtaatggcggtgttgttctcccacacaaagagatcaagtcaagcattctgaagcctgagatcgtcatgtaagagttctccagttttaactacagtacattcttaagttcttcgagtaagtgaggattgcagatcccctttttataagtgatatctattggtatctttggcctaattcaaacagcttcagacatgttcgcttgctaaactgttgacaatgtatccttgttctttgttgaaaagttttgtacttgtagtgtcaatcatatttcacaaagtggttgtcatataatactgagaggttttggacccttgatctgcagaagttcaataccatagtagcaagaataagtttatttttaaatgttgtccaatgtaactttcagcagtaatgtttgtgtgctaaatgctctcccggagaaatgtacacgctgcccacgtgtgatgtaacttactatgttcacgtatttaatcttgtaccaatgaatatattgtcggtgtctttaaaatcattct

SEQ ID NO: 151388 - DNA, 1777 bp, Zea Mays
gaggccaaccgttgaggagaagccaatcgccagaagcggcaagccttgcctcgcgcaccggtctggttctggtgggtgccctcttcgccggtggccggaaggcgagggggaagccggaggacgctgagggcgggcgaggccgccgtccccagatctcacttccgccgcccgcccgccccgcttttggtactactcttcttctgttccagggattgagagaggaaggaaggaaaggaggtgcttcaatatgaaggcgctcattcttgtcgggggtttcggaacccgccttcggcctttgactcttagcttcccgaagccccttgtggattttgcaaacaagcccatgattctgcatcagatcgaagctttgaaagaagttggggtcacagaggtggttttggccatcaactaccgcccagaggtaatgattaatttcttgaaggactttgaggataaacttggcatcacaattacatgctcccaagagactgagcccttaggaactgctggccctcttgctctagcaagggacaagcttgcggatggatctggcgagccattctttgtcctcaacagcgatgtcataagcgaatacccatttgctgaactcatcaaatttcacaagtctcatggtggtgaggcaacaattatggtcactaaggtggatgaaccatctaaatatggtgttgtggttatggaggaggcaactggcagggtggaaaggtttgttgagaagccaaaaatatttgtgggcaacaagatcaatgctgggatttacttgctgaacccatctgtccttgaccgcattgaactgaggccaacatcaattgagaaagaggtcttccctcaaattgcagctgatcaacagctctatgcaatggtccttcctggtttttggatggatgttggtcagccaagggactacattactggattgcgtctttatctagactcgcttaggaagaaatcggctgccaggctagctgctggagcgcatgttgttggcaacgtgctggtgcatgagagcgccaagatcggagaaggttgcctgatcggtcctgatgtcgcaattggacctggatgtgtcgtggaggatggcgtgaggctttcccgctgcactgtcatgcgtggtgtgcgtatcaagaagcatgcctgcatctcgaacagcattatcgggtggcactcaactgttggacaatgggcacggatagagaatatgaccatcctgggcgaggatgttcatgtgtgtgacgaggtatacagtaatggcggtgttgttctcccacacaaagagatcaagtcaagcattctgaagcctgagatcgtcatgtaagagttctccagttttaactacagtacattcttaagttcttcgagtaagtgaggattgcagatcccctttttataagtgatatctattggtatctttggcctaattcaaacagcttcagacatgttcgcttgctaaactgttgacaatgtatccttgttctttgttgaaaagttttgtacttgtagtgtcaatcatatttcacaaagtggttgtcatataatactgagaggttttggacccttgatctgcagaagttcaataccatagtagcaagaataagtttatttttaaatgttgtccaatgtaactttcagcagtaatgtttgtgtgctaaatgctctcccggagaaatgtacacgctgcccacgtgtgatgtaacttactatgttcacgtatttaatcttgtaccaatgaatatattgtcggtgtctttaaaatcattct

SEQ ID NO: 151389 - DNA, 1774 bp, Zea Mays
gaggccaaccgttgaggagaagccaatcgccagaagcggcaagccttgcctcgcgcaccggtctggttctggtgggtgccctcttcgccggtggccggaaggcgagggggaagccggaggacgctgagggcgggcgaggccgccgtccccagatctcacttccgccgcccgcccgccccgcttttggtactactcttcttctgttcggattgagagaggaaggaaggaaaggaggtgcttcaatatgaaggcgctcattcttgtcgggggtttcggaacccgccttcggcctttgactcttagcttcccgaagccccttgtggattttgcaaacaagcccatgattctgcatcagatcgaagctttgaaagaagttggggtcacagaggtggttttggccatcaactaccgcccagaggtaatgattaatttcttgaaggactttgaggataaacttggcatcacaattacatgctcccaagagactgagcccttaggaactgctggccctcttgctctagcaagggacaagcttgcggatggatctggcgagccattctttgtcctcaacagcgatgtcataagcgaatacccatttgctgaactcatcaaatttcacaagtctcatggtggtgaggcaacaattatggtcactaaggtggatgaaccatctaaatatggtgttgtggttatggaggaggcaactggcagggtggaaaggtttgttgagaagccaaaaatatttgtgggcaacaagatcaatgctgggatttacttgctgaacccatctgtccttgaccgcattgaactgaggccaacatcaattgagaaagaggtcttccctcaaattgcagctgatcaacagctctatgcaatggtccttcctggtttttggatggatgttggtcagccaagggactacattactggattgcgtctttatctagactcgcttaggaagaaatcggctgccaggctagctgctggagcgcatgttgttggcaacgtgctggtgcatgagagcgccaagatcggagaaggttgcctgatcggtcctgatgtcgcaattggacctggatgtgtcgtggaggatggcgtgaggctttcccgctgcactgtcatgcgtggtgtgcgtatcaagaagcatgcctgcatctcgaacagcattatcgggtggcactcaactgttggacaatgggcacggatagagaatatgaccatcctgggcgaggatgttcatgtgtgtgacgaggtatacagtaatggcggtgttgttctcccacacaaagagatcaagtcaagcattctgaagcctgagatcgtcatgtaagagttctccagttttaactacagtacattcttaagttcttcgagtaagtgaggattgcagatcccctttttataagtgatatctattggtatctttggcctaattcaaacagcttcagacatgttcgcttgctaaactgttgacaatgtatccttgttctttgttgaaaagttttgtacttgtagtgtcaatcatatttcacaaagtggttgtcatataatactgagaggttttggacccttgatctgcagaagttcaataccatagtagcaagaataagtttatttttaaatgttgtccaatgtaactttcagcagtaatgtttgtgtgctaaatgctctcccggagaaatgtacacgctgcccacgtgtgatgtaacttactatgttcacgtatttaatcttgtaccaatgaatatattgtcggtgtctttaaaatcattct

SEQ ID NO: 151390 - DNA, 1754 bp, Zea Mays
gaggccaaccgttgaggagaagccaatcgccagaagcggcaagccttgcctcgcgcaccggtctggttctggtgggtgccctcttcgccggtggccggaaggcgagggggaagccggaggacgctgagggcgggcgaggccgccgtccccagatctcacttccgccgcccgcccgccccgcttttgggattgagagaggaaggaaggaaaggaggtgcttcaatatgaaggcgctcattcttgtcgggggtttcggaacccgccttcggcctttgactcttagcttcccgaagccccttgtggattttgcaaacaagcccatgattctgcatcagatcgaagctttgaaagaagttggggtcacagaggtggttttggccatcaactaccgcccagaggtaatgattaatttcttgaaggactttgaggataaacttggcatcacaattacatgctcccaagagactgagcccttaggaactgctggccctcttgctctagcaagggacaagcttgcggatggatctggcgagccattctttgtcctcaacagcgatgtcataagcgaatacccatttgctgaactcatcaaatttcacaagtctcatggtggtgaggcaacaattatggtcactaaggtggatgaaccatctaaatatggtgttgtggttatggaggaggcaactggcagggtggaaaggtttgttgagaagccaaaaatatttgtgggcaacaagatcaatgctgggatttacttgctgaacccatctgtccttgaccgcattgaactgaggccaacatcaattgagaaagaggtcttccctcaaattgcagctgatcaacagctctatgcaatggtccttcctggtttttggatggatgttggtcagccaagggactacattactggattgcgtctttatctagactcgcttaggaagaaatcggctgccaggctagctgctggagcgcatgttgttggcaacgtgctggtgcatgagagcgccaagatcggagaaggttgcctgatcggtcctgatgtcgcaattggacctggatgtgtcgtggaggatggcgtgaggctttcccgctgcactgtcatgcgtggtgtgcgtatcaagaagcatgcctgcatctcgaacagcattatcgggtggcactcaactgttggacaatgggcacggatagagaatatgaccatcctgggcgaggatgttcatgtgtgtgacgaggtatacagtaatggcggtgttgttctcccacacaaagagatcaagtcaagcattctgaagcctgagatcgtcatgtaagagttctccagttttaactacagtacattcttaagttcttcgagtaagtgaggattgcagatcccctttttataagtgatatctattggtatctttggcctaattcaaacagcttcagacatgttcgcttgctaaactgttgacaatgtatccttgttctttgttgaaaagttttgtacttgtagtgtcaatcatatttcacaaagtggttgtcatataatactgagaggttttggacccttgatctgcagaagttcaataccatagtagcaagaataagtttatttttaaatgttgtccaatgtaactttcagcagtaatgtttgtgtgctaaatgctctcccggagaaatgtacacgctgcccacgtgtgatgtaacttactatgttcacgtatttaatcttgtaccaatgaatatattgtcggtgtctttaaaatcattct

SEQ ID NO: 151391 - DNA, 1431 bp, Zea Mays
atcgattgttcccattttccgattctttggtcttgttctgatgcggacttcacagctctgatgttacctttcttatatctggcttgccctgtgtggcagcagggattgagagaggaaggaaggaaaggaggtgcttcaatatgaaggcgctcattcttgtcgggggtttcggaacccgccttcggcctttgactcttagcttcccgaagccccttgtggattttgcaaacaagcccatgattctgcatcagatcgaagctttgaaagaagttggggtcacagaggtggttttggccatcaactaccgcccagaggtaatgattaatttcttgaaggactttgaggataaacttggcatcacaattacatgctcccaagagactgagcccttaggaactgctggccctcttgctctagcaagggacaagcttgcggatggatctggcgagccattctttgtcctcaacagcgatgtcataagcgaatacccatttgctgaactcatcaaatttcacaagtctcatggtggtgaggcaacaattatggtcactaaggtggatgaaccatctaaatatggtgttgtggttatggaggaggcaactggcagggtggaaaggtttgttgagaagccaaaaatatttgtgggcaacaagatcaatgctgggatttacttgctgaacccatctgtccttgaccgcattgaactgaggccaacatcaattgagaaagaggtcttccctcaaattgcagctgatcaacagctctatgcaatggtccttcctggtttttggatggatgttggtcagccaagggactacattactggattgcgtctttatctagactcgcttaggaagaaatcggctgccaggctagctgctggagcgcatgttgttggcaacgtgctggtgcatgagagcgccaagatcggagaaggttgcctgatcggtcctgatgtcgcaattggacctggatgtgtcgtggaggatggcgtgaggctttcccgctgcactgtcatgcgtggtgtgcgtatcaagaagcatgcctgcatctcgaacagcattatcgggtggcactcaactgttggacaatgggcacggatagagaatatgaccatcctgggcgaggatgttcatgtgtgtgacgaggtatacagtaatggcggtgttgttctcccacacaaagagatcaagtcaagcattctgaagcctgagatcgtcatgtaagagttctccagttttaactacagtacattcttaagttcttcgagtaagtgaggattgcagatcccctttttataagtgatatctattggtatctttggcctaattcaaacagcttcagacatgttcgcttgctaaactgttgacaatgtatccttgttctttgttgaaaagttttgtacttgtagtgtcaatcatatttcacaaa

SEQ ID NO: 151392 - DNA, 382 bp, Zea Mays
tttatcggggtaccaagacgccacgaacgcacaccacacgcacgcacacatctctgcaagcaacccccccccccccccccccccccgggcgtttccttggattcaccgtcaccgacaccgcagcatgtttgagtttgacctccaaagtagccccgagatctgccgcgtttcgcgacgcatcaggtgaggtggtgcgtgcatgtgcatggcgctactgcgagccgcagcccgcagcctgcgtgggatacgtacggtacgataagataatcacagccccaaacgggtggtccatgtccgtggcgtcgtcgaggaatcagctgtcagaatatgccgaaaccatttggtggactcgtagtacttcgttgtcaccactcaccagaag

SEQ ID NO: 151393 - DNA, 516 bp, Zea Mays
gtagcatctgttaatgaaccagtgcaacatgtaccaagagcgggcagcgagatcaatgttgctcgaccaagtgtgggcagtgagactaatgttgctggaccaagtgtgggtagtgaggcttgtgaagttcagtcaccaccttccggtacgtcagtacatggaagcgggaaaaagaggaagaaaagtcaagttgcaagtgttttggatgactatttggagcacaagaagaaccaaacagataagactatggaggcgttccttgagaagaagagtcgtggagaggagtctatggataggtgtgtccacatatttgaagctatggaggagttgacagatgaggagaaggccattgcagcagaggtgttcgagaatgaattgaatcgagagatgtttctgaagctaataattcacaacgtgcggctgatttggcttcggaggaagataagtaggattacatctacctgagagatggacaaggtgtgactgatggcttcggtgcaaacataggtatgcctc

SEQ ID NO: 151394 - DNA, 2230 bp, Zea Mays
ccactcccactcccacccccaccccctcctggccgcgatccttgcgatgtggacgcttctcgggtcgacacgtctgcaggcgaaccccccggcctcggaggctcggacttccagaaccttcctgccgcttcctggccacgaatggccgtcccgatccagcgtcccagcgcgcgccacgtgtcagagatcggccacgtcggcgtccgatgtggcgctcccgcccccgaagaaactgatacggccccaaccctcgcgtctcagcctcacgctcggaagagtaagtggccgccgcaagcccgcaaccaacaccaacgctttgctcgcttgctccgctgtccgctcccgtcggccagcgatcgaaatcagcggtggattcggaggcccaggctcccggaggagatgaacggccgcggcaccggcggaggagggggaggggaggatgagatggaggaggacagcggccccagctgcgcgcagggggagggcgcggggaataaggagcgggtggtgctgatgtgggggtacttgcccggcgtgtccccgcagcgctcgccgctgctcgggccggtccccgtaaggttgcccccgacggcggcgactgccgccggtgatgggtggagagacgtgtgcggcggcggttgcggcttcgcgatggccatctctgagtctggaaaactcctcacttggggttcagctgatgacatgggccaaagttatgtgactgctgggaagcacgaggagactccagaagcttttccacttcctagcagtgtcgtgatagtgcgcgctgatgctggatgggctcactgtgttgcaataactgatgaatatgatgtttatacatggggttggaaagaatgtgttccaactggaagggttattggagaccagtcttcagttggaaccatggaaaaggatgaaaggcaaatggcaatggccactgaccaagtgagccctaggtcacaggtgtctaggacaagcagcggagcggcagctggttcctctgaaagcagaggcactgatgacagcacaaagcgacgaaagttgtctttagcaaaacatggacctgagagttcgacatccagtgatgaaagtctttcagcacccccttgtgttgtgacatttagtacaggagtgaaaatagtggctgtagccgctggtggtcgtcatacattagcactatcagatttaggtcaggtgtggggttggggatatggaggagaagggcaactaggtttgggttctagaatccgaactgtttcttctccccatcctgtaccgtgcattgaatcagcactatacaccaaggataggccatcagctatgaaaggtaacaaggctgctgaaggacatgtcagtaaagtcttgggaaattgcgtgagggcaattgcttgtggaggtcgtcacagtgctgtagtaacagattcaggagcacttcttacatttggatgggggctgtatggacagtgtggacaagggaatacagatgatgttttaagtccaacgtgtgtatcgtctatcctgggaatcaagatgcaagatgttgccgcaggtttgtggcacactgtatgtacatctgtagatggtgatgtgtattcgtttggaggaaaccagtttggacagcttggcactggttctgatcaggctgagactcttccaaaattggtagatgctacaagcctggagaataagaacgccagatccgtttcttgtggagctcgccatagtgctattataacagatgaaggtgaggtattctgctggggatggaacaagtatggccagcttggccttggcgactcaatggacaggaacgtgccttgcagtgtacgtgtggacgcttaccacccgctaaacgtatcatgtggctggtggcacaccttggtgctcgcggagtcgcctgcttgaaacctgacaaagaaattaccttagattgacaattttgttaggaacttgtaggctcgtgcaggtacggtgatgctgcatttcatcgtgtacatacatggcagtgcatacagatatgtgtattcattctttgcggtgcgctcttcgacctgtgcgacgtagacgaaagcttgtatcgcactgcgtatacagttgaataggcttgcctcgacaaattgtgctcctccattgctagtagtggaaaattttccacaagcaacaatgcaagacagggtaaccggtttacgtgattgctaactccggacggacgtgatcctcgttacag

SEQ ID NO: 151395 - DNA, 2245 bp, Zea Mays
ccactcccactcccacccccaccccctcctggccgcgatccttgcgatgtggacgcttctcgggtcgacacgtctgcaggcgaaccccccggcctcggaggctcggacttccagaaccttcctgccgcttcctggccacgaatggccgtcccgatccagcgtcccagcgcgcgccacgtgtcagagatcggccacgtcggcgtccgatgtggcgctcccgcccccgaagaaactgatacggccccaaccctcgcgtctcagcctcacgctcggaagagtaagtggccgccgcaagcccgcaaccaacaccaacgctttgctcgcttgctccgctgtccgctcccgtcggccagcgatcgaaatcagcggtggattcggaggcccaggctcccggaggagatgaacggccgcggcaccggcggaggagggggaggggaggatgagatggaggaggacagcggccccagctgcgcgcagggggagggcgcggggaataaggagcgggtggtgctgatgtgggggtacttgcccggcgtgtccccgcagcgctcgccgctgctcgggccggtccccgtaaggttgcccccgacggcggcgactgccgccggtgatgggtggagagacgtgtgcggcggcggttgcggcttcgcgatggccatctctgagtctggaaaactcctcacttggggttcagctgatgacatgggccaaagttatgtgactgctgggaagcacgaggagactccagaagcttttccacttcctagcagtgtcgtgatagtgcgcgctgatgctggatgggctcactgtgttgcaataactgatgaatatgatgtttatacatggggttggaaagaatgtgttccaactggaagggttattggagaccagtcttcagttggaaccatggaaaaggatgaaaggcaaatggcaatggccactgaccaagtgagccctaggtcacaggtgtctaggacaagcagcggagcggcagctggttcctctgaaagcagaggcactgatgacagcacaaagcgacgaaagttgtctttagcaaaacatggacctgagagttcgacatccagtgatgaaagtctttcagcacccccttgtgttgtgacatttagtacaggagtgaaaatagtggctgtagccgctggtggtcgtcatacattagcactatcagatttaggtcaggtgtggggttggggatatggaggagaagggcaactaggtttgggttctagaatccgaactgtttcttctccccatcctgtaccgtgcattgaatcagcactatacaccaaggataggccatcagctatgaaaggtaacaaggctgctgaaggacatgtcagtaaagtcttgggaaattgcgtgagggcaattgcttgtggaggtcgtcacagtgctgtagtaacagattcaggagcacttcttacatttggatgggggctgtatggacagtgtggacaagggaatacagatgatgttttaagtccaacgtgtgtatcgtctatcctgggaatcaagatgcaagatgttgccgcaggtttgtggcacactgtatgtacatctgtagatggtgatgtgtattcgtttggaggaaaccagtttggacagcttggcactggttctgatcaggctgagactcttccaaaattggtagatgctacaagcctggagaataagaacgccagatccgtttcttgtggagctcgccatagtgctattataacagatgaaggtgaggtattctgctggggatggaacaagtatggccaggtgggtgccccttaacataccttttgcataaacatattggattgtaaaattagctgtggtctatcgaatctgtggtcgtttatgcagcttggccttggcgactcaatggacaggaacgtgccttgcagtgtacgtgtggacgcttaccacccgctaaacgtatcatgtggctggtggcacaccttggtgctcgcggagtcgcctgcttgaaacctgacaaagaaattaccttagattgacaattttgttaggaacttgtaggctcgtgcaggtacggtgatgctgcatttcatcgtgtacatacatggcagtgcatacagatatgtgtattcattctttgcggtgcgctcttcgacctgtgcgacgtagacgaaagcttgtatcgcactgcgtatacagttgaataggcttgcctcgacaaattgtgctcgaaactgggatctacaactcttgacaggtt

SEQ ID NO: 151396 - DNA, 1696 bp, Zea Mays
gtttcgcctcgcgcccgcgctgctgtcctgctgctgctattttgccattgcatccatttccgggggacggagtggaggaggagggcgtcgcctgcgttgcttcgcgtgggaagcgtagcgtgcttcgtttaggcctctcgccaatatccgagggttaatctagagaggcctttggctttgccagacgcgcctgtacgcgcctttctgggaggcagccgcttgctctcgcctccaatggccgagatctgctgcgaagaagccaagtccacgccggcgaccgccgtggctgcggcttcagtctccgccacggccgctgcggccgccgccgtggcagtggcctcctcggcgttagagaggaggcgacgcaggttggagatgaggaggttccgcgtcgcgggcgatcccgaggcgccggtcgcggaggacgtccgcgccgccaagcggcagaggctggcgcgcacgctgtccagcacctgccccgacgcgggctcaggctcgggctcggactccgacaggcctgccctaccggagcggttgcccaggtacggggtcacctccgtctgcggccgacgccgcgagatggaggacacggtctccgttaggccggactttgtgcccggcaccagcaaacagcacttcttcggcgtcttcgacggccacggctgctcccacgtagcaaccatgtgccagaacatgatgcacgaggtggtcgcggacgagcacaggaaggcagattgttctggcgaagagacggcgtggaaggccgtgatggagaggagcttcgcgcgactggacgagcaggccgccagctgggcgaccagccgcagccgcgacgagccctcctgcaggtgcgagcagcagaagcccttgcgttgcgatcacgtggggtccaccgccgtggtcgccgtcgtcagccccacccacgttgtcgtcgccaacgccggcgactcccgcgccgtcctatcccgcgccggcgtccccgttccgctgtccgtcgaccacaagcctgaccggcctgacgagctggcgcgcatcaaggcggcgggcggccgcgtcatttactgggacggtgctcgtgttctcggcgtcctcgccatgtctcgagccataggcgacggatacctgaagccgttcgtgtcgtcggagccggaggtaacggtgacggagcgcaccgacgacgacgagtgcctgatcctggccagcgacggcctgtgggacgtcgtgaccaacgagatggcgtgcgaggtcgtccgcgcgtgcttccacagcaacggtccgccggcgccggccgctcgggcgaacggcgcggccctccgggcagccgagaacggatccgcggccgccaagggcgtgagcgtggaggattccgacaaggcgtgctccgacgcggccatgctgctggcgaagctggcgctggcccggcggagcgccgataatgttagcgtggtcgtcgtggatctccgccgggggatatgatttgccttccttcctttttagccctcttggaatccaagctaatttctcccccgttttcttccatacttttaggttctgttttggtttagtattaatactgtagtagttaccaaccagacgcttttcttctctcaaacgaggaattaaaagccagtcggaccaaggaaatagaacatcgaattgcacacagatgcacaaggtagtggtaatcgttaatcat

SEQ ID NO: 151397 - DNA, 1001 bp, Zea Mays
ctccctgcttccatggccctcggcttctccagctgccggtgcttgccctctgccatggccgcgccggattgaagcccctgccatggcacttcgcttcctctgcgacgttctcctccctctaatctttctgctcgccggcagtaatatccagtcgcgccctgggtttgcccgaagctatgcgcgcccggtcgatctccctgctccagcgctgcgcccgactccagccagctctgctcctctttctctctgctcggcgtccttcctctgcccgctgagtccctccatcgcctggccgcgcccagcttctttgctccgtgcgcgcgcctgctcctatgcggcgcggaacttcctctgcgtccaggtccctcagctcgcgtccatgccgcggcgtcctggtccctacttgaccgtgtcactctgcgctcgcgtcgctgtctggttccgagcgcctgggtcttctttcccctgcgctcggtcatagtcgctgcgagcctgcgagccgtgaaactccctgtgtcgagctcggatccctgcgcagcggagcttttcccctagccaagatcgtcattgcgcgcagattttctttgctgctcgccgcgctcgattcgtcgtgcgctgggcgctgtccggcgccggtattcgccgaccccgcctcaccatgggtgtgtgtcatcaatctcgccctgttctgtccactcgatgtcgcgtgcttctgtgtcgtttgctacgcttggcacatccgtgtcattcgtgttcgacatgtccccggcacggttgtttgcagctgctcggataaacttctctgtttcggcgtgttcgccatcgaccgcccccggtgctcgacgaatggctggaacccggaattcgtcgtcgtttctcatccgcgatctcgtcaacctctgctcgacaagtgttcgatgaagggcctgagccaagtgttgttgctacttccacgaatttctcatcgaattggtacgttaattaatcacgcgatgcggaag

SEQ ID NO: 151398 - DNA, 1754 bp, Zea Mays
tcgcctctgtgtacataaatgcaccatgcgcataagctcagctcgccggtcgagctccctgcttccatggccctcggcttctccagctgccggtgcttgccctctgccatggccgcgccggattgaagcccctgccatggcacttcgcttcctctgcgacgttctcctccctctaatctttctgctcgccggcagtaatatccagtcgcgccctgggtttgcccgaagctatgcgcgcccggtcgatctccctgctccagcgctgcgcccgactccagccagctctgctcctctttctctctgctcggcgtccttcctctgcccgctgagtccctccatcgcctggccgcgcccagcttctttgctccgtgcgcgcgcctgctcctatgcggcgcggaacttcctctgcgtccaggtccctcagctcgcgtccatgccgcggcgtcctggtccctacttgaccgtgtcactctgcgctcgcgtcgctgtctggttccgagcgcctgggtcttctttcccctgcgctcggtcatagtcgctgcgagccgtgaaactccctgtgtcgagctcggatccctgcgcagcggagcttttcccctagccaagatcgtcattgcgcgcagattttctttgctgctcgccgcgctcgattcgtcgtgcgctgggcgctgtccggcgcccggtattcgccgaccccgcctcaccatgggtgtgtgtcatcaatctcgccctgttctgtccactcgatgtcgcgtgcttttgtgtcgtttgctacgcttggcacatccgtgtcattcgtgttcgacatgtccccggcacggttgtttgcagctgctcggataaacttctctgtttcggcgtgttcgccatcgaccgcccccggtgctcgacgaatggctggaacccggaattcgtcgtcgtttctcatccgcgatctcgtcaacctctgctcgacaagtgttcgatgaagggcctgagccaagtgttgttgctacttccacgaatttctcatcgaattggtaatagtactctagctcgctactcctactaatcaattaattcgatgaatatattggatgaatattacccgcgacgttagaatcagatacttgtgatgtgctgtagtaattatctgtatttcattgtatatgtttgatgttaggttatttctctacgggataggatattgtatttcgatatttaatctcgtctggtatgtagacttgttaggtgttcgagaaaatgtctgaattagaaatcgttgttgttatcaggtgttgagtcaaatatggtcccaatgagctgtgccgtttttattgctattagaattgatgaatggttcgattaaatatattatcacgatgattctcttatttatagcacagatgcgcggtagcgatctgtgttacttagcgctagtttgtttcctttgtgtgtttgcgtgtaggttcattccctacgaggcatcaccgtttgcgctaagcacgtttggcccatctagttcacttgcacgccaggtgttcgatgaatcacctgaactgagactcgttgtcgtttccacgacatctgagtcaatttagcattagtgagccggtttgttaattctctagcttaggaatatatataggatttgtgttttgtattagcgcttcttgttcaagtcagattcggttaagttaaaatagcgcgaacgttgtacttagtaatatcccggtatctggtaattgcttttaaatgttatttgtgcctcgtca

SEQ ID NO: 151399 - DNA, 510 bp, Zea Mays
acgttcgtcaatcatgtcctgacccgcaacagacactcgcgcaacctcctcttcctaccctatctgagctgcctcgcccccgtcctgcaatcgctgcaacctgaaggatctgcagcgatggtgaggaaagccatcaccgccacatgggacgagcggcagacggtgactggcgagcacacaatcccccacccacaaaggccggccgtcgctactactttgacccccttcgtcggcgatgagaaccaccaagtacgtcgtcttgcacaacatcgctgccacttcgcgtgctgctcaaagctggagtggacgggactctcattgttcaacatattaatcatatctcattgtgttgaacaagtgtgtagaagaaatacacatccaagttcattggttgttgttttgtgaatcttgtagacgatggaactacgattaaacagcttatgacacaagtagtcacttggaattttcttttgacaccaaagggttgatacattctgctattttctaata

SEQ ID NO: 151400 - DNA, 2532 bp, Zea Mays
cgaaaactaaactagcagcgatccagtagtggtgcatgcatgcatggtcaaaaagagatgaatcgatcgtcgttgccgcatacgttggccacactccgaagctagagccctccagctatagctcgaccggagcagctcgcctgcctgcctgcccttgatcgttcatctaccgaatcactcacacaccgaactgcatagtcctgcccaagctgcgtcgttcctgtcgaccacgcagaaagcctaagaaaatggcggtggtaggtagttgacatatgtactgctaactagcgctgctgcctatacgtcgcgctatatatggagaggaggggaccctattggctgtcccaacacacacatcgttcttcttcttcttcctccgtctcttcgatcgcctggccggccgtgtcgtcccccctctactagacctcaagagcaactctggatagctgcttatcggagcctagagctagaggttgaaccagtccatcatcaactagcgtggccggccatggcgatctcctctgctcttccatgctcctccctcctcatggcggctgcccaactgatgctcctcgcctccgttgtcgtccaagtgcaaggcatcacgaggcactacgacttcaatgtgaccatggcgaacgtgacgcggctgtgcgccaccaagagcatcgtcacggtgaacgggcagttccccggccccaagatcgtcgcgagggaaggcgaccgcctcatcatccgcgtcaccaaccaggcccagcacaacatctcgctgcactggcacggtatccggcagctgcgcacggggtgggcggacgggccggcgtacatcacgcagtgcccgatccagacggggcagagctacgtgtacaactacaccgtcgccgggcagcgcggcacgctgtggtggcacgcgcacatctcctggctgcgcgccaccgtctacgggcccctcgtcgtcctgcccaggcccggcgtcccctacccgttcccggcgccgtacaaggaggtccccgtcatcttcggtgagtggtggctggcggacacggaggtggtggtcgagcaggcgctccagctcggcgctggcccgaacgtctccgacgcccacaccatcaacggcctgccaggaccgctctacaattgctctgccaaagacacgtacaagctgaaggtgaagccagggaagacgtacatgctccgcctcatcaacgcggcgctcaacgacgagctcttcttctccgtcgccaaccactcgctcaccgtcgtcgaggtcgacgccgtctacgtcaagcccttcaccgtcgacaccctgcccatcgccccgggccagaccaccaacgtgctcctcgcagccaagcccttctacccgggcgccaactactacatgtccgccaagccctactccaccgccaggccggccaccttcgacaacaccaccgtcgccggcatcctcgagtacgagtaccccgacgcgccatcctcctccgcggcgagcttcgacaaggccctgccgctccacaggccgaccctgccgcagctgaacgacaccagcttcgtcggcaacttcacggccaagctccgcagcctcgcgacgccgcagtacccggcggccgtgccgcggacggtggacagagcgttcttcttcacggtggggctcggcacgcacccgtgccccgggaacgccacgtgcctgggccccaccaacacgacgcagttcgcggcggccgtgaacaacgtctccttcgtgctcccgaccagggcgctcctgcactcgcacttcgccggcctgtccagcggcgtctactcgtcggacttccccgtcgcgcccctcacgccgttcaactacacggggacgccgccaaacaacaccaacgtggccagcgggaccaagctgatggtcgtcccgtacggcgccaacgtggagctggtgttgcagggcaccagcatcctcggcgtcgagagccacccgctgcacctgcacggcttcaacttcttcgtcgtcggccaaggctacggcaactacgacccggtgaacgacccgcccaagttcaacctcgtcgaccccgtcgagcggaacaccgtcggcgtgccagccggcggctgggtggccatccgcttccttgccgacaaccccggggtatggttcatgcactgtcacttggaggtgcacacaacatggggcctcaggatggcatggttggtgctcgacggcagcctcccgcaccagaagctgctcccaccgccgtccgatcttcccaaatgttgattagactcccctctatatatcctgtgctggtcgcttcaaagggaactgtgaattagacttgatcacaatgttgatttttttgtttactttcttcattgccaattgcaattctttcaacttccattttaactagtccgttctattcccatctgacctggactttttgtaattttttcttccatttgcttaccaccctgtaatgataaatgtgtttggtacactattttgagaacaacgaatggcgcggcttgcaccagagatccataaaa

SEQ ID NO: 151401 - DNA, 515 bp, Zea Mays
tcaagtgatcaaagccgattttcaatgcagttgcatctgaatgcattgaataagcaagttaggcatttcactggtttgggaaatacccctatgacttacaaccttaggcctgtcattgaagaaattcaaaggtccgcggaggatagtggtgacaaacgaaatttgaagatgtgcttggggatgctaaagtccatgagaaatcgctgtgatcagaactttgttgcttatagaaagggtcttggtgttgtttgcaacaaaaaaggtggattcggtgtagatgactttgttgttgaattctttggggaggtttacccttcttggagatggtacgaaaagcaagatggtattaaacatatacaaaacaacagtgaagatcaagctcctgagttttacaacattatgttagaaaggccaaagggagaccgagatggatatgacttggtttttgttgatgctatgcggccaactacgcgagtagaatctgtcactcctgcaaccctaactgcgaagcaaag

SEQ ID NO: 151402 - DNA, 448 bp, Zea Mays
ggaccacggcgtggacgccgtgacggtggtcaacatggcgcacctcgctcgtgacttcttcacgctcccactcgaggacgagttcaagatgctcgaccaaatgtctggcccagctaggaagttacatgtgcataccgacgagaacagtgatgacggggctaacccaccgaaggaatacattctcatcttgtctattgaaagaactgaagcatagaaaaattaaagacaggtgcacttctccagattcaatgccaattaatgatttgaagaggttgtcaacgtgaatgtatgattgatgacaaaacaagaggtgatggcaagtactaaggtcaatggagcactgtaaagtctaatgcatttccttcatttggaagaggtattgagagagcagattgcaggaggccagccttgtacacacaggccatggactgatacaggttaaaagact

SEQ ID NO: 151403 - DNA, 837 bp, Zea Mays
agagcgccgggtgaccgcatttccgctagccgccgaggagcatcggccggggccgcgtccgctcgccgcccacaaaaactccccttctccgccactaccgaagcccttgtacccctcactgccgccgctgctgctagggagcttccacccgcacgcctacaacgagagctagcagcagtagcggccgttatcttgtcgctcctgctccgttcgtttacccaagtcccagcctagatgccgcagatggaggggcccactgattagatccccgtcggctggttcgctgagccggcttcgaggaagaattatgatcaacatgcgtgatccctgaatatgaatcacgagaaatgtttacatccttgcacttatgtctgacgagatgcttatttttttcacagaaagaactggacggtattctcaaggactacgttggacgtgagagccccctatacttcgcggagcgcctaacggagcactacaagcgcgccgatggcacaggcccgctcatctacctcaagagggaggaccttaaccacacgggtgccaacaagatcaacaatgccgtggcgcaggccttgcttgccaagcgacttgggaagcagcgcatcattgccgagacaagggctggtcagcacggcgtcgccacccccactgtgtgcgcccgtttcaggctgcagtgcatcatctacatgggcacacaggattggagaggcaggcgctcaatgttttccggatgaggcttcttggtgcagaggtacaacagagacatctgtttgttggattgagtccgtatctacacttgttcttcagggaagaaaaaaaagaatttgttatatg

SEQ ID NO: 151404 - DNA, 583 bp, Zea Mays
ctagtcattttctcagccgccacaaagacagccgcctccctgggatttttttttcttttcttcttcctggccgaccgcacctcccacttctattcctgccggccgccagggagattctctctttcttttctttatctcaatgatgtcttgtcgttgcatttggtcacgatgtgatcctcagtatgctcttttccttcttatccagtgaggattagagcaagccagaggcagattcttttcactttcgtggttctattcttttctactttgtgcgttctctagcatctggccgctagttcctgcagcgcatgcagttcattcgttacaccactggccgtacagccacatgaaggccatatgcctcacggtctcactttctgttttttttctctctgcatcacttgaactcagagccgagaaaaaaaaaataccgtgttgcacgaggctatttctggttacacgatccagcctcaagtattcgatccctctcttctgtgtgaatgtatgtatgagatgtgtcttcttgtaatttatgggatcgagtacggaggtctaaaacgtggatctggttcccaacattttt

SEQ ID NO: 151405 - DNA, 1046 bp, Zea Mays
tttccatccggcacttgatgggggatgtgctgcactctcagcccggcgctgccgacgtggccgtctggcccggcgagctcgacgagcagctcataaccgagctcctcagcgacgacagcctcctcctcggagccctgcagcaggcccccgccggcgactcggagcactgctgctcgagtgacccaggcggcgcgtcatctgctcccgcgccgtgcatcagtggcgacggcggcaccgcgaccgagcaggagctgctgcttccgcagccggaggcggtaagcagggccctgtgctcggtgtacaccggcccgacgatccgcgacatcgagaaagcgctgtcagcgtccaagccgtacccctggagcaggagccgctacagcccaatgcatcttggcaggttgggagcggtgagccgagcgccggagaagtacacgacgaaggtgaagagctgtgacggcaagacgccgagcgacgggtacaagtggaggaagtacgggcagaagtccatcaagaacaacccccatcccaggagctactacaagtgcacgagttcccggtgcggcgcgaagaagcatgtggagaaatcgccggacgacccagagatgctgtcggtcacgtacgagggtgcacacctgcacggcccgcagccgctcttcccgcgccggcggcagtggctgccggtcggcatgggggcgacgacgacgaagcaacagcagcagcaggcctgcagtgcctcctccctgtccccagccgcgcttgcgagcgacgacgcgggcggcggctggccatcgagctcgcagcaattagtcacaagcaacgtccaggcgcgagagcccacggctgctgctgctgcgggcgaaagcgaaacggtgccggggcctcagaccgccggacacgcgggtgacgccgcgtcaacgcagacgcacctgctgctgctgaccgcggactcgtgcgacgacggctccaccgcctccatgccgccgccgcggctggctgctgcgacatttcactgtgactcgccgccggcgcctaccacctggtcgtgc

SEQ ID NO: 151406 - DNA, 1776 bp, Zea Mays
ccatcccatcccgtctctccgcgtcaccatcaccacccctccactgaccactgtgcagtgctcctgcgcaccccgcgccacctccataaaacccaccgcgaccgcgagccggccgaagcggaacccccaccccgcggatccaacacgagaacccgtcaccatcctcgcatcacatgcgcgcataggccccggccgcagggtcgcaatcaccaccatgccgccagcgctgctcgcttgtctcctcatcctgctcgtcgccgcgccgcggccgtggtctgtcgccggcgagccgggcggggccaagcctcgcgcgttcccgctgcgctcgcggcaggtgccggtgggggcgctgccgcggccgccgagcaagctgcggttccaccacaacgtcagcctcaccgtctcgctcgccgtcggcacgccgccgcagaacgtcaccatggtgctcgacacgggcagcgagctctcctggctgctctgcgcgacggggcgcgccgcggccgctgctgccgactcgttccgccccagggcctcggccacgttcgccgccgtgccctgcggctccgcgcgctgcagctcccgggacctgccggcgccgccgtcctgcgacgccgcctcgcgccggtgccgcgtgtcgctgtcgtacgcggacgggtccgcctccgacggcgcgctcgccaccgacgtcttcgccgtcggcgacgcgccgccgctgcggtccgcgttcggctgcatgtccgccgcgtacgactcctcgcccgacgccgtcgccacggccgggctgctggggatgaacaggggcgcgctctccttcgtcacccaggccagcacgcgccgcttctcgtactgcatctccgaccgggacgacgccggcgtgctgctgctcggccacagcgacctccccttcctgccgctcaactacacgccgctgtaccagcccaccccgccgctcccctacttcgaccgcgtggcctactccgtccagctcctcggcatccgcgtcggcggcaagcccctgccgatcccgccgtcggttctcgcgccggaccacaccggcgcagggcagacgatggtggactccggcacgcagttcaccttcctcctcggggacgcctactccgccgtcaaagccgagttcttgaaacaaacgaagccccttctccccgcgctcgaggaccccagcttcgcattccaagaagcgttcgacacctgcttccgcgtgcccaaggggcgcccgccgccgtcggcgaggctcccgcccgtgaccctgctgttcaatggcgcgcagatgtcggtggcgggggacaggctgctgtacaaggtccccggagagcgccggggagccgacggcgtgtggtgcctgacgttcgggaacgcggacatggtgcccctgacggcgtacgtgatcgggcaccaccaccagatgaacctgtgggtcgagtacgacctggagcgcggccgcgtcgggctcgcgcctgtcaagtgcgacgtcgccagcgagcggctcggcctcatgctgtgacgcggcctgtgctctggctcgggggttagctcctccagttgccatataaccttaacctgccaaacgattctaaagtttggaacttgtttatcctttttcatgtggcatgtacggtgtctagtgtaaactggaaattaagtgtagtgtactaatgtgcttctttattttactgaacaggtagtgttgttgtatattgtctgtaaatatcaacatgcatgcactaagatcaactaagcttgtggtgtacattatac

SEQ ID NO: 151407 - DNA, 1491 bp, Zea Mays
cgcaacagcagcatcagctcagcgcggtgctctccccgccaattaagctcgtccagtgagcagcagcaagagagcctcgtcccattcccaccccgttgctctgactgctccgccgtgcgtgcgttacccgcgctcgagacaaggcgttgtctcactctcatcatccgtgcagtgctggacgatcgcttcctgtcccgtctcggcttctcgcctcttcggcggcagcggggcatcgattgccatggacgcgcccttcttccacgagctcaggcggcaggcctcctcctacctgaccggcaagatccgctccgcgcggctggcgctcaccgacgtcaccccgacgcagctcttgacggaggaggcgacgaacggggacgcgtcgccgccgaacgtcaggacgatggggcgcatagcccggcaggcgttcgacgtcgacgagtacgtcaggatcacgggcgtcctgcacgggcgcctcgcgagcttcgaccgcaggcagtggcgggaggcgtacaaggcgctgctcctcctcgagcacctcctcacgcacgggccccgcagcgtcgcggcggagttccacaaggacagggaggccatcgaccggatggccaccttccaacacgtcgacgagaaaggcttcaactggggcctgacggtgaggagcaagtcggagcgcgtgctcaagctgctggagcgcggcccgttcctggaggaggagcgcgagcgggcgcgcaagatcgcgcgcgagatcacgggcttcggcagcttcagcctcagcgcaggcgcctcccaccacgccgtgtcgcagtcgcagccacccggtgacgacgggaaccgcggcgacggccggagcagctccaagcgcgaggagcggcagaggcacgacgacggcggccgattcgggcggagccactcgcagttcgaggagcggtggtggaagcacaaggacggtgacgacggcgacaaggagaatctgatacagagcccggagccgacagcacgggtcgcgccgcgggaagtggatgcggaggcggaggaggaggagctgcaccaccaccagctccatccgttccacgggttggggcaaaaacagcggccggaggcgacgctgctcctgagccagtgacgggatcagtcggttcgtgtcatggtgacgtgaaaagaaccgtgtgcttttctcccttcctccaaggctgcagggtcagtattttactgacactgcttggtgcatcaggcatctcatgcgccatgaatggccgcttgcttggcctcgtaaaatttctttccttcagttcggaacttcggatgccagaatgtactagagaccaccacatacaggcatgtctcaagcttccagtaactctctagaaaccacgtattctaggagtgcgagaatgggatcctcctgcccaagtgcagctgtgctaatcttttactctgaacctgtgaaccatctactgaaggaaagcaaaaggcagtagttattcctaaccc

SEQ ID NO: 151408 - DNA, 104 bp, Zea Mays
gatgccgaagtcgatactacggcagggggtacttgaccggagcaaacccgtttcttcgcgtttcattacgcacgcgaggggcggagtcctgatcctgactgccc

SEQ ID NO: 151409 - DNA, 2581 bp, Zea Mays
gagtacattttgtccactgccatagagccatcgactacaaaagtctagaacacagtggaaagcaccagacaacgcgcgaccaaaagggcccaggccccagcgccccagtccgggggttgtgttcgccgacctgtgcgtgcctgctcgtcacgtcacgtccctatttgcccgtcttcctcccctccagacccttctcgaacgccccttcgttctggatccaacggtcggtctctgccgggctcgaacgttctcgaaaccacgtcacccccgataaaaccccacgcacagcctcctcccttcctcaaccatcattgcaaaagcgaagcaagcaatccgaattctctgcgatttctctagatctcgaccacccctactagttttggttcctcctttcgttcgagagagcgtttctagtggcaatggcgaagagcgagggtccggcgatcgggatcgacctcggcaccacctactcgtgcgtcggcgtgtggcagcacgaccgggtggagatcatcgccaacgaccaggggaaccgcaccacgccgtcctatgtcggcttcaccgacaccgagcggctcatcggcgacgctgccaagaaccaggtcgccatgaaccccaccaacaccgtcttcgatgccaagcggttgatcggcaggaggttctctgacccgtcagtgcagagtgacatgaagctatggccgttcaaggtcatcccagggcctggtgacaaacccatgattgtagtcaactacaagggcgaggagaagcagtttgctgctgaggagatctcctccatggtcctcatcaagatgaaggagattgctgaagcctaccttggttccaccatcaagaacgcagtggtgacagtgccggcctatttcaacgactcgcagaggcaggccaccaaggacgccggtgtcattgcgggcctcaatgtgatgcgtatcatcaacgagcccactgctgctgctattgcctacggtcttgacaagaaggccaccagctccggcgagaagaacgtgctcatcttcgaccttggtggtggcacgtttgatgtgtcgctcctcaccatcgaggagggcatcttcgaggtgaaggccactgcgggcgacactcaccttggcggcgaggacttcgacaatcgcatggtgaaccacttcgtccaagagttcaagcgcaagaataagaaggacataagcggcaacccccgtgcactgcgccggctgcgcacggcgtgcgagcgcgccaagcgcacgctgtcatcgactgcccagacgaccattgagatcgactccctgttcgagggcatcgatttctactccacgatcaccagggctcgcttcgaggagctcaatatggacttgttccggaagtgcatggaacctgtggagaagtgcttgcgcgacgccaagatggacaagagcagcgtgcacgacgtcgtgctcgtcggtggctccacccgcatccccaaggtgcagcagctgctgcaggacttcttcaacggaaaggaattgtgcaagagcatcaaccccgacgaggctgtggcgtacggcgccgctgtccaggctgccatcctcagcggcgagggcaacgaaaaggtacaagatctgctcctgctcgacgtcacgccactgtctctcggcctggagactgcaggtggcgtcatgacggtgctgatcccgaggaacaccaccatcccgaccaagaaggagcaggtcttctccacgtactccgacaaccagccgggcgtcctgatccaggtgtacgagggtgagcgcgcgaggaccaaggacaacaacctcctcggcaagttcgaactctccggcatccctcctgctccccgcggcgtgccccagatcacggttaccttcgacatcgatgccaacggcatcctcaacgtctctgccgaggacaagaccaccggccagaagaacaagatcacgatcaccaacgacaagggccggcttagcaaggaggagatcgagaagatggtgcaggaggctgagaagtacaaggcagaggacgaggaggtcaagaagaaggtggacgccaagaacgcgctcgagaattatgcctacaacatgaggaacaccatcaaggacgacaagatcgcctccaagctccccgctgaggacaagaagaagatcgaagatgccgttgacggcgccatcagctggctggacagcaaccagctggctgaggtggaggagttcgaagacaagatgaaggagcttgaggggatctgcaaccccatcatcgcgaagatgtaccagggcgagggcgcgggcatgggcgctgctgctggcatggatgaggatgccccgtctggtgggagcggtgctggtcccaagatcgaggaggtggattaagttggttagtgttcgaggtttggtttggtgaggtgtgaagtgcctgaactctgatggttgtttgtgaggtgtggtcgcaatagctgcggcctgtggtgaacttctcagaaataaataagttttcgttcctaatttgttttttttcaattcatgtgttggtcgccttgtttcgtatcgttgcttttcatgttaaacaggtactcttgtcatgcaag

SEQ ID NO: 151410 - DNA, 471 bp, Zea Mays
tttacttgctaccatctggattctgatacctttgccatttaaattttgtaaatgtgcaaaagatacgcatggtcatatagcgaagtggatatcgcgttagattccgaatctaaaggtcgtgggttcaaatcccactatgatcaatacgtatctgtttgtttttatttttattattgtttctgtttttggtctgggctgaaagtgacattttggcatcatctgtccagtcttgcactcttgcttttgcttgtgaaaaagtggtcccactcccgttaggcttgctgccttcagtgagaattgtcacggagtgcagaaccgttgcagcgctgacgttttatgggcctgctgttgtatctaaatacaggcttgcatgatattagagactattagttcatagcttgtattctttttgacaattgtaacatgctgcctgcttgtaactggtgtacttggtgttcgtttcatcaaatg

SEQ ID NO: 151411 - DNA, 1007 bp, Zea Mays
catgactcgaacggccgtcgagcccaaacctagcgatcgcagagagttgcgcccggaccccggaccgcgccgacccggctcgcaaactcctccacaaccctcgtcgccgccggctgctccacccccgccaccgccatgggtaaattccgcaagcttggccgcgattactcccaacgcatctgcatgctcaggacgatggtgtcgcagctggtgaagcacgagcgcatcgagaccaccgttgccaaggcgaaggaggttcggcggaaggcggatcagatggtgcagctagggaaggagggtactcagcatgcagcaagacgtgctgctgcctttgttcggggtgatgatgtcgttcataagctatttactgagctggcctttcgctacagagatcgagctgggggctacacaagaatgttaagaaccaggatacgtgttggtgatgctgctccaatggcatacatcgagttcgtggatagggagaatgagcttcgagaggccaaacctgcaacgccgccgcctcctcaacgagtccctcttgatccatgggccaagtcacgtgctagccaacagtgggcaggacctaaaatcaccaagagctcggaaacggacggcttatgagctagtatacctatgttccatagaaagtttcagttattttgcttaagagatttttttatctagagatatctgccgatagaataattcaaactttattgtcattttgtatgcttctaattcaccgagtgaagattgcaaggctgtgtccaaacaggaggaagtttggaacgagagagatgtatctctgctttgcttattggagttgtaacagatccaactacatgatcaaattcgtgtatgcatcagtctgccagtcctgtgtggctgtgtccgtggatcgttatgtcagattagtttctgatgatgtgtcttttcaccgtttgcctgttctgaaccaaaagaatgttatagcaatcagttccacagaaaaaaaaaacgcacaagaa

SEQ ID NO: 151412 - DNA, 920 bp, Zea Mays
agcgatcgcagagagttgcgcccggaccccggaccgcgccgacccggctcgcaaactcctccacaaccctcgtcgccgccggctgctccacccccgccaccgccatgggacgatggtgtcgcagctggtgaagcacgagcgcatcgagaccaccgttgccaaggcgaaggaggttcggcggaaggcggatcagatggtgcagctagggaaggagggtactcagcatgcagcaagacgtgctgctgcctttgttcggggtgatgatgtcgttcataagctatttactgagctggcctttcgctacagagatcgagctgggggctacacaagaatgttaagaaccaggatacgtgttggtgatgctgctccaatggcatacatcgagttcgtggatagggagaatgagcttcgagaggccaaacctgcaacgccgccgcctcctcaacgagtccctcttgatccatgggccaagtcacgtgctagccaacagtgggcaggacctaaaatcaccaagagctcggaaacggacggcttatgagctagtatacctatgttccatagaaagtttcagttattttgcttaagagatttttttatctagagatatctgccgatagaataattcaaactttattgtcattttgtatgcttctaattcaccgagtgaagattgcaaggctgtgtccaaacaggaggaagtttggaacgagagagatgtatctctgctttgcttattggagttgtaacagatccaactacatgatcaaattcgtgtatgcatcagtctgccagtcctgtgtggctgtgtccgtggatcgttatgtcagattagtttctgatgatgtgtcttttcaccgtttgcctgttctgaaccaaaagaatgttatagcaatcagttccacagaaaaaaaaaacgcaca

SEQ ID NO: 151413 - DNA, 871 bp, Zea Mays
gcctgtatcctgttgctctgcgtcgccttgccgttgatctcactggatttgtctccccggcaggacgatggtgtcgcagctggtgaagcacgagcgcatcgagaccaccgttgccaaggcgaaggaggttcggcggaaggcggatcagatggtgcagctagggaaggagggtactcagcatgcagcaagacgtgctgctgcctttgttcggggtgatgatgtcgttcataagctatttactgagctggcctttcgctacagagatcgagctgggggctacacaagaatgttaagaaccaggatacgtgttggtgatgctgctccaatggcatacatcgagttcgtggatagggagaatgagcttcgagaggccaaacctgcaacgccgccgcctcctcaacgagtccctcttgatccatgggccaagtcacgtgctagccaacagtgggcaggacctaaaatcaccaagagctcggaaacggacggcttatgagctagtatacctatgttccatagaaagtttcagttattttgcttaagagatttttttatctagagatatctgccgatagaataattcaaactttattgtcattttgtatgcttctaattcaccgagtgaagattgcaaggctgtgtccaaacaggaggaagtttggaacgagagagatgtatctctgctttgcttattggagttgtaacagatccaactacatgatcaaattcgtgtatgcatcagtctgccagtcctgtgtggctgtgtccgtggatcgttatgtcagattagtttctgatgatgtgtcttttcaccgtttgcctgttctgaaccaaaagaatgttatagcaatcagttccacagaaaaaaaaaacg

SEQ ID NO: 151414 - DNA, 614 bp, Zea Mays
cgatctctctcgatggtcatgacgcttacgagacacgactcgggagagagcaaggagatggagggcctccgtgcgcactccgaggccgcgctgctcacgctgtcgtcgacgacgacgggcggcaccggcaccggcaccggcaccggcacggccgcggcggcggagggcgcgttcgagtgcaagacgtgcagcaagcggttcccgtcgttccaggcgctgggcgggcaccgcaccagccacacgcggctgcaggcgcggacgctcgtcggcgacccggccgagcggtacgacgacaggccggcggcgcgggtgcacgagtgcgccgtctgcggcctcgagttctccatgggccaggcgctcggcggccacatgcgccgccacaggggcgagggcccgccgccaccggccgcgcacgacgacgacggcgacggccccgcccagccggaccgggacatgcccgacctcaacctgccgccgttggacgacgacgatggcagccaagcaggttcacggcagtcgggcggtggtcgcggctccgggcctcagctgctcaacctgctcgtatagcgtgcgtggcgtgcacagattgtggttcggatcgagatgtaaatgaa

SEQ ID NO: 151415 - DNA, 1730 bp, Zea Mays
aggtgtgacggcggcgtggacgcgtcaccgtcacgtcgcgtggcgcagagcgagagcggtatatgcgtatgccggccgcacgacgcccgaatgctgaccacacgacacaacaagtacccaaccactccttgattcccctttcctccctctcgcattcgtctccaccagccggtcggacttcttgcgctccaagaactcggcgaggatggaaatgttttttggcagctttctcagtgaatcagtatcaccgcagaaccttttcggacacccggatgttgagaaatgcccattcctgaggaatatcaatggagctacaaccttttccctcgcttctgctttgccagtagctgctcaaggaggcaagggtccaatttttgaggaagggtcaggctttgagtctgcattcaagcttttccatggccgagatggaatagttcccctttcagaaagatcatatgtatctgatgaaaaccacaatgagagcattgatgtcaggactgaacctgctctgccgtttaatccattggctgctagagcagccacaataagtctatcagcatttggaccatttggttttggctttttcaacggcaagggcaaaaggcagaacaagaaacccaacaatctagatcagtcccaccagaagcccaagacaccagatcagtcttccatgaaacaaaaaggagtcaacccaccatcacatgaggcattcagcgatgagtggttggaaaatggccagtgcccacttgcgcggtcttaccgggcaatgagtggtgttttgcccctcgttgccaaggccttacagccaccagctggtatgaagctgaagtgcccacctgctgtggttgctgtccgagctgcccttgcgcgaactgcgcttgtgaaatccctccgaccacagcccctgccctcaaagatggtagccattgcactactggggatggcagcaaacatccctcttggggtgtggcgggagcacaccaagaagttctctcctcagtggtttgcagctgtccatgccgctgttccgttcattgcaatgctgaggaagtctgttgtgatgcccaggactgcgatggcattcaccatagcagcctccattgttggccagacaattgggtcaagggctgagcgcatccgtctaaggaatcaggcggcaaatggtactggtgattcttcaacgcacactgctatgtatccaaacaagaatgggcattgcagcgacactgaaggcaaggcatgggaccctcttgcgacgaagataacaggctcaactgctaggggttctcctgcaccaaccccaagcgtgtgcttctgattgtgttaagcatgtgattcacgcacacctgtgaagagattatacatgaaccagtttatcttatagtgccatgtaattgccttgtgtgtcccagaaaactgagctgcccgtgtgcgataagtagaataagaggtgctaccccactgtttgctgtgttgctatggtcgagattgatgtattgatgctgctgcatttctttctttttgttaatgtgtggtggcgtttctcgcttctgtaaagcagctgaagctgtcacatcatttgatcagttgaagctgtatgttaccatgtgtgtgccatttaatgtttggagttatgaaatgaggcacatgtctcgaccctgaaataacatatagttcttctgcactgtgagaatgctgccctctgttcatgtctatattttagttcaagg

SEQ ID NO: 151416 - DNA, 1403 bp, Zea Mays
aggtgtgacggcggcgtggacgcgtcaccgtcacgtcgcgtggcgcagagcgagagcggtatatgcgtatgccggccgcacgacgcccgaatgctgaccacacgacacaacaagtacccaaccactccttgattcccctttcctccctctcgcattcgtctccaccagccggtcggacttcttgcgctccaagaactcggcgaggatggaaatgttttttggcagctttctcagtgaatcagtatcaccgcagaaccttttcggacacccggatgttgagaaatgcccattcctgaggaatatcaatggagctacaaccttttccctcgcttctgctttgccagtagctcaaaaaggagtcaacccaccatcacatgaggcattcagcgatgagtggttggaaaatggccagtgcccacttgcgcggtcttaccgggcaatgagtggtgttttgcccctcgttgccaaggccttacagccaccagctggtatgaagctgaagtgcccacctgctgtggttgctgtccgagctgcccttgcgcgaactgcgcttgtgaaatccctccgaccacagcccctgccctcaaagatggtagccattgcactactggggatggcagcaaacatccctcttggggtgtggcgggagcacaccaagaagttctctcctcagtggtttgcagctgtccatgccgctgttccgttcattgcaatgctgaggaagtctgttgtgatgcccaggactgcgatggcattcaccatagcagcctccattgttggccagacaattgggtcaagggctgagcgcatccgtctaaggaatcaggcggcaaatggtactggtgattcttcaacgcacactgctatgtatccaaacaagaatgggcattgcagcgacactgaaggcaaggcatgggaccctcttgcgacgaagataacaggctcaactgctaggggttctcctgcaccaaccccaagcgtgtgcttctgattgtgttaagcatgtgattcacgcacacctgtgaagagattatacatgaaccagtttatcttatagtgccatgtaattgccttgtgtgtcccagaaaactgagctgcccgtgtgcgataagtagaataagaggtgctaccccactgtttgctgtgttgctatggtcgagattgatgtattgatgctgctgcatttctttctttttgttaatgtgtggtggcgtttctcgcttctgtaaagcagctgaagctgtcacatcatttgatcagttgaagctgtatgttaccatgtgtgtgccatttaatgtttggagttatgaaatgaggcacatgtctcgaccctgaaataacatatagttcttctgcactgtgagaatgctgccctctgttcatgtctatattttagttcaagg

SEQ ID NO: 151417 - DNA, 376 bp, Zea Mays
tcgtacgtactggtactgactgacgctcctgctcttctagagaggcagaggctgcgactgcgagcgaggcgatagggtgacgtgcgtgcttgtattgcactacacgacggttgatctttagcgacccttatttgttaccaactgttggttgctaaaagttatggaccgatggttggtcgctaaatccgtttgtagcaacagtctgttggtcgctaaaagtctagaaatttaacaacttatgattggtcgctatagacctcgttggagaccaacggttggtcgctatagagaaggggtcgctatcaaatcttatagcctaattaatctgtagatgttactgactaaaaattaattaaaacattggtcgctaaattat

SEQ ID NO: 151418 - DNA, 758 bp, Zea Mays
acgaaaaaggaagcagggtaaggcgaggcgccgtggcccccgaaacaatcccctccccggcctctcggcgaatcgcgaggcggcacccacgtgcgcggctcgcccccactccctgacatgcgccgatcgcgcccacatgtccctctccccccgcgccgctatttctacctccccgccggcgctactcgtcgcgctccccaccggtagcacgtccgcctcttcatccatccatctatccatccgcgtccccgggatcaccgagctctccagtaggtctagaagataccacacgtacgtccggcggcttccgtcagagaagctagctagcgcttcgtctccgacccggccgtatagacgacgacacacagcggggcccggccggccggtctctctcggcgtaggcggcgaccatggacgacgacgacgccgcctcctcgtcaccggcggcttcgtacgtcagactggtgcagcatctgatcgagaagtgcatctgctacaagctgaacaaggaggagtgcatggagacgttggagaagcacgccaaagtgatgcccgtcatcacatccacagtgtggaaggagctggagaaggagaacagggagttcttcgagacgtacaagaagtatctgggacaagagtcggcgctgcagaagaatccatccgatggacaggaacagccttcgtctgcttccaagagctcagacgacgacgacgattagacagatctgtcgcgctcgctcacatgcatggccttgcag

SEQ ID NO: 151419 - DNA, 2589 bp, Zea Mays
cgccacgtagctctcgaccgcgctctcgccccgcctccctctcgcccgcctctcgcccgggcgggcgctccagcgcgggcgagagcgagtcccacaccataccaggtcaccatacccgcctccgccgcctggccgcgctctcccgccatgaagcagctccacaagtcttcccccacccaagcgccatcgccggcgcacgcaccggctcccaaggcagccaagccggcgcgccctggcccgcgctcctggatcgggtatatcctccgcgagcagcgcctcctcttcgtcctcctcggcgcgctcatcgccaccaccttcttcctcatccgtccctacttctcgctctccccgtcctcccacctccccgacgtccgcccgctcttctccttcgccgcccgctccgctgtcccgcccggcttccgcccgcccccgcgccgcgtcgtcgtcacaggcggggcagggttcgtcggcagccacctcgtcgaccggctcctagagcagggggacagcgtgatcgtggtcgacaacttcttcaccggcaggaaggagaacgtcgcgcaccacctccggaacccccggttcgagctgctccgccacgatgtagtcgaaccaatcctcctcgaggtcgaccggatctaccacctcgcatgccccgcgtcgcccgttcattacaagtataacccaatcaagacgatcaagacaaatgtcatgggaactttgaatatgttgggtctggcaaagcgagttggtgcaaggtttttgttgactagcacaagtgaagtttatggtgatccacttgagcatccacagaaggagtcatactggggacacgttaatcctattggtgttaggagctgttatgatgaggggaagagaacagctgagacttcaactatggactatcatcgtggtgctggtgttgaggtgcgtattgcccgcattttcaatacatatggtcctcgtatgtgtctcgatgatggccgtgtggtcagcaattttgttgcacaggcactacgaagacaaccaatgacggtttatggtgatggaaaacaaactcgaagtttccaatatgtttctgatctggttgctggattgatggctctaatggagagtgatcacattggtcctttcaacttgggaaacccaggagagtttaccatgttggagctagcacaggttgtgaaggaaacaattgacccaatggcaaccattgaattcaaacccaacacagctgatgatccccatatgagaaagccggatatcaccaaggctaagcaactgctacattgggagccaaacgtctctctcagagaaggccttccgctaatggtcaaagacttccgtcaaaggatctcggatgagtaatcgaggcaatcctacgatactggtgaccggtttgattctgaactatgctgcaaatacagtcagaagctctttatcgattggagccatgcagtacagtgtactgtgtacacagagactgtagaatcacccaggccccatttggaatgtggggatccatacaatttccactggatagtactgtttctgtgaaataactgaaaagttcatgggaagttcgtgttaatcttttttttttatatcttggtggggcagaacagaagcagtcaaatatttttttgtgcatatgtgaaattccagagttgtgggtggtgagagataggatacaatgctgtatgtatttcaggaacttctgtaacacgagaacattcatcatgtgaaaaaatgtaactgaatgtgttggccagctcgctcttgctgtacattcaactgacagtccacaaattccccattctcaagtgaaaaataacagtctcgtatacagtatctgagcagttttctggatacatttgtcatcagaagttgacttccaaaaacatcgaagctttgcaacacagtaggtgtttctgcaaattctgcagccttctacttgagatgcacactgaaactcagcactctgctcaggctgacattattcccacccgtttctggtacaccaccagcagctctgacaacggcaaagccggaggcgccactgtaccgccccgtccctccgacgaccgcgacgtgagactcctcctggtcgtcgcggcggacgccgaagaagctgatgctgtcgcccgcgccgtcgccggcgaacgaggccttcacggccaccatatggctgccgttgtcagccacgccggtgacgaggacgccctgcagcctcccatccagaggcagcccgaactccttgctgccgcggagccgctcgtcgaccacggtgaccgcggcaggccggagcgcgtccggcctcgtcaaggcgcgcagccagcggctgccgattggcccctcgtccgtgaagaccgggcgccgcgtggaaggagctgtgggtttgggcgacgcgacgccggtgccggtggtgtacagcgtgatcgtttgggcggagctgcgggacggcggcgacggcgaggaaccgcggcgtgccggacgggcgctggctgccgtgctcgtcaccgcgagcaggagcgcgagagcggcggcgcaggcttgcttgaggatgcgagtgcgagattgcgcgtgcatctt

SEQ ID NO: 151420 - DNA, 1535 bp, Zea Mays
ttagatgcaaacgaaaggcacacgcacatcataggggcagacacagataggtcaggtcatggtcatcctctctagctacaggaattctgctttaaagcatgccaaaacttcctccactcccttccaagaacacaacacaacaaccaccacctctatctgccaagaccaacccagaccagaaaacacagatccagcaaggaagcaagaacaatggcaaaacatataggcccccaaacccatgctggcggccaaccactccaacaagatgactacatagacatggatctgagtctgagctcaccaccagcggccaccaccaccgcgagcctgttctgctacagcagtgccatggcagcctcgccgtcgccgcagcacccgcgagagtttgagttccacatgtcgtcgtcggctccaccagacccgtgggaggagcccgtggcgtccccggcagacgagctcttctacaagggcaagctgctgccgctccatctcccaccgcgcatccagatggtccagaagctgcttcagagcgccgctgagaagggcttgctctcagcgagcactgctccagcaacgccgtaccagtcctgcaacgtgtcagcggcgagctcgtgttacgccagtggcgagctcagtgctgctgagtactgctcattccatgagtgcgtatccaccggtactgacgccgccgaggcggcggcggcggcggcagcctctgagaagaagccgtggtccaagaagctcaggttcatcaggcacctcaacctcggcctcaagctcaaggcgtcgaaggcttatctgaaaacgatatttgctactacgactaaaggagggaatccagatggcaagaatggcgtgcctagagcaaacgagctgcccggtgcacagctcagtgcctggaggaggaggaagaacccgtggtttggccaaatcagaagcgaaaggtacacggccgcctcatcacccatcagcgacaacgccacggcaggaggcaagtttcaagaggacgagtcatgtggccatagaaggtccttctccggcgtcgttgtccggtactcgtcgtcaaacaagacgtcctccgtttcgtcgtcatcgtcgtgttcttcttcgtcgagttcgtcgtccttcttgatcccaggctcaaacgaccgcaagttcagagatggtgttggagttgggccagtgctcaggaggagcagcagcgcgagttcagagatggacttggacaatccgattcagggcgcgatagcgtactgcaagaggtcacagcagctcgcctccgtcaggaagagcgcaagcgacgcagggttccgtttcatgtcatcgtcagcatcaagaatagcagcagagtccgaagatgatgagggcgtatttgagatcacccgaaatggaatggaaacgtagatgtaaattccaaatagttctgtactcttttgatcttgggcttttctgtagatatggtatgtgtctgatattatggccttcagaaatatcaatgtaagcaatttctgttcgagggcaaagagttttatatg

SEQ ID NO: 151421 - DNA, 2809 bp, Zea Mays
cacgaccccgcccgcgcgttggccaccatcccgtctcctacacacaccatcagccccgcggacgcctctctccgacccctagaccgtttcctcctcccaccattctcccgccgtgaccactgacgacaacgcccccaagcggccttcaagcttgagctccacgcctccccaagtctgctgcaccttctcgtcctctcctggaagccacactggaccgaacgacctactggacccaccacacccgccctccctttacttaagctcggctcgctcgcttttgcgccagtgagtgggcagagaaagtgcagccagcagcacgtacgtacaccacgggttttcgatcgcgaggctgcgtgctcgcatgcgatggcgcccgccgtgcaggaccgcctcccgttcctagcctcgcccccgcccgcgcgggagaggggccggaacccgtccctcgccgagatgctccgcctcgtcggcgccgccaccgtcgacccggcggacgatgacggctccgcgtccgcgttctcgctgccgctgccgcacgccaccaccacgcccgaccgtgacgcggtggcgggagtcgccggcgcgacggccatcggacggaccgtgcacttccgcctggcgttcagcagcctgacctacagcgtccgcgccaagcagcacgggcgcggcggccctggccccggcctgctgcccctgcagcgccgctccgaccgcgtcaccaccagggcgctgctggacggcgtctccggggacgcgagggagggcgagatcctggccgtcatgggcgccagcggctccggcaagtccacgctcatcgacgcgctggcgcaccgcatctcccgggacgcgctcaagggcgccgtcacgctcaacggggagcccctcacgggcgccgtcctcaagtccatctccgcgtacgtcatgcaggacgacctgctgttccccatgctcaccgtcgccgagacgctctccttcgccgccgagtttcgcctcccgcgggcgctgtcgcccgccaagaagcgcgcgcgcgtgcaggcgctcatcgaccagctcggcctccgcgccgcggccggcaccatcatcggcgacgagggccaccgcggggtgtccgggggagagcgccgcagggtgtccatcggcaccgacatcatccacgaccccatcctcctgttcctcgacgagcccacgtcggggctcgactccacctccgcgttcatggtcgtcaaggtgctccgccgcatcgccgagagcggcagcattgtcatcacgtccatccaccagccgagccagcgcatcctcggcctcctcgaccgcctcatcctgctctccggtggccgcacggtcttcagcggcccgccttccgcgctgccgtcctacttcgccgagttcggcttcccggtgcccgacgacgagaaccgcgccgagttcgcgctcgacctgatccgcgagctggagtcgtcgcccacggggaccaagccgctcgtcgacttccagcgcacgtggcagctcatgcacgcgcggacgacgagccctgcggctgcccaaggggacggcggctcggcgatgtcgctcaaggaggccatcagcgcgagcatttcgcgcgggaagctggtgtcgggctcggacgtggccggggaggccgcgtccgtgcgcacctacgccaacccgttctgggtggagatgaaggtgctgacgaagcggtcagcgatcaacacgcggcgcatgcccgagctgttcctcatacgcctcggggccgtggtggtcaccggcgcgatcctcgccaccgtcttcttccggctggaccagtcccccaagggggcgcaggagcggctgggcttcttcgcgttcgccatgtccaccatgtactacacctgcgccgacgcgctgccggtgttcctccaggagcgctacgtgttcctgcgcgagacggcctacggcgcgtaccggcgcgcgtcctacgtgctctccaacgcactcgtctccttcccgccgctcgtggtcctctccctcgccttcgccctcacaaccttcttcgccgtcgggctcgcgggcggcgtgcccgggttcgccttctacacgctggccatcctggcgtcgttctgggcgggcagcggcttcgtcacgttcctctccggggtgataccgcacgtgatgatcggctacaccgtggtggtcgccatcctcgcctacttcctgctcttcagcggcttcttcatcacccgggacaggatcccgccctactggatctggttccactacctgtcgctgatcaagtacccgttcgagggcgtgctgcagaacgagttcggccggggcggcgagtgcttcgtgcggggcgcgcagatcttcgacaactccccgctggcggggctgccggacgcggtgaaggcccgggtgctcgcgtccatcagctcggcgctcggggtggggatcggcgccgacacgtgcgtggtcacgggccgcggcgtgctgcagcaggcggcggtgacgcagctcggcaagtgggagtgcctgctcgtcaccatggcttgggggttcctcttccggatcctcttctacttcagcctcgtgctcggcagcaagaacaagaggaggtgatcgcgccacggcacggactgcggacttgcgcgtgcgtgtgcgcgccgttgtacatttgaaaggtggaagctggctggacatggcccatggggagaaagcaagcgttgccgaaggaggcccgggtgaaagaagacgtacgtagttaattattaggtggtgattgttcacgttctttttctttctttcttttctggtgatttgatgatagaaa

SEQ ID NO: 151422 - DNA, 1086 bp, Zea Mays
cattatccaacttctcaaaaaccatagggaaccaaacatcacgtaacctggattttgccacaccaaggcaaacatctatggcattctatttgcagcatatatattgtggccatgggcacgcagccactgcttcaactccagtaccgccatctccatcgactggggcaactgcaaccgtccctggtttactattgtgtacctctgctgtggggaagaaggctcatagccatgggggcggacccactggcccaactctagtgctgttgtctccgtagattggggcaactacaggctacagccatccctagcagctagcttccagtcgggtactgctggcatgtccggttggcggccaggttcctccttctacagcctcgtcagaactttggttctttctccccgacaccagcaccctttagtaaagggactccaccagcgatttcagcagcaggatctaagaaaaatgacattgatgacgacaatgacgtcgaggtcgacaggagtgccacccacgatgaagttagattggcaagtgcttggttgaatcattctaccgacccaattgatggctatgggctatggcaagaagaatgataaattctaggatcaagtttttttttgaaagggagggcaaaagatttgccgctccaatatattagaaaggagatacacttacaagacacgcactcgaagacaaagggaggagaaaagaaagaagaaggacaaaaacaaccgtctactgagcctaatcacaactccgaaactacctggcacaaactaactcaagaaagcacccactagctctttcactaaagaagcgatctgctttgcatttttctgctggttcctgaagatcctgttgtttctctctaaccataggctccaccaaaaatagatcagaagaccatcgaaatttcttctagattgcctattacagagacctcttatatttctccaccaaccatacaacgacacggaagcctggattcctctcaggaaggaacagttccccaatgtcaatattttatcccacacctctctactgaaaggataatctttgcataaataagataccgtctccaacgc

SEQ ID NO: 151423 - DNA, 925 bp, Zea Mays
aggtacacatcatctcttccaaatcccaccagcaaatccccaattcctccgagttcgagcgaccatgtcggggcgtggcaagggcgggaagggtctgggcaaaggcggcgccaagcgtcaccgcaaggttctccgcgacaacatccagggcatcacgaagccggcgatccggaggctggcgaggaggggcggcgtgaagcgcatctcggggctcatctacgaggagacccgcggcgtgctcaagatcttcctcgagaacgtcatccgcgacgccgtaacctacacggagcacgcccgccgcaagaccgtcaccgccatggacgtcgtctacgccctcaagcgccagggtcgcaccctctacggattcggcggctgagaggcgctaccgccgctggtggccgtggcaaaagtcttgggtcgcggtcaagaaatcgagagtattctggatgacgtgcttagtttcgtagtattattatcactagtgcttattgttagcggttgttgggttcgaccactctaagccactgtcaaacagtaatatatgagtaccgcatttccgtgtttcgaacttctaatatatcataatcttatggacatcgggttaattcgcttaattttgtgctggctatctgaatatttgttgctcccagtatttagcatttttttcttattagattgataaatttagaaacctaatttgtcgaggtctttgcaacagcttcttctgtccgtgacgcttcagccacgcttaggagtatttggcttcagcttgttgctagacagcaggagctaggagtaaaccattccatctctgtacctatctttacctcctagccatcatttgacttttctgactgtctacagtgctctacaacatcaaaaccattactataactatccacaagtggcaaatgattcttctgtt

SEQ ID NO: 151424 - DNA, 762 bp, Zea Mays
cgaagtgaagaagttttgataaaaaagaactcaaagtttagtctttgtgacgcactagaccagtctaatgagacacctgacctattcgagcgaccatgtcggggcgtggcaagggcgggaagggtctgggcaaaggcggcgccaagcgtcaccgcaaggttctccgcgacaacatccagggcatcacgaagccggcgatccggaggctggcgaggaggggcggcgtgaagcgcatctcggggctcatctacgaggagacccgcggcgtgctcaagatcttcctcgagaacgtcatccgcgacgccgtaacctacacggagcacgcccgccgcaagaccgtcaccgccatggacgtcgtctacgccctcaagcgccagggtcgcaccctctacggattcggcggctgagaggcgctaccgccgctggtggccgtggcaaaagtcttgggtcgcggtcaagaaatcgagagtattctggatgacgtgcttagtttcgtagtattattatcactagtgcttattgttagcggttgttgggttcgaccactctaagccactgtcaaacagtaatatatgagtaccgcatttccgtgtttcgaacttctaatatatcataatcttatggacatcgggttaattcgcttaattttgtgctggctatctgaatatttgttgctcccagtatttagcatttttttcttattagattgataaatttagaaacctaatttgtcgaggtctttgcaacagcttcttctgtccg

SEQ ID NO: 151425 - DNA, 267 bp, Zea Mays
atgtcggggcgtggcaagggcgggaagggtctgggcaaaggcggcgccaagcgtcaccgcaaggttctccgcgacaacatccagggcatcacgaagccggcgatccggaggctggcgaggaggggcggcgtgaagcgcatctcggggctcatctacgaggagacccgcggcgtgctcaagatcttcctcgagaacaccgtcaccgccatggacgtcgtctacgccctcaagcgccagggtcgcaccctctacggattcggcggctga

SEQ ID NO: 151426 - DNA, 261 bp, Zea Mays
atgtcggggcgtggcaagggcgggaagggtctgggcaaaggcggcccggcgatccggaggctggcgaggaggggcggcgtgaagcgcatctcggggctcatctacgaggagacccgcggcgtgctcaagatcttcctcgagaacgtcatccgcgacgccgtaacctacacggagcacgcccgccgcaagaccgtcaccgccatggacgtcgtctacgccctcaagcgccagggtcgcaccctctacggattcggcggctga

SEQ ID NO: 151427 - DNA, 723 bp, Zea Mays
gtacttgcatgatgagaaaaatttaatgatcactactaagattgcttactctgctgttcataggtatgacagtcttatcgtgaagtttgtggggcttatagttttttcttttgctactgccttcatattgctcatgatggaaacactgagtgccttcctgcatgcactgcgtctgcactgggttgagttcatgaacaagttctatcatggggatggttacaagttcaagccattttcatttgctctgctagcagatgacgaagattgatgcatgtgtagttcagcacgtaaacagattggttcatttcttacaaagttttggagcacaggtgtcaaatttcatgggcaagatgggcttttcctgatacacagcattttgtcagaccgctagactttttcctagcgcatgagtgcagttgtcgttgagattgccagccttgtggaaggagattttgtaagtttacagcaatattgtagagggcaagttcatcgtacagttcctccaacggagatgcagattatagttgctaacaaaaaaaaggatagaaatgtagacttgtccgcgtacttttgacttcaaatttatcagcatgactgccgcttaccacttatgaatgaaaaatatgtatttggccattcatacaaccgtcgctggaagaaagacatgcacgctattgtactgttttgttttacaaatcaaataaatagctctaatcgtgctaa

SEQ ID NO: 151428 - DNA, 735 bp, Zea Mays
ccatggatgctcttcccaaaaccttttatcttgaagaaacttcataaggagagatttcaaggtcacacttatcgtttcctagggacatctgaaatggatccagattctgaacctgattccgcccgagcacgtcatgatgatttcaatttcagcgaagtttttgtgcatcaaatgatacattccattgagtttgtacttggtgcagtttcaaatactgcatcttatcttcgactttgggctctgagcttggcgcattcagagctgtcaacagttttctatgagaagttgctgttacttgcctgggggtatgacagtcttatcgtgaagtttgtggggcttatagttttttcttttgctactgccttcatattgctcatgatggaaacactgagtgccttcctgcatgcactgcgtctgcactgggttgagttcatgaacaagttctatcatggggatggttacaagttcaagccattttcatttgctctgctagcagatgacgaagattgatgcatgtgtagttcagcacgtaaacagattggttcatttcttacaaagttttggagcacaggtgtcaaatttcatgggcaagatgggcttttcctgatacacagcattttgtcagaccgctagactttttcctagcgcatgagtgcagttgtcgttgagattgccagccttgtggaaggagattttgtaagtttacagcaatattgtagagggcaagttcatcgt

SEQ ID NO: 151429 - DNA, 1581 bp, Zea Mays
atggggctgttcgaccggctgcccccgatggaccacatgcggtccgagaagatgtgcttcgtgcagctcatcatgcccgccgagagctcgcgcctcgccgtcacctacctcggcgagctcggcctactccagttcaaggacttgaatgaggataagagtcctttccagcgtatatttgtcaaccaggctttggtaacgagagtcatatactcatatcgatgcctttatcgattgatccacatatacacaaaagatggaaataagaaaaataaaagtactcatgtaatcaagccacaaaattgcatgaagactccaaccgatggggtaaagcgatgtgcagaaatgtcacgcaaactaaaatttttcagtgatcagatcaacagggcaggtttaagatcttctgttcgacctgcacttgaaccggatattgatctggaggagctagaggcaagattgggtgaacatgagcatgaactgcttgagatgaatacaaatagtgacaagctaaaacagacatacaatgagcttcttgaattcaagctggtcttgtcaaaggcaggtcacatccttgcttcttctcacagccatgcagcttcagctgagcatgagctagatgaaaacatatatgacaatggaatacatgagggaaatgcctatctgctcgaacaggtagagaaagctgtttttgtagttttcttttctggggaacaagcaaaagcaaagatactaaagatttgtgattcatttggagcaagttgctaccctgttcctgaggagatggtcaagcagagacaaattttcaatgaggtatcggctcgtctctctgacctggaagttactttggatgctggaatccagcacagaaacaaagctcttgagtcaataggatcacaattgtggaggtggacaatcatggttaaaaaggagaaagctgtatatgacacgctcaacatgttgaactttgatgtgacaaagaagtgccttgttggagaaggatggtgtcctatatttgctaaatctcagatcaaggattgtttgcagcgttccacaattcacagcaattcacaagttggtacaatatttcatgagatggacactattgaatcaccacctacatatttccgaactgataagtttaccaatgctttccaggaaattgttgatgcatatggcgttgcccgatatcaagaagctaatccggctgtatattctgttgtgacgttcccatttctttttgctgttatgtttggagattggggtcatggaatatgtctattactaggagctttggttcttatacttcgcgagaagagattttcctctcagaagcttggtagctttatggagttggcattcggcggacgatatgttattcttctgatggcaatattctcaatatactgtggccttatatacaatgagttcttctcagttccattccatatatttggcaaatctgcatatgaatgccgggacaaaagctgcagccttggagggagagaaagggtgaagaagggagttgggaagagagaagcgtcttttctgattttctcccagccgtcaaggaagatgaaaagacag

SEQ ID NO: 151430 - DNA, 768 bp, Zea Mays
ggaataggtctagtaaaacaaggcagggagtaaacaaaggcagtcaggctttccgattctttgtacaatgttctgtataaataaacgacaacctctgtgtccccaacagcgcaccgttgattcagaattcagctacgttgaacctgcggaacacaggcgcccacggcccacgagatctccgtaagaaggcggaacctgtagaagacatggccggcgagatgagctgggtgggcaagaagatccacctctacaacgtcaccatgggcctctacatgctcgattggtgggagcgctgcctattcaacatactggtgctgatcctgctctggttcatctgcttcaacggatcccgcttcgccactgatgtctacgaaagccacctgaaggcacggattttccaaggcgcaaattacggcatgggaattggcatgccctcctcctaagccttcaacgcaaaacacagaagcagcaaaatctgctagttctggaatctgaactgggttccaacaagctgtagtgatgtgtatgatgtagttccaatatgtaagattcttaacattattctttattttaatgtactttgtgtaagtgtgtaactaaggtttgagcgcacgatatcacatcctgagttctactgtaattatatccatttccttggtattatgttttgttactcatttactatatgtggccacagtttgactgcatgacatcacattcatagtattattagcttgtttcttcaaatttcacattataattttttga

SEQ ID NO: 151431 - DNA, 935 bp, Zea Mays
ggaataggtctagtaaaacaaggcagggagtaaacaaaggcagtcaggctttccgattctttgtacaatgttctgtataaataaacgacaacctctgtgtccccaacagcgcaccgttgattcagaattcagctacgttgaacctgcggaacacaggcgcccacggcccacgagatctccgtaagaaggcggaacctgtagaagacatggccggcgagatgagctgggtgggcaagaagatccacctctacaacgtcaccatgggcctctacatgctcgattggtgggagcgctgcctattcagtatccttccgccgtgtcttgatccaattcagtttatgtattactgtcccctttgcagattccgaccttgcttttctcgacttcgtcatcaactaaggcttatgttagatccccgtctgattctggcggggtatctttgcctctgtcccggcagggcttaggtttggacatactggtgctgatcctgctctggttcatctgcttcaacggatcccgcttcgccactgatgtctacgaaagccacctgaaggcacggattttccaaggcgcaaattacggcatgggaattggcatgccctcctcctaagccttcaacgcaaaacacagaagcagcaaaatctgctagttctggaatctgaactgggttccaacaagctgtagtgatgtgtatgatgtagttccaatatgtaagattcttaacattattctttattttaatgtactttgtgtaagtgtgtaactaaggtttgagcgcacgatatcacatcctgagttctactgtaattatatccatttccttggtattatgttttgttactcatttactatatgtggccacagtttgactgcatgacatcacattcatagtattattagcttgtttcttcaaatttcacattataattttttga

SEQ ID NO: 151432 - DNA, 749 bp, Zea Mays
aggacattggttcttgaggtgtaaactagacatccatggatcacgaactattcattagactatcttgtcaacaataaaattttacaacagaggctgatatacaacaattaattgatataaaatgctccactacacagatttaaatctgaggtcatgctagattacaatcttcttatcttcgggtgtgacaactccatatgaacagcgactcggttttatcaagaaccctaagtgaatattgataataatgtacaagtgctctcccttaagccctgttcgttttgtactaatccatagggactgagggggattaaatcccctataagtcaaaatcctctccaatcccttccaatccccctcaatccctatggttttgggatcaaacgaacatgaccttaaggggcttatagcatagtaggcactccagccttcatcaaaacaattccattgtgcggcagcaaaacttacacagcctgactaatttgggggatcccatggttttggaaccattctggcatatgaaatctttcacgcaatacgggtctgacgtctttctggagggaaagatgcttcaggagtggaaatataaccgtcatgagctggaatgtttagtcaagaaaaaaatcagcgcaatttgttaggctagaagttcaggcccacagaatgacttgtgccatagtcagttacctgatcatcagaatgttgtccagctgaaaatggaacacaaggtattccattcaaaggctgaa

SEQ ID NO: 151433 - DNA, 718 bp, Zea Mays
gacatccatggatcacgaactattcattagactatcttgtcaacaataaaattttacaacagaggctgatatacaacaattaattgatataaaatgctccactacacagatttaaatctgaggtcatgctagattacaatcttcttatcttcgggtgtgacaactccatatgaacagcgactcggttttatcaagaaccctaagtgaatattgataataatgtacaagtgctctcccttaagccctgttcgttttgtactaatccatagggactgagggggattaaatcccctataagtcaaaatcctctccaatcccttccaatccccctcaatccctatggttttgggatcaaacgaacatgaccttaaggggcttatagcatagtaggcactccagccttcatcaaaacaattccattgtgcggcagcaaaacttacacagcctgactaatttgggggatcccatggttttggaaccattctggcatatgaaatctttcacgcaatacgggtctgacgtctttctggagggaaagatgcttcaggagtggaaatataaccgtcatgagctggaatgtttagtcaagaaaaaaatcagcgcaatttgttaggctagaagttcaggcccacagaatgacttgtgccatagtcagttacctgatcatcagaatgttgtccagctgaaaatggaacacaaggtattccattcaaaggct

SEQ ID NO: 151434 - DNA, 492 bp, Zea Mays
ccagaaaaaaccgccctgcgacgacacttgaaacgcccagattctgaatttgtccattttctgtcttatctgctgcaaattaaccccaggaaaagacccacagccgatgaagcactacagcatccatggctttcttttgcgtactaatgaaaagccatccggtgctttgttcacttataaggatgactttgtctcctattttgttgctcttgtaaagttcttgaaaaatatcgattttttaaagtttcgcttcattaacgtgaatcatcattactcgtttccttattttgtagaagagccctccttttgtgagtgcaggattcttattttttttctgtcttcagggtaattcttggtgtgaacccctgctctgtgagtgattcatgagtgtacgtaaatatcagaaaaatttccgcggtttatctgtacagttgaaaggccactcttgtactccatctgatccgttaatgataacatgagaagatatcaaaa

SEQ ID NO: 151435 - DNA, 1456 bp, Zea Mays
aagccatccaaggagcgaggggtacaagcacaccgcagtctcagccctccgccctctctctctctcccttcaagaactactcgaggtctaattgtcccagcctgccgcgcgcgctcggcacgccagaaggaaggacgtaccagaggcacacaatttcaaatggcggactgcatgcaggagtggccggagcccgtcgtccgcgtgcaggcgctcgccgagagcgggctgtccgtcatcccgagctgctacgtcaagccgccgtgcgaccgcccggccccggccccggccccgaccatggcaccaccggcgccggcagtccatccgaggaagaaggagcccagctcggacgccatcgccagcattccggtcgtcgacctcggcgagctgctggccgcagacggcgccgtcgccaccgtcaccgaggccgtcgccgccgcgtgccgggactggggcttcttccaggtggtcaaccacggggtgcgccccgagctgatgcgcgcggcgcgggaggcctggcgcggcttcttccgccgcccgcccgccgagaagcagcgctacgccaactcgccgcgcacgtacgagggctacggcagccgcctcggcgtccagaggggcgccgtcctcgactggggcgactacttcttcctccacctcgcgccggaggcggccaagagcacgcccaggttctggccggcccagcccagcaactgcaaggatgtgtcggaggagtacgggcgcgaggtggtgcggctgtgcgagctgctgatgcgggtgctgtccgtgagcctagggctggacgaggcgcacctccagcgggcgttcggcggggcggagtgcggcgccaccctgcgcgccaactactacccgcggtgcccgcagccggacctgacgctgggcctctccgcgcactcggaccccggcgccctcaccgtcctcctcgcggacgtgctcgtccgcggcctgcaggtccgccgcgccgccgccgacgactgggtcaccgtgcagcccgtccgcgacgccttcatcgtcaacgtcggcgaccaagtccagatactgagcaactccgtgtacaagagcgtggagcaccgggtggtcgtgaacgccgaggaggagcgcatctccctcgcgctcttctacaaccccaagggcgacgtccccatcgccccggcgccggagctggtggcggccgcgagcctgccggcgctctacccgacgatgaccttcgacgagtacaggctctacgtcaggaacaagggcgccaggggcaaggcgcagatcgaggctctcaagggccagggaacaccagaaagtcaattatagacgacgactagctagctactagctagtacgtagccaccacttgtctacgtacattacagtatatactagctactagctagttaataaacaactgctgcgtgtgtgtcctaattaatatgacaattgttaatctgga

SEQ ID NO: 151436 - DNA, 624 bp, Zea Mays
gatcaacgttatttttatcaactcataactcgatcccgaataatacattagatccatctcatacattaattcatcaccgtaagggattcgagtacatgaggactagatccgagttaaaggttaaacacggtcatgagaccgatttttttttgacccgtcgtgctcggaccaccatcagatcccagccgacagcagctcacccgcccgaagggatgagctcgctggcggcaaggtctgcggagtcccgtgctcataaagtttcggctgatcagtgcacagtgccggccaaacatagagacgagaacagacgtgaacaagaaatgcaaactgatcgagacccgaacgaaacactggggcgcggtcggccaggagcagatgctccctggcggcccttgtttcttgtgcggctgaagcaagaaattaaaaaaagggaatacaaagagaggaggtggccacatgctagaatcaagaaaaaaaaagtacagagaaagaggcggccaagcaaaaagaaaaaaaaaacagaacaaacagagagaggggagtcggactggagctggcggccaggagaaaatggccctggcggccggtgttttgtgcggctagaacagaagtgagctagggttt

SEQ ID NO: 151437 - DNA, 2254 bp, Zea Mays
agcataatgttcccctccccgactccgccttccccgcctcgtccttctcggaccgccggctccgcgtccccagttctacgtcgccagcacctcatccataccgttagcccgcacagcagtttttactgctctgtagtagtaggctgtagactctgtactctctagtctctactcccccctctccgccttctctctctccgcaggcggtatcctcccttcctcggttcctctcctctcccccaccaccccaccccagcgccccaaatgccgctccaaccctagcctcccgccacgcctttcgatctcggccggccatgggcaactgctgccgctcgccggccgccgtcgcgcgggaggacgtcagctcctcgcacttccccgcatccaacgcgaagaagaagccgcaccaagcgcgcaacggcggcggcgccgggcagaagcggctctcggttctgggcgacgaggggtgcgaggtcgtcgggatcgacgacaagtacgtcctggacagggagctcggccgcggggagttcggggtgacgtacctgtgtatggatcggggcaccaaggagctgctcgcctgcaagtccatctccaagcgcaagctgcggacggccgtcgacgtggaggacgtgcgccgggaggtggccatcatgcgccacctgcccaagagccccagcgtcgtgtccctgcgggaggcgtgcgaggacgacggcgccgtccacctcgtcatggagctctgcgagggcggcgagctcttcgaccgcatcgtcgcgcggggccactacaccgagcgcgccgccgccagtgtcacccgcaccatcctcgaggtcgtccagctctgccaccgccacggcgtcatccaccgcgacctcaagccggagaacttcctcttcgccaataagaaggagaactcgccgctcaaggccatcgacttcggtctctccatcttcttcaagcctggtgaaaagttttcagaaattgtgggaagcccctattacatggctcctgaagtattgaagagaaactatgggccagaaatagacatatggagtgcgggagttatcctgtatattttattatgtggagtccctccattttgggctgagactgaacaaggggtggcgcaggctattcttcgtggaaatatcgattttaagcgggaaccctggcctaatgtttcggaaaatgcaaaagatttagttcgacacatgttggagcctgatccaaagctcaggctaactgcaaagcaggttcttgaacatcattggcttcaaaatgcaaagaaggctcctaatgtccctcttggagatattgtaaagtcaaggctcaaacaattttctaggatgaatagattcaaaagaagggctctaagggtcattgctgatcatttgtctgctgaggaagttgaggatataaaggatatgttcaagactatggatactgacaatgatggaattgtatcttatgaagaactgaagactggaatagcaaaacttggttctcatcttgcggaatcagaagtacagatgctcattgaagctgtggacacaaacgggaggggggcactagactacggggaatttctggccgtctcgctccacctgcagaggatggcgaacgacgagcatctccggcgggccttcctgttcttcgacaaggacggcaacggtttcatcgagcccgaggagcttcgagaggctctggtggacgacggggcggccgacagcatggaggaagtggtgaacgacatactgcaagaagtcgacaccgacaaggacggcaagatcagctacgaggagtttgtggcgatgatgaagaccggcacggactggagaaaggcgtcccggcactactcgagagggaggttcaacagcctcagcatgaagcttataaaggacgggtcggtaaagctgggtgtcgagtgaaaaccgcaccgacgctcgttgatgtgtgtgtgggtgtgtgcgcgcatgtagttttaggcccttgggccactaagcagaagaactctaggccttcttcttctttttttgtcccctcgtgactgtcttgcgtggaaattttagataggtggaagtggcggaaccctccgatttgtcttactacctgtgtaattagctatcccggtctcgctgacaggcactgggccaaacggtgtacctaatgctctcacccgttctcttgatggcagcccgagtgctgtacgatacagtgtgttttgcggtctggaaatgctcaacaatgtgttgggaga

SEQ ID NO: 151438 - DNA, 1525 bp, Zea Mays
gtactctctagtctctactcccccctctccgccttctctctctccgcaggcggtatcctcccttcctcggttcctctcctctcccccaccaccccaccccagcgccccaaatgccgctccaaccctagcctcccgccacgcctttcgatctcggccggccatgggcaactgctgccgctcgccggccgccgtcgcgcgggaggacgtcagctcctcgcacttccccgcatccaacgcgaagaagaagccgcaccaagcgcgcaacggcggcggcgccgggcagaagcggctctcggttctgggcgacgaggggtgcgaggtcgtcgggatcgacgacaagtacgtcctggacagggagctcggccgcggggagttcggggtgacgtacctgtgtatggatcggggcaccaaggagctgctcgcctgcaagtccatctccaagcgcaagctgcggacggccgtcgacgtggaggacgtgcgccgggaggtggccatcatgcgccacctgcccaagagccccagcgtcgtgtccctgcgggaggcgtgcgaggacgacggcgccgtccacctcgtcatggagctctgcgagggcggcgagctcttcgaccgcatcgtcgcgcggggccactacaccgagcgcgccgccgccagtgtcacccgcaccatcctcgaggtcgtccagctctgccaccgccacggcgtcatccaccgcgacctcaagccggagaacttcctcttcgccaataagaaggagaactcgccgctcaaggccatcgacttcggtctctccatcttcttcaagcctgagactgaacaaggggtggcgcaggctattcttcgtggaaatatcgattttaagcgggaaccctggcctaatgtttcggaaaatgcaaaagatttagttcgacacatgttggagcctgatccaaagctcaggctaactgcaaagcaggttcttgaacatcattggcttcaaaatgcaaagaaggctcctaatgtccctcttggagatattgtaaagtcaaggctcaaacaattttctaggatgaatagattcaaaagaagggctctaagggtcattgctgatcatttgtctgctgaggaagttgaggatataaaggatatgttcaagactatggatactgacaatgatggaattgtatcttatgaagaactgaagactggaatagcaaaacttggttctcatcttgcggaatcagaagtacagatgctcattgaagctgagtactgcacatcattatattaagaagatgaaggtaatacagcaatacaaggcgagctcacggcagccagaaacgaaaatacacaaaagcatccattagggacacaaggacaaaaacaacccctcataggctgcctcggttgagaatttcacgttagaacccaatctaaaaatatgagaatcatccacatctggttgtagctccaccaaattgagaatatcccatagggtatgaaaatccatgaggacccgaacagtgatggcaccctgaatatccaatac

SEQ ID NO: 151439 - DNA, 1595 bp, Zea Mays
gtactctctagtctctactcccccctctccgccttctctctctccgcaggcggtatcctcccttcctcggttcctctcctctcccccaccaccccaccccagcgccccaaatgccgctccaaccctagcctcccgccacgcctttcgatctcggccggccatgggcaactgctgccgctcgccggccgccgtcgcgcgggaggacgtcagctcctcgcacttccccgcatccaacgcgaagaagaagccgcaccaagcgcgcaacggcggcggcgccgggcagaagcggctctcggttctgggcgacgaggggtgcgaggtcgtcgggatcgacgacaagtacgtcctggacagggagctcggccgcggggagttcggggtgacgtacctgtgtatggatcggggcaccaaggagctgctcgcctgcaagtccatctccaagcgcaagctgcggacggccgtcgacgtggaggacgtgcgccgggaggtggccatcatgcgccacctgcccaagagccccagcgtcgtgtccctgcgggaggcgtgcgaggacgacggcgccgtccacctcgtcatggagctctgcgagggcggcgagctcttcgaccgcatcgtcgcgcggggccactacaccgagcgcgccgccgccagtgtcacccgcaccatcctcgaggtcgtccagctctgccaccgccacggcgtcatccaccgcgacctcaagccggagaacttcctcttcgccaataagaaggagaactcgccgctcaaggccatcgacttcggtctctccatcttcttcaagcctggtgaaaagttttcagaaattgtgggaagcccctattacatggctcctgaagtattgaagagaaactatgggccagaaatagacatatggagtgcgggagttatcctgtatattttattatgtggagtccctccattttgggctgagactgaacaaggggtggcgcaggctattcttcgtggaaatatcgattttaagcgggaaccctggcctaatgtttcggaaaatgcaaaagatttagttcgacacatgttggagcctgatccaaagctcaggctaactgcaaagcaggttcttgaacatcattggcttcaaaatgcaaagaaggctcctaatgtccctcttggagatattgtaaagtcaaggctcaaacaattttctaggatgaatagattcaaaagaagggctctaagggtcattgctgatcatttgtctgctgaggaagttgaggatataaaggatatgttcaagactatggatactgacaatgatggaattgtatcttatgaagaactgaagactggaatagcaaaacttggttctcatcttgcggaatcagaagtacagatgctcattgaagctgtaagtattcacagaattatcctagaaacagataaagtagacttctgtatttactatttactttgaacttagaagtcttaggtggttaacaaataccatttaatagaaatggtacaaggaagatgtgatgcattgaaggacaaaatggtaattttcatgagaagatacattgaaccaacttcataatcttcacactgtgttcagtgca

SEQ ID NO: 151440 - DNA, 159 bp, Zea Mays
atgccccgcgtcctcatcatcattggggccttggaatcggaccaggaaaggatcgagcgaagtcgccggcgcgtgtggaaaccgttcgtggcatccgcatctggaggggctctcggagttgcggtaatttcacaccgtcgggaatcgtccggccgctga

SEQ ID NO: 151441 - DNA, 1543 bp, Zea Mays
gagaaagttctgccgtccatccatcgtctcgtccccgcctgccattcgcgagcatccaaagctgtagttgctgcaaagctctcgcaaaatcctactcccaccgccgactcgaacagtcgaacctcggctcccctcctccccaatccgtcatcttccttctacacttgtttctgcgggagcgggagagaaggcaccagggaggccgcccccgtcacccatagccaaagtcacgcgccaccaaactttgttctctcacccagtcgctttcgcgttcagcgcgagccgagcccagccggtgggtcggtcgctgaaggcggagccataaaggcgtcggcgacggcaggatgatgagcggcagatcgggcggcagggacggcgaggcggccggccccgtcatcaggatcagggtttcccacggagccaccttccgcgaggtcgtcgtgccggcgcaggctaccttcggtgagttgaagaggatccttgttcagactactggcttggagcctgagaggcagaggctcttcttccgtgggaaggagaagagtgacagagagttcctccacgcggcaggtgttaaggatggcgcgaagttgcttctgcttgagaagccttcccctgccaacatagagcagaaggttgagcctgtgattatggatgagagcgtgatgaaggcatgtgaggctgttgctcgtgttagagctgaagttgataggctgtctgctaaggtgtgtgacttggagaagaatgtgcttgcagggagaaaagttgatgataaagaatttgtcgtcttgacggaactgcttatgatacagctgctgaaactcgatggcatcgaagctgaaggagaagcaagggcacagaggaaggctgaggtccgccgagtccagtcccttgtggagaccttggataagctgaaggcaagaaatgcgaaccctttcagcgatcataacaacgctgtttcagtgacgacgcagtgggagacgtttgagaacggtatgggcagcttcagcgctcccccgccccacgttccttcagagcaagttaacactgactgggagcagttcgactaggctcagctgaagctgttgatgtatcgtgagatcggtatgggcattccttttcccaggcagcgaggtgttttgtgtatatgcaccgcgtttggtgcctttggtgtcctaactgcctgtgaatgttaccagatcataccatactaccatgtgaattgcattgcaccgctcaacgctcattgagggccatgtttcgatatgctcctgccaatgccattcgcatgatatttattggctaggttcagcaaggttggtggtaacggccctggccagatccctttacagcagtagctcatccgtgaatgcaattgaatcagtcatgtacacgttgacgctgtagctgttccgaaagtcctgtacagcactagctcatcggcgaatgcatctgtaccatgtacacgctgacgctgtagctgcatttgtagtgcccctttgtaatgcaggaatttaagagaaattatacaggaatttcacag

SEQ ID NO: 151442 - DNA, 1426 bp, Zea Mays
gagaaagttctgccgtccatccatcgtctcgtccccgcctgccattcgcgagcatccaaagctgtagttgctgcaaagctctcgcaaaatcctactcccaccgccgactcgaacagtcgaacctcggctcccctcctccccaatccgtcatcttccttctacacttgtttctgcgggagcgggagagaaggcaccagggaggccgcccccgtcacccatagccaaagtcacgcgccaccaaactttgttctctcacccagtcgctttcgcgttcagcgcgagccgagcccagccggtgggtcggtcgctgaaggcggagccataaaggcgtcggcgacggcaggatgatgagcggcagatcgggcggcagggacggcgaggcggccggccccgtcatcaggatcagggtttcccacggagccaccttccgcgaggtcgtcgtgccggcgcaggctaccttcggtgagttgaagaggatccttgttcagactactggcttggagcctgagaggcagaggctcttcttccgtgggaaggagaagagtgacagagagttcctccacgcggcaggtgttaaggatggcgcgaagttgcttctgcttgagaagccttcccctgccaacatagagcagaaggttgagcctgtgattatggatgagagcgtgatgaaggcatgtgaggctgttgctcgtgttagagctgaagttgataggctgtctgctaaggtgtgtgacttggagaagaatgtgcttgcagggagaaaagttgatgataaagaatttgtcgtcttgacggaactgcttatgatacagctgctgaaactcgatggcatcgaagctgaaggagaagcaagggcacagaggaaggctgaggtccgccgagtccagtcccttgtggagaccttggataagctgaaggcaagaaatgcgaaccctttcagcgatcataacaacgctgtttcagtgacgacgcagtgggagacgtttgagaacggtatgggcagcttcagcgctcccccgccccacgttccttcagagcaagttaacactgactgggagcagttcgactaggctcagctgaagctgttgatgtatcgtgagatcgatcataccatactaccatgtgaattgcattgcaccgctcaacgctcattgagggccatgtttcgatatgctcctgccaatgccattcgcatgatatttattggctaggttcagcaaggttggtggtaacggccctggccagatccctttacagcagtagctcatccgtgaatgcaattgaatcagtcatgtacacgttgacgctgtagctgttccgaaagtcctgtacagcactagctcatcggcgaatgcatctgtaccatgtacacgctgacgctgtagctgcatttgtagtgcccctttgtaatgcaggaatttaagag

SEQ ID NO: 151443 - DNA, 330 bp, Zea Mays
agtttcctttcaccaggcgacaccacacaacatgtgttctaaagtctaccccgtcatggaaaaaacaggcgactcaagatgtgttctgaagtctaccactctaccccatcacgggaaaaaggaaaacagagatgtgctcttccatactccactttcgcttgttttcctggatgcttctatttactccagcatcaggatcccaccaaacagggcaggcgattattcttttgagctgataatgtcaagaatcttatcagcgaactggcgaaaaccttgacgttccatcactttctcccattcctacagataaattaatgtagatattttttt

SEQ ID NO: 151444 - DNA, 602 bp, Zea Mays
taatatgtttgaagatccaaatttaagcaacctgaaggaactgtaaactgtttcagtgaacacataaaagagacgaaactacaacatgctacaatgcagcgaaagaggccaagtttggtttgggacaaacacacatgtcaaagaggattcagttcatcctgtgtctcttgttctgttggaggcttccaccatccacatccaatgaacctgatgcattgctcctccctctcctcctcagggatcccgaagaacctgcattgctaggctctcctgcactttcagagataccaccatccccttgtatcacagcaacagtgcttgaattagacgcttggtctgcagaaggtgcacccgcaatgcgagctccatcgactgctggctcattattttgaagattcgatgatgaagcagatcctctatattggtttggtgaagcgattcttctaaagtcatcactcatggcaccagctgtgtttgcaatgccaaaagcaagacgttccaacaattcaagtcgtcttgaattgcttcctgccagacgttccaacaatgcattgtttcctgtcagaatttctgatggattgtttcctgtcagaccattatca

SEQ ID NO: 151445 - DNA, 1759 bp, Zea Mays
ttctcgctgtggtcaccacgcttcacatctcgcgcggtagcgtccgacaggcatggccgcctcctccctgctccggtcgttcacccgccgcagctgcgcgggcccgagcgctttcgcttaccgccaccaccaacgacagcaaccttggtctcccttctccaccagcgccgctgcggtcacgcaggacgaagcggcgaagaggttccctggactagggccgacggcgaagggggagaaggccagggtggtggtgttggggacagggtgggcggggtctcggctaatgaaggacctcgatacacaaggctacgacgtggtctgcgtcgccccgcgcaaccacatggtgttcacgccgctgctcgcctccacctgcgtcggcacgctcgagttccgatccgtcgctgagccggtcgcgcgcatccagcccgccgtgtccaagtcgccgggctcctacttcctcctcgcccgttgcaccggcgtcgaccccgacggccacacgattgattgcgaaacagttacagatggtgagaaagattccttggagccatggaaattcaaggttgcttatgacaagttggtttttgcctgtggagctgaggcatcaacttttgggatacatggtgttaccgaccatgcaatctttcttcgcgaagttcatcatgctcaagagattcggagacggctcctccttaatctgatgttgtctgatctccctggaatttcagaagaagaaaagtgcagattattgcactgtgttgttgttggaggtggtccaacaggggtggaatttagtggtgaacttagtgattttattatacgagatgtcaaacaacgttattcacatgtgaaggattatattcatgtgaccctgattgaggcaaatgagatattgtcatcattcgatgttcggctcaggcaatatgctacaaagcaactaattaagtcaggtgttaggcttgtgcaaggaattgttaaggatgtgcagcccaacaaaataattcttgacaatggagaggaagttccttatggtttactggtatggtccaccggagttggtgcttcaccattcgttaagtcattgccatttcctaagtcacctggtggaaggatcggtgtcaatgagtggttacgtgtcccttctgttcatgatgtttatgccattggtgactgcagtggatttctcgagagcaccggcaaggaagttctccctgctttagctcaggttgctgaacgacaaggcaagtacctggcaagcctgctcaaccatgtcatgaaagctggaggagggcatgcaaactctgagactgaagcagatctgggtcgtccaccctttgtgtacaagcatctaggcagcatggcaactgttggaagatacaaagctctagtcgatctgaggcaaagcaaggagtcaagagggatatctcttgcaggatttgtgagctggttcatctggcgctcggcatatttaactcgtgttgttagctggaggaataggttctatgtggctatcaattggctgaccactctcttatttggccgggacataagcagaatctagagtgtctttgtatacgtacgaacaagcatataagtcgatgtagagttacacgccacggtcacttgcttgccacacacccctccgggggtccactcctaccactgtccctattagctgtgaatgtaattcacaggtgaattatgaataaatctgaggatactgcagttacttacatgtggtgtgaatgtataatactctgtc

SEQ ID NO: 151446 - DNA, 1448 bp, Zea Mays
ccgccgaggaacgattcccttcgcacaatcgtactgttcccctcaaaccccagccagccatggcgatcgcggcggattctgccgccgatcaagacccaaaccctatacccaacgaggccgcgggcgaatccgtcgagctacccgcgtacactgaccacggggaacccaatgcggatcttgctgacgtggactacgaggatgaagaggagctggacggggtgacggcggaagcggcggcgagagacaaggtggaggcagtgttccagcggctgtcggaagcccccgttggcatccgcgtccacgacattatcatcaaaggcaacaccaagacccgcgacgcgctcatcgaggcggaggtcgtggggctcatccgctccgccgtcaccgtgcaggacctggtgcgcaccgccaacatcgccgccgtgcggctcaggctcctcgacgtgtttgactccgtccacgtcctcctggatgctggccctcccgagctgcctggcaccactaacgttataatccaagtcgtcgaggctgctaaccccatcgatggaagcgtcggctgcttctccaagccggaggagtttgatattcgcggggctgttccattgggcttttacaatgctgccctaaatgctggcatctcagcaggggtgattttaccgttggggagggggtttatggaatcaccttcatctgtacctgatagatttttcctgggagggcattcttctccagtaatcagtctttgtagtttaacttccctactgggtttcaaaacaagaggagttgggccaacagaactacggagaattgtcccaagtgaatctgtgacaaatgaatccacagcctctccaggatgggactatttgggaggtgatttcgcagtttctgcatttgctgatctatcctttgatttgcccttaaagttattccaggatgctggcatacatggccatgcattcctatctgctggaaatctcgccaagttgtccgagggtgagttcagaaatttctcgttttccaagttcgggcgcacatttaggagctcagctggtgttggcattatcttacccactaagcttcttcgtgcggagataaactactgttatatactgaagcagtttgagcatgatcgtggaaagactgggattcagttcagtttttcgtctccaatgtagatgtcatgtttgtggttctccctgactatgaacaatgcaatgcttaatcgtgctgagcatttccgctcgttctattttggttctggctgaatcatctttttaactaactaggagtccagcaaatccatatccagatgattgatcttttgtatcatgctcgttgttgaccattagaactggaagagttgccttgctgacggttattgtgaactgtgatggtttcatggtcggcaaaaaaatgcgtatatgttggtggcaatgatgtttgctcta

SEQ ID NO: 151447 - DNA, 1931 bp, Zea Mays
ccgccgaggaacgattcccttcgcacaatcgtactgttcccctcaaaccccagccagccatggcgatcgcggcggattctgccgccgatcaagacccaaaccctatacccaacgaggccgcgggcgaatccgtcgagctacccgcgtacactgaccacggggaacccaatgcggatcttgctgacgtggactacgaggatgaagaggagctggacggggtgacggcggaagcggcggcgagagacaaggtggaggcagtgttccagcggctgtcggaagcccccgttggcatccgcgtccacgacattatcatcaaaggcaacaccaagacccgcgacgcgctcatcgaggcggaggtcgtggggctcatccgctccgccgtcaccgtgcaggacctggtgcgcaccgccaacatcgccgccgtgcggctcaggctcctcgacgtgtttgactccgtccacgtcctcctggatgctggccctcccgagctgcctggcaccactaacgttataatccaagtcgtcgaggctgctaaccccatcgatggaagcgtcggctgcttctccaagccggaggcaaggtcatggacagttgaaggatcagtcagatggaggaacatatttggttatggtgacatctgggatgcttcgggagcatatgggtgggaccagtcatcagagataagcattggagtatccttaccaagatttagatcgataccaaccccctcgactgctcgggcatcactcttgtctcatgactggctgaaattttcatcatacaaggaacgtctgcttggcctatcctttggtttgctttcggacatgcaccatgatttatcttacaatctgacttggcgtaccttgactgatccttcacaagcggcatcaaaatccataacaagacagttaggacataaccttctttctgcattaagatatacatatacaatagatcaaagggattcccatctcaggccaaccaaaggatatgcatttgtctcaacttcccaagttagtggtctatggggcagcaaaggattgagattcttccgccaggagtttgatattcgcggggctgttccattgggcttttacaatgctgccctaaatgctggcatctcagcaggggtgattttaccgttggggagggggtttatggaatcaccttcatctgtacctgatagatttttcctgggagggcattcttctccagtaatcagtctttgtagtttaacttccctactgggtttcaaaacaagaggagttgggccaacagaactacggagaattgtcccaagtgaatctgtgacaaatgaatccacagcctctccaggatgggactatttgggaggtgatttcgcagtttctgcatttgctgatctatcctttgatttgcccttaaagttattccaggatgctggcatacatggccatgcattcctatctgctggaaatctcgccaagttgtccgagggtgagttcagaaatttctcgttttccaagttcgggcgcacatttaggagctcagctggtgttggcattatcttacccactaagcttcttcgtgcggagataaactactgttatatactgaagcagtttgagcatgatcgtggaaagactgggattcagttcagtttttcgtctccaatgtagatgtcatgtttgtggttctccctgactatgaacaatgcaatgcttaatcgtgctgagcatttccgctcgttctattttggttctggctgaatcatctttttaactaactaggagtccagcaaatccatatccagatgattgatcttttgtatcatgctcgttgttgaccattagaactggaagagttgccttgctgacggttattgtgaactgtgatggtttcatggtcggcaaaaaaatgcgtatatgttggtggcaatgatgtttgctcta

SEQ ID NO: 151448 - DNA, 661 bp, Zea Mays
agacaacattactttagttattatcgtatatactgctacccgagataggataacctgcagtcgcccccaaatttccccgaaccaaatcactcccaccgtgtccacagcaaccagcacacatttccctttggcggatcgaaggaaggaaggaggagatgggtggcggcatggaggtgcacaaaaaccggtggatcgaagagtggaacgccggccgcgagaacctcgagttcaatttccgctggacccgccgcagcctcgccgtcgtcggcctcttcggcctcgctgtccccatcctcgtctacaagggcatcgtccgcgaattccatatgcaggacgaggatgcaggccggccatacaggaagttcctgtaagcggcgtccagggctgcaggagacgtcgatccctcgaccggggctgcgaggaggggagtttccattcagtttgtgtcggtattgttttagtctgaatctgatggagcagtttggaatgctgaactattgtgcctgatccaaatgaataaggtgtaatgactcgtcttttcaattactgaaactgaacatgtttgaatttatctggtcacttgtatggtaaaatagcagcgttgtcaattgtcatatactgtttatgacttcattcgagcgccgtggaggaatattggata

SEQ ID NO: 151449 - DNA, 673 bp, Zea Mays
agacaacattactttagttattatcgtatatactgctacccgagataggataacctgcagtcgcccccaaatttccccgaaccaaatcactcccaccgtgtccacagcaaccagcacacatttccctttggcggatcgaaggaaggaaggaggagatgggtggcggcatggaggtgcacaaaaaccggtggatcgaagagtggaacgccggccgcgagaacctcgagttcaatttccgctggacccgccgcagcctcgccgtcgtcggcctcttcggcctcgctgtccccatcctcgtctacaagggcatcgtccgcgaattcggttggatccagcatatgcaggacgaggatgcaggccggccatacaggaagttcctgtaagcggcgtccagggctgcaggagacgtcgatccctcgaccggggctgcgaggaggggagtttccattcagtttgtgtcggtattgttttagtctgaatctgatggagcagtttggaatgctgaactattgtgcctgatccaaatgaataaggtgtaatgactcgtcttttcaattactgaaactgaacatgtttgaatttatctggtcacttgtatggtaaaatagcagcgttgtcaattgtcatatactgtttatgacttcattcgagcgccgtggaggaatattggata

SEQ ID NO: 151450 - DNA, 1112 bp, Zea Mays
cacccacaaaacagcaacccggccgccgcgcccgcgtgcctcccgtgagcccccaatccaaaaaacgaacaaatccccgcctcctccctcgtccccatctccggcctccgctcgcccacgcccacctcccctcatgtggctgccctgggtgaagacgcgcccttcgtccgccacctccacctctcccacatccaccgcgctcgtagccgccgccgccgccgcctccccgcgcctgtccttctcctcgccctccctcaaggacctccaggcgctgctgctgtctgacgcagccacgccctccccgccgcccgccgcgccctgctccccctcctcccgcgtccgcgtcttccaccgggtccgcgtcgccgcctcggccctccgcgcgctccgcaccctccaggcgccgccgcccgccggcgccacctcctccgaggccgccgaacgccgcgtcgtgctctacttcacctcgctccacgtggttcgcggcacgtacgaggactgccgggccgtgcgcgccatcctgcgcgggctccgcgtcgccgtcgacgagcgggacctcgccatggacccgcgctacctccccgagctcgcggcgctcctcccgcgcctcgcgtccccgcggcgcgccacgctgccccaggtattcgtcgggggccgccacctcggcggcgccgacgaggtccggcgcctccacgaggccggcgagctccgccgcgtcgtggccggcgccggcgccgcctccctcgccgcctgcggccggtgcggcggcgagcagtacgtgctctgcggcagctgcgacggcagccacaagcggtacagcgccaagggcggcggcggcttccgcgcctgcgccggctgcaacgagaatggcctcgtccgatgccccgtctgctcgccgccggacgtctgacgctccagatccgagaggccacgacctgataactgttagatgttttccttcaccttttagttccaaacttgagatgataagaaatgagccgtgtgtgtaattgttaatctttaattggcacctactagctagttttaatttgttgctaatttgaaagtggccatttgcagtttttctagcatttgctaatcaacgcctctaa

SEQ ID NO: 151451 - DNA, 554 bp, Zea Mays
atggcctcgtaccccatggcctccgccatctggagcggcgtggcgccgcgcctggtccgggcgttggcgtcggcgcccatgtcgagcagcagctccacggcctccgcgtggcctccctcgacggcgaggtggagcggcctgtgcccttccacgtcctcgcactcgacgtccatgcatcccggcccggcgagcagcgcgatcgcgtcgccgtgtcccttgatcgcggccaggtgcagcgccgtgaggccgtactggtcgcgcccgcggacgccggcgcgcttgctgagcagggactcgaggctcccgaggtcgcctcgcctcgccgccgtcatcaccagctcccaccgttccaggacgtccaccacttcttgctgcactgggcaaaaattgacaacacctccgccgttacactgattacattattggtctttggtcaagacaagaataatggcctggccatgcatgcgttagctaatactatcgtacgtcgtcgctcgtcctactcgaccgggccgttcctatcatggttcacgagcacagctacgcggctcgca

SEQ ID NO: 151452 - DNA, 1088 bp, Zea Mays
caagcgcatcggcatctgctcagacctcatccatctccctccttaactttccctccaaaggaaaagcatctctcgcgcctaggccatcatcgtagccctcgactaaactaaactaaactaaaagcaagacagtgagcgccctttttcttccgttgctccatggccatggcttcccgaccgcctcttcatcgtcgacgtcgtcttcccctcgtcccactcctcgttctgctctgcctctctccgggatgcgctgccgggagagtcccggtttcggtctactacgaaacgctgtgcccgttctgctccgcgtttgtcgtgaacgacctctccaggatcttccgcgacgggatcttctccatcgctgacctgcggctcgtccctttcggcaatgggcgtgtctcggccgacggaaccgtcacttgccagcatggagaggacgagtgccaactcaacgctatagaagcttgcgtgatcagaatatggcctgacgcggagcagcattttcctttcattcaatgcgttgagcatttagcactgactcggaaatgggacgcctggcagtcttgctttcatgaaactggtctcgcttatcaacctgctattgactgctacaactcagggtatggaaggcagctcgtactccagtatgctgctgagacaaatgctctgcagcctcctcatcggtttgtaccttgggtggtcgtcaacggcaaaccgctcggtgatgattacatgaactttgaggcatacatctgcagcgcttatgacggcaagcttccaaaggcatgcaaggggaagcacctagcaattgctcaggagacgaaagccagccgaggagacaaggtgtgcccagctagcaaaactatcagctaactcgcgtgtgaaaatttaagttttttggaatttggataaaattgagtactgctttgagtttggttctaagaggttctgcgtttctgctgtcttgttgggtctccgtctattttgaagttagttgaaataacagtgctgtcaaacctttgacagaaaaacatcaaatgcaaacatttcatgttgatattcactagcattttcagaaaaaagaaata

SEQ ID NO: 151453 - DNA, 1226 bp, Zea Mays
ctttccacacataatgagcatacctacaagccatattcccatccacattcatcccccaacacccactcgtccacccaccgttttccttgtcttcactttcctcacgcaattcacccaccccctcaccatttcccccatcgaccattgctgccacataccaaacccacttcctgtggtcttcggtgtcttccccgccgccgccgctgccgtcgccgtcgtgcatcacactgtccctcttgctgtgatatctatgagagagagaaacagctcgatcgatcaagaacaccaacgaggctctagctccagatcgacaatgccgttcgcagcctcaaggacgtcacagcagcagcacagccgtgtggccaccaacgggagggccgtggcggtgtgcgcgggtcacgcgggcgtgcccgacgaggtggcgcggcaccacgagcacgctgtggcagcggggcaatgctgcgccgccatggtgcagtccatcgcagcgccggtggacgcggtgtggtcgctggtgcgtcgcttcgaccagccgcagcggtacaagcgcttcatcaggagctgccacctcgtggacggcgacggcgccgaggtggggtccgtgcgggagctcctgctcgtgtccgggctgcccgccgagagcagccgcgagcggcttgagatccgggacgacgagcggcgggtgatcagcttccgggtcctgggcggcgaccaccgcctggccaactaccgctccgtgaccaccgtgcacgaggcggcgccgtcgcaggacgggcgcccgctcaccatggtcgtcgagtcctacgtggtggacgtgccgccggggaacaccgtcgaggagacgcgcatcttcgtggacaccatcgttcggtgcaacctccagtccctcgagggcacggtcatcaggcagctggagatcgcggcaatgccgcacgacgacaaccagaactgattgccgtcgggccggccggctgcacaccgtcatcgcagttgggctgccggtttatttggacgaggcttcatcgaccatttatgatatattttctttcgtcgttggtactgtatactctcgcgaaaataagaagttggtactgtgaactgcttaaagtttgaggttgtttgtcttccctttcttaaactctgccaataatgaagtattgtaagttacagcatcaataatattaagaccagtaaagtagtatagttaatatatatatatatatgaa

SEQ ID NO: 151454 - DNA, 2053 bp, Zea Mays
caaacacccacaggccgtagcggggacgccatggagcgagagcctgcgcgctccctggaacgcgctatatatgccgtgcgtgctcggtggcgaagaagcctctcatcgccaactcggagaccttgagaggaaagccaccgcgcgctagggcctagggcagggcacgagcaaaggccctcccgcgggttccattggagcgcgagcgaacggcgccgacgcggcaacacacattcgctttatttgccatgacatcgccgtcctcgtcgtcgtcctggctgctgctgctcctctcgtgcctcgcgcttgccctgctcgcggcggacgccgaagtgcaccaccatgagttcgttgtccaagagacgccagtgaagaggctgtgcaagacgcacaacgtcatcacggtgaacgggcagtacccggggccgacgctggaggtcagagagggcgacacgctggtgatcaacgtcgtcaaccgggcgcagtacaacgtcaccatccactggcacggcatccggcagatgaggaccgggtgggcggacgggccggagttcgtgacgcagtgccccatcaggcccggcggcagctacaagtaccggttcaccatcgaggggcaggagggcacgctgtggtggcacgcgcacagctcctggctcagggcaaccgtctacggcgcgctcatcatccgccccagggagaacaagacctaccccttcgccaagccctcgcgcgaagtccccgtcatccttggggagtggtgggacgcgaacccgatcgacgtcatccgggaggcgcagaggacgggcggcgcccccaacgtctccgacgcgttcaccatcaacggccagcccggcgacctgtacaaatgctcccagaaagagactacggccatcccggtgaagcccggcgagacggcgcttctgcggttcatcaacgccgcgctcaaccacgagctgttcgtcaccatcgcgcagcacaggatgacggtggtcgccaccgacgcgtcctacaccaagcccttcaccacctcggtgctcatggtcgcgccgggacagaccaccgacgtcctcgtcaccatggaccaggcgcccgcccggtactacgtcgccgcgcgcgcctacgtctccgggcagaacgtggcgttcgacaacaccaccaccacggcggtcgtcgagtacgactgcggctgcgcctccgacttcggccccaagatccagccggcgttcccgtccctcccggccttcaacgacaccgccgccgccgccgccttcgccgcggggatcaagagccccggcagggtcagggtccacgagagcgtcgacgagcacctcttcttcaccgtcggcctcggcctgttcaactgcgagccgggccagctctgcgccgggcccaacaacagcacccgcttcacggccagcatgaacaacgtctccttcgtcttcccgcggaccgactccctcctccacgcgcactacttcaagacccccggcgtcttcaccaccgacttcccggcgcacccgccggtgcagttcgactacacggcgcagaacgtcagccaggccctgtggcagccggtccccgcgaccaagctgtacccgctcaggttcggctccgtggtgcagctcgtcctgcaggacaccagcatcgtcacgcccgagaaccaccccatccacatccatggctacgatttcttcatcctcgctgagggctttggcaacttcgaccccgagaaggacgtcgacaagttcaactacgtcgtcccgccgcagcggaacaccgtggcggtgcccgtcaacgggtgggcggtcatccagttcgtcgccgacaacccaggtgtgtggctcatgcactgccacctggacgtgcacatcacctggggcctggcaatggctttcctagtggaggacgggtatggagagctgcagtccctggagccgcccccagttgatcttcccatgtgctaatgctgaccagaagcaactgtgttgaggaatcgaaagcatgttcacgcttccagcttgttttgaagttttcccctgtaaatctatgtaatttt

SEQ ID NO: 151455 - DNA, 909 bp, Zea Mays
atggccactgacgttcaggttgcgctgcacggctctgctgcctccacacacaaggtaaacaatacggttgatcttgctaatgttttcactacaatccaaaaaagtttagacactgtgcctgtttgctccctcggcgttggcatgatcaatatgagttccactttactgaactctgccccagctgcccatccgattgagtgcccacataccaattgcttagacagtgtcctggagagtggcccctgcgctgttccggtccctgcttggccgggcaattgtttatctggccaacagactttgctttcagagttacatcttgtgaacgataatcgcgctattgacctcatcatgcctgctcccgatctgggtgggctgttaggtggctcagtcgcccacgatccagttgtcactgacaatcaggaagctgtgagaattctaccttccctcggatcagagaacctaccgacagacaacaccaaattgatagacttcatagccacaataaccaagacaccagagccacctttgatctcatccccgccgcaaccacacccgttaaaatctcagaagcaacccaccactagaagatcaagtgttaggttggctgctaagaaatgcattaggcctgggcgtaaccgggatgcaatatccaaggcccaggaaatcttacttgccaagcttaacaattcggctgttaaaaatgttgactgctctagttcttccaattgttctaactttgatgagtcttttgagcagatgacaagccttctcacaaagcctctctccaagaagcaaatggatgcaatcatggagctcttaaaccaagacaaggtgaagacagcgaagagtaaaaaaaaagggagaaaggtgatgccggccatcgaagatgtcgaggcgggggtcaactga

SEQ ID NO: 151456 - DNA, 80 bp, Zea Mays
cgctcgtctccggatctcttcttcctctccgcctcgcccttccccatcagtactgcctccgcgagattgggggatggaac

SEQ ID NO: 151457 - DNA, 687 bp, Zea Mays
aagaatggtatgtgccgtccaaacgagcgagcacacatatcctttgtggtcgccgtcgctctcctccacatgacttgcttatgccagtatgctgactgtagcctgtaccggagctaccccagcataccacgctgtgattttgctgacaacttcttcttcatcccaggcatcgctgcaccagtctttgctggagtttacacagcgcacagtcttctcagcagaggcaacgaggctccgtctgatgaaggaaccaatgaatcagatacggttcaagaagagacaaagccacctgaaacagggaactgtgaaaagaggaaggtacgggtgcagctatataagctccaggaagcagagagccaggcatctctacttgaaagctgcttgaagagtttgtgcacagtgggtctcctactcggctattcagttctcctgctctactctccggaaaccatggctgttgtggagctgaaggttggaatgcactgtgagaggtgcatcaaggccatcaagaaggcaatcaaaactattgacggtgagcttattacttgcttatggtcaaacatggagagctatcgccttgagacggagataaacaaggtcacggtgacggggagcgttaccccagaggaagtcgtcaaggctctccacaagatcgggaagacggcgacatgctggacccaagactga

SEQ ID NO: 151458 - DNA, 667 bp, Zea Mays
agatgtgaacaacttaccgacacggcggcggagcacgagcggcagcagaacgaagacggcggtgacgagcagcacgaactgcctccccgtccaccaccgcgcgccgaacagctcctgcagcaccccggcgtgctcgtcgcctccgccgacgctcccagacatcacctcaccgatgatgatgaggtagacgacgagcgtgcccgtggtggtaagggcgacgaagacgttgagcaatgcggcgccggcgcggccgaaggcgtcgcccatggtccccgcgtacgacgtggccgcctcgtccttgccgccgccgccccacccccgccccgtgtaccgcagcatgaactccacggagacgtcggcgagcgcggcgacggcggcgatgaggagcgccgcggggaccaccccgagcacccgcatcgctgccgggatcgacatgatgccggcgccgacgatgctcgtcgacacgttgaacacggcgcccgagaccgacgccccgccgccgtgccgcccacccgccgaggactccggcagcagcggctcgtctatcgcgcccgcgctggcgccggcgtccgcgcgtttgcctgatgttctcgccggcggcgtcattttcgcgggcgctctcgggcgtggcgtgtgggtggcgctcgccgacgaacgagcgggaacc

SEQ ID NO: 151459 - DNA, 489 bp, Zea Mays
atggtgttcctcttcacaatgcagatcaactcgttcatacaaccaaatcatacatttagtgattctaaaacaaagacccggctatcacctaccacccacgtcaccggaatcaacctttatgacaccatgaaaagcgggacgcggcccatcggcgccgcgccggtccacgacggcgtgcaggaggaggagccgcagcagggagacgacgaccccatcgccacgcgggcgctgttcgcggagctggacgagcgagggaccacgtcggagctggagaacctggcgctcaacatccaggggcttggcaagcgcaggcaggacgggggcgagaagcagagtggccgcgcgcggagccagcagcagcacgggttcgagacggcggaggtcaccgacgacttttgcgaggagcttctgaacgaagggatgaagggcggtgcggaggctgagacgcggcggctttggggtttggggggaggtgggagcgtgagatga

SEQ ID NO: 151460 - DNA, 1710 bp, Zea Mays
tgtctgcgggagccgcgctgagatctgacgtggctacagtggcgtcccagcctgagaatagaggggcctttaacaagacaccgagggcgcgcagccagcgggagtacacgcccctccccttcctcgtgcttcctaaacttgttggctgcctgcagcttgcttgcttgcttgctgcggcttcaatcagggtcttgaaataggggtgctgctcaggcccatcccatggagtggtccatgtccagggggaggcggagatggaggcggtgtggcagatccatgctaaagctggcggggctgtgcctcgccgtcgccgtctgcctctgcctctgcctctacctctgcggcgttcggccttgggcctgcagtggctgtactgtgctgctccgttcaggtaaacgaacgaaagatgtcctcactactatgcagatgcttgcttgccgcgtttcggcaactctttcgtgtgcttctctctctggtgacctgctctgcatagtcattggtgtgagtgacgcctttctcgtccacggttcatgtttgccaaggttcattcacgtactagttgcttcgtcatgctgtgttctttgttctttatacatgcgcgcagctgcctgcactcgtcttcgtctagcaccggattggtcttcgcttcactgcatttactagttgtaacttcattgtcctctttttttttctttcttgcttgatttgctcttcagagtcctggagacgaggacgggcggcagcaccttgcggcaatcaggggtgctacacgggtgggcaatggcggcggctgctggcggatggtccggggtcatacccgccacggtgcacgtccaagtgcggcgactgcagcccctgctacccggtgcacgtggccgtgccgccgggcgtgcccgtcactaccgagtactacccggaggcgtggaggtgcaagtgcggcaaccgcctctacatgccatgagcgcagtccgagcaagcaggcaggcagccagccagccagccagcgaaggatcgagagcgccggccgaggcgcgctgggcctacgctccattattgcaccgggcggggtggctctcgcggtctcgcctgcgctgcgctgcgcgcgcgcgcgcggtgtcgtggtcctctcgccgcgcgcatgggcgggatctgcgctctgcagcggcgcgtgctggccgtggccagtggcggcctaccactctgaccggctgccggctgggtccgctgcctggggatgctgagactgtgcatggctttttccgtgccgcgcgctggaattcgcacggccctaccacgagcgcgtggaggcttggagcggagcggaggcatggcgggcgtacggcgcgtcagcgcgtgctggatcgatgaaggatgagagctgagaggagctgtcgcggcccactcctacacgtgtccgtataatctgttcaatcttccaagtgttgatactcgatcttttcgcatctgagaatcttgttacacaattttctggtaaccaaatatactgttggatactagtactatatttcgtgatagtacggaacacttcaaatcctattgccctaccgtgttagaattgatctccaccggttagcccaatgacaaactaggtctttgacctcacggcttgatcgatagagtccagcacaaggtgaggttggtgggccttgttgcgaagcttataaataaagaggtgggagttgacggctc

SEQ ID NO: 151461 - DNA, 1677 bp, Zea Mays
ggcgactagccgattgacatccatccatctctagccgggcggtcactcagagtctcagacacgcacaaccagtacaagtctacctgaagtgaccccgtcgacctgaagtccactactagactcagtgtacgcagcaggcagcagcagctagtgccaccgcttgcctagttgcctgcctaccctgcatgcatgcacgctcttctctttctgtagcctgtatgtatgcactgtatgtatggtcgcagtctcgccgatctatcaaacttggccagcgatcaggtgtagtccggtctgtctgcgggagccgcgctgagatctgacgtggctacagtggcgtcccagcctgagaatagaggggcctttaacaagacaccgagggcgcgcagccagcgggagtacacgcccctccccttcctcgtgcttcctaaacttgttggctgcctgcagcttgcttgcttgcttgctgcggcttcaatcagggtcttgaaataggggtgctgctcaggcccatcccatggagtggtccatgtccagggggaggcggagatggaggcggtgtggcagatccatgctaaagctggcggggctgtgcctcgccgtcgccgtctgcctctgcctctgcctctacctctgcggcgttcggccttgggcctgcagtggctgtactgtgctgctccgttcagagtcctggagacgaggacgggcggcagcaccttgcggcaatcaggggtgctacacgggtgggcaatggcggcggctgctggcggatggtccggggtcatacccgccacggtgcacgtccaagtgcggcgactgcagcccctgctacccggtgcacgtggccgtgccgccgggcgtgcccgtcactaccgagtactacccggaggcgtggaggtgcaagtgcggcaaccgcctctacatgccatgagcgcagtccgagcaagcaggcaggcagccagccagccagccagcgaaggatcgagagcgccggccgaggcgcgctgggcctacgctccattattgcaccgggcggggtggctctcgcggtctcgcctgcgctgcgctgcgcgcgcgcgcgcggtgtcgtggtcctctcgccgcgcgcatgggcgggatctgcgctctgcagcggcgcgtgctggccgtggccagtggcggcctaccactctgaccggctgccggctgggtccgctgcctggggatgctgagactgtgcatggctttttccgtgccgcgcgctggaattcgcacggccctaccacgagcgcgtggaggcttggagcggagcggaggcatggcgggcgtacggcgcgtcagcgcgtgctggatcgatgaaggatgagagctgagaggagctgtcgcggcccactcctacacgtgtccgtataatctgttcaatcttccaagtgttgatactcgatcttttcgcatctgagaatcttgttacacaattttctggtaaccaaatatactgttggatactagtactatatttcgtgatagtacggaacacttcaaatcctattgccctaccgtgttagaattgatctccaccggttagcccaatgacaaactaggtctttgacctcacggcttgatcgatagagtccagcacaaggtgaggttggtgggccttgttgcgaagcttataaataaagaggtgggagttgacggctc

SEQ ID NO: 151462 - DNA, 1428 bp, Zea Mays
ggcgactagccgattgacatccatccatctctagccgggcggtcactcagagtctcagacacgcacaaccagtacaagtctacctgaagtgaccccgtcgacctgaagtccactactagactcagtgtacgcagcaggcagcagcagctagtgccaccgcttgcctagttgcctgcctaccctgcatgcatgcacgctcttctctttctgtagcctgtatgtatgcactgtatgtatggtcgcagtctcgccgatctatcaaacttggccagcgatcaggtgtagtccggtctgtctgcgggagccgcgctgagatctgacgtggctacagtggcgtcccagcctgagaatagaggggcctttaacaagacaccgagggcgcgcagccagcgggagtacacgcccctccccttcctcgtgcttcctaaacttgttggctgcctgcagcttgcttgcttgcttgctgcggcttcaatcagggtcttgaaataggggtgctgctcaggcccatcccatggagtggtccatgtccagggggaggcggagatggaggcggtgtggcagatccatgctaaagctggcggggctgtgcctcgccgtcgccgtctgcctctgcctctgcctctacctctgcggcgttcggccttgggcctgcagtggctgtactgtgctgctccgttcagagtcctggagacgaggacgggcggcagcaccttgcggcaatcaggtgcgaatccatctccccgatctcagctactactacctatattctccactgcgcgacgatggcgatgggacagcgcagagatcaaaccgacttgtgattagctggttgtcctgttcataatactaatcttctgctccgggatccaccgcattcatgacgatgcgccatcaaatctaattaaacccacgtaacagagagcgacagaggaaacgccaaacgcacccggctccgccatggctgctgctgcacgcacgcacgcactgcagccagctcccggccagtagcgctcgatcatgcattcacaggcacaggcacggccatgccagctgctcgcagccccgtccgtccgacagcccttcgccgccgggtcccatggccttttgaccatacgtcactgctgtgtccatcggtcgatgcattggcaatgcaacaccaccgtacgtacccacgatagcgaccttaccgccggccgaatggtacgtacgttccacgagtgcgcgacgcgacgcgacgtaccctcagcccccagcattcagaactcatgatatggttcgttattcttcttgctactcgcgctgcaggggtgctacacgggtgggcaatggcggcggctgctggcggatggtccggggtcatacccgccacggtgcacgtccaagtgcggcgactgcagcccctgctacccggtgcacgtggccgtg

SEQ ID NO: 151463 - DNA, 1125 bp, Zea Mays
ccgtcgcgcgcagaggactacacggaggagctcgccatcgcgcacgtgcggcggctgctcgacatcgtcgcctgcaccaccgtgttcgcggcgaagaagccccagccgaagcccgatgtggcggatgccgcgaccgagtccgccaaagacgggtcgccctcgcccggttcaaaaggttgactagtcgaagtgaagttgctatttgttcaagagattacaaattctattcaccccggcataagatcaggtgttccccacaggcagcatttgacatccctgatacaagtgctttgacagaggatgagaactctttattggtttgttcttcaggatttcgctcaccaaacgagaccacttagaatctgggtaggtatgcaggtgcgagtttgtaacgagaaaccggtgacgattgtggcatcccaagaaggattcaaccctgcaggaaagcgagcactcatcagcaaaaacaagatgagaccaatgggatgaccattttcccttgtatcagcttaaggatgctgcttcataagtcatgtgctcaaccacctggagttcaacggttgcagactagtgatcctgaagacaatgaggctactcaaacttttgtccggaagatattaacagacagcctgcagaagcttgaaaatgaggctccgatagttcacagagtcatctacttaagctgacatggtatgtcaatcgtgccctatatcttttgcaccttacatgtggcccttctcatcgtaacaccgctgcaacttatatcaatgttgtgatgatggaagaagggttgggtagggatggcaatgggtacccgaaacccgaaacccgatgggtaaaaaccctattagggcacgggtatggcggattttgatatcaatgggtattttattgggtcatttgttatgcccatcgggtatggtgggcgtgggtatgttctctgttgccccatacccgctacccgatggggaacccgctaatatatgacacgtgggtccagatttatatgtctcatataaaatgaatgctatgttttgtccacagttttgtagaatcaaccgctatgttttgtgtgatttgaaggcatgatattgccatttaatgttgaatattgttgaacctgtg

SEQ ID NO: 151464 - DNA, 930 bp, Zea Mays
atggacagaaaagaggaaaaagaagagcacgacaatgcagatgatgatgaagacgatgatgaagacgatggcgaggaatatgagcattcagttgagtgtatggtttctaatgtgaatttcgatgccaatatgaagcaagaaacaaagggatttgaatccaaaggtattcagtgtactgaagcaccagaaccttgcgagacagtagaacttgagataaaggcacacaagaaagagttgatgagaaacagagtagcaaatgcagaagaaactcctggtttcacagtatatctgaatcgaaggccagcaagcttggttgaggccatgaaggatatcgactgtcagttctcggggatatgtgacgctgctcggaaaatctcagtaatgttggaggcaagtagagctcagtaatcaacctcaaacgatctttctgcgaagatgctgaacccagttgcatttttgcgttctgcgtcatcccgttcatcatcatctcgtttccttcttgctccctctagctcaatagatgatctctttgacaatgagactagcagctgctactctgaagaatcttgcagtaccatgtctggaagtcaccactctaccttggatagactctatacatgggagaagaaattatacaaagaagtaaaggcaggtgagcggttaagaatcgagtatgagaagaggctgacacatttgaggaaccaagatgtgaaaggcgaagaacctacctctgttgataagatttgtgcagcattgagaagcttgcatactcggctgaaggtgtcaatacacacagttcagtcggtatcaaggaggattgaaattctaagggatgaggagctgcatcctcagcttatggagttgattctggacacggagacgatcagcaagcacgacgtgatcagggattttccttcgcatctcctgtag

SEQ ID NO: 151465 - DNA, 3066 bp, Zea Mays
ggcaccaacccagcagactgagcagatcagcagagcacgatcgtccccgcccgaagattctccccatcccctcctccccacccacccaccctcaggcatgacggcgacgtccaaggctccgcggcggccccgcatccgcccccgcggcccgccgccggcgccgacgccgatccgcacggcgcgcggcgcgcgcaccgcggccgccgacgagcgcgtcctcgccgagttcctcgaggcctccctccgcgtgccggacctctccctgcccccacggaagcgcttcagcttcccaccgccgccggcgccggaaccggacgggatcccttctcacgccctcgtttcgggcgacgcggacgcggagcagcgggcgattgccgcggcagcggagaccggcgcgttccgcgtgaccagcgcggtcgacgctcgcgaggcgcgcgacgccgtggaggcggcgtcggagctcgtgttcgcggcgccggaggaggtgaagcgcggcctggagagatggtaccgaaggagagatcgggagccccgggaggagttcgtctggttccggccgatgagcgccgacgaggacagagcgatggccgcggccttcccaggctccacgtaccgtgcgttcagggagaaggtggacaccttggcgtccaaaatggaggatatagcaaaagctgtcatcagggttctacacgataacgtcaaaaaccctaaagcctctgccgagcccagagaagccgccccgtcaatcctgcgcctggcactgtacagcagtgacacgtcgagtacgtgctggaacgagcttgacagcaccactgctcctaactcgcacgctttgagcgtccacctctgcggacaagaccggcggatctgtctgcggcggagtctggggggctcgaccgtctccactctacctgcgggctgcatgcttgtcacagtcggcaagcagattcaggaatggtccaacgggcagttcaaggccgctgttggaggagaggtagtactgttcgagacgaccgacgaaccaggccccttcgtctccgcggaactcatcgtgtactgttactgtccacacgacctgcgtctctctgaggctggccgctggtgtcacgcttgtcccctagctagttctgcagcctacagctgcgaggctcaaggagagatccctaggtgtaacaagtacccaaaacaccacgcaagctgcgcacccaaaaaaaaaaccacccggccttatcaagaggaggaacaagactacaagagtcaagagtgcctctccgacaatgcagaattgcagagtacaagtaggaaggcgctgggtattcaagaaacaagagaggcagacggcagagacatatcggcctcggatgctcggccgacttcaattcttcaaccagaccgatcaaaatggcagcagtgtcgatttccagattaataccacacgcccacagcatatatatatcacttacggttacagtgtactgtacctggtaggtacagtgcgcaggtgtcgtgttaggcccgcccaaccaagcgccactgtatcatcgaggtaaaaaagaagaagaagaagaacaacatcatggttggcgtcacaggatttagcaaatatatctgcgtacctaatttaggatcattgacaggaacgtaattacgatttacaaccaccactcttgctcttggggtcgtttaattcaccatgcaaaagagtgcgttgcgttctgcatgagctctgcagctacactacaccttgacgtcagagagcgtgacccagatgtgctcgaacacctcgacgatgaggtcgtggtactcggcggcgttgagggacaggtagcacgcgaggaggtcctcgaggtcggcggcggcgcggatgccgttctccgcgatcatctcctccatggactcccggaagtcccgcctcgggtcccgcgacgacttcaccaccgcgaagctcttggccagaggaggcggcggggagcgcgcggccgtcgtggtcgtgggtgacttgcacttcttggacgacggcgacgctaagcgcggggtgttcgcgcgcgtcttgaggcggcgcgccgacgacacggaccgccgccgtggcttcagcgtgctctgctcggggacagctggcgaggtgcgtcgggccgcgtgtgtgaggacgtcgatgtgcttgtcctcgagctggcacacgtcgggctccctcttcgtcgccggcttggtcgcgatcggcgggagagactttgcgggcctcttcttggtccgcaggtcgaagatgatatccgtggcggaagtgatcaccttgccgtcgagcctgtggtgagcgcggacggcgaccgtcggtttcttcacgcactcgtcgtcgccgtcgctactgtaaccggcaaaaatgtcgcggcggcacggcggggtgtcgggcgcctcgaccaccacgagctcttgccggcagcggcaggcggctgaggccggcgaggacgcgacgccgctgctgctgctgctgctggccgagggcggcggcgccagcttgacggaccgcctccggtggcgccgcctggaccggcgcggcggcgacagctgcagcggcgggaagtgcgtgtcggaggccctggggtgcagcggcgagcccaggccgccgaggtcccctgcccgaggcgtgtagtagtgagacgccctgtgcgggagccaggccgcggccctcggcgtgctcgggggcggccgcgacgcggccacgcgggggctggtcgccgccgcgccgccgccccgtgcgtgcatgtcccggagcttgaagaaccacgcgttcggcatcatgtctgacagccggaacttgtgccgccccatggctccctgcgccggggtgaagcacacacacaagctgcaacggcgacaaagctctgcccgcgcgtgcgctgctgtgcttctctttggtagcttgctctgttacgaagatcagaggcgcggctcggcgaggatgaggacgaggcgaggcagagcattcaggagcgcaggaaatggcgcgcactgcactgcactagagtggggggagcgggaggagtcgaggagaggaggggacgcgaggcgcct

SEQ ID NO: 151466 - DNA, 1449 bp, Zea Mays
tatcatcgaggtaaaaaagaagaagaagaagaacaacatcatggttggcgtcacaggatttagcaaatatatctgcgtacctaatttaggatcattgacaggaacgtaattacgatttacaaccaccactcttgctcttggggtcgtttaattcaccatgcaaaagagtgcgttgcgttctgcatgagctctgcagctacactacaccttgacgtcagagagcgtgacccagatgtgctcgaacacctcgacgatgaggtcgtggtactcggcggcgttgagggacaggtagcacgcgaggaggtcctcgaggtcggcggcggcgcggatgccgttctccgcgatcatctcctccatggactcccggaagtcccgcctcgggtcccgcgacgacttcaccaccgcgaagctcttggccagaggaggcggcggggagcgcgcggccgtcgtggtcgtgggtgacttgcacttcttggacgacggcgacgctaagcgcggggtgttcgcgcgcgtcttgaggcggcgcgccgacgacacggaccgccgccgtggcttcagcgtgctctgctcggggacagctggcgaggtgcgtcgggccgcgtgtgtgaggacgtcgatgtgcttgtcctcgagctggcacacgtcgggctccctcttcgtcgccggcttggtcgcgatcggcgggagagactttgcgggcctcttcttggtccgcaggtcgaagatgatatccgtggcggaagtgatcaccttgccgtcgagcctgtggtgagcgcggacggcgaccgtcggtttcttcacgcactcgtcgtcgccgtcgctactgtaaccggcaaaaatgtcgcggcggcacggcggggtgtcgggcgcctcgaccaccacgagctcttgccggcagcggcaggcggctgaggccggcgaggacgcgacgccgctgctgctgctgctgctggccgagggcggcggcgccagcttgacggaccgcctccggtggcgccgcctggaccggcgcggcggcgacagctgcagcggcgggaagtgcgtgtcggaggccctggggtgcagcggcgagcccaggccgccgaggtcccctgcccgaggcgtgtagtagtgagacgccctgtgcgggagccaggccgcggccctcggcgtgctcgggggcggccgcgacgcggccacgcgggggctggtcgccgccgcgccgccgccccgtgcgtgcatgtcccggagcttgaagaaccacgcgttcggcatcatgtctgacagccggaacttgtgccgccccatggctccctgcgccggggtgaagcacacacacaagctgcaacggcgacaaagctctgcccgcgcgtgcgctgctgtgcttctctttggtagcttgctctgttacgaagatcagaggcgcggctcggcgaggatgaggacgaggcgaggcagagcattcaggag

SEQ ID NO: 151467 - DNA, 2160 bp, Zea Mays
atgaccgcgccacctccacctccactcccttccctcgccccctcgccccctggccccaaccctcccacctccatccgccatccttgcctctcgccggcctccactccggacccggcgaccaccccagaaactcccctcggcgtctctcctgacggacgatcacaggctccccagggtggcaagtggttcggagtaagaggaggtctcgaggtgatcatcggccacgtcgagagtcccctgtggatctccggggtcggtgtttcggcacgggaagaggcaaatctcaggagggctctcttcgttacaatagtgggaaccaggccaattgtgactgattctgaggtcatcgacgaagttgctcatagtttcaacatcaagactgaggatatgaagattcatcagaccaagccagaagattttcttctgtttcttcctgacgaggctacggcaacaagggtgcttaatgatggcaagatcttaaaaggacctcgatttagtctgattttcaagtgttggacaagatgttctcatgcctcatcttcaatcatgccagggctggtagacatagagattagagggatcccagaacatgcatggtttctgtctacagcgaagagtatactgactgattcctgtttgatcgctgaagtgcaccctgattctttgtccaagcgagagctatcgtcgtttgtagtcagagcctggtgctttaacccggagaatctccaacgcgattcagtgcttcacattattgagcctgggttacagatgttcgagaaaagatgccttacatacaagatccaaattagagtcctgcatgctggttcacacatctcaccagaaggtctccctccatccgcggacggcgataaacccccatgggatgatgatggaaacgacgatcatggcacccatcctcggcgtccgattggctctctggtgctgcgcaagccactgcatcttcgcttgggcccaatgccggctgagggctgcggcaccgaggcgtctgcgccgccaggagcctcgaaggcggggccttgggatactgggcgtgatatgcaattaactctaggcactgatatgtctccgacgcccaaggcgtcccttcgggatgttgtgcatttaacgacttgtattgatgggtctccagtgtccgaggcgccccttcatgagaacggaacaccttcagggcgagatatgcaattaactccaggcactgatatgtctccgacgtccacggcgccccttcgggatgttgagcatttaatgaccggtactgatgggtctccagcgtccgaggcgccccttcatgaggaccgaacaccttcatcaatctccaatgcagcaggaaaggttttgtcggggaagataaacagtccccgaagcagctttgggccggggatgtccctcgggccggatccgccccgatgcttggttgggccgcttgagactactgggccagtttctgtctcgccccaggtgccggttgggccgcttgagacttgcatttcgatgccggtctcgccccaactgcgctgtgggccgctggagacgaacgcccttgcgtatgtctcgccccaactagcttctggatatcccaagaagacgggtccaatatctcttcagctgactgagatggctgggacgatggcagcaacaagagatgaagcaacaaaggctctcaaggtctattttcgcagaagaactaaagcaaatctccttcaactcagtcagaacgaggagacagaggaaggctcagttcagaataatgattccttgcactcggccccaaggactatgaatcactccacaacgaaggacgagttcttcagaaaaattagtacaacagctgaacaattactgccggcaccgaagcaggatatgaatgccttactgtcttctaattcttctcgggaagctgcacctaggcgaagccgacgcattgctggtgctggagttgaattcaacatgcatgactggggcagcagggctactaaacaagctttaagagcactgcatatcatttctgaggctgagggtacgtcccaggaagcaacagaagcttatgcaagggttttcaagcaacccttgtcgcatagccaggtgaaagctttggcagccctctttggctggacccctccacctgacctggtgtattag

SEQ ID NO: 151468 - DNA, 726 bp, Zea Mays
atgacgctggacaccccggccgccgtggtcctggagctgatgaccatggggcagcagtccgcggcgcacctcggggacctgctccgggccgcgtcccctgctgcagcgtctccgcaccaggagctcgcggccgagatcctccgctgctgcggccgcgtcatcgacgcgctcagggccgccgccgccgccagcgggcacaagaggaaggcggcggcggagtaccaggacgcagcagcagggggaggcgcctcgcctcctcctcctcctcctcctccggggccgccactaaagagaaggctctactaccgctgcgcgcacaaggaccaggggtgcgacgcgacccggcgggtgcagcggacgcgggagcagcccgcggcgtacgagatcgcctactacggggaccacacgtgcaggggcgcggccaccgcctggcagcagggagcgccggcgcccgccgtcgtcgacttcggctccaactcctggggatccgcggacaccaccagcggaggctcgccggcctcggtgccgctgggagggtggtggtccccgtcggcgtcgtccgaggtcgggttcgaggcgcatgcggccgcgcacgagtggcgcgacacggctgcggctgctcctgatccggtaatggagttcctggacggcgccttcggctgggaatccgtcctcgaggaccgctttgacttgggcggtctacatggcatcgctacgtttcagtag

SEQ ID NO: 151469 - DNA, 325 bp, Zea Mays
attccaaatattttagataggaaagtatattgtatcattcagattgatgaatgatgacgctcacacggtgtttacttcattatatttgttgatcagatttacaaagatttgtggggacagttctgcactaattttgacctagaattccattcaaagatggttaaaacagtcgcaattgcgtatactcatttaagttgagaaaaaaggcttgactggtgcctgtatataactgtattcataaaaaaattgattaatgaacacaaaaattaacgtcattacaaacacaatcagttatttacataaaggcttcagagtagtcgtagct

SEQ ID NO: 151470 - DNA, 282 bp, Zea Mays
atgtcggtggctgagatgtattcctgccgctacaaatctgtcagcctaatcacgctgtcactgccaggccttgcgggaggtggtctgcatcggcgacagccttccgcagtggcgcagcagtggaggcccttgcgacatactatccaagttgccagatttgagtctgatccagttgcatcctcctatggaggcagtgatggtcgtcatgttttgttcgatcttccagcaaacagtatgctagttgaaccgtactttcaagaaatgtacttgcagttcatgtaa

SEQ ID NO: 151471 - DNA, 1368 bp, Zea Mays
atgcaggccgaggacgtgaggtcgcggttcgggcggtgcccttactgccgcgccatgatctaccaggacctcagcgccgtcatcttctactgcaccaggtgccgcacgcccatccgaggcaggaacccacaacccgccgacgagaccgagtacgcgctcgcgcagctcgagatcctctccgccgacaccgcgtccgtgttctccgacgtcgacgccgaaccgcccaacccgaggtcggcttgggccgtcgaggatgacgacggagaacagagcaggtcagctaccgctacccggagaagctccgcgtcgtcgccctcgtacagagagggagagtttggttcggtcagggcaggtccaacaagcagcggcagcgctctcaactctggcctcaaccgggaccaccgatcggaggccgcgagaagcgcgtcgccgctgcacagtcgcgtgacccagctccggccgtcgtcgcggaggaccaggcgatcgagcagcggcgacgtagatgtgcgcagcgacgcgggatcgaacaccgagtcgtactccgccgcgactgatacatcttacacgcgccggtcgtcgccgctgagctcgcaagaactccaagcgccgacggccttgtcagcagcagcaggattcgagtcagccgaccttacgaggacgccgctcggtgatccggcgttccagaaggacctcctgcaggcgctggacaacctccggaagctcatcgctgtcgtcgatcatccgccgcggagcgtcgacgtcgacgacgggcaccttcaaggcgcgacgcctcggctgagcgcgtcctgcaacaacgggagcagcggcggcaagcgtacgaccacaaggcgcagctcccgactcatgctccgcctggagtcgcagtcgcagctcacgcgggcgttgcccgccgagcgaccgcgccgccgagacgcgaacacgagcacttcgtcctcctcctcggcgtcgagcagccgccggcgcggtggcgccagggcgcgggccccgcagtgccgcccggtgctgggcggcacgccgttcgttgtctgcggcgagtgctcggagatactgcagctgccgcccgccctacccgccggccgagtatgcaggctgcagtgcggcggctgcggcgaagcgttcgagatgacgctgccggcggtcggctcgacgggcctgcccaagaagatcttttccgcgccgcagcctgctgtcagcggcggagaggatgccgaggagtatccgctcgcgagaagcaacctgagcctgagcctgagccgcgagcagccacggccgacgatggagccgctgcaccgcgtgctggggtacagctccgttagctcggtgctacgcagcctgcggtacagctga

SEQ ID NO: 151472 - DNA, 867 bp, Zea Mays
acccccgggctaccttgcatattcagttatcggttcacgacgcaccaaccgaggccacaggccaccaccattccttccttgttccttccccagctccgcaggctgctcatggcatccaaacgtatcctcaaggaattaaaggacttgcaaaaggaccctccaacatcatgcagtgcaggtcctgctggtgaggatatgttccactggcaggcaaccatcatgggtcctcctgatagtccatatgctggaggtgttttcttggtgaacattcatttcccgccagactaccccttcaagcctccaaaggtatcttttaagacgaaggtcttccatccaaacatcaatagtaatggaagcatatgtcttgacattcttaaggagcagtggagccctgctttgacaatctctaaggttttgctttctatctgctccctgcttactgatcccaacccagacgaccctcttgtccctgagattgctcacatgtacaagacggatcggcctaagtacgaggcgacagcccgcagctggacccagaagtacgccatgggatgaaatgttcggcgttactggctaaatgcagacgattgtggtgttgcccatgaaactgttatcggggacgtatgttcttctgttccttgtgcattctccgatccatctctaggatccgagttctagtccaacattaacctaccattgccttgggtaatgagatgacttgtgcttgctgtggtaactatgctagtgttgatgttaatgattctcattgagggcttgttcagggattggagggtttaggggattttgacttattggcgagctctgctgccagtctatatctactattattacgctcgactgtataga

SEQ ID NO: 151473 - DNA, 917 bp, Zea Mays
acccccgggctaccttgcatattcagttatcggttcacgacgcaccaaccgaggccacaggccaccaccattccttccttgttccttccccagctccgcaggctgctcatcgccctccctccgcgcccccgatccagatccagatccaggggcttgtcatggcatccaaacgtatcctcaaggaattaaaggacttgcaaaaggaccctccaacatcatgcagtgcaggtcctgctggtgaggatatgttccactggcaggcaaccatcatgggtcctcctgatagtccatatgctggaggtgttttcttggtgaacattcatttcccgccagactaccccttcaagcctccaaaggtatcttttaagacgaaggtcttccatccaaacatcaatagtaatggaagcatatgtcttgacattcttaaggagcagtggagccctgctttgacaatctctaaggttttgctttctatctgctccctgcttactgatcccaacccagacgaccctcttgtccctgagattgctcacatgtacaagacggatcggcctaagtacgaggcgacagcccgcagctggacccagaagtacgccatgggatgaaatgttcggcgttactggctaaatgcagacgattgtggtgttgcccatgaaactgttatcggggacgtatgttcttctgttccttgtgcattctccgatccatctctaggatccgagttctagtccaacattaacctaccattgccttgggtaatgagatgacttgtgcttgctgtggtaactatgctagtgttgatgttaatgattctcattgagggcttgttcagggattggagggtttaggggattttgacttattggcgagctctgctgccagtctatatctactattattacgctcgactgtataga

SEQ ID NO: 151474 - DNA, 871 bp, Zea Mays
aaccgaggccacaggccaccaccattccttccttgttccttccccagctccgcaggctgctcatcgccctccctccgcgcccccgatccagatccagatccaggggcttgtcatggcatccaaacgtatcctcaaggaattaaaggacttgcaaaaggaccctccaacatcatgcagtgcaggtcctgctggtgaggatatgttccactggcaggcaaccatcatgggtcctcctgatagtccatatgctggaggtgttttcttggtgaacattcatttcccgccagactaccccttcaagcctccaaaggtatcttttaagacgaaggtcttccatccaaacatcaatagtaatggaagcatatgtcttgacattcttaaggagcagtggagccctgctttgacaatctctaaggttttgctttctatctgctccctgcttactgatcccaacccagacgaccctcttgtccctgagattgctcacatgtacaagacggatcggcctaagtacgaggcgacagcccgcagctggacccagaagtacgccatgggatgaaatgttcggcgttactggctaaatgcagacgattgtggtgttgcccatgaaactgttatcggggacgtatgttcttctgttccttgtgcattctccgatccatctctaggatccgagttctagtccaacattaacctaccattgccttgggtaatgagatgacttgtgcttgctgtggtaactatgctagtgttgatgttaatgattctcattgagggcttgttcagggattggagggtttaggggattttgacttattggcgagctctgctgccagtctatatctactattattacgctcgactgtataga

SEQ ID NO: 151475 - DNA, 713 bp, Zea Mays
acccccgggctaccttgcatattcagttatcggttcacgacgcaccaaccgaggccacaggccaccaccattccttccttgttccttccccagctccgcaggctgctcatcgccctccctccgcgcccccgatccagatccagatccaggggcttgtcatggcatccaaacgtatcctcaaggaattaaaggacttgcaaaaggaccctccaacatcatgcagtgcaggtcctgctggtgaggatatgttccactggcaggcaaccatcatgggtcctcctgatagtccatatgctggaggtgttttcttggtgaacattcatttcccgccagactaccccttcaagcctccaaaggtatcttttaagacgaaggtcttccatccaaacatcaatagtaatggaagcatatgtcttgacattcttaaggagcagtggagccctgctttgacaatctctaagtacgaggcgacagcccgcagctggacccagaagtacgccatgggatgaaatgttcggcgttactggctaaatgcagacgattgtggtgttgcccatgaaactgttatcggggacgtatgttcttctgttccttgtgcattctccgatccatctctaggatccgagttctagtccaacattaacctaccattgccttgggtaatgagatgacttgtgcttgctgtggtaactatgctagtgttgatgttaatg

SEQ ID NO: 151476 - DNA, 527 bp, Zea Mays
aaccgaggccacaggccaccaccattccttccttgttccttccccagctccgcaggctgctcatcgccctccctccgcgcccccgatccagatccagatccaggggcttgtcatggcatccaaacgtatcctcaaggaattaaaggacttgcaaaaggaccctccaacatcatgcagtgcaggtcctgctggtgaggatatgttccactggcaggcaaccatcatgggtcctcctgatagtccatatgctggaggtgttttcttggtgaacattcatttcccgccagactaccccttcaagcctccaaaggtatcttttaagacgaaggtcttccatccaaacatcaatagtaatggaagcatatgtcttgacattcttaaggagcagtggagccctgctttgacaatctctaaggtgctgggacaatttagtactaactttactagtatatacactgttcatattatagcttaaatgacttgtgcacagtaaatgattagcttaaatgcatgctgtgatgtttata

SEQ ID NO: 151477 - DNA, 1914 bp, Zea Mays
atgcagcgtcttacagcgatagtcttcgtggctacttctttccttattgcaagtgttccacatgccaaaagtgctgatctgaactctgataagcaggctcttctcgcatttgctgcatcactgcctcatggcaggaagctcaactggagctccaccacacctgtctgcacttcttgggtgggggtgacatgcacaccagataagagtcgtgtacatacactgcgcctacctgctgtaggacttttcggtccaataccatcagacactcttgggaagcttgatgcactggaggtattgagccttaggtcaaatcgccttactgttgacctcccacctgatgtaggatctattcctgccctccattccctctaccttcagcataataacctgtctggaatcataccaacttccctctcttccagtttaacattcttagacctgtcatacaacactttcgatggagaaatcccattgaaagtgcaaaatcttactcaacttactgcattgcttctccagaataactcactttctggacccattcctgacctccaacttcccaaattgagacacttgaatttgagcaacaataacctcagtgggccaataccaccttccttgcagaggtttccatcgagttccttcttagggaattcttttttgtgtgggtttcctttggaaccatgttttggaactgcaccttctccttctccagtatcaccaccatcccccagtaagaccaagaagagcttatggaaaaagatcagaactggtgtgataattggaattgctgttgttggaggggtattgttgcttattttgattctcgtgctcttgatatgtattttcaagagaaagggacacactgaacctaccacagcttcgtccaaaggaaaggctattgcaggtggcagggcagaaaaccctaaggaagactacagcagtggtgttcaggaagcagagaggaataaattggttttcttcgagggcagttcatttaattttgacttggaggatttgttgagagcttctgctgaagtccttggcaaaggaagttatggaactacctacaaagctgttcttgaggatgcaaccatagttgttgtcaagagattgaaggaagtggtggttagcaagaaggattttgaacagcagatggagataattggtagggttggccagcatcaaaatgtaattccattgcgggcttactattactccaaggatgagaagttgttggtgtttgattatgtcccatctggtagccttgctgctgttttgcatgggaataaagctgctggaagagctccattgaactgggagacaagagtcaagatatctctggacgtggcccatggaatcgcccaccttcataccgagggaggagggaagttcatccacggcaacatcaaagcatcgaacgtcctcctatcgcagaacctcgacggctgcgtctccgagttcggcctggcacagatcatgaccaccccacagaccccgccgcggcccgtcgggtaccgggcgcccgaagtcctcgagaacaagaaatcgacccagcagtccgacgtctacagcttcggcgtcctgctcctcgaaatgctcacgggaaaagcccccctcaggtctcccgggcgcgaggacccctccgtcgagcaccttccgaggtgggtgcagtccgtggtccgtgaggagtggaccgccgaggtcttcgacgtggacttgctacggcaccccaacgtcgaggacgagatggtccagatgctccaggtcgcgatggcgtgcgtggccgctcaccccgaggagcggcccaagatggaggaagtgatcaggagggtcacggaggtccggaattcttactcttctgggacgaggacgcccctggaggacaagccatcggagactgcacgagcgccatga

SEQ ID NO: 151478 - DNA, 786 bp, Zea Mays
ccctggcccgtctgccgtcgcagtcccagtcgccctcctcttcgtctgtggtctccaccccgcgcacacgcacagttcgtcgacgcgagcgagggccagccgtccagggcacggaagtgggagcccgcagcttctcgtcggcggggggtgggggctgagtcgcgggagtgatctagtggtttcgtggtctgcggcgcggcggggcggggttcgagatggaggacttgctgaacacggagatcgggaagaacgactatgactggcttctgacaccccctggaacacctcgtgatcctacattagatgctgctgagaaagctccatcatcaattgtgactaaacatactgttaccagatcatcctcgacaactagagcatctaggctttccacttatgagacagagaatgggcatttgacatttcccactaggccagcacggagtatatctgtctcttgccgggcagttcaatctacaccaaacaacatcaggtcatcaatcgtcaatgcaaacatttcctctgttaattcaagatctacaacccaaagcaagcggacagccactcttactgcatcaaagccatctgttgcatcgtcacgtccagtgccaacacggtcctctacacctgtcgaagcccgtctgtctacaccaacccatactcatccatctactccagtgaaaaagcgtccttctgtgtccaactctatggccaactccgctgttcccaagaacacgtcagcaccatgctcaagatcatcaactccaacctctcggtctcgaaccttgt

SEQ ID NO: 151479 - DNA, 921 bp, Zea Mays
gagaagtctgcagaggaagaaaagagagcgaagggggttaaaccgcggaccgcggaggcggagcaaagcacacgccatccatccctggcccgtctgccgtcgcagtcccagtcgccctcctcttcgtctgtggtctccaccccgcgcacacgcacagttcgtcgacgcgagcgagggccagccgtccagggcacggaagtgggagcccgcagcttctcgtcggcggggggtgggggctgaggtgagccactcccctccccgcttattcggatcctctctcgcccaatcccccggtcgcgggagtgatctagtggtttcgtggtctgcggcgcggcggggcggggttcgagatggaggacttgctgaacacggagatcgggaagaacgactatgactggcttctgacaccccctggaacacctcgtgatcctacattagatgctgctgagaaagctccatcatcaattgtgactaaacatactgttaccagatcatcctcgacaactagagcatctaggctttccacttatgagacagagaatgggcatttgacatttcccactaggccagcacggagtatatctgtctcttgccgggcagttcaatctacaccaaacaacatcaggtcatcaatcgtcaatgcaaacatttcctctgttaattcaagatctacaacccaaagcaagcggacagccactcttactgcatcaaagccatctgttgcatcgtcacgtccagtgccaacacggtcctctacacctgtcgaagcccgtctgtctacaccaacccatactcatccatctactccagtgaaaaagcgtccttctgtgtccaactctatggccaactccgctgttcccaagaacacgtcagcaccatgctcaagatcatcaactccaacctctcggtctcgaaccttgt

SEQ ID NO: 151480 - DNA, 1427 bp, Zea Mays
ccgatgtgaggtgagcctgtccgaggcttctcatccgcgtcgcatggactcggggtctcgtgctgtcgcggtgtcgccagccagccgcctcccgcatcgcctccaaggctctccaaccggggcgcctgcctaaccggccgatttccttccttgcgtagctccattccactgcacaaacagcgcgccactttcccaattcccgtcgcgtggcctccttccgatcctggccactttgtgcgtcctgtagcgagggggtgatcggtgatggactgggggaacaggaccaaggccgccgccgccgctgcggcgccggacgagagggccgggggaggggaagggctcggaggatacgtcaaggtcatgaccgacgaacagatggaggtgctccgcaagcagatctccatctacgccaccatctgcgagcagcttgtcgagatgcatcgcgtcctcaccgagcaccaggacaccattgcaggattgaggtttagcaatctgtactgtgaccctctaatcatccccggcggtcacaagatcacggcaaggcagcggtggcaaccaacaccgatgcagctgcagatcctggagagcatcttcgaccagggcaacgggacaccgagcaagcagaagataaaggagataacagcggagctctcgcagcacggccagatctcggagacgaacgtgtacaactggttccagaacaggcgggcacggtcgaagcggaagcaggccgctgcttccttaccgaacaacgccgaatccgaagccgaggcggacgaggagcctctcgccgacaagaagccgaagtcagacaggccgccgccgccgccgccgccgatccaggataataccaaggctacgggcgctctcagcgccgacagggtctctggtgggacgcgtcacttggacacgggtcatgaccagaccagtggcgtgatgtatgggtgcaacgacagtggcttgttgagatcgtccggcagttcgggccagatgtccttgtacgagaacttcatgtcgaatccaagaatcgatcgtttcccggcgaaggtggagagctcccggagcttcccccatctccaacaacacggggaaggctttggcatgtttggatgacatgcatgctgctgcgctgagttgccgtgtgaaaaatggaggtcgacacagcgtgcgttcgatttgctgacgtgaaagttttatcttggatggtacgtgttgcttatcacggtctggttgaccacctccgcggatggtagctagctagcttgaacgaacctgctcttttggagtagctgtaagaggttgatatatagtagtatttgcacgtagtctaattactctaaattatcagcatataattcttcatgtttgcagatttagcacgagaccagtcctacgctgctgctgctgagcagcaggttgtggttaaa

SEQ ID NO: 151481 - DNA, 1505 bp, Zea Mays
ccgatgtgaggtgagcctgtccgaggcttctcatccgcgtcgcatggactcggggtctcgtgctgtcgcggtgtcgccagccagccgcctcccgcatcgcctccaaggctctccaaccggggcgcctgcctaaccggccgatttccttccttgcgtagctccattccactgcacaaacagcgcgccactttcccaattcccgtcgcgtggcctccttccgatcctggccactttgtgcgtcctgtagcgagggggtgatcggtgatggactgggggaacaggaccaaggccgccgccgccgctgcggcgccggacgagagggccgggggaggggaagggctcggaggatacgtcaaggtcatgaccgacgaacagatggaggtgctccgcaagcagatctccatctacgccaccatctgcgagcagcttgtcgagatgcatcgcgtcctcaccgagcaccaggacaccattgcaggtttcattcatcgctgttgcctgttggtcttctgttcaaattatgtagtctcccttctccatttggtgaagagtgaaggattgaggtttagcaatctgtactgtgaccctctaatcatccccggcggtcacaagatcacggcaaggcagcggtggcaaccaacaccgatgcagctgcagatcctggagagcatcttcgaccagggcaacgggacaccgagcaagcagaagataaaggagataacagcggagctctcgcagcacggccagatctcggagacgaacgtgtacaactggttccagaacaggcgggcacggtcgaagcggaagcaggccgctgcttccttaccgaacaacgccgaatccgaagccgaggcggacgaggagcctctcgccgacaagaagccgaagtcagacaggccgccgccgccgccgccgccgatccaggataataccaaggctacgggcgctctcagcgccgacagggtctctggtgggacgcgtcacttggacacgggtcatgaccagaccagtggcgtgatgtatgggtgcaacgacagtggcttgttgagatcgtccggcagttcgggccagatgtccttgtacgagaacttcatgtcgaatccaagaatcgatcgtttcccggcgaaggtggagagctcccggagcttcccccatctccaacaacacggggaaggctttggcatgtttggatgacatgcatgctgctgcgctgagttgccgtgtgaaaaatggaggtcgacacagcgtgcgttcgatttgctgacgtgaaagttttatcttggatggtacgtgttgcttatcacggtctggttgaccacctccgcggatggtagctagctagcttgaacgaacctgctcttttggagtagctgtaagaggttgatatatagtagtatttgcacgtagtctaattactctaaattatcagcatataattcttcatgtttgcagatttagcacgagaccagtcctacgctgctgctgctgagcagcaggttgtggttaaa

SEQ ID NO: 151482 - DNA, 729 bp, Zea Mays
atgcaggcgctgatggccacggacaaatgcttctctccggctagggcgatgtccccgatgccgattgtgaggccccctgcatcacccgacattgccattcagtatctggatgacttgttgcaggagcaacagaagctcgggcccttcgtgcaggtgctcccaatctgcggcatgctgttgaatcaagagatacggagaatatcaaacctgctttctaactttggactcagaggaaatgagaggtcgccaccaattgcaagtccaaaccatatgcatccattgccccgggtgcctaatttctgtggaaacagttttggtccttggaatgagatgcatcctgagagaaatggtttacctaggggagccatgggctggcaaggtgctgtacagaaccattcctcctacattgtcaagaagattgtgcgattggaagttccaacagatgcttaccccaattttaacttcattggccgtctgcttgggccaaggggacactcgctaaagagagttgaagctactacaggttgccgtgttttcatcagagggaagggctccgtaaaagatcctgtgaaagaggaacagctcaagggaaggcctggctatgaacacttgggcgatccaacacatatcttgatcgaggctgaattacctgctgatgttattgatgccagactggcacaagcacaggagatactggaggagttgctgaaaccagtggtatacatatga

SEQ ID NO: 151483 - DNA, 1951 bp, Zea Mays
atctgttctatatcgccccattgctcgctcgccaagagttcttcttgttaggcaaggcaaaagcagaagcaaaaagagaaaggtcttgttgccgatggggagctcagggttctcgtggacgcttccggaccaccccaagctccccaaggggaaaccggtggctgtcgtcgtgctggacggatggggcgaggccaaccccgaccagtacaactgcatccatgtcgctcagactcctgtcatggactcgctaaagaatggcgctcctgagaaatggagactagtgaaggctcatggaacagctgtgggcctcccatctgatgatgacatgggcaacagtgaagttggtcacaatgcacttggtgctggtcgaattttcgcccaaggtgctaagcttgtcgatcaagctcttgcctccggaaagatttatgatggagatgggttcaactacatcaaagaatcttttgaaagtggtactcttcaccttattgggttgttgagtgatggtggtgtccactcccgtcttgatcaactgcagtattggtttcgtggagaccctagagaatgatcttttggagcttagagcgaagggtgttgatgcacaaattgcatctggtggtggaaggatgtatgttacgatggaccgttatgagaatgactgggatgtggttaaacgtggttgggatgcccaagtgcttggagaagcaccctacaaattcaaaagtgcacttgaggctgtgaaaacactgagagcacagcccaaagccaatgatcagtacttgcccccatttgtgatagttgatgacagtggcaatgctgttgggcctgtattagatggtgatgcagttgtcactatcaacttccgagctgatcgcatggttatgcttgcgaaagcactagagtatgcagattttgacaactttgaccgtgttcgtgtccccaaaatccgatatgctgggatgcttcagtatgatggtgagttgaagcttccaagccgttaccttgtttccccaccagagatagatagaacatctggggagtacttggtgaagaatggcatccgcacctttgcttgcagtgagacagttaaatttggccatgtcacatttttctggaacggtaaccgttcgggatactttgatgcaactaaggaggagtatgtagaagtacctagtgacagtggtattacattcaatgttgcacccaatatgaaggcgcttgaaattgctgagaaagccagggatgctctcctaagtggaaagtttgaccaggtacgtgtcaacctgccaaatggtgacatggttggtcacactggtgatattgaggccaccgtagttgcttgcaaggcagctgatgaagctgttaagattattttggatgctgtcgagcaagttggtggtatttaccttgttaccgccgatcatggcaatgctgaggatatggtgaaaaggaacaagtctggcaagccgttgctcgacaagaatgaccgtatccagattcttacctcgcatacccttcagccggtcccggttgccattggaggccctggccttcaccctggagtgaaattccggaacgacatccaaacccctgggctcgccaacgtagccgcaaccgtgatgaacctccacggatttgaggctcctgctgactacgagcaaaccctcattgaagtggctgacaactaaacactggccacctgtgtccaattttggttatatgtagttctgagaatggacattcaataatttatgtttgcaagcacgttgctcaaactcaccaaaacatcgagggatgccttttgactttggcatttacagcattttcgtttggctttaatccttatcggtttctattgcttctgtttcatttctatgtatcatagctgcagtagttcgaacaactgtctttgcacaactcattagatgctctatttatataccgttgacgattg

SEQ ID NO: 151484 - DNA, 2040 bp, Zea Mays
atctgttctatatcgccccattgctcgctcgccaagagttcttcttgttaggcaaggcaaaagcagaagcaaaaagagaaaggtcttgttgccgatggggagctcagggttctcgtggacgcttccggaccaccccaagctccccaaggggaaaccggtggctgtcgtcgtgctggacggatggggcgaggccaaccccgaccagtacaactgcatccatgtcgctcagactcctgtcatggactcgctaaagaatggcgctcctgagaaatggagactagtgaaggctcatggaacagctgtgggcctcccatctgatgatgacatgggcaacagtgaagttggtcacaatgcacttggtgctggtcgaattttcgcccaaggtgctaagcttgtcgatcaagctcttgcctccggaaagatttatgatggagatgggttcaactacatcaaagaatcttttgaaagtggtactcttcaccttattgggttgttgagtgatggtggtgtccactcccgtcttgatcaactgcagttacttctgaaaggtgtcagtgagagaggggcgaaaaaaatccgtgtgcacatccttactgatggacgtgatgttttggatggaagcagtattggtttcgtggagaccctagagaatgatcttttggagcttagagcgaagggtgttgatgcacaaattgcatctggtggtggaaggatgtatgttacgatggaccgttatgagaatgactgggatgtggttaaacgtggttgggatgcccaagtgcttggagaagcaccctacaaattcaaaagtgcacttgaggctgtgaaaacactgagagcacagcccaaagccaatgatcagtacttgcccccatttgtgatagttgatgacagtggcaatgctgttgggcctgtattagatggtgatgcagttgtcactatcaacttccgagctgatcgcatggttatgcttgcgaaagcactagagtatgcagattttgacaactttgaccgtgttcgtgtccccaaaatccgatatgctgggatgcttcagtatgatggtgagttgaagcttccaagccgttaccttgtttccccaccagagatagatagaacatctggggagtacttggtgaagaatggcatccgcacctttgcttgcagtgagacagttaaatttggccatgtcacatttttctggaacggtaaccgttcgggatactttgatgcaactaaggaggagtatgtagaagtacctagtgacagtggtattacattcaatgttgcacccaatatgaaggcgcttgaaattgctgagaaagccagggatgctctcctaagtggaaagtttgaccaggtacgtgtcaacctgccaaatggtgacatggttggtcacactggtgatattgaggccaccgtagttgcttgcaaggcagctgatgaagctgttaagattattttggatgctgtcgagcaagttggtggtatttaccttgttaccgccgatcatggcaatgctgaggatatggtgaaaaggaacaagtctggcaagccgttgctcgacaagaatgaccgtatccagattcttacctcgcatacccttcagccggtcccggttgccattggaggccctggccttcaccctggagtgaaattccggaacgacatccaaacccctgggctcgccaacgtagccgcaaccgtgatgaacctccacggatttgaggctcctgctgactacgagcaaaccctcattgaagtggctgacaactaaacactggccacctgtgtccaattttggttatatgtagttctgagaatggacattcaataatttatgtttgcaagcacgttgctcaaactcaccaaaacatcgagggatgccttttgactttggcatttacagcattttcgtttggctttaatccttatcggtttctattgcttctgtttcatttctatgtatcatagctgcagtagttcgaacaactgtctttgcacaactcattagatgctctatttatataccgttgacgattg

SEQ ID NO: 151485 - DNA, 978 bp, Zea Mays
gcagcagcagccgcaaaagccaaacaagacctctagctggctgactgctactacccagcaaccacctgggactgggagtcgagctcgctccagcgcccccttcaattccgtcctgatacgctcgagcacgctagcctagccaccgatcgacgacgacacatggcgaaggtccacccggaccgccaccccaacgtgctgccgccgtcgccggctgaggagaaggaggaggaggcgacgtcgctgacggtgtggcgcaagtcgctgctgttcaactgcagggggtacacggtgttcgacggcaggggcgacctggcctaccgcgtcgacagctacgacgacgccggggccgacgccggggccgtgctcatggaccccgccggccgcccggccttcacggtggcgcgccggagccgcctcctcggcctgctgtccggccagcagcggctcatctacgcgggcgaggacacgcggcggcccgcggtgtacgccgtcgtcaggcgccgcggcaaggcgacggcgcgcgtgacgccgtgcgctgctgcaggcgccgcgtacgaggtggaggggtcctacgcgcgccgccgctgcgtggtgtacgacgccgagcggcgggtcgttgtggcggaggtgcggcccaaggaggcggtcgtcggcacggacgtgttccgactggtggtgcggcccgggttcgacgtgtcgctcgccatggccgtggtggtggcgctggaccagctgtttggggggaggccgtcgctcctcaggagctggtccacgatgtagattcatgtacatgttctttgttcagttcaatataatctagactagatagagttttgcccctggacttggggttgtgagttatcactggatatgcatatgatgatgattcttcaatctgcctggcgtcgtgggcatcggagccatttctgttattgtgtgcttgcttgcttgcttgcctgccttcaaaatttctgatga

SEQ ID NO: 151486 - DNA, 2628 bp, Zea Mays
atggacgccacgccgatcaccgaagagctgccgcccaacatcacggagcagatgcgcaacgcgacgacgctgcccaaggcgtccagcaccgtggtgtgctactcgcccatgatgataaccaccaacggcatctggcaagggttcaacccgctcgagttctccctcccgctcttcatcctccagacggccgtcatcgtcgtcaccacccgcttgctcgtccttgtgctcaggcccttccgccagccccgcgtcatcgctgagatcctctccggcgtgctgctgggcccgtcggtgttggggcagatagagacctgggcgaccatggtgttcccgatgcgcagcctgctcacgctggagacggtggcgcacctcggcctcctctatttcctcttcctggtcggcctggagatggacatcgacgtgatccggcggtcgggcaagaaggcgctgttcgtcgccttagcgggcatggcgctgccgttctgcatgggcatcgccacgtccttcatcttccggcaccaggtgtcgcggaacgtgcaccaggcgtccttcctcctcttcctcggcgtcgcgctctccgtcacggcgttcccggtgctcgcccgaatcctcgccgagatcaagctgctcggcaccgacctcggccagatcgccatgtccgccgccatcgtcaacgacatgtgcgcgtggatcctgctcgccatcgccatcgccatctcggaggtgagcagcgccgcgctgtcgtccacgtgggtgctcctctccggggcgctcttcgtcctcttctgcttctacgtcgtgcgccccggcatgtggtggctcatccgccgcacccccgagggcgagggcatcagcgacatgcaggtctccctcatcctcaccggcgtcatgctcgccggcgtgtgcaccgacgccatcggcatacactctgtcttcggcgccttcgtgtacgggctggtcattccgaccgggccgctcggcgtggtgctgatcgagaagatcgaggacttcgtcaccggcctgctcctgccgctcttcttcgccatcagcggcctgcgcaccaacgtccggaagattagggaccccgtcactgttggccttctcgtgctcgtgttcgtcatggccagctttgcaaagatcatgggcaccatcatcatcgccgcgctctacaccatgccgtttcgcgagggcatcgccctcggcttcctcatgaacaccaggggcctcgtggaaatgatcgtgctcaacattggaagagacaaagaggtgttggatgacgagtcgtttgcggtgatggtgctggtgtcggtggccatgacaaccctggtgacgccggtggtgaccagcgtgtaccggccgtcccggcgcctcgtcggctacaagcggcggaacctgcagcgcatccggcacgacagcgagctccgcatgctggcctgcgtgcacaccacccgcaacgtgccgtccgtgctgtcgctgctcgagctctcgaacccaaacaagcgctcaccgatcttcatctacgcgctccacctcgtcgagctcacgggacgtgcgtccaacatgctcgccgccgccgcggcctccgcctccaagcagagccggggcggatcgggatcctccctgccccccgtgacggagcacatcttcaacgccttcgagaactacgagaggctcactggaggcgtgtccatccagacgctcgcggcggtgtccccgtaccaaagcatgcacgaggacgtgtccgtgctcgccgaggacaagcacgtctcgctaatcgtggtcccgttccacaagcagcagacggtggacggcggcatggagccgatcaacccgcacgtccgcggcttcaacgagagcctcctctccacgtccccgtgctccgtcgccatcctcgtcgaccgcgggctcagcgccgcggcggcgcggatggccaccgagcaccacgtagcgctcttcttcttcggcgggcccgacgaccgcgaggcgctcgcgtacgcgtggaggatggtcgagcaccccggcgtcaccctcagcatcgtgcggttcgtcccgccggactaccgggcgcggaccgtctcttgctcggcttaccgcccgccggccgactcggactcgcgcgccatcaccatcaacacggagggcaagagcgagctggagatggacgaggactacctcagcgagttccgggcgcgcaaccacggcaacatcgccatcacctacgccaccaggacggtggccaacagcgaggaaacggtggcggccatacgggccatggacaacaacctgcaagagctgtacatcgtgggccggcgccccggcgaggtcaggtcgccgatgacggcggcgctggaggagtggatggagaacccggagctggggcccatcggcgacatgctcgtgtcgtccgacttctccatgtcagtgtcggtgctggtggtgcagcagtacgtggtggccgcagcgcccgcccccgtccccgcgccggcagcgagcagcgaccccgtgcgccagtacgtgagcaacgctaaccaacgggcggcggcggcggcgtccggggcataccggacgagtgcggcgtcagcagccaatagcaggtggtctggctctggtggcaccgtaggcttctga

SEQ ID NO: 151487 - DNA, 450 bp, Zea Mays
atgaagtcgaactgcggtaatcatggtggcgggcgtggcttccagagcttcggtttagtggatgaagaaaggaagcagcgtcggttggagggagaaggggtctatggggtgcttatatgcacggatgaagccgcgagggagggtggacgagagggcgacggaatcggatctcgccctggtttctcgcggcggctggtactcgtctccttcctgctttgcatgacggcacgccgcacagccccatggcaaaacttggacgcatgggaggagtgcgcgcgagttgttgggagaaggaacgggcataagatcaggggcttcacgcaatactcggcaacagaatccagatcgaaatcgagctgggaaagtcatctagcgtgtcgagcacacccagcagcaaatcaggtattggtgtgggaacaactggtttgcatgctgacatcatggaaatga

SEQ ID NO: 151488 - DNA, 2161 bp, Zea Mays
cgtgcacgcccccgccaccggccggatcgacagcaccgatcaccctgaccgtctgcgcgcggcggctctcacacaccggcgacacgcagggcgcgcataggcgagggcctcccccccggcgagggatggtgtggtcggctgggatggcaacaatgcgaggcgcctccgccgccgcgctactggtgctggcgctcgccgccgccgtggcgcgcgcggaggacccctaccacttcttcgagtggaaggtgacgtacgggacgaggaccatcatggggacggcgcagaaggtgatcctcatcaacgacatgttcccgggccctaccatcaactgctcatccaacaacaacatcctcgtcaacgtgttcaacatgctcgaccagccgctcctcttcacatggcacgggatccagcagaggaagaactcgtggcaggacggcatgccgggcaccatgtgcccgatccagcccaacaccaacttcacgtaccactggcagcccaaggaccagatcggcagcttcttctactaccccagcaccggcatgcagcgggcggcgggcgcctacgggctgatcagcgtccacagccgtgacctgatcccggtgcccttcgacacgccggccgacgacttcccggtgctcatcggcgactggtacaccaaggaccacgccgtgctggccaagaacctggacgccggcaaggggatcgggcggccggcggggctggtgatcaacggcaagaacgagaaggacgcgtcgaacccgcccatgtacaacgtggaggccggcaagacgtaccggttccgcgtgtgcaacgtgggcatcaaggcgtccttcaacgtccgcatccaggaccacatcatgaagctggtggagatggaggggtcccacaccatgcagaacgactacgactcgctggacctccacatcgggcagtgcctgtcgttcctggtgaccgcggaccagaagcccggcgactacctgctggtggcgtccacccggttcatcaaggagaagagcagcaccacggccgtgatccgctacaagggctccagcgccccgccgccggccaagctgccggagggccccagcgggtgggcgtggtccatcaaccagtgcaggtccttccgctggaacctgacggccagcgcggcgcggcccaacccgcaggggtcgtaccactacggccagatcaacatcacccgcaccatcaagctcgccatgggccgcggcaaggtcgacggcaaggagaggttcggcttcaacggcgtgtcgcacgtggacccggaaacccccgtgaagctcgccgagtacttcaacgccagcgacggcgtgttcaagtacaacctcatcggggacgtgccgccctccaacacggcccccaccaagatggcacccaacgtcatcagcgccgagttccgcacgttcattgaggtggtcttcgagaaccccgagaagagcatcgacaccatccacatcgacggctacgccttcttcgccgtcggcatggggcccggcaaatggacggcagcgtcgcggagtacgtacaacctcctggacacggtgagccggcacacgatccaggtgtacccaaggtcgtggacggcggtgatgatgacgttcgacaacgcgggcatgtggagcgtccgctccaacatctgggagaggcagtacctcggcgagcagctgtacgtgagcgtcatctcgccggagcggtcgctcagggacgagtacaacatgccggagaccagcctccgctgcggcaaggtcgtcggcctgccgatgccaccgtcctaccgcgccgtctagagcgtcgaccgatcgcgcacggtgctgtacacaactaaaggagagcgagaggggactttttctcgcgtttccttctctagccagccttgtctgtcccctcctcgtttattctctctctctcttttttttcgttcgcttccgaggaataatacccaaaaacaaaaaaacaaaggggctcaagacttcatcatgcatgcatgcataacacctcgagtaggagttgaagtacatgatcattgatggtatatatatagaggaagcatgtctatctaataagtccctcatccaaaattgttctttatgtcatgtatatgtacgtgcatatatatatataaaaatacgtctccttttattaa

SEQ ID NO: 151489 - DNA, 1760 bp, Zea Mays
catcaaacgccttcttcgctcttcgacaagcgggcggccgccagttcctcctcgatgtggcgcagactcctcgcgagagcgatcccactcgcccccgcctcctctggcttccccaaaccgctaagccccctcctccacatcggtggaccgcgcctaaccacctcttccggggaccccgtcgcggacggtggcatcggcggcgaagatgaccctttctgcttcccggaccactactacgagcagctcccgcccgatgtcgcccggggagtggacgccgtcgtagcagctgccgaggccaccggctccaatgccacggacgccgcgcgggccctcgacgggtgcggcgccgaggcgtccgagccgctcgtggtggcctcgctggcgcgcctccggaacagctgcgccgccgcccatgccgcgttccggtgggccgccgcgcagcccgggtacgcgccgggccggcgcgcgtgccactccatgctcgacatcctcgccaagcaccgccgcttcgacgccgcgcgcgccctgctcgacgaaatgcgccgcgcgtccacggcgtctccggccgcggtactgctcctcgtccggcgccactgcgccgcgagggacgtcgcgggcgccgtcgccgccttccgagcgctcccgagcttcgggttccacaccggcgccgccgagttccatggcctcctgagcgcgctttgccggtacaagaacgtgcaggacgcggagaatttgctgatatcctggcagaaggagttccccttcgagaccaagagcttcaacatcgtcctcaacggatggtgcaacattgtctgcagcgtgcgggaggcgaagaggttctggagctccatggagagaaagggcattgccagggatgttctgtcctatgggagcatgatctcctgcttctcaaaggccgggagcctcgactcagtcatgaaactcttcaaccgcatgaacgaggctggcgttgctccagatcggaaagtgtacaatgctattgtgttcgccctggccaagggacggtgcgtgaaggaggcgaagatgcttgtcaggagtatggaggagaagcaggttgccccagacacggccacttttaactctctcatcggccctctgtgcaaggctcgtcagtttcaggaggcaatggaaatgttcgatgctatgttacagagaaagctgtctccttcagtaaggactttccatgcactgcttaatgtggctaggaactccaccgaagtttttgatctcttggataagatgaaacagttgcgatgtgagccagagatggacacttacatcatgttgatcagaaagttctgccggtggagagagcacgagagtgtggaaaagctgtggagtgcaatgcctgcaaatggcctgagccctgaccggagcgcgtacattgtattgatacatggtttattcctaaacggaagactagaggaggcagcaaggtattatgaagagatgaaaagtaagggctttttaccagagaaaaagactgaagaaatggtaatggcttggcttgaaggcagagagcttgccaaggcatcagttattagctccaagggtggtcgtggtccagtgtctctcaaacttcccaagaagtgacaagtttaaggtttagggtacgataaagttcaagaatgaaatgaaacgaaacgatatatgacggcgcttattgttattcctgtagaactgctaaagttcaagagatattttgctacacagaaaacgggggttatccctaaacctaa

SEQ ID NO: 151490 - DNA, 3128 bp, Zea Mays
cgccgcaccgtgccacccgcgcggcccgcctgctacaccccatccggccgtccccaagccgggagcggaggcgcaaaaccctccttccgctgctccggcgccatgggcggcgcctccaagctgctctcctccttcctcctcacctcttccccgctccgcctccgacccgctactgccgccgccgccgcgctgttcctatccccgcccgcggcggcctcgcgccgcctgttcctgctctccttaccctccccgcaccgtaccctctacatctcgtccgcttccgcctcccttccgcacggctccagctcggcctgcccgccgccaccgctccgagcgcctttccccgagtggtcccgcctcgtcgaccgacttgccgccaccggatacggctccggcctgcccttttccgctgacgatctcgccctcgtgtccggatgcgtcctgtcggacggggagcaggccgctgtctccacctgcctcgccttcgcgcgcgaccggcctgacctcctgagttcgcttcaaaggaaggacgtggaggtcctggtgggcaatgtggcgccgtctctgttcaaggacggggaggcatcaggacagcggcttcggcgctaccttgctggggaagaaaccgacgtcactgtttcagagagagctggaactgttgatattgttcgatatctgctaagttacatatacggttcttctgacatctgctcagaagacaaggaactcactgatttggccgtgagaaatatcatggttgagttagtgagttttagtgctctttcccagtcttccacttctgtggaattaactcccaaccaaatttgctcgagtcagcatgaacaattttccaggcctccagggcaaaatatcgaaatgaagcgaggtgattggatttgcacaagatgtagcttcatgaacttcgcaagaaacgttaggtgccttgagtgcaatgagcagaggccaaagaagatgttgactggtggagagtgggaatgccctcagtgtgatttctataactatgggaggaatatgtcatgcttaaaatgtgattgcaagaggccagcaacaatcccaccgcatcctacatctgttggtgctgatttaggtggtgtggtacagcagcttctcaaggtaacaacaagtgttggtaaatctgaaattgagagaaaacttgctgaaaatgatgaaaaggcagagagatggttgagcaaagtatctcaacttcatgattcagcagacttaagtagtctagcagaagatgaggactttcctgagattatgcctatgcgcaagggggtgaataagtttgtggttagcacacgcaaaacaccactggagagaaggcttgcaaatgcacagtacagcagtaacaatatcctcacattgtccgacccaaagataagtcaaactttggacaggatacttgggagttcagctcctactgcagccccaaacaatcaatctgttactagtgatgcaactatggaagctccgaagaaatcaatagatcacctcagtggcattgaccctgttccctttgagcccctgtctgcagatctctttgctaaaccagagagtaatgatcgacagagaaatgagaatgaaaaaaacaatgtagaagatggcagttctatggcaaataatacagtgcctttacctgagaggcgaagtatggaatcattagatactgctgagaaatggtccgagaaagtagcagaacttgacaatgtaaaggattctccaagtgcaatttccgatgaaaattttcctgagattatgccaataaggaaaggtgaaaatcgatttgttgttagtaagaaaaaagatcgctcattgacatcacagcagtacaaaaggcgcagtattctcgagcaggcagacagttctgattttgtcccatttgttccttttcctcctggctactttggcaagaaagatacgccaatagagagtactacacacacaggaattatgtcaggagacggtcagccaaaaggtaacctgaataatgagaactggaacaggaattactatcaatatcaatcacaatctcaagaatttaggcctagtggtaatgcatatactggctctgggaacacaggcaactccgaggggaacattaatgggagtaggggcgaatctacttaccatgaagctaactttgaaaagcgatcttattataactcaggttatagcaacaacggttattggagcagcgataacaataacagcaacaatgcctggagtgacaactctaattataacaacaataatgcttggagtggtaacaattcctataacgggtgtattaggaacgacaataccagctgcaacagcaatcgtgattataactacaatgatacatggagtgccagcagcaacagtgcatggagcagcagcaacaacaataaccagagtggtccatttgctgacaatagcaatgccactagaagcagtagttccgtgaatgctaatcactcggttcacagctcaggttatggaggaaactcgaacagaggttatactggaaagagcttggaaggatctgctgtgaaggatcctgatcctctagacatgtctgaggaagctaaggctgagagatggtttaggagggcagctcagataaaggacatctctgagctggcgaatattcccgacgaggacttccctgagataatgccgatgaggaagggggtgaatagattcgtcgtgagtaagaggaagacgccattggagaggagattaacatccccgcaatacagaaggaacctgccaatcgttagttctgaaacggacaaagatgccaactgaaaacagaggtatgattgcctgcataccacaatcttaactgtactgcgacgcaccatttttacaccaaggtattactctttgtgacgataagggagcaatcagaaacaagaatcatcaagaataatgctccaggaaggtttttgtacggtaaaaattatgtccgcaatgacctagggtttgctggattgtgttcgctacatgtacactatacacgtttacgttgtactaagaaccttttaacatgcaacccgtgggtgcgcggcattatcgttttttttttgtggcttgtctgagattacatgttgtcggcgttt

SEQ ID NO: 151491 - DNA, 3088 bp, Zea Mays
cgccgcaccgtgccacccgcgcggcccgcctgctacaccccatccggccgtccccaagccgggagcggaggcgcaaaaccctccttccgctgctccggcgccatgggcggcgcctccaagctgctctcctccttcctcctcacctcttccccgctccgcctccgacccgctactgccgccgccgcctgttcctgctctccttaccctccccgcaccgtaccctctacatctcgtccgcttccgcctcccttccgcacggctccagctcggcctgcccgccgccaccgctccgagcgcctttccccgagtggtcccgcctcgtcgaccgacttgccgccaccggatacggctccggcctgcccttttccgctgacgatctcgccctcgtgtccggatgcgtcctgtcggacggggagcaggccgctgtctccacctgcctcgccttcgcgcgcgaccggcctgacctcctgagttcgcttcaaaggaaggacgtggaggtcctggtgggcaatgtggcgccgtctctgttcaaggacggggaggcatcaggacagcggcttcggcgctaccttgctggggaagaaaccgacgtcactgtttcagagagagctggaactgttgatattgttcgatatctgctaagttacatatacggttcttctgacatctgctcagaagacaaggaactcactgatttggccgtgagaaatatcatggttgagttagtgagttttagtgctctttcccagtcttccacttctgtggaattaactcccaaccaaatttgctcgagtcagcatgaacaattttccaggcctccagggcaaaatatcgaaatgaagcgaggtgattggatttgcacaagatgtagcttcatgaacttcgcaagaaacgttaggtgccttgagtgcaatgagcagaggccaaagaagatgttgactggtggagagtgggaatgccctcagtgtgatttctataactatgggaggaatatgtcatgcttaaaatgtgattgcaagaggccagcaacaatcccaccgcatcctacatctgttggtgctgatttaggtggtgtggtacagcagcttctcaaggtaacaacaagtgttggtaaatctgaaattgagagaaaacttgctgaaaatgatgaaaaggcagagagatggttgagcaaagtatctcaacttcatgattcagcagacttaagtagtctagcagaagatgaggactttcctgagattatgcctatgcgcaagggggtgaataagtttgtggttagcacacgcaaaacaccactggagagaaggcttgcaaatgcacagtacagcagtaacaatatcctcacattgtccgacccaaagataagtcaaactttggacaggatacttgggagttcagctcctactgcagccccaaacaatcaatctgttactagtgatgcaactatggaagctccgaagaaatcaatagatcacctcagtggcattgaccctgttccctttgagcccctgtctgcagatctctttgctaaaccagagagtaatgatcgacagagaaatgagaatgaaaaaaacaatgtagaagatggcagttctatggcaaataatacagtgcctttacctgagaggcgaagtatggaatcattagatactgctgagaaatggtccgagaaagtagcagaacttgacaatgtaaaggattctccaagtgcaatttccgatgaaaattttcctgagattatgccaataaggaaaggtgaaaatcgatttgttgttagtaagaaaaaagatcgctcattgacatcacagcagtacaaaaggcgcagtattctcgagcaggcagacagttctgattttgtcccatttgttccttttcctcctggctactttggcaagaaagatacgccaatagagagtactacacacacaggaattatgtcaggagacggtcagccaaaaggtaacctgaataatgagaactggaacaggaattactatcaatatcaatcacaatctcaagaatttaggcctagtggtaatgcatatactggctctgggaacacaggcaactccgaggggaacattaatgggagtaggggcgaatctacttaccatgaagctaactttgaaaagcgatcttattataactcaggttatagcaacaacggttattggagcagcgataacaataacagcaacaatgcctggagtgacaactctaattataacaacaataatgcttggagtggtaacaattcctataacgggtgtattaggaacgacaataccagctgcaacagcaatcgtgattataactacaatgatacatggagtgccagcagcaacagtgcatggagcagcagcaacaacaataaccagagtggtccatttgctgacaatagcaatgccactagaagcagtagttccgtgaatgctaatcactcggttcacagctcaggttatggaggaaactcgaacagaggttatactggaaagagcttggaaggatctgctgtgaaggatcctgatcctctagacatgtctgaggaagctaaggctgagagatggtttaggagggcagctcagataaaggacatctctgagctggcgaatattcccgacgaggacttccctgagataatgccgatgaggaagggggtgaatagattcgtcgtgagtaagaggaagacgccattggagaggagattaacatccccgcaatacagaaggaacctgccaatcgttagttctgaaacggacaaagatgccaactgaaaacagaggtatgattgcctgcataccacaatcttaactgtactgcgacgcaccatttttacaccaaggtattactctttgtgacgataagggagcaatcagaaacaagaatcatcaagaataatgctccaggaaggtttttgtacggtaaaaattatgtccgcaatgacctagggtttgctggattgtgttcgctacatgtacactatacacgtttacgttgtactaagaaccttttaacatgcaacccgtgggtgcgcggcattatcgttttttttttgtggcttgtctgagattacatgttgtcggcgttt

SEQ ID NO: 151492 - DNA, 248 bp, Zea Mays
ctcttatcttgtaggtggtaacgaccacgtcaaaacaccttgcctcctttcgatcctgcagatcgaaatccagacaccaaactccgacaacgagagaagcgacagggataaagaagccacggatcaagcacaaccagatcgaaaccgggagcaaagtaaggaccgaggggggcgtgggcgacggagggaacgcaaaggtcaaagacaattactactactactactaaaattactaatagaacgatgct

SEQ ID NO: 151493 - DNA, 911 bp, Zea Mays
atacgagtcagaccacacttgtcagcaaagcgccggaatccaaaccacgcaccgccgcctcggctagctaacacgtacactagcagtgatccccatggcaatgctgccgcgtccaacagcgctcgtcgcagcggtggtggtggcggcggcgctggtgctcgggatggcgtcggcgcaggggccggccgccgcgcccgcgccgggcccggcgcccgggatcagcgacgagtgcttcaacgcggtgctcaacatgtcggactgcctgacgtacgtgacggcgggcagcaaggcgcggcacccggacacgccctgctgcccggagctggccgggttgctcgagtcccaccccgtctgcctctgccagctgctgggcggcgccgccgagtcctacggcgtcagcgtcgactacaagcgcgcgctcgcgctcccggggatctgccgcctcaccgcgccgcccgttagcgcctgcgcagctttcggattccctatccccgagggattggtgcctactgcggcgcccatggcaggcctctctccatcttctatcggcccagatgtgcctgccaacacgccgacgggctcagccaagtcccccgcgggacgcgtcaccgccgccggaggcctcgtcgccctcgccgcgctacccgtcgcggtcgcggccgccgggatcatgttctagagcatctaccggtcgtcttagactttgtgatttcttcgtcatcattcttcttacagcacacacatgtttgtgcattatggtactagttcgttaattcacgtacaaacagctagctgttccaggcacgagattcttccggatttgtttcctagcttgtaataattccccttgatgagcgtgtgtttggtatgtttctactacggagcactgtatgcatgcagttcaatctcga

SEQ ID NO: 151494 - DNA, 1072 bp, Zea Mays
gaccgcaccgcggccacagcctcgcgtcgtcgccccacagccacgcgagccttcgccgatccgcgagcgcagatcgccgaagccaggcggcggagagggagctcgaggcggcggaggaaggcgttcgccacagtcgctgatttccctggggaagagatgggtctctcctttgggaagctgttcagccgcctcttcgccaagaaggagatgaggattctcatggtcgggctcgatgccgccggtaagaccaccatcctctacaagctcaagctcggcgagatcgtcaccaccatccccactatcggattcaatgttgaaactgttgagtataagaacattagcttcactgtttgggatgttggtggccaggacaagatcaggcccctgtggaggcactactttcagaacacacagggacttatttttgttgtagacagcaacgacagggaacgtgttgttgaggctagagatgagctccacaggatgctgaatgaggatgagctgcgtgacgctgtgctgcttgtatttgcaaacaaacaagatcttcccaatgctatgaatgctgctgaaattactgacaagcttggtctgcattccctgcgacagcggcactggtacatccagagcacttgtgctacatctggtgaagggttgtatgaggggcttgactggctttccagcaacatctccagcaagtcttgaagcttttcggcagggctcctagcgagaggatgtctgaacaacttatggctgctttttttttacatattattactaagacacaagctacagcagatatagtacttgtgaaaaaaagaaacttctgagctcttttgagggattgatactagattggattgtgtttttgtttttgggtcgataccatcgcctgttcggttccacaaaattgactgtcaactatatttacctatgttcggagattgtatggtaaattaaattgacatgctttagcgtaggtctccaccgatccagtgttgtgctagatgtgagttgctagattttgtttatagatgagtatatgcttattttcatccatgcatgatttagagca

SEQ ID NO: 151495 - DNA, 105 bp, Zea Mays
gtttgatgtaatcaacttatcttcttcgttagataaaaacttagctatggtcgtcgctgctggtggctggtccaggctgcttttgatttgtctctagtttgtcac

SEQ ID NO: 151496 - DNA, 833 bp, Zea Mays
tgtgagagagaaaaaaaaatctacgaacatctgggaaagagagacaacatggaaaaaggaaaatcccctatctgcctaacctcgctacagtatcctttactgtacaccacaagcaaacaaatgtccctgttctagccagaggagaggaaaaaaaacctacagcggctccacatcagcagccagcagctgcagatcgagaatgcctttcgatcgagtcgctcacaagactatggtgtacttcccactccagctagttttgtatcgggttggacctgctcggcgtctgcttcttcaggttctcggacaccgcggcgccgccgggacccatggctgccggcttggccgctgcccggaccacctctggtcgcgccttctccgagtctgagctgacgcgtgctactacgacgaggctctgcaagagctttctcgactgcgtcctctccttggagaccacagcggcagaaggtgccaggaggaggcagtagtgcagaagcagcagggcggagaggaggctgagagcgcagacgctggtagtggtagctcctcccagtccccccatgccctggtaagctgtgggaaatgaggactgggagctccaatctgctcaggaaataagaactcccgttccatgtgagtacagtcagcgccgagagatccgtgcttcagccttcaggagctctcatgattgttgtgtttgatttggcatgtgtgagtgtggtccttcggcgattgtgggcagcacatgcggccacagattccatccactttttttctgtttctctccacgtattttttacattcgtttttgtcaataataaagaaaattgtttttt

SEQ ID NO: 151497 - DNA, 2484 bp, Zea Mays
atctctttctctttctctctctctctctcctgaaatctctctctcgctgacctgagagttatccaaatactctggtatggcgagatccccctcctcgggttcccactcaactgctgtatcgtagtagtcgactacttccctgcaatccgttggtcagctcacaatagcagatgagtccattggaggagttcgactagtctccaccgctgctgcgagattccgccagattataaaacttctgcccgagcaaagcggccgaccaagttaccacagagcaagtcagcgaggcgaaataggcgaccaagtcccaaccgagtaagaaagggagacgaaactgccgaccaagtctctaggcccacaaggtagaaacctgaacccaatgatatcaatgatatgggcccacatccgccgcgatgatttggtgatttggtgatttccatctactaataatgctcttttcatgctaatcctgcatataatccaaatggtaatcgaaccctacttccactaggttccgcgcataccctgacggcaagccatgtaccgggtgaagagccaggcggagggcgagggcgagggcaaggacgagatgatgtcgcaggaccagatggactcgccggtggacaacgatgtcagcagcagccgcaggtcgcctcgcaggggcgtcggggcgcccctgaagaaagggccctggacggacgcggaggacgccatcctgatagactacgttaagaagcacggcgtgggcaactggaacgcggtgcggaagaacaccgagctattgcgctgcggcaagagctgccgcctcaggtgggcgaaccacctcaggcccaacctcaagaaggaggccttcaccccggaggaggagcgcctcatcatccagctccacgccaagctggggaacaagtggtcgaggatggctattcatttgccagggcgtactgacaacgaaataaaaaactactggaacacacgaaaaaagagatgtgaacgagctagccttcctatctatcctgctggtgtacgtaatcaatcttcaaatgaagaccagcaattgtctggtgatttgaacggtggcgagaacatgtccaatgatcttctatccggaaacagcctttgtctaccagattttaacaatgacagtttccgtgcgaaactgaaggctttaccaccacagctgccagctgtttcaataagcaatttgctcggccaaagctttgcatcaaaaggttgtagcttcatggatcaggtagaccaagcagggatgctgaaacaatctggcagtgcgcttcctacattgagcgatgccattgacgatgtgatttcctcggttgatcaattttcaaatgactctgagaagctcatgcagactttaggttttggttatctcaatgaagccaacgctaccagcaagagtattgcgccttttggggttgcacttactggcagccatgcccctttaaatggtattttctctgcatctaggctcacaaatggtccttcgaagatggagcccccttcagtccaaaatagcaggctcaagtatactgtggatcctgcaatgcagcctactgagttagtagatccttacatgcagtctctatcagcgaccccttcagtgaaatcagagtgtgcatcgccgagaaacagtggtcttttcgaagagctgcttcatgaacctcatgcactaagatctgggaagagccaacaaccatcggtccgaagttcaagttcttctgctggcacaccttatgggactatggttagctcagaatttgatatgggtcaggaatattgggaagaacagcccggttctctcctcagcgaatatgctcacttcagtgggaattatttggctgaatgcgctcctcctgttagcgctgcatcaactgatatctttccgctccccaagatttctcctgcagaaagcccttcaatgggctctggcgagcaggcgttagagcctaaacatgagtcagcagcttcacgtacgtcatcttggaaacttgaggcatgatgcattattctctgggaacacagcccattcatccagtttcaacgataccatagcaatgctcatcggcgatgtacctgttcttggtgatggaattgtgctcgattcttcctcatgggacaacatgccacatgcttttcaaatggcggaattcaaatgagttccatataatttctttgtgatgctgaagggcttcttcctgcttgttttggggtcaatatcagggaacgccccactgattgtgacgctgcattcctgacagagatccttgtgatcttcatgcggatagtccttttgtctaattaagtgcatggaagataacctggatattatttttaattttttgctttgtattagagaaccgtttttgccatccctgacagcatttctgttggaaacgtgtcatgacttttgtttgaacaatttaaatatcggttatagataatgtgatgtgtgccatcccttgatgc

SEQ ID NO: 151498 - DNA, 946 bp, Zea Mays
cgcggtccagccaagtccaacccaccccaccacacccaccacgtcgtcgacgccgacgcgtcgccaacggaaacttctcaaagcgccgacggggttccacggcgcccgtaatttcaaccgtccccaccgccgcgggctcctcctgacggaccccgaaggtcgccgtgactcccgcccctcgccggcgacgtccggcatgccgtcctcccgcctcgtccacctcatcctcctcgcgacgctctcgctcctcctcgcccaaaccctagcctcctctgcccccgtgcccgccgccgcgtcggcgtcgacggagtccggcgacccctgcgcggccgccgtagctgacggggaagctgacgttccgctgtgccccgtgcggtgcttccgccctgacccggtctgcggcgccgacggggtcacgtactggtgcggctgccccgaggcgacctgcgcgggcgcccgcgtggcgcgacgcggctactgcgaggtcggcgccggctccggctccgcgcccgtctcgggccaggcgctgctgctcgtccacatcgtctggctcttcgtgctcggcgccgccgtcctcctcggtttcctctgatgcgcctctcgcgttcccgcagttatattcccctcccccatattctttgtcccgatcttgtgttggttgttgccttcttgttgtgctgttgatggctgaggaattgcgatgtaacgatttagttgtaattttgagaggatccgtctagagatgtaacccggttcttcgtcagatctgtcgggttcagctgtgctcaacacttcgaagcagagctgcgatgattggttgtcaaatgttgtaggttgaggtcatgtaaaacagttgtaaattcctcattaacgaatcgcattgatcagattgttttgttgtccagaagtttgggattgatggtagattgaatttgaactgcgattg

SEQ ID NO: 151499 - DNA, 632 bp, Zea Mays
tgctcaagctcaaccctaagtcctaatctggtttctgttatatcagaccttttggttgcggtgttattcttggaggttatgatagggatggaccacagctttacatgatagagccctcaggagtttcctataaatactttggtgctgcattggggaagggaaggcaggccgcaaagactgagatagaaaagttgaaactttcggagcttacctgccgagaaggcattgttgaagttgcaaagataatttatggagtgcatgacgaatccaaggacaaagcttttgagttggagttgagctggatctgtgatgaatcgaaccgccagcatcagaaggttccgaatgaattgttggagcaggccaaagctgctgctcaggcagctcttgaggagatggatgctgactaagaaacatgacaaatatgcccatgcttcatgtttttgtgctgttgatatctttgatccctttggggtgacaccgtgacagactggacattgccaatttgttggattttatttggatgtcatgtaaaactccattcatggaagtttgaatctggattgactgatataagagctgtggtgttttttacattctggtttagtcacgggctcacggcgctcgcgttcttt

SEQ ID NO: 151500 - DNA, 913 bp, Zea Mays
ttctatgattcttattgatcaagccacggtgtttgtgaaaaggactgttgttgggatcaagtgcaaagatggcattgttctgggtgtcgagaagctggtaacctcaaagatgatgctggaggggtcaaatcggaggatccattcagtgcaccggcattcgggcttggttgttgctggtttggcagcagatggcagacaaattgtttcaagggccaaatcagaagctgccagttatgaaaaggtctatggagaacccattcctgtgaaggatttggcagatcgtgtagcaagttatgttcatctttgcacgctgtactggtggctcagaccttttggttgcggtgttattcttggaggttatgatagggatggaccacagctttacatgatagagccctcaggagtttcctataaatactttggtgctgcattggggaagggaaggcaggccgcaaagactgagatagaaaagttgaaactttcggagcttacctgccgagaaggcattgttgaagttgcaaagataatttatggagtgcatgacgaatccaaggacaaagcttttgagttggagttgagctggatctgtgatgaatcgaaccgccagcatcagaaggttccgaatgaattgttggagcaggccaaagctgctgctcaggcagctcttgaggagatggatgctgactaagaaacatgacaaatatgcccatgcttcatgtttttgtgctgttgatatctttgatccctttggggtgacaccgtgacagactggacattgccaatttgttggattttatttggatgtcatgtaaaactccattcatggaagtttgaatctggattgactgatataagagctgtggtgttttttacattctggtttagtcacgggctcacggcgctcgcgttcttt

SEQ ID NO: 151501 - DNA, 1674 bp, Zea Mays
cccccccccccccccccccccccccccctgcgcagcacctgcacttcctcctcctcctcctccatggctgcaccttgcgacctgatccgccatgccctgcgtgtcctttcgaaaacggctgtcgacactgcccctctcgctcgctttccactcgattccagcaggcgtgcgtgcgtgcgtggcccaagtacccaacgcaccaccaggtggggcctctgctccaccccactccactttcactagcaccaacaccaacagcctcgccgccagcagcagccacgcgacacgacgcgacgcgagacgcggagcggtacaaaaggtggactgggtgggtgtggctggttccgtggttcaactcctaccactaccacagcaccagcgacggaccgggcaggcagagaaaaagcagaccagacgagacctctcgcgttccgtcctcctccctgcccctgctgccgttccccttcttcctcagttctcccgcccgctgctgccctccgtccgcgtccagatcccgccaccaaccgatccggcgccctccagcatggcgggggcgggggcgaaggcggcgggagccctggctctggcgctcgtgctcgcgctcgcgggggccaactcggagggcgacgcgctctcggcgctgcgccggagcctcagggaccccggcggcgttctgcagagctgggaccccacgctcgtcaacccctgcacctggttccacgtcacctgcgaccgcgacaaccgcgtcacccgcctagatcttggtaatttgaacttatctggtcatctggtgcctgagcttgggaaactggagcatcttcagtatctggaactttataagaataacattcaaggaacaatcccttctgagcttggcaatttgaagaatctaataagcttcgacttgtacaagaacaacatttcggggacaatacctcctgcccttggaaagttgaagtcccttgtattcttgcgtctcaatggcaatcatttgactgggcccatcccaagggaactcgctggaatatctagtctcaaagttgttgatgtttcaagtaatgatttgtgcgggacgattcccacgtctggaccatttgagcatattcctctgagcaactttgagaagaacccgcgcttggaaggtccagagctacaaggcctggccatatacgacaccaactgctagagggcaccacgaagaaaagaactgctagaaagtaacgagcgaacaaggttaccagaaattgggcgatatagatttactaggtctggatctgtaatcctccctgcatagctcttattcgtaactcgctgtcggcacgaaagttggtgtgtgttttagcagaatgctttctgtccgtgaaagtaaacttgaaactgcttattacgactgaaatgatattgtcgttcccccctgcgcccctgccatgagttttgggttcctttgtgttttgtacactgaacttgtcggaagtacggttcagtgaactagtttatccctgctgtggcaaatttatggaaggtggccgtgatatcgatcgactaaaccatggcacaaaagaagcaacaggcaatgatgtcctgtctggtggcgtctgcattaaggtagcaccggcaattcttgaacttgatgatcccttggttttacggacaatgcggtttgctgcaagctaa

SEQ ID NO: 151502 - DNA, 670 bp, Zea Mays
gccattgttcttgtaattttagctatgctttcacatcattatatcttgctaacacatggttgcactttgtaggcgtctcaatggcaatcatttgactgggcccatcccaagggaactcgctggaatatctagtctcaaagttgtgtgagtacacgtcagcctcaaatgtttagaattctattctttccacactaatactcaattttacaatctacccaccttattatttcagtgatgtttcaagtaatgatttgtgcgggacgattcccacgtctggaccatttgagcatattcctctgagcaactttgagaagaacccgcgcttggaaggtccagagctacaaggcctggccatatacgacaccaactgctagagggcaccacgaagaaaagaactgctagaaagtaacgagcgaacaaggttaccagaaattgggcgatatagatttactaggtctggatctgtaatcctccctgcatagctcttattcgtaactcgctgtcggcacgaaagttggtgtgtgttttagcagaatgctttctgtccgtgaaagtaaacttgaaactgcttattacgactgaaatgatattgtcgttcccccctgcgcccctgccatgagttttgggttcctttgtgttttgtacactgaacttgtcggaagtacggttc

SEQ ID NO: 151503 - DNA, 1803 bp, Zea Mays
cctgtccccgcctctgccaacgctcctgccccgcacacccacccgccgctcccgcgttgtccgcccccgtcatgaattgccctcttccatgtgcaccacagaaatctcggcgcgagatccccccgaaacctcgccataccctactgcgaggcgtaccattcggcagcgaggccctccttggcgggaacggcgtggtagtcatggaggctaagacgctccacctcgacgtgtgcgttgaaccacacgctgtgcttgtccttgcataacctggtgaggatttggccgcatcgtcccgctgagcatcacgtgcgacggcaggccctgctgctcccaggtgtcggtgcgagataggagagcgcgaacctggccgagctccatgtgaggcagtcccagggcacacgggcctcgcggtggcccaaggacgtcgggcggaagtcgcgccgagctacttccctgtctacgccaaggacgcccaacgcagagaagaggatgcccaccagcgacgtcccgtgctgcgaccgccacgcgaagaaggctgacggcatgccccgctccgatatgcccaacagctgggaccgggaaaaagacatgggacaaatagaagacatctaaagctttccaaggcagatgcctccagaggatatctactctctggtcatatgatcgatgcatagatcacttcagacaatcaaataacagtagtatacatagaaatgcaacatgtaagtatttcctttatatgtctaacagtagtttacaaatatattccacatataaccatattagcttaattgatctatgtataaattatgattattagaataaattttaattccaaatatccaaacatggcctaaataaatactgaattggacattgtatttaaatagacaacagggaacaagagcatatcaccagacacacactagaactcataaaacagggatactatgctattagtctctcttaaatgcagtacatggaagcaaggtttatgatcagatttttgtataccagagaacactcaagtctcccaactgcccgcctgccgaggttggatgtggctccaccagctctgcctccctacttcctctactgctgcggctactgctacatcatctatcgtgcctgtttttctaggaatcttaatggcatcaggctggcattttgttcaactcattagctggttacagtaacaaggaaccaccattttaatgcaaaggagcagatgcgacaggatcacaagtaggaggagcggcgacgatgctgtagcgagagacacgggtgccaaggtcgttgtgctgcggtggtggcaggacaggaaggaaacgaaaaagcaggagccagggctgttcaacaacgtgaccgagtcgctgaggcgaggaagagtaaggtgaaggcactcgtcgacgcctttgagactgacagagcgtcatctcgctgcaggaaaccagcaagcctgctgctgctccagctatgaaagtaggtgtcgtgccatgagtgcttcttgacctgcagtgtgcatgatcacctttcttggaatttttggtcttttttggttgttagtgaccgtaaaagtggcgcttgttgaggtttgctcgttcccatgtaaactgagttttctcatgggagtttccatacttttgtagtgctagaaaaaaggaaagtctgtacaggttttgtgtctatgcaaggcttgagaagttggcattgtactgataagtgataagtaaacaagttattgtaatgatttaaactagattgttttgaaaggaaatggaatgcataaagcaaattaaactt

SEQ ID NO: 151504 - DNA, 1674 bp, Zea Mays
cctgtccccgcctctgccaacgctcctgccccgcacacccacccgccgctcccgcgttgtccgcccccgtcatgaattgccctcttccatgtgcaccacagaaatctcggcgcgagatccccccgaaacctcgccataccctactgcgaggcgtaccattcggcagcgaggccctccttggcgggaacggcgtggtagtcatggaggctaagacgctccacctcgacgtgtgcgttgaaccacacgctgtgcttgtccttgcataacctggtgaggatttggccgcatcgtcccgctgagcatcacgtgcgacggcaggccctgctgctcccaggtgtcggtgcgagataggagagcgcgaacctggccgagctccatgtgaggcagtcccagggcacacgggcctcgcggtggcccaaggacgtcgggcggaagtcgcgccgagctacttccctgtctacgccaaggacgcccaacgcagagaagaggatgcccaccagcgacgtcccgtgctgcgaccgccacgcgaagaaggctgacggcatgccccgctccgatatgcccaacagctgggaccgggaaaaagacatgggacaaatagaagacatctaaagctttccaaggcagatgcctccagaggatatctactctctggtcatatgatcgatgcatagatcacttcagacaatcaaataacagtagtatacatagaaatgcaacatagaacactcaagtctcccaactgcccgcctgccgaggtgagctccgaatgcctgccctccacctctgatccgtgttgcggcttcgctcctgtgtggagcaagttaattttttttaacatgcctcaacatagatgtcgtccaattacgactgaagcaaaaaaatattgcaaggctaaacactcgggtcaattgctatgtctgggttggatgtggctccaccagctctgcctccctacttcctctactgctgcggctactgctacatcatctatcgtgcctgtttttctaggaatcttaatggcatcaggctggcattttgttcaactcattagctggttacagtaacaaggaaccaccattttaatgcaaaggagcagatgcgacaggatcacaagtaggaggagcggcgacgatgctgtagcgagagacacgggtgccaaggtcgttgtgctgcggtggtggcaggacaggaaggaaacgaaaaagcaggagccagggctgttcaacaacgtgaccgagtcgctgaggcgaggaagagtaaggtgaaggcactcgtcgacgcctttgagactgacagagcgtcatctcgctgcaggaaaccagcaagcctgctgctgctccagctatgaaagtaggtgtcgtgccatgagtgcttcttgacctgcagtgtgcatgatcacctttcttggaatttttggtcttttttggttgttagtgaccgtaaaagtggcgcttgttgaggtttgctcgttcccatgtaaactgagttttctcatgggagtttccatacttttgtagtgctagaaaaaaggaaagtctgtacaggttttgtgtctatgcaaggcttgagaagttggcattgtactgataagtgataagtaaacaagttattgtaatgatttaaactagattgttttgaaaggaaatggaatgcataaagcaaattaaactt

SEQ ID NO: 151505 - DNA, 1952 bp, Zea Mays
cctgtccccgcctctgccaacgctcctgccccgcacacccacccgccgctcccgcgttgtccgcccccgtcatgaattgccctcttccatgtgcaccacagaaatctcggcgcgagatccccccgaaacctcgccataccctactgcgaggcgtaccattcggcagcgaggccctccttggcgggaacggcgtggtagtcatggaggctaagacgctccacctcgacgtgtgcgttgaaccacacgctgtgcttgtccttgcataacctggtgaggatttggccgcatcgtcccgctgagcatcacgtgcgacggcaggccctgctgctcccaggtgtcggtgcgagataggagagcgcgaacctggccgagctccatgtgaggcagtcccagggcacacgggcctcgcggtggcccaaggacgtcgggcggaagtcgcgccgagctacttccctgtctacgccaaggacgcccaacgcagagaagaggatgcccaccagcgacgtcccgtgctgcgaccgccacgcgaagaaggctgacggcatgccccgctccgatatgcccaacagctgggaccgggaaaaagacatgggacaaatagaagacatctaaagctttccaaggcagatgcctccagaggatatctactctctggtcatatgatcgatgcatagatcacttcagacaatcaaataacagtagtatacatagaaatgcaacatagaacactcaagtctcccaactgcccgcctgccgaggttggatgtggctccaccagctctgcctccctacttcctctactgctgcggctactgctacatcatctatcgtgcctgtttttctaggaatcttaatggcatcaggctggcattttgttcaactcattaggtgcgtcaacactgaaattcactcttacggtcatgttttgttattgcattagagtttgcagcatgaatcagggacatccaatgttgttagatctattaatgcgatgttctctgtcttatttttatcctacaagtcatttcgagatatgtggttgctgatcagatgcgggcaatgtcaattttattattggaattgtttaacttgacactcattcaccttctggactgaaaaccaagacagtactgcatctatttagttaaacatatattacttggctgctaacacaactaagagaaatactgaaaatcaatccttcagtctatccttccataggattttaatttgtgcatgatagagagttttacatgtcagaaatttatagatgtcagagagttcattgcagttcatctccttcactgcatcttgcatattttttctctctttcagctggttacagtaacaaggaaccaccattttaatgcaaaggtaagcatctgcattttactcgagttacatgtcactgctaccccttaattcccggggtgcctttgatttgcgacatccaggagcagatgcgacaggatcacaagtaggaggagcggcgacgatgctgtagcgagagacacgggtgccaaggtcgttgtgctgcggtggtggcaggacaggaaggaaacgaaaaagcaggagccagggctgttcaacaacgtgaccgagtcgctgaggcgaggaagagtaaggtgaaggcactcgtcgacgcctttgagactgacagagcgtcatctcgctgcaggaaaccagcaagcctgctgctgctccagctatgaaagtaggtgtcgtgccatgagtgcttcttgacctgcagtgtgcatgatcacctttcttggaatttttggtcttttttggttgttagtgaccgtaaaagtggcgcttgttgaggtttgctcgttcccatgtaaactgagttttctcatgggagtttccatacttttgtagtgctagaaaaaaggaaagtctgtacaggttttgtgtctatgcaaggcttgagaagttggcattgtactgat

SEQ ID NO: 151506 - DNA, 1993 bp, Zea Mays
cctgtccccgcctctgccaacgctcctgccccgcacacccacccgccgctcccgcgttgtccgcccccgtcatgaattgccctcttccatgtgcaccacagaaatctcggcgcgagatccccccgaaacctcgccataccctactgcgaggcgtaccattcggcagcgaggccctccttggcgggaacggcgtggtagtcatggaggctaagacgctccacctcgacgtgtgcgttgaaccacacgctgtgcttgtccttgcataacctggtgaggatttggccgcatcgtcccgctgagcatcacgtgcgacggcaggccctgctgctcccaggtgtcggtgcgagataggagagcgcgaacctggccgagctccatgtgaggcagtcccagggcacacgggcctcgcggtggcccaaggacgtcgggcggaagtcgcgccgagctacttccctgtctacgccaaggacgcccaacgcagagaagaggatgcccaccagcgacgtcccgtgctgcgaccgccacgcgaagaaggctgacggcatgccccgctccgatatgcccaacagctgggaccgggaaaaagacatgggacaaatagaagacatctaaagctttccaaggcagatgcctccagaggatatctactctctggtcatatgatcgatgcatagatcacttcagacaatcaaataacagtagtatacatagaaatgcaacattacatggaagcaaggtttatgatcagatttttgtataccagagaacactcaagtctcccaactgcccgcctgccgaggttggatgtggctccaccagctctgcctccctacttcctctactgctgcggctactgctacatcatctatcgtgcctgtttttctaggaatcttaatggcatcaggctggcattttgttcaactcattaggtgcgtcaacactgaaattcactcttacggtcatgttttgttattgcattagagtttgcagcatgaatcagggacatccaatgttgttagatctattaatgcgatgttctctgtcttatttttatcctacaagtcatttcgagatatgtggttgctgatcagatgcgggcaatgtcaattttattattggaattgtttaacttgacactcattcaccttctggactgaaaaccaagacagtactgcatctatttagttaaacatatattacttggctgctaacacaactaagagaaatactgaaaatcaatccttcagtctatccttccataggattttaatttgtgcatgatagagagttttacatgtcagaaatttatagatgtcagagagttcattgcagttcatctccttcactgcatcttgcatattttttctctctttcagctggttacagtaacaaggaaccaccattttaatgcaaaggtaagcatctgcattttactcgagttacatgtcactgctaccccttaattcccggggtgcctttgatttgcgacatccaggagcagatgcgacaggatcacaagtaggaggagcggcgacgatgctgtagcgagagacacgggtgccaaggtcgttgtgctgcggtggtggcaggacaggaaggaaacgaaaaagcaggagccagggctgttcaacaacgtgaccgagtcgctgaggcgaggaagagtaaggtgaaggcactcgtcgacgcctttgagactgacagagcgtcatctcgctgcaggaaaccagcaagcctgctgctgctccagctatgaaagtaggtgtcgtgccatgagtgcttcttgacctgcagtgtgcatgatcacctttcttggaatttttggtcttttttggttgttagtgaccgtaaaagtggcgcttgttgaggtttgctcgttcccatgtaaactgagttttctcatgggagtttccatacttttgtagtgctagaaaaaaggaaagtctgtacaggttttgtgtctatgcaaggcttgagaagttggcattgtactgat

SEQ ID NO: 151507 - DNA, 1395 bp, Zea Mays
atgggcaactgctgcccgggctccggggatgcggagcccgcccccgctgcctccgccgatccctcctcccacctccactccggcagcttgtccctcaaggccggcgcctcggcaggctcggcgcccactcccacaaagccgcccgcgcctatcggcccggtcctgggacggcctatggaggacgtgcgcagcatctacactgtcggcaaggagctcgggcgtggccagttcggcgtcaccagcctgtgcacgcacaaggctaccggggagcgcttcgcgtgcaagaccattgccaagcggaagctctccaccaaggaggacgtggaggacgtgcggcgcgaggtgcagatcatgtaccaccttgccgggcagcccaacatcgtggagctcaaaggcgcctacgaggacaagcagtcggtgcacctcgtcatggagctctgcgccggcggggagctcttcgaccgaatcatcgccaagggcaagtacacggagcgcgccgccgcgtccctgctccgcaccatcgtggagatcgtgcacacctgccactccctgggcgtcatccaccgcgacctcaagcccgagaacttcctcctcctcaacaaggacgagaaagcgccgctcaaggcaactgacttcggcctgtccgtcttcttcaagcaaggggaggtgttcaaggacatcgtcggcagcgcgtactacatcgcgccggaggtgctcaagaggaactatggccccgaggcggacatctggagcatcggcgtcatcgtctacatcctcctctgcggagttccgcccttctgggccggcaagctcaagcagttcacggcaatgaaccagttcaagaaggccgcgctgagggccacccaccattattctgaaatccgaatcactgaatcccctgccaaggtcattgccgggtgcctgtcagaggaggagatcaggggcctgaaggagatgttcaagggcatggactccgacaacagcggcaccatcaccgtggacgagctgcggcgagggctggccaagcagggcaccaagctcagcgaggccgaagtggagcagctgatggcggccgcagacgcggacgggaacgggacgatcgactacgaggagttcatcacggcgacgatgcacatgaacaggatggacagggaagaacacctctacaccgcgttccagtacttcgacaaggacggcagcgggtgcatctccaaggaggagctggagcaggcgctcaaggagaaggggctcctggacggcagggacatcaaggacatcatctcggaggtcgacgccgacaacgacgggaggatcgactacagcgagttcgtggcgatgatgaggaaagggaccgccgagccgaaccccaagaagcggcgcgacgtcgtgttgtag

SEQ ID NO: 151508 - DNA, 226 bp, Zea Mays
acacgtttctcaatggcgagaacaacaccatccttcgtcttcaatccaattgcagtggatcccaactgtattagcaaaacaaacagcaacataagcatcacttcgtcacgaaccccccatatgaatcctgcaactaaaaggtcctagcattttaatacaagtacttgtccttgagctattctctacttaatgctagtggcacacaacaacctgactggcaagggat

SEQ ID NO: 151509 - DNA, 900 bp, Zea Mays
tctccaaactccgcgacatcgcgcgagttccgacccccctgctccgattcacctcgtcggccaacggccatgctacattacagttacagttatagcacgccgcagccctccccgccgatgtcaccgctcgtagccccggcgacgccccgtaccccgggcgcgccggcctcagacgcgtcgccgctgcccacgatcacgctcacggcgccgccgtccaacaagcggaggcgccgcggcggggccgcgcgctcctccctgcgcgccatccgcgccgtgcgcgcgctgttccggtccctcccgatcctcgcgccggcgtgccgcttcccgggcgtcatcccgcggcacggcggcggcggcggcgggccgaggggacacggtggccacatcggcggcgcgtgccgtacgacggggacgctgttcgggcaccgcagggcgcgggtgacgctggcggtgcaggagacgcccgggagcgtgcccgtgctgctgctggagctcgccatgcagaccgggaggttcatgcaggagatgggcgccgagcacctgcgcgtcgcgctcgagtgcgagaagaagccgccgccaggcgccggacgcaccaggctgctccacgagccgctgtggacggcctacgtcaacggccgcaagattgggtacgccgtgcgccgggagcccacggaggacgacctcacggtcctgcagctcctgcgcacggtgtcggcgggcgccggcgtgctgccggccgacgccgtaggcgcccccgaggggcaggacgccggcgacctggcgtacatgcgcgcgcacttcgatcgcgtcgtggggtccagggattccgagtccttctacatgctcaaccctgacggcaaccacgggccggagcttagcatcttcttcatcaggatatga

SEQ ID NO: 151510 - DNA, 1876 bp, Zea Mays
ccgtgcgtcgcgaggaaaggctcggaacgggagggcgcgggccgtcggatgctcgcagtcgcagctgccaccgccgcctacggctatttaaccccgcgctgccgacgccgcactcgcccccggcctcctccgcccgcatacccgatcccgctcgctcgccgccagttgtcccgcagctcggatcgtctcatacctcggcgaaaatgagagagatcttgcacatccagggagggcaatgtggcaaccagatcggtgccaagttctgggaggtcgtgtgtgacgaacacggcattgacactacaggtcggtacactggcacttctgaccttcagttggagcgcgtcaatgtctactacaatgaggcctcctgtggccgctttgtgccccgtgctgttctcatggacctagagcctgggacaatggacagtgtccgcactggaccctatgggcagatcttccgccctgacaactttgtgtttgggcaatctggtgctggcaacaactgggcgaaggggcattatactgagggcgctgagctcattgactctgttctcgatgttgtgaggaaggaagccgagaactgtgactgcttgcaaggattccaagtatgccactcccttggtggcggtactggatctggtatgggtacgctgttgatctcaaagatcagggaggagtaccctgaccgcatgatgctgacattctcagttttcccctcaccgaaagtatctgatactgtggttgagccatacaacgccactctttctgtccaccagttggttgagaacgctgatgagtgtatggttcttgacaacgaggccctctacgacatttgcttcaggactcttaagttgaccacccctagctttggtgatttgaaccatttgatctctgcaaccatgagtggagtcacctgctgcctaaggttccctggtcagctgaactccgacctcaggaagctggcagtgaacctaatccccttcccccgcctccacttcttcatggttggcttcgcgccgctgacgtcccgtggctcccagcagtaccgagcactcaccgtccccgagctcacgcagcagatgtgggacgccaagaacatgatgtgcgccgctgaccctcgccacgggcgttacctcaccgcctcggccatgttccgcgggaagatgagcaccaaggaggtcgacgagcagatgatcaacgtgcagaacaagaactcgtcctacttcgtggagtggatccccaacaacgtgaagtccagcgtgtgtgacatcccgccgaggggcctgtccatggcgtccaccttcgtcggcaactcaacttccatccaggagatgttccggagggtgagcgagcagttcactgccatgttcaggaggaaggctttcttgcactggtacacgggcgagggcatggacgagatggagttcaccgaggccgagagcaatatgaatgacctcgtgtcggagtaccagcagtaccaggatgcgactgctgatgacgatgaggaggccgagtatgaggacgaggaggagccagctgatggcatgtgaggggaggctgttaaatgtgaagcctggtgatgtcccctttcgtgttgtcgccatgttatactagtacactagcataccaccctcgtggcccattccgtcgatcgtggctgttgatgcttgtgtttccttgttctatagaaccttgcttttggtacggagctgcaatgtggattcgatccttccgtatcgctacttatgctgcgctaatttgctgaaatcaaaatctccagagctatgttgacctatggaagtcaaaccattctgctcgaaaacgggaagatgctcaacaagtttccgcagtcagtcaaaaaaaattattaaaaaaa

SEQ ID NO: 151511 - DNA, 1723 bp, Zea Mays
ccgtgcgtcgcgaggaaaggctcggaacgggagggcgcgggccgtcggatgctcgcagtcgcagctgccaccgccgcctacggctatttaaccccgcgctgccgacgccgcactcgcccccggcctcctccgcccgcatacccgatcccgctcgctcgccgccagttgtcccgcagctcggatcgtctcatacctcggcgaaaatgagagagatcttgcacatccagggagggcaatgtggcaaccagatcggtgccaagttctgggaggtcgtgtgtgacgaacacggcattgacactacaggtcggtacactggcacttctgaccttcagttggagcgcgtcaatgtctactacaatgaggcctcctgtggccgctttgtgccccgtgctgttctcatggacctagagcctgggacaatggacagtgtccgcactggaccctatgggcagatcttccgccctgacaactttgtgtttgggcaatctggtgctggcaacaactgggcgaaggggcattatactgagggcgctgagctcattgactctgttctcgatgttgtgaggaaggaagccgagaactgtgactgcttgcaaggattccaagtatgccactcccttggtggcggtactggatctggtatgggtacgctgttgatctcaaagatcagggaggagtaccctgaccgcatgatgctgacattctcagttttcccctcaccgaaagtatctgatactgtggttgagccatacaacgccactctttctgtccaccagttggttgagaacgctgatgagtgtatggttcttgacaacgaggccctctacgacatttgcttcaggactcttaagttgaccacccctagctttggtgatttgaaccatttgatctctgcaaccatgagtggagtcacctgctgcctaaggttccctggtcagctgaactccgacctcaggaagctggcagtgaacctaatccccttcccccgcctccacttcttcatggttggcttcgcgccgctgacgtcccgtggctcccagcagtaccgagcactcaccgtccccgagctcacgcagcagatgtgggacgccaagaacatgatgtgcgccgctgaccctcgccacgggcgttacctcaccgcctcggccatgttccgcgggaagatgagcaccaaggaggtcgacgagcagatgatcaacgtgcagaacaagaactcgtcctacttcgtggagtggatccccaacaacgtgaagtccagcgtgtgtgacatcccgccgaggggcctgtccatggcgtccaccttcgtcggcaactcaacttccatccaggagatgttccggagggtgagcgagcagttcactgccatgttcaggaggaaggctttcttgcactggtacacgggcgagggcatggacgagatggagttcaccgaggccgagagcaatatgaatgacctcgtgtcggagtaccagcagtaccaggatgcgactgctgatgacgatgaggaggccgagtatgaggacgaggaggagccagctgatggcatgtgaggggaggctgttaaatgtgaagcctggtgatgtcccctttcgtgttgtcgccatgttatactagtacactagcataccaccctcgtggcccattccgtcgatcgtggctgttgatgcttgtgtttccttgttctatagaaccttgcttttgtcaaaaaaaattattaaaaaaa

SEQ ID NO: 151512 - DNA, 1631 bp, Zea Mays
ccgtgcgtcgcgaggaaaggctcggaacgggagggcgcgggccgtcggatgctcgcagtcgcagctgccaccgccgcctacggctatttaaccccgcgctgccgacgccgcactcgcccccggcctcctccgcccgcatacccgatcccgctcgctcgccgccagttgtcccgcagctcggatcgtctcatacctcggcgaaaatgagagagatcttgcacatccagggagggcaatgtggcaaccagatcggtgccaagttctgggaggtcgtgtgtgacgaacacggcattgacactacaggtcggtacactggcacttctgaccttcagttggagcgcgtcaatgtctactacaatgaggcctcctgtggccgctttgtgccccgtgctgttctcatggacctagagcctgggacaatggacagtgtccgcactggaccctatgggcagatcttccgccctgacaactttgtgtttgggcaatctggtgctggcaacaactgggcgaaggggcattatactgagggcgctgagctcattgactctgttctcgatgttgtgaggaaggaagccgagaactgtgactgcttgcaaggattccaagtatgccactcccttggtggcggtactggatctggtatgggtacgctgttgatctcaaagatcagggaggagtaccctgaccgcatgatgctgacattctcagttttcccctcaccgaaagtatctgatactgtggttgagccatacaacgccactctttctgtccaccagttggttgagaacgctgatgagtgtatggttcttgacaacgaggccctctacgacatttgcttcaggactcttaagttgaccacccctagctttggtgatttgaaccatttgatctctgcaaccatgagtggagtcacctgctgcctaaggttccctggtcagctgaactccgacctcaggaagctggcagtgaacctaatccccttcccccgcctccacttcttcatggttggcttcgcgccgctgacgtcccgtggctcccagcagtaccgagcactcaccgtccccgagctcacgcagcagatgtgggacgccaagaacatgatgtgcgccgctgaccctcgccacgggcgttacctcaccgcctcggccatgttccgcgggaagatgagcaccaaggaggtcgacgagcagatgatcaacgtgcagaacaagaactcgtcctacttcgtggagtggatccccaacaacgtgaagtccagcgtgtgtgacatcccgccgaggggcctgtccatggcgtccaccttcgtcggcaactcaacttccatccaggagatgttccggagggtgagcgagcagttcactgccatgttcaggaggaaggctttcttgcactggtacacgggcgagggcatggacgagatggagttcaccgaggccgagagcaatatgaatgacctcgtgtcggagtaccagcagtaccaggatgcgactgctgatgacgatgaggaggccgagtatgaggacgaggaggagccagctgatggcatcataccaccctcgtggcccattccgtcgatcgtggctgttgatgcttgtgtttccttgttctatagaaccttgcttttggtacgg

SEQ ID NO: 151513 - DNA, 1711 bp, Zea Mays
ctagttgcctctttttttattcttatctttaaatcgattgtaagtttactattttttctgtcttcttttctccctcttccacctaagtatttagcacgtttatagcctcctaccatcccaatccaaacggtacaaagtcaacgatcacatacatggcggtggaaaattctgtacatacgtttccttgggtgcaacagttgcgcattgatcgacgactagtacctcctccgtgatagacgcgagcaacctatatgcacatggagccatccttacacgctaaattggagcaacttcacgtattttctataaataacatgctaaattaataaatttagcaatgtaataacataagtagtaaccataatttatttctctctctaataatttattatagtacgtccttcgttttttatttgtttcaaaatcaactaaagagcgacaaatattttaaaacgtataaataaataattgggaacttggactatttttaaccgacctagcatattttaactgtttcttttctctatctcttatcattttctcacctgaaaaagttcgcagcttcaccgaacgaaaatgtcctgtcgttccctttccaaccccgtctccgtctccgcccgccacaacaatatcgcattgacagatcgttcatcgtagcctcctccagtcgtctcccgggatcttctccggctataaatttccgccccaattccccaatccagatgcgcaaacatcgaatcgtctcgctcgtggctgccctgctcatactgcttgccctcgccgtatcgtccacccgcaacgcacaggaggattccatggccgacaacaccgggacgttggcgggcggcatcaaggacgtgccggggaacgagaacgaccttcacctccaggaactcgcccgcttcgccgtcgatgagcacaacaagaaggccaatgctcttctggggttcgagaagcttgtgaaggccaagacacaagtggttgctggcacgatgtactatctcactattgaagtgaaggatggcgaagtgaagaagctctacgaagctaaggtctgggagaagccatgggagaacttcaaggagctgcaggaattcaagcctgttgaagagggtgctagcgcctaaggatctctccttctccatgtgcgagcctgaagctcaaagcaaagttgcagaataaggagccacctcccaacatgctagaccatgctcccttgtgtaatttcataagactacaacccttttagggcttgttcgtttgtgtctgtgtctaagggaattgaaggtgattaaatttccttctatacaaatagaggggctttaatccactccaatacttttcaatccacgcctaaccgaacaagcccttaatatgatatcttagattgccgtacctgtgtaatatcatgaataaaatttgctattatggattctaaggtttatgaactaccatacatggcagaatcctcatgttactttgctgaaatctttgttggaagttggaacgtacatggcagaattctcacattacttggctcaagtcttcggcttggaagtttacatgcagattttttggtcacatgacgatcccatccaatctcagcttggtcaattcagattataccttgtaaaccaagcaagcgcctgagtgcatagtcagctcaccagatgaccagagagaatatgtttgcgatcacttcgaagctgtt

SEQ ID NO: 151514 - DNA, 2383 bp, Zea Mays
tcaacctctcgtctttggcctccgccccaggcgccgacgcagcggagacctcgtcgcccgcctccggcgagtcttccgcgtcagcttcgcgccccacgggcttcggatctaggcccgctagctcggcttggtcccctggcgggttgaaggacccgaacttgggcgtggcctccggcgccacgaagcagcccggcgcgtgctggaacgagaacgacccgccatccccgtccccgccgcagcccgccaccgcactgtcgagcgcggcgacccacgcgcggcgccgctttggctcgggcacccgctcctcctcctcctcggccacgccgtcgaaccccgggatcgggagcccgcgcttctccggggaagcggaagagcccccgcgcgccaggggcggaggaggcgctcggggcagcgcgcgtccctcggcctgggcctctgccgccattattcggggtcgggcagcagaattgcagaacagcctaagggtcggagacggatggtgagcgggtggaatggggaggtgaattttttaatccagccgtccccgtccgcggctcgccttcggctttggcggtgattttttggcgatggcaacatgtccatatgggactcgtgacgaggatgacacgacaccgcccacgctgttctctcgctttccgtcgcggcgacattgcagccttgcaggcgccgtcggccgtgcccgtgacgaggagccacgaaatcaacagaaccgagggctcgctagtagcagaatggaccaaccatagcaatataactttaaacactggatcctgttcgtcagtgctcggtcgaattgcactaataactttagataataatgcgaacgattttgcttactgtttatgtggtagtaacagctacaactggccaaaaaatacaaaaaaaggctcatatatatttcccttttttccccacatgttcgacacaaggaatgaacaaatgttgcatcgaacttgtacgggttgtcagggttcagaccgatcgggcggtcagatccgtcacactcgctaggcctggtcgtcagtcttgcggtcgccgtgcgagtcgcgctcctgcagcagcgacccggcctcctcgtcggcctgcgccgccttcttctgcgcctccttggccttgagcgcctgcagcttgacgtggttgtagtatcccaccccgaggaaggcgatcccgtagccgaagaggttgacgggggtgacggtgtcgcggatgacggaccaggagaaggcgatgagcagccagtccttgacgacgccggcgacgttcatggtgagggccgacgtcttgccgacgagcaggaagacggcgaggttgagcgcgaaggcgcagagggagttggtgccgaagacgaagaggtccggctggaagccgccggcgacggcgcgcagcctgggcagctcgacgaagacccagggcacgacgaggaaggcgaggcagcagggcgcgacgtagtagagcgaggtgatggggttgagcgagatgcccttggaggtgaggaggatctggatgaggacgaggcgcgtggcctcgaaggcgacggcggcgagctgcagggccacgccgcgcgcgtcgaagcgggcctcgccgtacgcggcgatggcgacgccgaacgagatggagagcatgttgagcatggcggaggacctgaaggtctccttcttgaagagcaccccgatggagtagacggcgacgggcatgagcgccttgagcatctggatgaaggagacggagaggtagatgtacgcggagttggagaaccagagcgagagcgagtagagggcgccgatgggcaccacggaggagaggtagagctgcgacgtcatggcgggcgaggacgggaggtccacgacgcggaggacgcggacgagcgccacggcgagggacgagcagaaggccatgtgcaccatggtcagggagatggggaagggccagttgtacatcttggggtccaggatgtacttgttgtagacgatcacggagaaggagaggaagatccacaccgccacgtacatgtacgagaccaggaccttgcggatcaccgacgccgacatgccgccgtcgccgccgccgccgctggccccttccttgcccatggcctggcctctggccccccgcttcctcgcgctgctccggtgagggggcgcggacgcggtggatctcgactgtcgagtgggaaggagccggagatctggaaggaaagcagggaggcagaaggaggcggatctgggagggcgcaggtaggtgacggggaggtttggggtgtctgcgcagaggggttattgcagactcggacggagggggatgttggccacgtggacagttgcgttgatgcagcttctgtttagtgagggtgctttgacttgtt

SEQ ID NO: 151515 - DNA, 1506 bp, Zea Mays
tttcactccccgcgccacgcgcctgactgggtgcactgcactggtggtgtgcacgcccctcgtcagtcgtcactcactcgctaccccatatcccattccccccgacggcgcctctggcagcaaggaacaatatgtccaatagggccacccattggtgttatgcctgtcagcgcccaattcgtcttcgcgggcaggatatcatatgtcccaactgcagtgatggttttatccaagaaatcagtgagatgggtggcgtactgaacacttatgggctaactgaaccggactttgaagagcgccaggccagaagatttggaatgatggatgccatatcttccctcatgcggcaacggctgtcagaaataggaagggatagtttgtttgatattcacggtagacaagggacaggtactgaatatggaaggaggtcaactgctattcctacgctggtatttggtggcatcccttctcctgcagttggtagcagtgatatcaatgttgtcatcagggaaggccgcagagctggcgctgcccgtccgaatttcagtagcttagttgttggtcccagtctggaagctctatttgagcagctactactccagaacaaccgtcaaggcccaccacctgctccacagtcagctattgactccatgcctgtggtaaagataaatcgcaggcatcttgacgaagatccacagtgtgcagtttgcaaagacaaattcgaggttggagcagaggcgcgggagatgccgtgcaagcacttgtaccatactgactgcatcatcccctggctggttcagcacaattcctgccctgtttgccgtcatccgctgccatcacagcgatcaggcagtagtaccagcagcgcccgtgtgccttcagcatactacaacgaaacagcttgccctcctgcggtcgccagggcagatttcgatcctgtgccttcagcatactacaacgaaacagcaactgatcctcctgcggtcaccagagcagatttcgatcctgctccaggaaactacggcagcgaaagccaggaaagtcacgtccccttctcctttctctggccatttggcccgtcgagttcttaccaatatgaagaaaatgttgatgaacctgcagtatacgatccaaaccagatagcatattctgcgtggcactatgaccactgactgaaaccctgagttaaaatcaagatatctgcaattcgtgccttgagctctcagctttggtgaggcaaagggctgcttgccgtataaaaaatggatggttattgtgttcagtgcatacccttgctacgcatgtccgttgtggagatatcagctgtgtatagaactgggcgcaataaactctgctgtaatgcccgtatatattccttttcggtatatcaagtctaaagctacataatcctgtatgtgcagtaatcggtgaactgagtgcatccagaatatcatgtcatgataaacatgattataattacatggttgtctttttagactgaacaca

SEQ ID NO: 151516 - DNA, 634 bp, Zea Mays
aaatatggttattcagctgcctaaatgtgggaaaaataatcctttgttacaaaatacaatatccatcaacatcaaaccatctactgtgctgcgaaaacacaggtccagttctggcggttccaaactacttcacaatttcagcttcagcctccctcgagaatgtcaaaaaacagtttgagaaaatttgcatttcgacaaactgatgtttccatgtcacttgtatggtgcaattatcctccttcggcgttttggagtctcccgcttaacatacatcttctccatatcatttagcggacggcttgatccatcaggcaagctgatgaacttccagcccccctccagcaccacgctttccctgatgaccgagcttttcgaccatgttgctccatccattgtctggtcggcgccgactgtacttgtggcacttagagccatgcgtaccttcttcttgttgaattccaagcgctgaacaaattcctcgtacaatatttgatcttccttcattgaaatttcatatagaacttcatcaggatctcgtgttgtgccatcccagccctcggacatcactttgaagtcaggtttatatggaagggatgctacgtgaaattccctgtcatgagaattgaagaacctg

SEQ ID NO: 151517 - DNA, 2117 bp, Zea Mays
aggtaccggcaggccattggccacagcccgctttactcacgacgcgacgaaccgcgcactccttttaaagctccacgttgcggtgtcctcacgggtcacggcgaccgatgccgctgctgctgcgcggcgcctccctcctccgcctctgccagtgtaccagtgggctctcaagtgtgaaatttagttcaagagtaacggtactagtgaatctcaacgccatgagggacggaatgcgggccacatattcacgtagagctgcctctaagaacagtgaggtcaagaaagatgagcagccagtcacagagaaggttagtagagctgcctctaagaacagtgaggtcaagaaagatgagcagccactcacagagaaggaagatgctgctgaaactgatttggaggtggagcgagggaggagcagcagccctagccagctccaatcaatgactgtcaaggagctcagggagctcacgaggaggaggggtatttctgtgaaaggtaccaagaaagatttagtatcagcactgatgaattctatggccgtggaagcaaatggtgaagggggaaagtcatccgttgagctggttagccccttggaagtacctttgaaaagaaaaggtggtgcttctgttgtggttgaacaaaaactagaaagttctgagatcatttctgaaacacctaacaagaaaagtagaacaaaacaaaaatcaagcaagaacaccactcgtgaggaaatttcggtgactaatgtcaagctaagtaagactgttgtccagaaggaaacagttgccggattaagtcctgatgatgattcagagccttggactatactcgtgcataagaaaccacaagccagctggattccatacaaccctaggactatgaggcctccacctctaagcaaggatacacgggctctgaagattatgtcatggaatgtcaatggattgaaagcattgctcaaatcaagaggcttctctgtgcagcagttagcacagagggaggactttgatgtgctttgcctccaagaaacaaaaatgcaggagaaggatattgaagttattaaggacactttgcttgatggctacacaaatagtttctggacttgcagtgtgtcaaagcttggctattctggcactgcaataatttcaagagtcaaaccactgtcgatcaagtatgggcttggtatatcagaccatgatactgaagggagggttgtgactgtagagtttgatgacttctacctgttaactgcttatgtaccaaactctggtgatggtctaaaaagattgacttacagggtcacagagtgggatccatcccttggtaactacatgaaagaattagagaaatcgaagcctgtcatactaactggtgatcttaattgtgcgcatcaggagattgatatacatgaccctgctggaaatcgtagaagtgcaggcttcacaaacgaggaaagagaatcatttgggaccaattttttgtccaaagggtttgttgatacgtttcggaaacagcatcctaatgttgttgcctatagttactgggggtacaggcataatgcccggaagacaaacaaaggttggcgcctggattactttcttgtgtccgaatcaatcacagaaaaagtgcatgattcatatattcttccggacatctctgccagtgatcacagtccccttggtctcgtgctgaagctgtaggctgtatcacacaggctatgccaaacattcagtctgaagcctgtgccatatttctcagacagcgatgtttattcctgatggtttctggttcgtgcagatccctggcaggaacaacgacttttgtcagactattagtgaaacaaggctttgtaacgcactgagcagatttgactattagtggacaacttactgttagcaaagctgcacctttgtagtgtaaatatgcggccatatcttgtgctgcacttgtgcagctcaatatgagcagcgggggaagctcattacctggttatggaattatgatactgaccttaacctattgaggtctttaaactatctgatcatgtgctgtgccgctgatggcgtcagaaaataactgtgccatgcaatttcacgcatagccgaaactgttcttgg

SEQ ID NO: 151518 - DNA, 2032 bp, Zea Mays
aggtaccggcaggccattggccacagcccgctttactcacgacgcgacgaaccgcgcactccttttaaagctccacgttgcggtgtcctcacgggtcacggcgaccgatgccgctgctgctgcgcggcgcctccctcctccgcctctgccagtgtaccagtgggctctcaagtgtgaaatttagttcaagagtaacggtactagtgaatctcaacgccatgagggacggaatgcgggccacatattcacgtagagctgcctctaagaacagtgaggtcaagaaagatgagcagccagtcacagagaaggttagtagagctgcctctaagaacagtgaggtcaagaaagatgagcagccactcacagagaaggaagatgctgctgaaactgatttggaggtggagcgagggaggagcagcagccctagccagctccaatcaatgactgtcaaggagctcagggagctcacgaggaggaggggtatttctgtgaaaggtaccaagaaagatttagtatcagcactgatgaattctatggccgtggaagcaaatggtgaagggggaaagtcatccgttgagctggttagccccttggaagtacctttgaaaagaaaaggtggtgcttctgttgtggttgaacaaaaactagaaagttctgagatcatttctgaaacacctaacaagaaaagtagaacaaaacaaaaatcaagcaagaacaccactcgtgaggaaatttcggtgactaatgtcaagctaagtaagactgttgtccagaaggaaacagttgccggattaagtcctgatgatgattcagagccttggactatactcgtgcataagaaaccacaagccagctggattccatacaaccctaggactatgaggcctccacctctaagcaaggatacacgggctctgaagattatgtcatggaatgtcaatggattgaaagcattgctcaaatcaagaggcttctctgtgcagcagttagcacagagggaggactttgatgtgctttgcctccaagaaacaaaaatgcaggagaaggatattgaagttattaaggacactttgcttgatggctacacaaatagtttctggacttgcagtgtgtcaaagcttggctattctggcactgcaataatttcaagagtcaaaccactgtcgatcaagtatgggcttggtatatcagaccatgatactgaagggagggttgtgactgtagagtttgatgacttctacctgttaactgcttatgtaccaaactctggtgatggtctaaaaagattgacttacagggtcacagagtgggatccatcccttggtaactacatgaaagaattagagaaatcgaagcctgtcatactaactggtgatcttaattgtgcgcatcaggagattgatatacatgaccctgctggaaatcgtagaagtgcaggcttcacaaacgaggaaagagaatcatttgggaccaattttttgtccaaagggtttgttgatacgtttcggaaacagcatcctaatgttgttgcctatagttactgggggtacaggcataatgcccggaagacaaacaaagaaaaagtgcatgattcatatattcttccggacatctctgccagtgatcacagtccccttggtctcgtgctgaagctgtaggctgtatcacacaggctatgccaaacattcagtctgaagcctgtgccatatttctcagacagcgatgtttattcctgatggtttctggttcgtgcagatccctggcaggaacaacgacttttgtcagactattagtgaaacaaggctttgtaacgcactgagcagatttgactattagtggacaacttactgttagcaaagctgcacctttgtagtgtaaatatgcggccatatcttgtgctgcacttgtgcagctcaatatgagcagcgggggaagctcattacctggttatggaattatgatactgaccttaacctattgaggtctttaaactatctgatcatgtgctgtgccgctgatggcgtcagaaaat

SEQ ID NO: 151519 - DNA, 612 bp, Zea Mays
cccgagcgctactctaaatcactcacaacacaacacatatcttttagtaacctttcaataggcgtcccccaagaactagtaaacatggcaaaactgttgagcctgttcttagccctctcctttgtagcagctatgtttgccataggctctcatgctgatggagactgtgagaatgacctccaaagcctgataagtgactgcaagacatacgtgatgttcccagctaatccaaaggtccctccttcggatgcttgctgtggtgtcatcaagaaggcaaacgtttcttgcttgtgctccaaggtcaccaaagaaactgagaaggttgtgtgcatggagaaggttgtgtatgttgctgagcagtgtaagaggccatttgagcatggcttccagtgcggaagctacaaggttccagcaaactgatgatatcgcaagagggaagcgcttgacgtagtctttagatttcaattgttgcagccgatcaaccttcttagggttgtataatatgaagtcaatgttgagactaatgtgaggtgggagaggcctattgatgcatcaaaagtattatgagctaataataaagccttctccacagattttatgattgctcaagaa

SEQ ID NO: 151520 - DNA, 2306 bp, Zea Mays
atgggtctctctggctccggtgccgtcgcgtcgattgtgttcctcggcctctgcgccaccgtgtcgtgctggcctgcaccgccgccaccggagatgctgcacgagagcttcgcagggaagtcggagttcaggacggtgaaccggaggaggctgtcctcgtgctccaacccgagcccgtacctgtcgatcaacgtgagcagcggcggggcgccgctccccgacgaggcgttcctcacggtcaccgtggccggcgtcctcagacccgacgccgacgactgggtcgcgatgatcacgccatgcagctccagtgtctccgggtgccctttgagtggtgttaactacgtccagaccggcgatctagcgcatctcccgcttctgtgccactaccccgtcaaggcacagtacatgaagcgcgaccctggctacctgggctgcaagaccgcggcatgccagaagcgcgacgcgtcgggcgcctgcagtgtccgcacctgcgccgccaccgtcaccttccacgtcatcaacttccgcaccgatgtcgagttcgtgctcttctccggcggcttccggacgccgtgcgtcctcaagcggtccggcgcgctccggttcgccaaccccgccagcccgctctacggccacctctccagcaccgactccacggccacatcgatgaggcttacctgggtgagcggcgacgggaggccgcagcaggttcagtacggaggaggcaagtccgctacttctcaagtggcaacgttcacgcggaatgatatgtgcagtaagttgtggtctcgtccatttatcacagagagcagacgttactaagggaaacgtgactgtgtttgattctggaattgcttcgacgaacttatctcgatgcaggtagccccttgttaccaagccctgccaaggatttcgggtggcatgaccctggctacatccacacggccgtcatgaccgggctccagccttctcaatcctacacctaccgttacggaagtgattccgtgggttggagtgacacaaacacattcagaatgccaccagctgcaggctccgacgagacatcatttgtgatctacggtgatatggggaaggctccgctggacccatcagtggaacactacattcagcctggatcgatttctgtggtcaaggcagtggctaaagaaatccaaacaggaaaggtcaattcagtcttccacataggagacataagctatgccacaggctttctggttgaatgggatttcttcctaaacctcatagcaccactcgcttctcgagttccctacatgaccgctattggtaaccatgaaagggattatgcagagtctggttctgtatatgtgaccccagattcaggtggcgaatgtggagttgcatatgagtcatatttccgcatgccagctgttagtaaggataagccatggtattcaattgagcaagggagcgttcactttgtcgtgatgtcaactgagcataagtggtcagagatgtcggagcagtacaaatggatgaatcaagatttgtcatcagtcaatagatcgaggacaccatgggtaattttcattgggcatagaccgatgtactcatcccatgtcggaataccagttaatgtagatctagcatttgtagcctccgttgagccactcttgctcaagcaccaggtggatttggttttctttggccatgtacacaactatgagaggacttgtgcaatatacaagaatatatgcaaaggcaagccaaagaaggatgaaagtggaattgatacttatgacaacagcaaatatactgcacccgttcatgccactgttggagctggaggatttagcttggacaagttccctaggattgtgttgaacaagtggagcttatcaagagtttcagaattcgggtatgccagggtgcatgccacaagaggtgatatgctggttcagtttgtaagctcaagtacgatggaggttttggaccaatttagatttgtgaagccagatccggcaaggaggctaaggaacaagccagtttaaccgtagctgcaatgcatgcaaaagatggagctggagctacttccttatattattgttatgctatatataaaagatggcgttgaattacacatcagcgtgtttcagcgtgttgtctaggttctatacttatatgtgtagtgtatggttctttatgacatttccacatgatagttctttctccctctgaagtatattgatccacaagtgtcattttgtagttgtagctaacagcctaacaacggctcctgaacttaagttataatttacagttttgtc

SEQ ID NO: 151521 - DNA, 2279 bp, Zea Mays
atgggtctctctggctccggtgccgtcgcgtcgattgtgttcctcggcctctgcgccaccgtgtcgtgctggcctgcaccgccgccaccggagatgctgcacgagagcttcgcagggaagtcggagttcaggacggtgaaccggaggaggctgtcctcgtgctccaacccgagcccgtacctgtcgatcaacgtgagcagcggcggggcgccgctccccgacgaggcgttcctcacggtcaccgtggccggcgtcctcagacccgacgccgacgactgggtcgcgatgatcacgccatgcagctccagtgtctccgggtgccctttgagtggtgttaactacgtccagaccggcgatctagcgcatctcccgcttctgtgccactaccccgtcaaggcacagtacatgaagcgcgaccctggctacctgggctgcaagaccgcggcatgccagaagcgcgacgcgtcgggcgcctgcagtgtccgcacctgcgccgccaccgtcaccttccacgtcatcaacttccgcaccgatgtcgagttcgtgctcttctccggcggcttccggacgccgtgcgtcctcaagcggtccggcgcgctccggttcgccaaccccgccagcccgctctacggccacctctccagcaccgactccacggccacatcgatgaggcttacctgggtgagcggcgacgggaggccgcagcaggttcagtacggaggaggcaagtccgctacttctcaagtggcaacgttcacgcggaatgatatgtgcagtagccccttgttaccaagccctgccaaggatttcgggtggcatgaccctggctacatccacacggccgtcatgaccgggctccagccttctcaatcctacacctaccgttacggaagtgattccgtgggttggagtgacacaaacacattcagaatgccaccagctgcaggctccgacgagacatcatttgtgatctacggtgatatggggaaggctccgctggacccatcagtggaacactacattcagcctggatcgatttctgtggtcaaggcagtggctaaagaaatccaaacaggaaaggtcaattcagtcttccacataggagacataagctatgccacaggctttctggttgaatgggatttcttcctaaacctcatagcaccactcgcttctcgagttccctacatgaccgctattggtaaccatgaaagggattatgcagagtctggttctgtatatgtgaccccagattcaggtggcgaatgtggagttgcatatgagtcatatttccgcatgccagctgttagtaaggataagccatggtattcaattgagcaagggagcgttcactttgtcgtgatgtcaactgagcataagtggtcagagatgtcggagcagtacaaatggatgaatcaagatttgtcatcagtcaatagatcgaggacaccatgggtaattttcattgggcatagaccgatgtactcatcccatgtcggaataccagttaatgtagatctagcatttgtagcctccgttgagccactcttgctcaagcaccaggtggatttggttttctttggccatgtacacaactatgagaggacttgtgcaatatacaagaatatatgcaaaggcaagccaaagaaggatgaaagtggaattgatacttatgacaacagcaaatatactgcacccgttcatgccactgttggagctggaggatttagcttggacaagttccctaggattgtgttgaacaagtggagcttatcaagagtttcagaattcgggtatgccagggtgcatgccacaagaggtgatatgctggttcaggtcagtttttgtatttccttttcctttccttctttcaatattctctcccttttcacatgtttgaaatagtactttacagattgatgtggcattggataacgaaaattccagaaaattcagaaagaacgccatttgggcatctccctctgaacaattgttactctattttcttcagtttgtaagctcaagtacgatggaggttttggaccaatttagatttgtgaagccagatccggcaaggaggctaaggaacaagccagtttaaccgtagctgcaatgcatgcaaaagatggagctggagctacttccttatattattgttatgctatatataaaagatggcgttgaattacacatcagcgtgtttcagcgtgttgtctaggttctatacttatatgtgtagtgtatggttctttatgacatttccacatgatagttctttc

SEQ ID NO: 151522 - DNA, 1929 bp, Zea Mays
atgggtctctctggctccggtgccgtcgcgtcgattgtgttcctcggcctctgcgccaccgtgtcgtgctggcctgcaccgccgccaccggagatgctgcacgagagcttcgcagggaagtcggagttcaggacggtgaaccggaggaggctgtcctcgtgctccaacccgagcccgtacctgtcgatcaacgtgagcagcggcggggcgccgctccccgacgaggcgttcctcacggtcaccgtggccggcgtcctcagacccgacgccgacgactgggtcgcgatgatcacgccatgcagctccagtgtctccgggtgccctttgagtggtgttaactacgtccagaccggcgatctagcgcatctcccgcttctgtgccactaccccgtcaaggcacagtacatgaagcgcgaccctggctacctgggctgcaagaccgcggcatgccagaagcgcgacgcgtcgggcgcctgcagtgtccgcacctgcgccgccaccgtcaccttccacgtcatcaacttccgcaccgatgtcgagttcgtgctcttctccggcggcttccggacgccgtgcgtcctcaagcggtccggcgcgctccggttcgccaaccccgccagcccgctctacggccacctctccagcaccgactccacggccacatcgatgaggcttacctgggtgagcggcgacgggaggccgcagcaggttcagtacggaggaggcaagtccgctacttctcaagtggcaacgttcacgcggaatgatatgtgcagtagccccttgttaccaagccctgccaaggatttcgggtggcatgaccctggctacatccacacggccgtcatgaccgggctccagccttctcaatcctacacctaccgttacggaagtgattccgtgggttggagtgacacaaacacattcagaatgccaccagctgcaggctccgacgagacatcatttgtgatctacggtgatatggggaaggctccgctggacccatcagtggaacactacattcagcctggatcgatttctgtggtcaaggcagtggctaaagaaatccaaacaggaaaggtcaattcagtcttccacataggagacataagctatgccacaggctttctggttgaatgggatttcttcctaaacctcatagcaccactcgcttctcgagttccctacatgaccgctattggtaaccatgaaagggattatgcagagtctggttctgtatatgtgaccccagattcaggtggcgaatgtggagttgcatatgagtcatatttccgcatgccagctgttagtaaggataagccatggtattcaattgagcaagggagcgttcactttgtcgtgatgtcaactgagcataagtggtcagagatgtcggagcagtacaaatggatgaatcaagatttgtcatcagtcaatagatcgaggacaccatgggtaattttcattgggcatagaccgatgtactcatcccatgtcggaataccagttaatgtagatctagcatttgtagcctccgttgagccactcttgctcaagcaccaggtggatttggttttctttggccatgtacacaactatgagaggacttgtgcaatatacaagaatatatgcaaaggcaagccaaagaaggatgaaagtggaattgatacttatgacaacagcaaatatactgcacccgttcatgccactgttggagctggaggatttagcttggacaagttccctaggattgtgttgaacaagtggagcttatcaagagtttcagaattcgggtatgccagggtgcatgccacaagaggtgatatgctggttcagtttgtaagctcaagtacgatggaggttttggaccaatttagatttgtgaagccagatccggcaaggaggctaaggaacaagccagtttaaccg

SEQ ID NO: 151523 - DNA, 768 bp, Zea Mays
gtattgtttatgttgaactctggattcggtaatcggttccaagtgatgcaagaaataacaattggcatttcactggccattgcagacatagacccatgtattcctcccatggtggtatactgcccaacgtggattccaactttgttgcctctgttgagccactcctgctcaactaccaggtggatctggttttcttcggccatgtacacaactacgagaggacttgtgcggtataccaaggcaattgcaaaggcatgccaacgacggacaaaagtggaattgacgtttatgacaacagcaactacaccgcacctgttcatgtcattgttggagcaggagggttcagcttggacagcttccctaacaaaggggaggcctggagcttatcaagggtttcggagtttggctatggcaaggtgcatgctacaagaaccgatatgctggttcagtttgtaaactcaagttcgatggaggtacgagaccaatttaggattgtgaagggagctccggcaaacaagtcactgagcctgataattcaataatagctgtcgctcacaacagaaagaagattaactggacctacttctcacctttttttgaagaatactatttatttttgtactgtaaataccatattattgtatagtatagatgttgtgtatctacaacatttacattaataaacgacccttgttaaaatactttcttactagttcatcagctcatgcggaaggagacataagcattatttaatgtttaattccatct

SEQ ID NO: 151524 - DNA, 2228 bp, Zea Mays
ccgtccacagcaaacggaggagacgtgccggtgccgccgccgcgccggtgcggcccgcccggcatataacaaccacctgcttctcagcagccgctagctccagcctactcaccatgatggctttcttcgtcgtccagcgaggctccagccaactcacgccgctcctcgcgctcgcgctcctcggcctgctgcgctgcgccgccgtctcgtgctcggcggcggcggcggcgacgacgctgctgcaccgcgagagctacgcgggcaagtcggagttcaggacggtgaaccgcaagccgctgggctcctgcgtcgacccgagcccctacctggccatcgatgtcggcgccgcaggcccgatccccgacgaggcgttcctccaggtcaccgtctccggcgtgcaaaggcccgacccctccgactgggtcgccatgatcacgccttccaactccagcgttgctgggtgtcctctgagtgaagtgaactacgtggagaccggcgacctggcgaatctcccgctcctctgccactatcctgtcaaggcccaatacctgacaagcgaccccggatacctgggctgcaagaacgccgggtgcgggaagcgcgacgcgtccggcgcatgcacggcccggacctgcgccgccacgctcaccttccacgtcgtcaacttccgcaccgatgtcgagttcgtgctcttctccggcggcttcaaggcgccgtgcctcctcaagcggtccggcgcgcgccggttcgccaaccccgccagcccgctctacggccacctctccagcaccgactccaaggccacctcgatgaggctcacctgggtgagtggagacgggaatcctcagcgcgtgcagtatggagacggaaagtcatctacttctgaagtcgcaacgttcacgcaggatgacatgtgcagtatatccgtgctgccgagccctgccaaggattttggctggcatgaccccggctatatccactcggccgtcatgactgggcttcagccatctcagtcctacacttaccgctacggaagtgattctgtgggctggagtgacacagttaaatttagaactgcaccagccgctggttcagatgagctatcctttgtgatctatggtgatatggggaaggctccactggacccgtctgtggaacactacattcagcctggatcggtttctgtggccaaggcagtggctaaagagatccaaacaggaaacgtggactccattttccatataggagacatcagctatgccacaggattcctggtcgagtgggacttcttccttcacctcatcacgccactggcctctcaagttccctacatgacagctattggtaatcacgaaagggattacgcgagctctgcatctgtgtatgtgactcctgattcagggggtgaatgtggggttgcctacgaatcatacttccccatgcctgctgttagtaaggataagccatggtattctattgagcaagggaccgttcacttcattgtgatgtccactgagcatgagtggtcggagaagtcagagcagtacaattggatggacgaagatttgtcatcggttgatagatcaagaacaccgtgggtgatcttcattggacatagacccatgtattcctcccatggtggtatactgcccaacgtggattccaactttgttgcctctgttgagccactcctgctcaactaccaggtggatctggttttcttcggccatgtacacaactacgagaggacttgtgcggtataccaaggcaattgcaaaggcatgccaacgacggacaaaagtggaattgacgtttatgacaacagcaactacaccgcacctgttcatgtcattgttggagcaggagggttcagcttggacagcttccctaacaaaggggaggcctggagcttatcaagggtttcggagtttggctatggcaaggtgcatgctacaagaaccgatatgctggttcagtttgtaaactcaagttcgatggaggtacgagaccaatttaggattgtgaagggagctccggcaaacaagtcactgagcctgataattcaataatagctgtcgctcacaacagaaagaagattaactggacctacttctcacctttttttgaagaatactatttatttttgtactgtaaataccatattattgtatagtatagatgttgtgtatctacaacatttacattaataaacgacccttgttaaaata

SEQ ID NO: 151525 - DNA, 1383 bp, Zea Mays
gacacacaggaaagcaatgataaacaagaacaccgtttgtgagacgaaagacaaccttgttcatgcatctacgttccatttcgtagattggttccatactgcgcattttcacttgtacagattctaaactaaactactacaggatattagaatcaacaagaccagatatatagctccaagtaaaccatagtcatctttcgagaaagatccatagaaaactgctagtatgtagcaacgagaggtgagaagattacccttgtcctatgctccaactctcaaaggttctccatctggatattgctcttgagtggcacgtactccccaaggtagcctccaaggtgctcatacaatgcagtgcggtcaatctgctggctgtggaaggccttgcaggcgtagtagaagacactctgcacgagcagtcctagcagattgacagagacaagaacgcacaccagcacggcgccgacaagcagccggccaggcaaggccaggccgaagctcccctcctcggtgcgtcccttaacgacagcggcacggaacagcaacgaggtcgcgccacagaccgcgaagtaggagacgacaagcgtggctgcggtgccggtgcggccctggagcagctgcctgctcttggccatggcagcgagcccgcagagcggctcgagcacggagacgacgctggcgaggtgccacagcgcggagatgtagacgtggatcccgaggaagacgaggacgacgaggaggaggaagaggacgaaggcgagggagggcggcgcggactcggacgcgttgggggcgaagacgacgatgagcaggaggacggcgagcgcgaaggcgaggtggtaggcgagcatgaggagggagacccagaggaaggtgcggaggaggcggggcaggatggggcgcagcgcgctgagcgaggaggagacggacgcgggcttcccggtgtagagggaggcgacggtgaagacggcggcggcggtggagaggagggagaaggtgaagaggacgatgaggtagatgaactggtacgcgaagaggccgagccacggcgcgaaccccgagtgggcggcgccccggatgcggagcaggatggggtgggtgaagagggagtgcgcgagcacggcgaaggagagcgggaagacgaggcaggcggtgagcagcgcgaaggtgcgcggagccgcgcgcgggatcgacgccgagacgcggatcagctccgccgcgcccagcgccgcgaggtcgctcgacgccaggtccatcgccgccgacgggatgctgcttgtgtcggccggccccggttggtttggggggcgatttgcggggtccgacctgctaggtgggtttgggggaatttggcggagttcgtgggggcacgccgtgtcgccg

SEQ ID NO: 151526 - DNA, 722 bp, Zea Mays
aaaccctagcctccacccctcacccgccgcagccaaaccctctccagcagccgtcgtcgccaccgctgcagcgcggaggcgacccccatcgccgccaagatgcagatcttcgtgaagaccctgacggggaaaaccatcacgttggaggtggagtcctcggacaccatcgacaacgtgaaggccaagatacaggacaaggagggcatcccgccggaccagcagcggctcatcttcgccggcaagcagctcgaggacggccgcaccctcgccgactacaacatccagaaggagtccaccctccacctggtgctccgcctccgaggtggcgccaagaagcgcaagaagaagacgtacaccaagcccaagaagatcaagcacaagcacaagaaggtgaagctcgcagtgctgcagttctacaaggtggacgacgccaccggcaaggtgacccgcctccgcaaggagtgccccaacaccgagtgcggtgcgggtgtcttcatggccaaccacttcgaccgccactactgcggcaagtgcggcctcacctacgtctacaatcagaaggcgtaatcccatgcgccgctttgcttcacccgcctacctatcaagcattcacctgttggttactcgatttgaatatcatttagatctgtttgaggttggaatatttttttcagcagtagtttctgtcttattatattggtacctctgttactgagttgacg

SEQ ID NO: 151527 - DNA, 1915 bp, Zea Mays
ccagaccagtctgaccctcccatagcttgccgagccccgtttagagaaacaagcgcacggacctgttagatacggcctgattttttaaccgtgatcttcactgagcccgtacactagtcctcatccggaaaaaagtatcaactcccaaactctcttcctttgccggcctcgtcgcgcgcccggctcgcctatatataaccgtctcgcctcccacctcattcatcaaacggactcacagctcgcagcacctgcaggacattgagaaccagccagctaaccaaccaaccaaccggcggagccaaagccaagaaggaaggcaacgtgcccatccagtcaggatgtgcaactccaacgtcaagtccgcgggggtggcccagatcgacggccgcccggtgctgcagccggcgggcaaccgcgtggcggcgccggagccggacgcctcccgcccgctcaagaagtccctccagaagtcgctctccatgccggtctactacgacagcaacgccaccgcgggcgcccgtcctgcgccggccgagaacaccacccgtgccgcggctaattcgtctccgctgcctcccgcgaaggcggcgacgaaggcagcgggcgctttccccgcggagaagagcggcaggtccaaggcggccaggaggccaggcgccgtgccgccgccggtggtggcgttcgcggcgctggaggcgttggagccggcggggagcatcgccgcggcgcagcgggagcacgccgcgcaggcgcaggcgcagcgcaagctgcggatcgcgcactacggccgcaccgcgtccttctcccgggtggaggggcgagtagtcggcgccgcggccgcggccgccgagcgggccgtccccgcctcccccaccgggcacgacgagaagcgctgcagcttcatcacgccctactcagaccccctgtatgtcgcgtatcacgacgaggagtggggagtgcccgtgcacgacgacgagtaagcaagccgccattattccttgctccttgcaagcgcaagctgatgatgatactagctcagtcacggcaacagctgtgctcacatgttcgagatgcactgaaacgacaggttgctattcgagatgctcacactgtctggcgtgcaagtcggggccgactggacttccatcctcaagaaaagacacgtctacagggaggcgttctccggcttcaacgtggatgcggtcgccaagtacaccgagaagcagatggcgtcgctgagcgccgactacgggctggatttgggcaccgtcagaggaaccgtcaacaacgcctgccggattatcgaggtgcggagggacttgggctcgctggacaggtacgtgtgggcgttcgtgaacaacaggccgctgtcgccgagctacaagtacagccggaagatcccggcgaagacgtccaagtcggagtgcatcagcaaggacatggtccggcgcaggttccgcttcgtcggccccaccgtcgtccactccttcatgcaggcggtcggcctcaccaacgaccacctcgtctcgtgcccgcgccaccgcgcctgctccgccgccgccgttaactgattctgctgaccaccgtccaccgatcgagagccagacgtaaggaagaagagagacctttatatataaggacacgtacaatacaaccgagaaaaaagagaaaggtagtagcctctagtagcactagaagtagtacgtagtatacggaagggagagtgctggtttgcaattgtgtgtacgtacgagtacgatgatcgagtgtgcttgtgtagattgattacgcccccacccctaattagtcaatgaatgagcttgcttgctgcgacttccgcctgcacactgcagtgtgcagtcattgttcgcgtgaggcggttagctgcaggcgtgcgctctcctcctctcaacaa

SEQ ID NO: 151528 - DNA, 2170 bp, Zea Mays
aggccgcaaacggagaagagacacgggagagagggagggctcgctagctaaacaataaccctcactctctactctctagctagctagcctctcagctcagctgtggtggggagaaagaccggaccggaggagagggcgatcaagaaaggttaccggccggcctagaggtagctgctagagccgccgagctcgatcgtccgactccgagagctagcttccgcttccgcttccgcccagggcagtagaagcgtttttacggcaacgctagctatagctagcgctgagagagagagaggtggaagtaacaaggccggtagagcaggcggaagcgagggagcggcagctgcaggcaggggtgggggcagcaaaatggtgggctccggcgcggctgggggcggagcggatcacgcgcggagcaaagaggccgcggggatgatggcgctccacgaggccctccgcaacgtctgcctcagctcggactggacgtactccgtcttctggaccatccgtcctcgcccgcggtgccgcggcgggaacgggtgcaaggtcggcgacgacaacggcagcctgatgctgatgtgggaggacggcttctgccggccgcgggtggcggagtgcctggaggacatggacggcgaggacccggtgcgcaaggccttcatcaagatgtccatccagctctacaactacggagaagggtgggtactggactacgactgggctgatgggaaaggtggcctctgataaatgtcacaaatgggtcttcaaggaaccttctgaatgcgagcccaacatctccaactactggcagagctctttcgacgcacttcctccggaatggaccgaccagttcgcatcaggcatccagaccatagctgtgatccaagccgggcatggcctcctgcagctgggctcctgcaagattatacccgaggacctgcacttcgtgctgcggatgcgacacatgttcgagtcactcggctaccagtcgggcttcttcctctcccagctcttctcgtcctcgcggggcgcctcgccgacgccgacgccgccattcccgctcaagcagccgccagcagctccggccgcgcgcgccccgccgcagctcttcagctggccgggccaccaccagccgcagcagctcccgtcgcccgcgggagcgtcgccgctcttcccgcccggcccgggcgcgttccacccgtcctccgcgcgcccaatgccgccgttcccaggcggcaaggacgagggccacatgttccacctcccgccagcggcgcaccacggcaccaacaagcagccgccgcagcacatggacgagcaccaccaccaccagcagcagccgatggtgggggccggcggcgacgcgcccgacggcgacctccgctggcccaacgggctgtccttcttcaccgcgctcaccgggcgcgcggacgacgcgaagctgcttttcggcggccccggcgctggcgctggcgctgcggacgacgacgacaaggcggcgccggacgcgcacggcggggccgagaacgtggaggagtacctcagcctggagagccactccaacaaggccaggaaggtggagagccccgcggcccagagcaccaacaagttcaagaggagcttcacgttgcccgcgcggatgagctcgtcctcgtccacgtcagcgttcccgtccgtgtcggcctccacggcgccgccgcagcagcagcaagcagggatggagtatcgagggccgcacgagggcggcgtctactcggacctcatggagacgttcttggagtagctatagctagctagatcccgtagcatgcatgatcgatcggttcagggtcacacactacgacaagcgtacgctgctttttgtttctcaccgccctccgtcccaagctttgtttcaggtttggagttttaatcgcataatatgtttaattagatttgtgtgtgtatttttttaattttcatcgtgtttcccccctattccagtagttgtcgtagctgctagctagatcgtaatgcacaaaaaaaatggtggagtacatgcatgcatgcatgcaagaagagcatgagttgcttccattatcatgactggctggcaactctgtggtgcaaccgccatggcgccatgatgaggaggtacaatgatatgcaacacccaataatatgggctttt

SEQ ID NO: 151529 - DNA, 2148 bp, Zea Mays
aggccgcaaacggagaagagacacgggagagagggagggctcgctagctaaacaataaccctcactctctactctctagctagctagcctctcagctcagctgtggtggggagaaagaccggaccggaggagagggcgatcaagaaaggttaccggccggcctagaggtagctgctagagccgccgagctcgatcgtccgactccgagagctagcttccgcttccgcttccgcccagggcagtagaagcgtttttacggcaacgctagctatagctagcgctgagagagagagaggtggaagtaacaaggccggtagagcaggcggaagcgagggagcggcagctgcaggcaggggtgggggcagcaaaatggtgggctccggcgcggctgggggcggagcggatcacgcgcggagcaaagaggccgcggggatgatggcgctccacgaggccctccgcaacgtctgcctcagctcggactggacgtactccgtcttctggaccatccgtcctcgcccgcggtgccgcggcgggaacgggtgcaaggtcggcgacgacaacggcagcctgatgctgatgtgggaggacggcttctgccggccgcgggtggcggagtgcctggaggacatggacggcgaggacccggtgcgcaaggccttcatcaagatgtccatccagctctacaactacggagaagggctgatgggaaaggtggcctctgataaatgtcacaaatgggtcttcaaggaaccttctgaatgcgagcccaacatctccaactactggcagagctctttcgacgcacttcctccggaatggaccgaccagttcgcatcaggcatccagaccatagctgtgatccaagccgggcatggcctcctgcagctgggctcctgcaagattatacccgaggacctgcacttcgtgctgcggatgcgacacatgttcgagtcactcggctaccagtcgggcttcttcctctcccagctcttctcgtcctcgcggggcgcctcgccgacgccgacgccgccattcccgctcaagcagccgccagcagctccggccgcgcgcgccccgccgcagctcttcagctggccgggccaccaccagccgcagcagctcccgtcgcccgcgggagcgtcgccgctcttcccgcccggcccgggcgcgttccacccgtcctccgcgcgcccaatgccgccgttcccaggcggcaaggacgagggccacatgttccacctcccgccagcggcgcaccacggcaccaacaagcagccgccgcagcacatggacgagcaccaccaccaccagcagcagccgatggtgggggccggcggcgacgcgcccgacggcgacctccgctggcccaacgggctgtccttcttcaccgcgctcaccgggcgcgcggacgacgcgaagctgcttttcggcggccccggcgctggcgctggcgctgcggacgacgacgacaaggcggcgccggacgcgcacggcggggccgagaacgtggaggagtacctcagcctggagagccactccaacaaggccaggaaggtggagagccccgcggcccagagcaccaacaagttcaagaggagcttcacgttgcccgcgcggatgagctcgtcctcgtccacgtcagcgttcccgtccgtgtcggcctccacggcgccgccgcagcagcagcaagcagggatggagtatcgagggccgcacgagggcggcgtctactcggacctcatggagacgttcttggagtagctatagctagctagatcccgtagcatgcatgatcgatcggttcagggtcacacactacgacaagcgtacgctgctttttgtttctcaccgccctccgtcccaagctttgtttcaggtttggagttttaatcgcataatatgtttaattagatttgtgtgtgtatttttttaattttcatcgtgtttcccccctattccagtagttgtcgtagctgctagctagatcgtaatgcacaaaaaaaatggtggagtacatgcatgcatgcatgcaagaagagcatgagttgcttccattatcatgactggctggcaactctgtggtgcaaccgccatggcgccatgatgaggaggtacaatgatatgcaacacccaataatatgggctttt

SEQ ID NO: 151530 - DNA, 856 bp, Zea Mays
gccttcagtccctgaccttgcggaaagaccaccacaccacacgcacgttgctgtacctgtagcccaacaagccctacacctctcagctctcggtcacagatggatcccacgccacgggcagtgctgagccacagcagcagtggcggggcgaagggaggaggaggaggaggaagccacgcgcactacaggggcgtgaggaagcggccgtggggcaggtacgcgtccgagatccgcgacccgtggaagaagacgcgggtgtggctgggcacgttcgacacccccctggaggccgccctcgcgtacgaccgcgccgcgcgcacgctccgcggcgccaaggccaggaccaacttccctgacgaccacgccgggcaggggcagctgcagcagcagcacctccgtcggcgccaacacccgccgccgcagcacgtctcgttcggaggcgtcggcgtcgactgcgcttctccgtggcatttcgtctgcttccagacaccgacgacggccccggcaaccgagacaccgtcaacggcactggagctgggcacgggccgaaggtgcggcggtctccccttcgacctcaatgaggcgccgtcgtgctgatgctccatcggactgtgacgaggcagcagtggcgagcaggtgagggctcagggctgggctggccgctggtgcctggcgctgggcaagggggtcagcagagtagtggggtgcaccactggtcaggctagctgtaaactgtacatatgagtgtatatttaaggaaagcttagcttagctgcttaggcctatcttgttgggcggcttgttttcgtttaaggagttaccacttctggtgtcctgtgtcggtaatggtggagag

SEQ ID NO: 151531 - DNA, 78 bp, Zea Mays
gcgagtagacgacaaaacagtcagagggaaaggaaagcgggcgacagggatgtgcatgcatgcaggtttcactggctc

SEQ ID NO: 151532 - DNA, 1122 bp, Zea Mays
cttatcctagacgccacacacacacacacatcgcttctccacacgacctcgctgaaccggaagacccgcgcacacacgccacttgtgcaccatggcgccccgggtggcggacaagtcgccattgccgctggccaccggcctgaagcttggcgttggcggaggagtcggaggcatgggcttgggtccacactaccgaggcgtgaggaagcggccgtggggacgctacgccgcggagatccgcgacccagccaagaagagtcgcgtgtggctgggcacgtacgacacggccgaggaggccgccaaggcctacgacgtcgccgcccgcgagttccgtggcgccaaggccaagactaacttcccgttccccctcgccgtcgccgtcgccggcggtgctggtagccccagcagcgacagcaccaccttggaatcgagctgtggcggcagcgggtgtggcgtcgaagcgcctgtgcaggcggccatgccgctgaccccggccctcgacctcgatctcttccaccgggcggccgccgtcagcgcggtcaccaccggcggcatgccctttccgttcaaggccttccccgtcgtgcgcccgaccccacatcagtacttcctctacaaccaggccgcggcggccgcggcagccgggtacaggatgttcaaggtcgcctcagctccagtcaccgtagccgccgtcgcgcagagcgactccgactcctcgtctgtggttgatcgcacctgttcgcctcccgcggtgacggcaaagaaggaggtcagcttcgaactggatctgaactggccgccgccggcagagaactagtcgcaccggagttttcagctgacgactttgcagtttcctttttcccttttggccttcatcaggaattgtagtgtagctctgggtgtttggtcttttttttttcttgcatgtagagtgtagactatgatatggtggagccttgtacatagtactgtagtgttttttttttccgccgagacggagtagatctgttcgtgtgtctggacagatcaaaccggcgttgatatgggctttaaaccatggagcatgttgattaatttctatgtatactgaggatatgattgttgacgaaaaaaaaacgatcc

SEQ ID NO: 151533 - DNA, 1340 bp, Zea Mays
tccggtttccccattcccacccagaccccactaccattaccaaccagagcgacaagcccgaccgcccgcttccttgcaaacgaaacaaaacaaaacaatggcgacagcgagtgagatcgcggcggtgggcgtaataggcgcggggcagatgggctcgggcatcgcccagctcgccgccgccggaggctgtgccgtacttctcctcgacgccgaccccactgccctctcccgtgccgtcatctccatctccgcctccctacggcgcctcgccgccaagggccagctctcccaggccgcgtgcgaggactcaataaagcggataaggtgcgtctccgccgtgcaggatctcagggacgcggatcttgtgatcgaggccgtcgtggagaacgaagctgtcaagaagaagctattcgtggagctggataaggtcacgaagccctcggccatcctcgcctccaacacgagctccatctccataacccgcctggcttcagctaccaaacgcccctctcaggtgataggcatgcacttcttcaaccctcctccggtaatgaaactgatcgagattatccgaggagccgatacgtcagatgaggtgtttgctgcggtcagatctttctccgaaagactcgggaagtccgttatatgctcgcaagattacccaggattcatcgtgaaccgcatcctcatgccgatgatcaacgaggccttctgggctctgtacaccggagtggcaaccaaagaggacatcgacgcagggatgaagctgggcacgaaccacccgatgggccctctgcagctcgccgacttcatcggcctggacgtctgcctctcagtacttcgggtactccacagcggcctgggagatagcaagtacagcccctgccctctcctcgttcagtacgtcgatgctggccggcttgggaagaagcgtggagtaggcgtgtattcgtatgggcacaggccttcgtccgtcaggccgaagtcgtctctgtaggcgtgagagcaaactgttgggcgaataaaaccaggtgcgtgttgcaattgcacgtcagagaaaaagggagcacagcctagttcagaggtactcagtcggacgcttcaggtcgtgtagattcgtaatggcagggtttgctgctctatgtagaaaagatggttcagtgtttttaatctgataagtggaagtcatgaaacatttccgcagtttgcgttctgctcgagagggtgggagaaacagaaaagctatacttcttttgtattgtaatcctctgtaaactacaaacagacagatctcactctctgaaccggtaaaggaaaccaatgagtttctattgtgaaaa

SEQ ID NO: 151534 - DNA, 1836 bp, Zea Mays
tatctgtggcgccggccgcgggacgcgtagccagacgcagaccccctgcctgttgccctgtcgcagtctagcatcaggcatccatcggcgagagcgagagcgagagcgttcgcagcaagcctacctcaccttgcctgcctgtctgcctgtctgtctgtctccagagctgcgcttgtccggagacggagccgactgaacatggccggagatccgggggacgcgccggaggtgggaggcggcggcatacgctccgtgctcaccacggcctcgctcgtcgctccctccggggacgaggttcagtttcgggagatcgacggcaagatcatcggcctctacttcgcggcaaactggtatccgaaatgcgaggctttcaccccggtgctggccgcggcctacgagcagctcaaggagcgcggcgccggcttcgaggtcgtgctggtgtcgtgcgacgaggaccggccgtcgttcgagcggttccacggaaccatgccgtggccagcggtgcctttcggcgacctcagctgcaagaagcgcctcagcgagaggttccaggtggagggcatcccgcgcctggtggtgctcgctccggacggcggcgcggtggtacacccggacgccgccgacctcgtgcaccgctacggcgagagggcgttcccgttcacggccgcgagggtggcggagctggaggcggatgaccagcgcaagtacgcgtcccagacgctggagaagctcttctccgtcagcgggaaagagtacgtgatgaacagtggtaataatgaaaaggttccggtctcgagcctggtggggaagacggtggggctctacttctcggctaaccattgcgcgccgtgtatcaagttcacgacgaagctggcggccatctacagcagcctcaggggcaaggcggaggacttcgaggtcgtgtacgtccccatggacagggaggaggacgggtacctgcgctcctgcggcgacatgccgtggctggcgctcccctacgacggcgcgccgtcgcgcgcgctggcgaggtacttcgacgtgcgggagatcccgacgctggtggtggtcgggcccgacggcaggacggtgacgcgggacggccggaacctggtgaacctctacttcgacatggccttcccgttcacggacgcgcagatcaggctgctgcaggaggcggaggacgaggcggccaaggagtacccgcggtcgctgcgccaccggggacaccgccacgagctcagcatcgtgtcggagaagtccgggggagggccctacatctgctgcgagtgcgaggagcagggactcggctgggcgtaccagtgcatcgcctgcggctacgagatacacctcaggtgcggccagaatgcggagggcggcagcgcaggaactgcttagctagctaggcgacgtacggcagtcggcagcatgccagcataacagcatcactggagtggtgtctacctattagactgctgcatgcgtattggacttggacatggtctgtgtttgatcccaacaaacgtcagcttgctctacgtcaagcaagtctgatgctaaagtagtcaaatagatagatgagaaatgcatagccttccttgtaaggcttagtaggtggttagctgagtgaacaacaaaatgaagctgcagcaatcaatcaatctactgtggcaggtgttatgcaaatcttgctgcactgcccaaccaaactactgcattttccagtgcgccttcttcgagcctaatttgacaccactgaaattaggctttatgtgcatagtgataaacaggatgtacctctgaaccgaagtaatcctttttgaggtacatttaacaagt

SEQ ID NO: 151535 - DNA, 1830 bp, Zea Mays
tatctgtggcgccggccgcgggacgcgtagccagacgcagaccccctgcctgttgccctgtcgcagtctagcatcaggcatccatcggcgagagcgagagcgagagcgttcgcagcaagcctacctcaccttgcctgcctgtctgcctgtctgtctgtctccagagctgcgcttgtccggagacggagccgactgaacatggccggagatccgggggacgcgccggaggtgggaggcggcggcatacgctccgtgctcaccacggcctcgctcgtcgctccctccggggacgagtttcgggagatcgacggcaagatcatcggcctctacttcgcggcaaactggtatccgaaatgcgaggctttcaccccggtgctggccgcggcctacgagcagctcaaggagcgcggcgccggcttcgaggtcgtgctggtgtcgtgcgacgaggaccggccgtcgttcgagcggttccacggaaccatgccgtggccagcggtgcctttcggcgacctcagctgcaagaagcgcctcagcgagaggttccaggtggagggcatcccgcgcctggtggtgctcgctccggacggcggcgcggtggtacacccggacgccgccgacctcgtgcaccgctacggcgagagggcgttcccgttcacggccgcgagggtggcggagctggaggcggatgaccagcgcaagtacgcgtcccagacgctggagaagctcttctccgtcagcgggaaagagtacgtgatgaacagtggtaataatgaaaaggttccggtctcgagcctggtggggaagacggtggggctctacttctcggctaaccattgcgcgccgtgtatcaagttcacgacgaagctggcggccatctacagcagcctcaggggcaaggcggaggacttcgaggtcgtgtacgtccccatggacagggaggaggacgggtacctgcgctcctgcggcgacatgccgtggctggcgctcccctacgacggcgcgccgtcgcgcgcgctggcgaggtacttcgacgtgcgggagatcccgacgctggtggtggtcgggcccgacggcaggacggtgacgcgggacggccggaacctggtgaacctctacttcgacatggccttcccgttcacggacgcgcagatcaggctgctgcaggaggcggaggacgaggcggccaaggagtacccgcggtcgctgcgccaccggggacaccgccacgagctcagcatcgtgtcggagaagtccgggggagggccctacatctgctgcgagtgcgaggagcagggactcggctgggcgtaccagtgcatcgcctgcggctacgagatacacctcaggtgcggccagaatgcggagggcggcagcgcaggaactgcttagctagctaggcgacgtacggcagtcggcagcatgccagcataacagcatcactggagtggtgtctacctattagactgctgcatgcgtattggacttggacatggtctgtgtttgatcccaacaaacgtcagcttgctctacgtcaagcaagtctgatgctaaagtagtcaaatagatagatgagaaatgcatagccttccttgtaaggcttagtaggtggttagctgagtgaacaacaaaatgaagctgcagcaatcaatcaatctactgtggcaggtgttatgcaaatcttgctgcactgcccaaccaaactactgcattttccagtgcgccttcttcgagcctaatttgacaccactgaaattaggctttatgtgcatagtgataaacaggatgtacctctgaaccgaagtaatcctttttgaggtacatttaacaagt

SEQ ID NO: 151536 - DNA, 791 bp, Zea Mays
aggcgaaaacgtagtcccagccctccgatcggatcagacggtggagagcacgcatagccagctcaaaaccctagcctccaactcatataccagctgctggccccgacacgcatcgactcccgccgccgccgcttccgctccgtcgctcgcctcacgcctccggcgccacctccaccatggccccgaagaaggagaaggccccgccgccatcgtccaagccggccaagtccggaggcgggaagcagaagaagaagaagtggagcaagggtaagcagaaggagaaggtcaacaacgctgtgctcttcgaccaggccacctacgataagctgctctccgaggtgcccaagtacaagcagatcaccccatccatcctatctgagcgcctcagggttaatggatccttggcacggagggccatcaaggatctgatggcaaaggggctcataaggatggtctctgttcattctagccagcagatatacaccagggcaaccaacacatgatgggtgttttgcgtcttgtggacgttatctagtctagacgacttgatgttgctattatatcaagtttaatttaatcgtggctcgatcaatcttactgtcgtgttgaatgtcgaatatttttgagattattgtactattttaatatcatgttttttataacatttaagaccatgttgccatccaaattttaatcttggtgaggaatatcaaccaatctctgctctgcaattacaattgctgaagttgttgcgtgtgttattatgaattcagtgttacttgacaaattta

SEQ ID NO: 151537 - DNA, 1910 bp, Zea Mays
ctcgcgcggatcgacccgagggtgcccctcccactctcgcgtcggtcccgcgatgggcctgttctcatcggccgctaagagatgtagaaagtgcaagaagttcctccgcagcgcgggcgcgtgctgctgctcgccgtcggcctcctccgcccctgctggtggtgtgcgcggcaacgaagaggcgtcgacgtcggcgctggcttccgcgccagatggcaagaaaaagaagaggtggaggaagagaaagttctggagaaagaagaagaaggccaagaaggagagcgacgatggcagcggcgagctcgtggatctcgtcaacagcttctcggccaagtccgacgtgtgcaagaacgtgaatgcggccgaggagatcctacggggctgcaaccagaacatgcccagcagggcgctgacgttcagccagctgggcgccgcgaccgacgggttcagcgagcagaacctgctgggagaaggcggcttcgggcgggtgtacaaggggctcctccaggacaccagagaggtcatcgccgtgaagcagctggacaggaacgggttccagggcaaccgcgagttcctggtggaggtgctgatgctcagcctcctgcaccacccgaacctcgtcaagctgctgggctacagcaccgactccaaccagcggatcctggtgtacgagtacatgcccaggggctcgctggaggaccacctcctggacctgcccccgagctggaagcccctgccgtggcacacgcggatgcgggtcgcggtgggcgcggcgaagggcatcgagtacctgcacgaggtggccaacccgccggtgatctaccgcgacctcaaggcgtccaacatcctccttgacagggaattcaacgccaagctctccgacttcgggctcgccaagctgggccccatgggcgaccagagccacgtcagcaccagggtcatgggcacgtacggctactgcgcccccgagtacgccatgaccggcaagctcaccaagatgtcggacatctacagcttcggcgtcgtgctgctcgagctcatcaccggccgccgcgccatcgacgtcacgaggccgtccgaggagcaggtcctcgttcactgggcaacgcctctgctgagagacaggcggaggttcatgaagctggccgacccgttgctgggcaagaggtaccccgtgaaggggctgttccaggcgctcgccgtcgcgtccatgtgcttgcaggaggacgctgccagccggccggggatcagcgacgtcgtctcggcgctctcgttcctcgccgatccgcaatactaccctccccaaggcacgggagccgagcagaaggccacagccacaggtcgagagagtaaacccaaggaggatactacagacaaggatagcagtcctcataaggccgaaatgatcagggcagacgacgaaacgaagcatagatgatgaccgtagggggaagctaaccacgggaaagggaggaacactgcagagctgtctgtctgctctcttgaatcttctttttgtaaagcgtacaccacgtaggcaggatgtaacaacaacattcaaggagttatcttgactgagatgcagattttcagcagcaatgcagcatgaagtcgagctaactgttccacacaaactactcagcaaaaggtcatgggagaggtctcaagcagggtgaccctcctcctcctcctcccctcctttttgttctggcgattgacccactacaaaaaaaatctaaagattgctacagagaccggagtactgagcaaatcggggagctgttcgcccactataaggatctcgatgtatacacatgatgcgaccttgtttgttaagccgaaaaaagaagaaattgagagaattgttagattgctaacttcaattggagaggcttttgttccgatgacca

SEQ ID NO: 151538 - DNA, 1126 bp, Zea Mays
gacgcccgcagccacgcagcactggccagttctaacgctcgatcgcattcgcacgtacgctatagctagctagcctttttggccgcgcgcgcgcacacgggtttttgtcgggaacacaggcaggcaggtaccccggcggtcggcaagctcgatggcgcaggggcggatgagctgcgtgttcctggcgtgcctggtggcggtggcgtcggtgtcggcgtccaccgcgtccgcgttcgtgttcaaggccggcggcacgggcgagtggcgcgtgcccgccgcggccggtagcggcaacggcagctcgtacaacgcgtgggcgcagcgcaaccgcttccgcgtgggcgacgccatcgctttcacgtaccagcccggcaacgactcggtgctcctggtcgacaagaggtcctacgacgcctgcgacacgggctcgccgaccgacaccttcgccgacggcagcaccgtgttcaccttcacccgctccggccccttctacttcatcagcggcaacaaggacaactgcgaccgcggcgagaagctgatcgtcgtcgtcatggccgagcgcgcggccgtcggcaacgccaccgagccgggcgcggggctggcgccgtcccccagcggcccgttctcgtccttctctccgccgccacccttcggcatcgacatctcgccgacggcgccgtatccgccgccaaacgccgccgcgccgcccaaggtggcagcaggagttgccggcgccgccacgtttgccatcggagccttgttctacgcgcttgtttgagatacgtctgttttgtttattcgaaatgttctggtgtgcatgcgcgcaaagtggagggagatgatcacgcggctgtgctttactagcttgctcaaattatatacatgtatatccgactgaggcgaatgaatgtgtttttaacgtataataatgtatcaaatatggttgatgtaatattgtatgcattgtttcgttaattcagtgcggaactgcggatgaaaaatgtgattttagtccaaacttatgttagcatggtgacaaatttatatgttattcattaccggaattcaggtctttgtcgagtgccaagcaaaaaaaactcgttaaaaaaaagcaatcgtcaaaaaa

SEQ ID NO: 151539 - DNA, 1031 bp, Zea Mays
aagtggtttgtgacttgtcaagtgttcttccggaaaaaaaaaaagaaacacaaatggacgctcctgcggcggcggcccagggttgcggcggcaagcacatcgtgctcgtccacggcgcgtgcctgggcggctggtcctggttcaaggtggccccggcgctgcgggaggtgcccacgttccgggactacacggggccgctgctggagctcctggcgtcgctgccggacggggatcgcgtggtgctcgtgggccacagcctcggcggcttgagcgtcgcgctggccgccgagacgttcccggacaaggtcgccgccgtggtgttcctctgcgccttcatgcccgactgcgcggcgcggccgtcgcacgtgctggagaagttcgtggaggggaagtggctggagtggatggacacagagttgaaaccccaggacggcgaaggcaagctccccacctctatgctgttcgggccccggatcatccgagagaagttcacccagctctgctcgcccgaggacgtgaccctcatgacatctctgcttcggccgagttccatgttcgtggaggacctggtgctccagcaaccctacaccaaggaaaggtacggctcggcgcgcaaggtctacgtcgtgtgcacggaggaccacgccatcgcggaggggttccagcgctggatggtggagaacagccccgtggacgaggtcagggagatcgtggcggaccacctcgtgatgctctccaggcccagcgacctggtgcgctgcctcgctgacatcgccgacaagtacgcttgacgacgctacgctcttcagcgcaattcgcccgcgtgctgttctcattttgccgcatttcagtttaatatttccccgctgtttccgaatcgagattggccagaattctcgacgcacggtgtgaaatcgtgtataataataataataatgctattgatgttttctaatatatagcaggtattttgtaacacttggttttaaggataaaactgaatccattagtacgtgtgctcaaaatgctta

SEQ ID NO: 151540 - DNA, 171 bp, Zea Mays
gtttttttttttttttttacaacagctggcggagggtcaagttgcttacgcggatgcacgctcaacgtgagtggcgccctatttttattgtatgatgattgacaacttcactgcagggcacgccgctgatgcctaattgtctgtgcttatctgtcagcgcgtagacattag

SEQ ID NO: 151541 - DNA, 264 bp, Zea Mays
acgcgcggtggccgctgaccacggaaccgttcctctcgagcagcacgcacggggaccgcggcggcgtgcagcgcaccccgccccgcacggagccgctgcacggcaggccgtgcccggctccggcccacgcggggcccggcgtgccggggcggagcgtgccgacgaacgacgacaccacgccgccgtcgcccccgccgcaggcgtcgtgcgcggccgcggcgccggtccccacggccgccagcccgccgcagcccccgaagccgg

SEQ ID NO: 151542 - DNA, 2171 bp, Zea Mays
ccagaccagacgatgaaccccgcgctcgtccccaacactgacgcagaggaggacggggttctcaccactgttcgagaatgggcctcaaccgcggcacctactctgtccccaacctccccgtggtctgcatcctgggtgggcccaactccgacgcctacggctccaaccgctccatgctcccggacatccatgttgtcggcggcggcctctccaaccccgacccgtacgaccccaaggtcatgggactcgaggcccgcgaacagatgcggtacatcgggaagctgaagcatgcgcactatgactggcaactgccctgtgagaggggagtccttgccgcgacgtggcagcaggcacggtcgctggcgttcgcggtgggcaacgagcagcttgcagtccacgtcgcttcgcagtgccaacaggcgtcctcgcgcgacacgcgggccatggccaccatgtcgaagaagagcgtcagggacctcacggaggacacgatcatcgcgagttgcaaggactctgtggaggtgacgcacgacaggcatctgctcggagtgacatacactgggctagagcagcatgagcaggcgctggagcagaatgagatctcatcgaaggggaccaagggctggggtgcggctggcttggacctcctgcaagctgagatcgatgcagcgaacatcaagatcgtgttgggaaaatttgatgatgcagtactgcatagaccaccatggcctccacctacacaatacggtcagtttgagaagattcttagggtgatgatggattgtaagggtcacatggtggagtcttgtttcattgtctggagtaatgtagcagatggccgaaagttagacatactagtggatggagtaggctacaatcatctgggcatatctgtggaggaagcagattgtagtcgaatggtcagatcagtgggtgaagggagttcaatgttcccttctatggaacattcagaagcatttcagggagctgtcccacataaggttgagcaaagtctttgttctgaagatgctgatctagggagtttagctgcacgtttgattggcttgtgcacccatgcaatgttggttaaacacggatggattgtcgtgagcatggtctggcactgagatagctaccacattgcgtttacaagatcaaattcagcatcaagatattatggtgctcattgattccggatcctctcacacttttctcattaattctggactaaagcaactattcatgtctgtatactgctcggcctggtcagggacaactagtcatcagactctgaaacttaaagggagcatacaggagcagcctctgaatatcttactggacggtggcagtaaacacacatttgtcaatgacaaattaattccattgctctctagggttcagtccatctcttatcctacgaaagttcaagtggtcaatggcctcattgtttcaggtcgatatcagtggttgcaggcccactggcagattcaggaatacgagtttgtgtctgatctgctctttttaccacttcccagtttagatatggttgtagacatagattggctggccacatttagttctatgcgtgtggattgggttcagaaatggttggctattccctacaaaggctcaagcatagtcttatatggtcagtcccatacaataccgagtggcacagttgtggagttatggtcgttggactcggaggcccagcagtcttcccagccatcttatcctccacagactcagtcgttgctattacagtttgcttatgtgttacggactccttttgaggctatggcaaatgaggcggcaacatggaaggaaatcaagattgtctcttctcctacaagcaggaagcgaccggtaaacgagatcaacaggagcagcacgaagaaacaaggacctggttcggttgaaataagcagagaagggatgagtgcttcaaaagcaagagctgaactagtgtccattcatggcagtagagcaaaagcatcatcagttcttatgcaatgggcacaagtttgtgtcaggtcaattctgttgctagtgagccaaggcaatttctcggtctttatttgggatcctgggggtcatgcaaagaacagcttggggacaagctgtatttcaaggagtggggaatgtcagcaacaatacaagaaagacgtcag

SEQ ID NO: 151543 - DNA, 1050 bp, Zea Mays
atgggcctcaaccgcggcacctactctgtccccaacctccccgtggtctgcatcctgggtgggcccaactccgacgcctacggctccaaccgctccatgctcccggacatccatgttgtcggcggcggcctctccaaccccgacccgtacgaccccaaggtcatgggactcgaggcccgcgaacagatgcggtacatcgggaagctgaagcatgcgcactatgactggcaactgccctgtgagaggggagtccttgccgcgacgtggcagcaggcacggtcgctggcgttcgcggtgggcaacgagcagcttgcagtccacgtcgcttcgcagtgccaacaggcgtcctcgcgcgacacgcgggccatggccaccatgtcgaagaagagcgtcagggacctcacggaggacacgatcatcgcgagttgcaaggactctgtggaggtgacgcacgacaggcatctgctcggagtgacatacactgggctagagcagcatgagcaggcgctggagcagaatgagatctcatcgaaggggaccaagggctggggtgcggctggcttggacctcctgcaagctgagatcgatgcagcgaacatcaagatcgtgttgggaaaatttgatgatgcagtactgcatagaccaccatggcctccacctacacaatacggtcagtttgagaagattcttagggtgatgatggattgtaagggtcacatggtggagtcttgtttcattgtctggagtaatgtagcagatggccgaaagttagacatactagtggatggagtaggctacaatcatctgggcatatctgtggaggaagcagattgtagtcgaatggtcagatcagtgggtgaagggagttcaatgttcccttctatggaacattcagaagcatttcagggagctgtcccacataaggttgagcaaagtctttgttctgaagatgctgatctagggagtttagctgcacgtttgattggcttgtgcacccatgcaatgttggttaaacacggatggattgtcgtgagcatggtctggcactga

SEQ ID NO: 151544 - DNA, 1391 bp, Zea Mays
atggcgctgcagcctgcgggcgtaggaaaacgcaacgcggggtcaggttcatttggcgtggcgtcggcgtcgccaccgttgtcgcagacgccgagacaagagaaaaagcgcaatgaatgtacggttcaggccgatgtgacaaggacatggcgtcggcgcatcgcttgcccggacccggtgggcgcagcgcagggaggaggaccagcacttgtggcttgcgtctgcctccgccacgacaagtttcttgttgagttctctgttgtgttatatccaatgtgtgttttttcttcccaatttatagcatccaagatactttcgatgcttcttgccttcttccgcggtgtttatttgacacaagtctgtcaaggcaggacaaaatctgaaacgggagctggacgacggggctatagctatacgcagcaagtcagcattcaagggaccagtggatgcctgactgcaagtactagtaggctagggtttgcagatgaccacgaagcacgggagcagcgccctcgggttcagcaggtacagctcctcgatgttggagtaggggccgaccttgccggcgagcgagtcgaagcccatcgtctgccccgcgaactccttgaggttgtccagcggcttgtgcacgcggccggcgatcaccctgcacaccagcagcgccctgcgcgtggtgccactgacactgccagcgccagccccgtcggcgccggcagcctcgatggactcgaaagcgcggccgctggtggacgtggtgaacacgcccacgccggtcttgccctccttcctgccggagaagccgtgccggatgatgcggcacacggcgcacttgtcggaggcgcagaggcgggacgaaccgccgccgccgccgccgccgccgccgagcgcgcacgagagcgtggtgccgtggaagcgcagcagctcgttgccgtcggcgaggcagcgcgggtgcttcttgggcagcttgctcgccctcagcttcacggcctcgcggtactcctcgaagcgggacagcgtccgctgcgtgttgtgcaccttgaacacccgctcgatccggacgcagctgctctccgactttagcaggctcgtccggcagatgatctccacgatcttccgcgacgagtccccttccaccagctccgtcactgcacgcacgcacgcatacagttattgaaattgttctgaaaatctagactcctggttgctgctctgcaaagcatggagttattgagcacgcagacgcagtacatgtacatcacaataaaaaagcatggagttattgagtgtcagcaacaatacaagaaagacgtcagaagctcaccagcactgaagatggagcactgaagatgaaaaagctgaccaacgatactgacgttgccacaacgacggag

SEQ ID NO: 151545 - DNA, 1707 bp, Zea Mays
aacccttcgcctcgcctgtctcaccacagtgtccactgtccagtcgcctagtcgcaaatctcaccccgccgccatggcctcccccgccgccgcctcccccgcgcgccgcctttccgtcattttctcctcgaccaagccacgcgcccgaccacccaaaccggcgccggctccgaaagcgccggccggccaggcggttgcgaaacctgacgagcgctgcgagtcccggaatctcacgaaaatcctgcaggtcatcttccgggagcgcgatccggacaagctggtttcccagttcatcgccgaatcgaccgcgtctgaacgcttccgcaacaagcaccgcgtgtacgacgtggccgtggcccgcctcgcctccttcggccgacacgatggcattgctgccatcatcgactcacagaagccgttcatcgcggcctccagcgtgggcttcgccgcacgcctcatccgcctctgcggccgcgcctccatgccgtcccacgccgccgcgatcttccatgacctcccaccgaagcacaagtcctccatgactttcaatgccctcctcgccgcctacctcgacgccagcgacttcgacgcactcgccaccgcgttgcaggaaatcccggccacacaccccactattgctcccaccatatactctcacaatatactcatcagtgcgctgtgcaagaagccggacctctcggccgccgtggatgtcatcacgctcatggagaagcgcggtattacccctgatatcatctctttcaacattctgctcaatgggttttacagcaatgatcgctttgatgacgtcgagaaagtttgggagatgatgaaggagaggaatgttgagccggatgcgaggagctataatgcaaaactgcggggtttggtttcccaagggagggttgaggatgcagctgcattgattgagaggatgcaaaaggagggaccaaagcctgattcagtgtcctacaacgaactgattcgagggtattgcaatgaagggaggttgaatgaagccaagaaggtatatgataatatgataaagaatggatatgcaccaaataggggcacatttcatacccttgtgccacattttgtggaggctggagagcttgatcatgctctaagctgctgccatgagatcttcactaggaagtgcagagtgcagtgctcgttgctgcagggggtagtgactgcgttgtttgctgcatcaagggtggaggaggctaagaggatcgttcatcttggaagggagaactactatcctcgaaagggtttgaggatgccaccacgtactagaaaagacgagggtttgaagatgccgcaacctggtggagaaggcaatgatgtagaagctggaactgattcagaagattctgtatcatatgaagatgggtgcgagcaagaagaggagtcgaaaaatggtcagtgaggatgtacctttgtaatttaagcattgatgtggcatggcgatgcaagctgaatttgctctacttctttgatggcctgatacaacagaattgcctgtgcaattggaattctctcgtactttagtaatatgatggtttattttgcttctctaggttgattggtaaaaactcctccactcattatatacatgatattagaatcaacccctcttccctagaatggcttgttttggcattttttgtcacacgtcttcaatattgttaaatatgtttg

SEQ ID NO: 151546 - DNA, 704 bp, Zea Mays
gatccattccacacaaccaccactgctcttgccccagcccgcaagaactcgcagaggccgacggaatcctcttcgggttcccaacgaggttcggaatgatggcagcgcagatgaaggcgttcttcgatgccactggtgggctctggagggagcagagccttgccggcaagcctgccggcgtcttcttctgcactggatcccagggtggtggccaggagacgacagcgttgacagcgatcacccagttgacgcaccacggcatggtgttcgtgcctgtgggctacaccttcggcgccaagctgttcggcatggaccaggttcagggcggcagcccctacggcgccggcacgttcgccgccgacggctcgaggtggccgagcgaggtggagctggagcacgccttccaccaggggaagtacttcgcaggcatcgccaagaagctcaagggttcagcctgatctacacatatacccttgtcggatatcataaaaaacacttattacagattcgtcttacccatcaatagatcggtctgttctctcgtggtgtctggatgttgtgtggctcagtggaactttcatgctacggtgactttgttgtaatctggagttggaatatcgttgtttcgcataaatttcgatgatttgctcaagtaaacggtttgtttggttcagagcttgttaatccatttgcgttaagaagtc

SEQ ID NO: 151547 - DNA, 998 bp, Zea Mays
gcctataaatagtctcgctccgctggccggcaactggcaccagcaccgaggcaggagcggcgatccattccacacaaccaccactgctcttgccccagcccgccgcaggagttgccagatctgctccggtcacaggagctccgactccgagccctctccaatggcggttaaggtctacgtcgtgtactattccatgtatggacatgttggcaaactagctgaagagatccagaaaggtgcctcgtctgttgaaggtgttgaagctaaaacatggcaggtccctgaaaccctccctgaggaagtgcttggaaagatgggcgcaccccctaagcctgacgtgccagtcatcacgccgcaagaactcgcagaggccgacggaatcctcttcgggttcccaacgaggttcggaatgatggcagcgcagatgaaggcgttcttcgatgccactggtgggctctggagggagcagagccttgccggcaagcctgccggcgtcttcttctgcactggatcccagggtggtggccaggagacgacagcgttgacagcgatcacccagttgacgcaccacggcatggtgttcgtgcctgtgggctacaccttcggcgccaagctgttcggcatggaccaggttcagggcggcagcccctacggcgccggcacgttcgccgccgacggctcgaggtggccgagcgaggtggagctggagcacgccttccaccaggggaagtacttcgcaggcatcgccaagaagctcaagggttcagcctgatctacacatatacccttgtcggatatcataaaaaacacttattacagattcgtcttacccatcaatagatcggtctgttctctcgtggtgtctggatgttgtgtggctcagtggaactttcatgctacggtgactttgttgtaatctggagttggaatatcgttgtttcgcataaatttcgatgatttgctcaagtaaacggtttgtttggttcagagcttgttaa

SEQ ID NO: 151548 - DNA, 3306 bp, Zea Mays
tccggtcccgcgcccaatccgccctacccaccatcggatcaccgagcagaaacgatgctccacacaccacacgcggacacgcccgccccgccgcgagcactcccgccccggtcacccccgcccggtcgtcaccatggccgcgctccttcagtcgtctttcctcttccctcacgccaccttccccaaccccaagccccaccacctcgccgccgccgccgccacgagacccgagtcacccaacgtggcccccaatcccgccagcgcccgcctccgccgcctcattgcccgcgaggacctcgccggtgccgcgcgcctcgtcgagctctccgcctcccgcgacggggaggcccccgacgtctacctctgcaccaagctcatccggaacctctgccgccggggccgcacctccgacgccgcccgcgtgctccgcgccgccgagggctccggctcccccgtcgacgtcttcgcctacaacaccctcgtagcggggtactgccgctacggccacctcgacgccgcgcgcaggctcatcggctccatgcccgtcgcgcctgacgcctacacgtacacgccactgatccgcgtgctctgcgaccgcggcagggtcgccgacgcgctcagcctgctcgacgatatgctccgccgcgggtgccaaccaaacgtcgtcacctacactgtgctcctggaggccatgtgcaagaacagtgggttcgagcaggccatggcagtcctcgacgagatgcgcgccaagggatgcacacccaacattgtcacgtacaatgtcatcatcaatggcatgtgcagggaaggccgtgttgatgacgcaagggatctcttgaacaggttgttctcttacgggtgccagcctgacactgtcagctataccaccctcctcaagggtttgtgcgcttccaagcggtgggatgacgttgaggaactatttgctgagatgatggagaagaactgcatgccaaacgaggtgacgtttgacatgctaatcagattcttttgccgaggaggtatggtggagcgggctattcaagttcttcaacaaatgacggagcatgagtgcgccaccaacaccaccttgtgcaatattgtcataaactcaatttgcaaacaaggccgggttgacgatgcctttaagttcttaaacaacatgggttcctacgggtgcaatccagataccattagctataccacagtcctaaagggcttgtgtcgtgccgaacgatggaatgatgccaaggaacttttgaaagagatggtccggaataattgccccccaaacgaggtaacattcaatacatttatctgcatcttgtgccaaaaggggttgatcgagcaagctattatgcttattgaacaaatgcaagagcatgggtgtacagtgggtgttgtcacatacaatgctcttgtcaatggattctgtgtgcagggccatattgacagtgccttagaattgtttcgcagcatgccctgcaaaccaaataccatcacatacactactttgctgacaggcttgtgcaacgctgaacggttagatgctgctgcagagctcgtagctgaaatgcttcatagggattgccctccaaatgtagtgactttcaatgtacttgtgaatttcttttgccaaaaaggatttctggacgaagcaattgaactcgttgagcaaatgatggaacatggttgcacacccaacctgatcacatataatacattatttgatgggattaccaaggattgcagttcagaagatgccctggagttgttgcatggcttggtcagcaagggagtatcgccagatgtcattacattttcttcaatcattggtatcctctcaaaggaagatagagttgaagaggccattcaaatgtttcacttagcgcaagatatcggaatgagacccaaagctttggtgtacaacaagatactgcttgggctatgtaaaagacatgaaatagataatgctatcgactttcttgcctatatggtatccaacggatgcatgcccaatgagtcaacctacattatacttatcgaaggccttgctcgtgaaggtttgttgaaggaggcccaagatctactgagcatgttgtgctcaagaggagttgtaagcaagaacttaatagaagagtagcactgaggttgaagaccaaactgtgcataccctttggctcatgatgaatcctgggattaaatgcttattcattattcacagtgagtggatcgatagcctcgtctccttcaagctgcagtgcttcatgtaggtggttgtttgagggcccataacctcctatgaaggaatcttgacaatgaacctcatttagaagagtcaagaccaacgagacggatctggagtaaagcacaagaagaaaagctcggtgctcctagatttcatactgtcgcagtaacgaatacaatcaacattttttacctgacacttttgagtttcgctaacacaatgacctgttaaactgcaagcattgtgcgtacaatgatttcgggttttcctttcatgtgcaatggacatttgtgcggttgctttttcgttcatttaagaatccagatacaacattcctcactgaatcttgtttttgcccaggtttctgtctcttaaaattggcttgtcaaagaatactatagtttataatttaatattgtatggacgcctttttttgactttataaacaggctggtgtgctttatcatcttcatcaccaagaatttgtatgctgtaagatttttagcttcttttttgtagttgtaggtttatgccattatattttaggcctcctgaaacctcagaatctagcacacatggtcacatgctatatcctgattagtcaattctggtatcggatttctaacgttattctatgtttcaatggttgattatcgactttggtggagacgtgagaagtgcgatactaatcaacgatccaagcacttaaattggttggtaaaccattgaactacataagatgctgagcagaagaaacatcattcctcagatgctcagaaagtcagaatcaaatgtctgatataggaggtgttgggggcatgggtatcaatggcttaatcctcagataagctgggttctggtccctctggatgtacaccggctttgacgaagttttcagtactgtctcaagaagagttacaagcatggcatggcgctggagacgggtggtaagggtgtctggaatggtatttgttggttttgtacagaacttggtggctacagattttgtctagtgcaccagtggaatgaaaattcactttcatttacattcgttttagaaa

SEQ ID NO: 151549 - DNA, 2353 bp, Zea Mays
ccccgtacgtccgccgccgagtgtttgggaagcgagcaaaccgctcctccccatccttgttctaccattgcgccgcgcgtatcccacgtcgacgcggtcgagggagtccaggctgttgccagcgagcgatggcgagcaacggctcgtcgctggtgcgccgagccgccgcagcggtgcgccgcatgcctcgttggaagaagcggcttgtcttcttcgccgtcggagctagcaccttaacttatgcttgtcaagataatcgtgttcttcaaatttgtgatgttactggaaacaagaagaaggtggttatccttggaactggatgggctggtgcaagtttcttgagaaatattgacacatctttgtatgatgtccatgtggtatcacctcgcaattacttcaccttcactcctttgttgccaagtgtgacatgtggcacagtcgaagcacgtagtatcgtggagccaattcgcaatatcgtgagaaagagaaatggtgcattccgattttgggaggcggagtgcttcaagattgatccaacaaacaaaaaagtccactgcagatcagatgttgggacaaacattaatggaaacggtgaatttgtggtggattatgattacctgattgtcagtgttggggctagacctaatactttcaacacgcctggtgttactgagaattgccatttcctaaaggaagtagaggatgctcaaaagatcaggaagagtgtcatgaaatgttttgaaagagctgcccttccaaatctttctgaggaagaacgaaagaagaaccttcattttgttattattggtggtggcccaacaggggtagaatttgctgcagagttgcacgactttgtgaatgaagacttggcaaagttgtatcctgatgttaagaagcacgtaaacatttcagtaattgaagcaggaggtcatatccttacaatgtttgacaaaagaatcacccaatttgctgaagagaagttcaagagggatggcatagatttgaagacaaattttaaagtcgtgaaggtgtctaataaggatattctcatgaccaatcctgctacaggagaggtcgccgttccttatgggatggcagtttggtcaactggaattggaacccgtcccatcattatggattttatgaagcaagttggtcaggagaaccggcgtgtgctagctactgatgagtggcttagggttcaagggtgtgaggatgtatatgctcttggtgattgcgcaacgattgctcaaagaaaagttatggaagatgttgctgccatattccgagtagcagacaaggataactctggcactttaactgtgaagaaaataaaagatgttcttggagacatctatgagagatacccacaagtggaattgtatcttaaatccaaccaaatgaagggcttccatgatctacttaaagactcagatggtagctccaaggagttcaaagaactggacatcgaacagttcaaaagggcccttgctcaagtggactctcaagtcaagatgctcccagcaacagctcaggttgctgcacaagagggaagttacctagcggattgcttcaacagaatgaagatgtgtgaagaatatcctgaggggcctataaggatcagaggtgcagggcgccatcggttcaaacctttcaggtacaagcatcttgggcaattcgctccactgggtggagagcaaactgcttaccaattgccaggtgactgggtacatgttggacacagcacccaatggctgtggtattctgtctatgcaagcaaacaattcagttggcgcacaaggatgctagtcgtatcagattgggggaggcgattcatctttggaagggactccagtagcatataaattgaaatctcccaaatctgtatccacctacgttatatagatgcatgctaccagtactacttgcatcagttttgctgtcccactattttcgaacgtagcctagcaaggtttctgataccaaattttgaccttgccaattcttttgttattcgtattactttggatatatgtttttttatgtagggcactgtgatttctagctatatatgttttgattgtcagtttgagttctgttgccatgggcgatcgagtatttatttttcctaggtttcttatcacatctgctgcctgattggaatctgcaagtttttccttatcactttagttgtataaaaatgtaaccgtgagtgtgaattgacctgttaggatgctgcacatgcaccagaggaaaaaacataaacaaggcataaataattcgagacacatgtcacagagaacctgtcaaccagtaccgtacacatagaggctggagctccaatgctcgagtt

SEQ ID NO: 151550 - DNA, 615 bp, Zea Mays
tttatgcatgatgccatgtatggtaggaatgtaggatgtttgcatatggcctgttcatttggatatatttcttaccgttgggttatataaatcagtaagtggaaaatatatagttgtttcctgttgcctcatgatctttctatttgtaagaatgatgcagttagtattgttgatatgtgctattggttttgtcgattccttttttgttctccagatcagttgtaatgaaaacagagaacctatacctgtgcactcaattttagtatggctgtcatctttgaatgttctttgcaatagctgacctgcctgcttttatcagaaaaatcatattcaatgtctgctattgggattgttaacccttgcagtttgcaaggccagtatgttccaacattgataccaccctaacagatgcccccttttactgattatatgttgtgagctactggcagttagccaacttattttattttaggatgttatggaaccactaggaactgttccatgatttttttggtagacttgcatgtaagaatatgaagtaggcactgttgcctatcagtttactttgaatctttatgtttaatattatttggacaacgacaactatgcaaatag

SEQ ID NO: 151551 - DNA, 1054 bp, Zea Mays
cagacttccatactgccccgttctcctctcctcttcccccaaatctgcgtgcgccgcggcaaccctagcccccgcgatccgctcgccggaggggagggagccccgccggcgtccatggaggtgaagctgtggaacgacaagcgcgagcgggagctcctggagagctacgcggacctgtacgcgatcatcaaggtcacggagaagctggaacgggcctacgtccgcgacctcgtctcagccgccgactacgaggcggagtgcctcaagctcatctcccagttcaactccctctcctcctcgctcgccggcaccgtcgccgtcccgcgcttcgtccaggcgtaccgtctcgattgccccgccgcgctcaaccgcctcctccagtcgggcgtcccggccaccgtcgagctccgcgccgcgtccgcctcatccgcgcccgccgccacctccgcctccgccgcagccatcgcgcactgcgtgcagaccttcatcaccgccatggacgcggtcaagctcaacatgcttgccaacgaccaggtccgccccctgctgcaggacgtcgctacatccatggccaggctcggctccctactgccgcccgactttgaggggaaggtcaaggttaacgagtggcttggcaagctgcataagatgggggccgcggatgagctcaccgagcagcaggccaggcagctcaacttcgacctcgattcggcctacagtgccttcttggctgcgctgcccgctgctggtctgtaacggggtaaggatctaccagcttgatttttatttggttggttcggtctattatgcttttgacactggagcactactctccactactatagtactatagatatctgtaatttcggtactgctatttgttgtcaataagaaagttttgttttcctttgtatacagtaaatatgtttattgcatggcatacattcacattacaatgcttgcaaatgacctgtttatttggatacatttattctattctctgtggaacatatggacttatgaagtgataactgtataatatattgttctctcc

SEQ ID NO: 151552 - DNA, 1467 bp, Zea Mays
ggacaaaacagtaagcaatgttcgtcgagggactggagagacagctgcagtcccagatgattttcggatccctgttcacagaagaaaaccctcacttagtggcagtgctgctgatagtgatagctcatcaagatcagtgttcactgaacctgatgtttgctcagagggtttgtctagcttaaaattctcctttgggctaactccatatcacaagaaagaagaatttggcgatgtggataatgaaggtattgcacaaatagcagaaaagatggaaagaacagtgtcgctggaccattctcagcagttaaatgatgataaatcctttgaatcaccatgctcaacaacagagactgccaaggtcaaatatgttagaggagttgctgtgccactggggaaaacaaagtctcttgttgagagatgggaaaaaagagagacttctagcactgattattcaccacaaactggttcttgtggtgatcgggcatcgagaaatgacaaccatccattccatctggcggaaccaagtacaacatttgaaaaggacctgtcaactgtagatgaagcgatggctcctgtcaatttagtgcggaaccatgatgaattcctaaatgctgtaaaacttcggctgacaaaactagagatgatgcggcatgtctttgaacaaagtggtattaaaggagcaattgctgcagtggcaaagctacctgacaatgctgttcaagcagatgttgttagtgctctcaaaggaaagcttgatcttttcaacctggaatttttctcaaattttctgcctgttcttgctgggttactgtgtagcaagactgaaaggcatgctatggtctctttggaaatgttgttggatcttataaagatttttggaccagtaattcattcagcattatcagcaaatttaggcgttggagttgacattcaggctgagcagaggttgcaacgttgttcacggtgctttaaccatttgcaaaagatccaacagagtctgaatccattgattctgcggggtggtcaaacagcacaacttgcacaagaactaagtctttcattgcaagatttggtggtgatctaggcaagatgatgtacaatgtatacgacagagtagataccattggttttggcgaaaagtgcccacagttgtgtagcttgtaattttgtcatagctttgcaagtgggttttgcaactgtgttttaacattgggctggcattcagcctggtcccctgttgtaaatgtgagcctagccgtgaatgagtctgtaattagccagccacatctgctgtgtgagcagccctgaacaaaaagactagttgaaaggaaacaaccgcaaaggggatcattttggttacaccccaggtggtaggatggctcatgtagcatgcggtgattggcaattccattctttgaaagcatctgtgtttaacgtatattttgtagaagtaaattgagttatgcc

SEQ ID NO: 151553 - DNA, 1349 bp, Zea Mays
gagaccaccaaaggaaaaaaaggggactcgctctcgccaactcccctgctccacagccacaagcccactcggatcccaatccgagccctactcgtcgtcgacgacgcgacggccccgcgtgcgaagccagccagccagccagccagccatcgccgtggaccggggagcccggagggatggaccccgagaagcgcggctacgagctccaaaattttgtggcgcatgatgcggaagttaggtccctgtctattggcaaaaagtctaggcgtgtgttcatcaccggtggcaatgatcgcaaggtcaaactgtgggccattggcaagcaaactccacttctgaccttgtccggccacacaagtgcggtggaggctgtgcagtttgattcagcagaggtgcttgtgcttgctggctcgtcaaatggttccatcaagctctgggacttggaagaagctaaagttgtgcggtctctcactgggcacaggtcaagttgcactgctgttgaattccatccatttggcgagttttttgcatctggttcgtcagatacagacctgaagatatgggacataaagaaaaaaggatacatacacacatataagggtcacagaggagcaattaaaacaatcaggtttacgcctgatggacgatgggttgtcactggtggggaagataacattgtgaaggtgtgggatttgacagctggaaagcttctacatgatttcaagttccatagtggacaaatcaactgtattgattttcaccctcaagaatttttgcttgcaacaggctctgctgataggacagtgaaattttgggatcttgaaacttttgaattgataggttcttctggacctgaggtattctcttgggaaccagtaaggtgccatgatgttgttgacatgggttggagtaatttggctgaccttagtatttatgaagggaaactcttgggatgctcctaccatgagtgccgtgttggtctatgggctgctgatatatcactcattggaccctatgctcttggtgtattgcccaaagcgaatttttttgctgagcttgtgcagtctatggaagataatcctgtgaaaccagttgatagcactgcaaattctcgtcctgcttcagcaatggcacattcaagaagttcatacaaaatcaaggagtctgggattgctcaaagcagggttcgtggctcacatttgactccagcaagtacagataagaccaagaaagataggagcagcactattccacgaagacctgattcgtctttaaagtcatctgttcagagtactaccctgatgaggcgtatgaagcttgttgatagtccttccaccaacacaaaaaat

SEQ ID NO: 151554 - DNA, 2354 bp, Zea Mays
atgagcagtcccagtttgctcatcctctgcggactgcggccgaacgcccatcacgccacgcgccccttccccaatccccatggagatctccgccggcgtcaccactgtcaccgccgtgtcgatcctcatcctcctgttgctgccgcaacccgcggcgccgttctccttcacatacaacttcacctcgccctcggacacgccgccgcccgggattgccttccagggggacgccttctacaacaaggccatccgcctcacccgcgacgagcgcctcggccccatcaccagcagcaccggccgcgccttctactcccacgccgtcccgctcgccgaccccgtctcccgccgcccggcctccttcgtcaccgccttcgccttctccatcgccgcccccgacccggcctccgcctcgggcgacgggcttgccttcttcctctccccgttcccatccgtcctccccgaatcctcggcggggggactactcggcctcttcaattcatcctcggtccgcgccggcacgctcgtcgccgtcgagttcgatacccacaagaacgagtgggaccccagcggcgaccacgtcggcgtcgatctcggggggatcgtctcctccgccaccgccgactggcctaccagcatgaaggacggccgcacggcccacgcgcgcgtcgagtacgacggcgtcgccaagaacctcaccgtctcgctctcgtacggctccgcgcgcccgaacaccacgggtgacgtccttctctggtatgccgtcgatctgagggaccacctgccggactccgtcgccgtaggcttctccgcagccacgggcgaggccgcggagctgcaccaggtgctctactgggagttcacctccaccgtcgaccctaaggaggagacggtggtcctgtgggtggtgttagggctgtgcgctttgcttctcgtactcgtcggcgcgggcatcgtctggttcgtcaggcaatggaggaaggccggacaattcgacgacggtgacatcgaggtcgacgacgtcatgggtggcgagtacgacgagctcgcggacgagttcgttgtccagtgcggcccgagaaggttcaggtacgccgaattggcggcggccacgaagaatttcgcggaggagcggaagctcgggcaaggcgggttcggcgccgtgtaccgggggttcctgaaggaactcggctttgaggttgccatcaagagggtgtccaagggctcaacgcaggggcgcaaggagtacgccgccgaggtgcgcatcatcagccagctgcgccaccggcacctcgtccgcctcgtcggttggtgccacgagcaccggggcgacttcctgctcgtgtacgagctgatgcccaacggcagcgtcgaccaccacctctacggcaagggcatgctcctcacctggccgatgcggtacgacatatcgctgggcctcgcgtcggcgatgctctacctccacgaggagtgtccacagtgcatcgtccacagggatgtcaagcccagcaatgtcatgctggacgccgccttcaacgcgaagctcggagactttggcctcgccaagctcgtggaacatggtagccagccgtacaccactgtcctggccggcaccctgggctacttggcgccggagtgcgtgatgacaggcaaggcgagccgggagtcggacgtgtacagcttcggtgtcgttgcactggagatcgcgtgcggccgacggcccgcagagctcaacaacgagccaagcaaggcgagactggtgccttgggtgtgggaactgtatggcaagaacgccctccttgaagcagcagactggaggctgaaggggcagttcgatgagaagcagatggagcgcctgatgattgtgggtttgtggtgtgctcaccctgactatgcgcataggccaagcatcaggcaggccctgaacgtgcttacgtttgaggcgccattgccggtgctgccggagaagatgccggtgccgacgtatttccccttgcctgatctcgttgcttcgatttctgttgggggaacctcgagcgccgaggatccagatccaggtgttagtgattatgggtcctcgggtaaagtttcatcagtcagggataggctgctggagccatgagccgatgacggagttttctgtgttttactgcaaacacgaggagtgaatctacggttttcagattcaggtgtatagcatcgaaatgtattgattgttaattcataggtaagggtggcaaaataatttgtgctgttttatttttttcacatacaagtttgctatcataatatgcagttttgattttgttactgctaagttcagagtacgtgactttttaacgtttctcaagtgagaa

SEQ ID NO: 151555 - DNA, 2306 bp, Zea Mays
atgagcagtcccagtttgctcatcctctgcggactgcggccgaacgcccatcacgccacgcgccccttccccaatccccatggagatctccgccggcgtcaccactgtcaccgccgtgtcgatcctcatcctcctgttgctgccgcaacccgcggcgccgttctccttcacatacaacttcacctcgccctcggacacgccgccgcccgggattgccttccagggggacgccttctacaacaaggccatccgcctcacccgcgacgagcgcctcggccccatcaccagcagcaccggccgcgccttctactcccacgccgtcccgctcgccgaccccgtctcccgccgcccggcctccttcgtcaccgccttcgccttctccatcgccgcccccgacccggcctccgcctcgggcgacgggcttgccttcttcctctccccgttcccatccgtcctccccgaatcctcggcggggggactactcggcctcttcaattcatcctcggtccgcgccggcacgctcgtcgccgtcgagttcgatacccacaagaacgagtgggaccccagcggcgaccacgtcggcgtcgatctcggggggatcgtctcctccgccaccgccgactggcctaccagcatgaaggacggccgcacggcccacgcgcgcgtcgagtacgacggcgtcgccaagaacctcaccgtctcgctctcgtacggctccgcgcgcccgaacaccacgggtgacgtccttctctggtatgccgtcgatctgagggaccacctgccggactccgtcgccgtaggcttctccgcagccacgggcgaggccgcggagctgcaccaggtgctctactgggagttcacctccaccgtcgaccctaaggaggagacggtggtcctgtgggtggtgttagggctgtgcgctttgcttctcgtactcgtcggcgcgggcatcgtctggttcgtcaggcaatggaggaaggccggacaattcgacgacggtgacatcgaggtcgacgacgtcatgggtggcgagtacgacgagctcgcggacgagttcgttgtccagtgcggcccgagaaggttcaggtacgccgaattggcggcggccacgaagaatttcgcggaggagcggaagctcgggcaaggcgggttcggcgccgtgtaccgggggttcctgaaggaactcggctttgaggttgccatcaagagggtgtccaagggctcaacgcaggggcgcaaggagtacgccgccgaggtgcgcatcatcagccagctgcgccaccggcacctcgtccgcctcgtcggttggtgccacgagcaccggggcgacttcctgctcgtgtacgagctgatgcccaacggcagcgtcgaccaccacctctacggcaagggcatgctcctcacctggccgatgcggtacgacatatcgctgggcctcgcgtcggcgatgctctacctccacgaggagtgtccacagtgcatcgtccacagggatgtcaagcccagcaatgtcatgctggacgccgccttcaacgcgaagctcggagactttggcctcgccaagctcgtggaacatggtagccagccgtacaccactgtcctggccggcaccctgggctacttggcgccggagtgcgtgatgacaggcaaggcgagccgggagtcggacgtgtacagcttcggtgtcgttgcactggagatcgcgtgcggccgacggcccgcagagctcaacaacgagccaagcaaggcgagactggtgccttgggtgtgggaactgtatggcaagaacgccctccttgaagcagcagactggaggctgaaggggcagttcgatgagaagcagatggagcgcctgatgattgtgggtttgtggtgtgctcaccctgactatgcgcataggccaagcatcaggcaggccctgaacgtgcttacgtttgaggcgccattgccggtgctgccggagaagatgccggtgccgacgtatttccccttgcctgatctcgttgcttcgatttctgttgggggaacctcgagcgccgaggatccagatccaggtgttagtgattatgggtcctcgggtaaagtttcatcagtcagggataggctgctggagccatgagccgatgacggagttttctgtgttttactgcaaacacgaggagtgaatctacggttttcagattcaggtgtatagcatcgaaatgtattgattgttaattcataggtaagggtggcaaaataatttgtgctgttttatttttttcacatacaagtttgctatcataatatgcagttttgattttgtt

SEQ ID NO: 151556 - DNA, 1221 bp, Zea Mays
tttttttgcaaagtttgtaccacacctactatcgaagacatttttggaatgttatgttcaagggaacattgaaccaagtgaagcaaaatctgtcgtacaagagatcgaaaacactatatttaatgcccccaattctttgttcaaatccatgtctccatcagagtatctgactaaaagagttgtcatgcttgaaaatgagttaaaatgctactaccaaactgagggattaaaccagaagaatcagaattcatcagttatccaatatattcaggtacatcaggatgacgccattttgaatatcaaacttgagctgttctctctaatagcaagccagccagccttcaaccagctgcgaactgttgaacagcttgggtatataacaagtctttctctgagatccgactatggagtcctggcactccaggtggttatacagtccacagtaaaggtacacgttaacctagagtagtttttttatttttgaaaagaacttatggtacttgttgctcctgctggtattttgttgcatgcctaggatccttcgtatcttgatggtagagttgatgaattcttcaagatgtttgaaagcaaaatctatgaactctccgacaaggacttcaagagaaatgtgaaatcactaattgattctaaactggagaagtttaaaaacttatgggaggaatcagatttctactggggagagattcaggcaggaactctgaagtttgatagggtcgagtctgaggtcactatgctaagagagctcaagaaagaagaattcatagagtacttcgaccagtacataaaagtggacgcgcctcaaaggaggacactaagcgtgcaagtcttcggcggcaaccattcggcagaattcaagacggcgatcgccgaagccgatccgcccaaaatgtacagaattacagacatattcggcttcaaacgatcgaggccgctgtacagctcactcaagggaggtccgggcaggatcaccatggactgacagccatcacgcagctattccctagttttcatgtacgtacgtagtgtaacggcctgttcatacgcctgaattccatcctgaatcctgcatcagattcgattgcacgattgatgctattcttaactgatggtttgttatgttaaccaataatgcacgacagcgtgtcactttctgggcagatatagggggctgtataaataaagtcatgtatgttcgcatgt

SEQ ID NO: 151557 - DNA, 1134 bp, Zea Mays
tttttttgcaaagtttgtaccacacctactatcgaagacatttttggaatgttatgttcaagggaacattgaaccaagtgaagcaaaatctgtcgtacaagagatcgaaaacactatatttaatgcccccaattctttgttcaaatccatgtctccatcagagtatctgactaaaagagttgtcatgcttgaaaatgagttaaaatgctactaccaaactgagggattaaaccagaagaatcagaattcatcagttatccaatatattcaggtacatcaggatgacgccattttgaatatcaaacttgagctgttctctctaatagcaagccagccagccttcaaccagctgcgaactgttgaacagcttgggtatataacaagtctttctctgagatccgactatggagtcctggcactccaggtggttatacagtccacagtaaaggatccttcgtatcttgatggtagagttgatgaattcttcaagatgtttgaaagcaaaatctatgaactctccgacaaggacttcaagagaaatgtgaaatcactaattgattctaaactggagaagtttaaaaacttatgggaggaatcagatttctactggggagagattcaggcaggaactctgaagtttgatagggtcgagtctgaggtcactatgctaagagagctcaagaaagaagaattcatagagtacttcgaccagtacataaaagtggacgcgcctcaaaggaggacactaagcgtgcaagtcttcggcggcaaccattcggcagaattcaagacggcgatcgccgaagccgatccgcccaaaatgtacagaattacagacatattcggcttcaaacgatcgaggccgctgtacagctcactcaagggaggtccgggcaggatcaccatggactgacagccatcacgcagctattccctagttttcatgtacgtacgtagtgtaacggcctgttcatacgcctgaattccatcctgaatcctgcatcagattcgattgcacgattgatgctattcttaactgatggtttgttatgttaaccaataatgcacgacagcgtgtcactttctgggcagatatagggggctgtataaataaagtcatgtatgttcgcatgt

SEQ ID NO: 151558 - DNA, 1426 bp, Zea Mays
tcttggtccccaatccaatcccgcacccaccattgcgagagatcatcagaggaccgcgtccaatcgaagcggagaggaggagaagggtgtgctgatggcgacggcggtggcggccacggccgcggcggcgggtggcagcaatgtcgagttcatccgcgcgcgcagcgacaagcgggagtaccgccgtgtggtgctcgcaaacgcgctcgagatcctactaatcagcgaccccgacactgacaaggcggcggcgtgcatggaggtcgaggtgggctcgttcagcgacccggagggactcgagggcctcgcgcacttcctcgagcacatgctattttatgccagcgagaaatatcctggagaacacgagtatacgaaatatatcacagagcacggtggctcttacaatgcatatacaagctcagagacaacaaacttctttttcgatgtcaatgtggacaattttgaagaagccttagatagatttgctcagttcttcattaagccactgatgtcacaggatgctgttcttagagagataaaagctgttgattctgaacacaagaaaaatttgttgtccgatggctggagaatgtatcagcttcaaaagcatctggcttcaaaggatcacccttaccacaaattcagtacaggaagttgggaaacactagaaactaaaccaaaagcgaggggcgtggacatcagacttgaacttctgaagttttacaagaattattcagcaaaccttatgcaccttgttgtttatggaaaggagagcctcgattacattcagggcttggttgagcgtatgtttagtgacataaaaaacactgatcagagatgcttcaaatgtccaagtcatcctctttcagaggaacatttgcagcttcttgtcaaagcactaccaatagaagaaggggactatctaagaattatatggccaattactcctagcatccagttttacaaagaaggtccttgccattatctaagtcacctcattgggcatgaaggcgaggggtccgtcttccatattataaaggaactaggatgggccatgaacttaatggctggagagagcactgacagtaatgaatattcctttttctcagtaagcatcaggctcaccgatgctggtcatgaacacatggaggatattgttgggttgatctttaaatatcttcatctattaaaagtagacggagtccacgagtggatatttaatgagcttgaagcgataaatgaaatggagttccattatcaagacaaagttgatccaataagctatgtgatgcgtactgtctcaactatgcggttgtttccaccagaagaatggctggttggagcagcattgccatcaaagtatgcaccacaaagaataaatatgatactcgatcaactatcacctgaaagatgttatgcaccttga

SEQ ID NO: 151559 - DNA, 510 bp, Zea Mays
aaatccaactgatctcgttaaagttaggttgcaagctgatggaaaggctaacacagtcaagaggagttattctggagcccttaatgtatatgctacaataatcagacatgttactttaaccatcatgggcacatggctcatttttgaatgtttgctggtgggaggatcgtctcttctatgtctacaagaatattttgccagtgatgacggtgtttagaggatgggatccttgcaattgtcaaacaagatgagagaccccttgaattgcttgctaaagaatatgctatcaactcttttgacatagatcctcaaaacccctctgatgttgttttcacgttagaatgggaatcaatcggtgtcctaccttgtggctagaagaaagaaaatttttactaccgagggatctcaattagaattttaggctcattcatacattcactacaatgccttcgaactcatgaacatttatctctggctctattgtggtgggttacatgaatagagtttttg

SEQ ID NO: 151560 - DNA, 1683 bp, Zea Mays
aaatatatatatagggcggatggcggagggcggacggcaaccagcgcggcgaagacacgaggcagcacgagggatgccctgatggccgggccacttcatcgttacgtgcggacgaaattgcgtagcagttgctcacatcacatataaccaaacaaacgatctccagaaccaacgtttggcgaccagctagtctttttcttgacatactcgaacaaggcacccgaatgaatcagcattcagcaacgccgtcgccggcaccgctgccgaaccgttccaagttccatcgttgatgccgatgagtgactaactactctctagcacagacaacaccttggccagcgcacatgcatgtgctggcttcgtcccgacacgcacaacagaccaaaactgacagtttcattcagataccgcccacccacgcaatcacccgagagctagctaatcatgaagctccagccaataacgcaaattaatcatcctcgtttccaaggctagctaaaagcctaaaacaaggatctcgccggacaccgcctatatatgcccggcctctcccttccgcccttttcccatccctcccaacacgttcatcagctcgcgagctttgtgctcctccttccatctctcgagcacccaccgagaagccagctagcgagatggcggccaccctgaggctcagaatcctcgccgcggccgccgcggccgccgtcgtggcctcgtcgctcgtcggcgtggccaccgcggccgaggcgccggctccctcccccgccggccccaccggggccgccgccgtgactggcccggcgctcgctgtcggcacgctcgctgtggccgccgctggctacctcttctgctgagctgctgggttttgccattgcgcgcgtcgtctccggctgcagtgtcagcagagccgcccgtgcgttgccgcccccggccggacccggagtgacgatacatatcagttcatcgcttctttctacttgattcttaccagtattttcatgttgtgtgtggtctgatcgattgacgtactacgcgagttgccggttgctgagtgtgtgtatgttgggttcttatactctctctatataaaataatacagcaagtttatattaactgtgcgctggccggcgtggtgcccacatcgctgacacatgaagctcttggcctgctgctgcaaggctgagcaagctagcctcggatttcttgctgggtcttgcgcccgtccagggttatgggttccggaagcccgtcgaagagtgatgccgcggcggcaatataatgttctggatagcgcggagaaaacacggaggtctctcgtcgtcttccaggatccgcttgtgaacatcgcgtgccatggcgcatgcgcccaccattgcctcgaagatgtgcgggtggcaggcccgtgtccgtgtccatccctcttatgaccgttcgaggcgtgggggcagaagctgccacgggcatcaacatctcctctagtgtctctcctaagttgtccatactcgagttgcgaccttccgggtgttagccacgaagcattcgcacgtaggactttggctcgctggcttgttgggttatttctaatccatatagattggaggggattatatagattgagagatattttaacttattagggcttgaaatcccctcaatctcattcaatccatatagattggagta

SEQ ID NO: 151561 - DNA, 750 bp, Zea Mays
gctcttccctcccaatgcaatgcaagctgtgcactttatgttgcgaagctagctatttatctccccggccccccccctgctcctctcttccacgggataacgggaggacgacatcacacagccatcgccggccggaagctctcagctctgagcagaaggaggcgggtcgtcacacggtcacacacccgtcagcatgagcgaccgcaggtacgggtactcgtacccgccgccccaggggtactacaacaacggaccaccggtgatggcgccgccgccgtaccagtacgcagctcctccaccgccgaggagggagccgagcttccttgaaggatgtctcgccgctctgtgctgctgctgcctcatagacgagtgctgctgcgacccgtcggtgatattcgtgagctgatccggccgcagtccgcagcacatgccatgccaccgtcccagcccaagagacatgtcgcatgcatacgtgtgtgttcgcatgcacttcgcgcctctgttggtgatatatgatgtttttttcagcctatatgtgtctactacgttgaattagtacaagcggtgagttgtgcgttcagatctcggggttagagagtttgttggacatggcccgatccagaattccatatgctgatcatggatccggcgcatgtttactgcatatgcacttgtttaagcgcaacgcaacacgatgtatatgtgtgtacgaaatctttgaataaggcctcctttggttatatggactaa

SEQ ID NO: 151562 - DNA, 1854 bp, Zea Mays
ttttttcttctgtcttctatttaacatattctagttgtagttgcctatttgtctgctaaagtttgatttgaatttgcaggctttattttacccgggtgaaattaggaaacccggcaaaggaattcttcgtccagattgacactgggagtgatatattgtgggtcacttgcagtccttgcactggttgcccgacatcaagtggactcaatatccagctagagtccttcaaccctgactcttcatcaacagcatccagaataacatgctctgatgacagatgtacagctggcttccaaacaggggaagcaatctgtcaaacctcaaattcccaaagcagcccttgtgggtacactttcacctatggtgatgggagtggcacatcagggtactatgtgtctgacacgatgtttttcgaaactgtcatgggaaacgagcagaccgccaattcgtctgcctctattgttttcgggtacagtttccttggagtcttatatcattttaataattgaaagtacctgatgttattttgctcaagttgccatttggagttgaaaaatagtttcttgttcctctattagccagcttcaaggttgcagttttgtttactcattaccctaactctgattttttttcttctaccaagattatcagtagacaattatttaccggctcatgaatgtttcaatttcttccaagcagatgtagcaactcacagtcaggagacctgacaaaggcagatagggcagttgatggaatttttgggttcggacagcatcaactgtctgtaatttcgcaacttaactctcttggggtgtcccctaaggtgttctctcattgcctgaaaggttcggataatggtggtggcattcttgtgcttggtgaaattgtggagccaggattagtgtatactccacttgttccatcacagcctcattacaacttaaatctggaaagcattgctgtcaatggtcaaaagctgcccattgattcctccttgtttacaacatcaaatacacaaggaacaatcgtggattcaggaacaacattggcataccttgcagatggagcctacgatccatttgttagtgcgatagctgctgcagtctctccatctgtgcgttctctagtcagcaaaggaagccaatgctttatcacttccagcagcgttgactcatcgtttccaaccgtaaccctttattttatgggtggtgttgcgatgtcggtgaagccagagaactatcttttacagcaggcttctgttgacaacagtgtattgtggtgcattggttggcaaaggaaccagggccaagaaataactatactcggagatcttgttttaaaggataagatattcgtgtatgacttggcaaacatgcgcatgggctgggcggactacgattgttcaatgtcggtgaacgtgacgacgtcatcagggaagaaccagtacgtgaacactgggcagttcgacgtgaacggctccgcacggcgcgcatcttacaagagcttgataccagccgggatcgtcaccatgcttgtgcatatgctcattttcggcactggctcacgtagatagcaggcgagccagctgacatcgtgatttgattattattgccacggcgtattcagaggtagagacgtcgccatccctgctgcgctagtcggttagtcgtatggacgaagagttggcatggcctgagcattcttactgtacatacagaaaatgaaaggtctattgttcatgtagtacggcctccttttttttctcaaattgcagcccggttcttcttccgtctctctgtttggtcgtgctctcaaatttttatccgccataaaatttggatgctattgtttttc

SEQ ID NO: 151563 - DNA, 2093 bp, Zea Mays
cgggcgcgtacacagcagcccacacgtaatcctttccccctccctttcacacttaaccctctcaactcccaactccttcgcaaattcgggtctcgaggaggcgttatatacgccgtgccgtagaatttgcgtctcttccgaggggctcgtcgcgagaaggagccgcaaaactttgctacggccacacgagcagcagagcagccgcgctcggtcctgctccccgcgtctggtgtcggggaccgcccccctcctgcccggcacccgctgcggctggctctcccgatgaggccgccggaggtagcggtggcggcgcttcttctcgtggcggccgccgccgtggccgcggccgcggccgcggcggagtcggcagcgccgttaccggcggcgctgcggttgcagcgcgcggttccgcaccagggggtgcccctggaggaactcaggcggcgggacgccgcgcggcaccgggtttcgaggaggaggctgctcgggggcgtagccggcgtggtggacttccccgtcgagggctccgccaatccgtacatggtcgggctttattttacccgggtgaaattaggaaacccggcaaaggaattcttcgtccagattgacactgggagtgatatattgtgggtcacttgcagtccttgcactggttgcccgacatcaagtggactcaatatccagctagagtccttcaaccctgactcttcatcaacagcatccagaataacatgctctgatgacagatgtacagctggcttccaaacaggggaagcaatctgtcaaacctcaaattcccaaagcagcccttgtgggtacactttcacctatggtgatgggagtggcacatcagggtactatgtgtctgacacgatgtttttcgaaactgtcatgggaaacgagcagaccgccaattcgtctgcctctattgttttcggatgtagcaactcacagtcaggagacctgacaaaggcagatagggcagttgatggaatttttgggttcggacagcatcaactgtctgtaatttcgcaacttaactctcttggggtgtcccctaaggtgttctctcattgcctgaaaggttcggataatggtggtggcattcttgtgcttggtgaaattgtggagccaggattagtgtatactccacttgttccatcacagcctcattacaacttaaatctggaaagcattgctgtcaatggtcaaaagctgcccattgattcctccttgtttacaacatcaaatacacaaggaacaatcgtggattcaggaacaacattggcataccttgcagatggagcctacgatccatttgttagtgcgatagctgctgcagtctctccatctgtgcgttctctagtcagcaaaggaagccaatgctttatcacttccagcagcgttgactcatcgtttccaaccgtaaccctttattttatgggtggtgttgcgatgtcggtgaagccagagaactatcttttacagcaggcttctgttgacaacagtgtattgtggtgcattggttggcaaaggaaccagggccaagaaataactatactcggagatcttgttttaaaggataagatattcgtgtatgacttggcaaacatgcgcatgggctgggcggactacgattgttcaatgtcggtgaacgtgacgacgtcatcagggaagaaccagtacgtgaacactgggcagttcgacgtgaacggctccgcacggcgcgcatcttacaagagcttgataccagccgggatcgtcaccatgcttgtgcatatgctcattttcggcactggctcacgtagatagcaggcgagccagctgacatcgtgatttgattattattgccacggcgtattcagaggtagagacgtcgccatccctgctgcgctagtcggttagtcgtatggacgaagagttggcatggcctgagcattcttactgtacatacagaaaatgaaaggtctattgttcatgtagtacggcctccttttttttctcaaattgcagcccggttcttcttccgtctctctgtttggtcgtgctctcaaatttttatccgccataaaatttggatgctattgtttttc

SEQ ID NO: 151564 - DNA, 2097 bp, Zea Mays
cgggcgcgtacacagcagcccacacgtaatcctttccccctccctttcacacttaaccctctcaactcccaactccttcgcaaattcgggtctcgaggaggcgttatatacgccgtgccgtagaatttgcgtctcttccgaggggctcgtcgcgagaaggagccgcaaaactttgctacggccacacgagcagcagagcagccgcgctcggtcctgctccccgcgtctggtgtcggggaccgcccccctcctgcccggcacccgctgcggctggctctcccgatgaggccgccggaggtagcggtggcggcgcttcttctcgtggcggccgccgccgtggccgcggccgcggccgcggcggagtcggcagcgccgttaccggcggcgctgcggttgcagcgcgcggttccgcaccagggggtgcccctggaggaactcaggcggcgggacgccgcgcggcaccgggtttcgaggaggaggctgctcgggggcgtagccggcgtggtggacttccccgtcgagggctccgccaatccgtacatggtcgggtgggctttattttacccgggtgaaattaggaaacccggcaaaggaattcttcgtccagattgacactgggagtgatatattgtgggtcacttgcagtccttgcactggttgcccgacatcaagtggactcaatatccagctagagtccttcaaccctgactcttcatcaacagcatccagaataacatgctctgatgacagatgtacagctggcttccaaacaggggaagcaatctgtcaaacctcaaattcccaaagcagcccttgtgggtacactttcacctatggtgatgggagtggcacatcagggtactatgtgtctgacacgatgtttttcgaaactgtcatgggaaacgagcagaccgccaattcgtctgcctctattgttttcggatgtagcaactcacagtcaggagacctgacaaaggcagatagggcagttgatggaatttttgggttcggacagcatcaactgtctgtaatttcgcaacttaactctcttggggtgtcccctaaggtgttctctcattgcctgaaaggttcggataatggtggtggcattcttgtgcttggtgaaattgtggagccaggattagtgtatactccacttgttccatcacagcctcattacaacttaaatctggaaagcattgctgtcaatggtcaaaagctgcccattgattcctccttgtttacaacatcaaatacacaaggaacaatcgtggattcaggaacaacattggcataccttgcagatggagcctacgatccatttgttagtgcgatagctgctgcagtctctccatctgtgcgttctctagtcagcaaaggaagccaatgctttatcacttccagcagcgttgactcatcgtttccaaccgtaaccctttattttatgggtggtgttgcgatgtcggtgaagccagagaactatcttttacagcaggcttctgttgacaacagtgtattgtggtgcattggttggcaaaggaaccagggccaagaaataactatactcggagatcttgttttaaaggataagatattcgtgtatgacttggcaaacatgcgcatgggctgggcggactacgattgttcaatgtcggtgaacgtgacgacgtcatcagggaagaaccagtacgtgaacactgggcagttcgacgtgaacggctccgcacggcgcgcatcttacaagagcttgataccagccgggatcgtcaccatgcttgtgcatatgctcattttcggcactggctcacgtagatagcaggcgagccagctgacatcgtgatttgattattattgccacggcgtattcagaggtagagacgtcgccatccctgctgcgctagtcggttagtcgtatggacgaagagttggcatggcctgagcattcttactgtacatacagaaaatgaaaggtctattgttcatgtagtacggcctccttttttttctcaaattgcagcccggttcttcttccgtctctctgtttggtcgtgctctcaaatttttatccgccataaaatttggatgctattgtttttc

SEQ ID NO: 151565 - DNA, 4024 bp, Zea Mays
ccccttcctcccgatcctctctcggatctcgccgcgcgctgccgcgctcgaaggtgagcggggccgcgatgcctgcggtgcccgttcccggaggcggtggctcctccgacgccgaggagctgttccgcaccaagcgcatcccggagattcgcgcggttgagggcgccacccgacgcgagatctccgccaaggaggaggagctccggcagctcgtcgggcgcagctaccgcgacctgctcgactcagcggactccatactcctcatcaagcagtcctccgatgcaatattctacaacctcgcccgcatctccgactccttgtcgtcgctctcgcctccccctgaaccctctctcgccgtaagcgccgtatcgccgtctccgtcagctggagggcgcgcgaggctctacgcgctggccgcgcgcgccaagtacctggttgacacaccggagcacatctggggccggctcgacgagggcctgctcctggaggcggcggggcggtacctgcgggctcaggtcgtgtacgggcgactctcccgcgacgccgctgccgccgcgcggttcccactcctcgcgcaccaggcgcagctcgtggaggcgttccggccgcagatcgcccagcgagcgcgcgagcgcctcgctgaccgccgcctccctgtagcggcccacgctgacgcgcttgcggccgtggccgcgatcgacgcgccatcgcttgcccctgctccggcgctccttctcttcctcacctcgcgccgcgcttggatctcccaagacctagctggtctcgcctcggatctgtcatcctacacctctgtgctgtgcgatatagcgaggatcgtgcggatcacgcttggccacgttggacagttgtttgtgcctgcactcagtgatatgccgttgttcttcaagacggtgactgagaagacgccgcctgagcagttgttcggtggcattccggaccctgatgatgaagcacggttgtggaaggagcacatgaaccagcttgaagctataatggtgctgcttaagccagatgttgttgcagcggcctgtacggattggctcaaggaatgttgcagtgaaatttttggtgtgattgctggtgagcaaaagttggttgatgccattgggagtggggagctgcttggatcagtgcaaagacttgtacgtgatgccctagatgggagagatggattggagagaagtttggagcagtggctgaaaagtgtctttgggtcagatactgagtcgccatgggatcagatccgtgggttgatcttgaaggacgacaaggatattttcgaggattggatggaggaagcatttgtgcgacggatgaaggacatcgtgcattcagagtttgatatattgggttctagtgttaacgtgaaggaatcaattcatgctatcggtgccaatgctgatccaaaggatgctggagatttccttgcatacctgcggaaatcttcaaagggtggtggtttctggttctcagagtctaagatcaagaaaggtggagttttggcacacttgaaaccaattgctgatgaaaatgatttccgtagctgcctaacatcgtattttgggccagaagttagtcggatcaggagtgcaattgacagtaaatgcaagaatatcctggaggatctgctaagctttgtggagtcacataattcaaccacaaggctgaaggaattggtgccataccttcaggagaaatgctacaagaccatctcgggagtactgaaagaattagaagctgagctcagaaagctctctgctttgttgggaaccaaaaaggagggtaacgacatacctgcagcttctattatagcggagaggtctctcttcattggtcgtctcttgtttgcgctgagataccattcaagtcatgtacccctgatactaggttccccaagggagtgggtaaaggaggttggtggtgcagcatttgccaggttatcatcacctacagcaagacatttaagggcatcttttacacccagaaggcacacatttgacagtcccaagagtcctggaaggcaattctccgatagccccagaagacaaactattgctgctgcagtatctttgtttggagctaatgatagatctaatcctagacttgatgaactcaataagaccctgcagtcactttgcatcatggctcataatgtatggatagcatgggtgtccactgaattatctcacattctttcatatgatctcaataaagacgattcactatcctctgcaactcctttgaggggctgggaagtcacagtaattaaacaagaggaaacaactgagggtcccttggaaatgcaaatagctcttccatcgatgccttcattgtacatcatatcctttctttatcaagcatgtttggagattcataaggttggagggcacatcctggacaggattattttgcataattttgcttgggagctactgcagaaggtcatcaatatttatgaaaattttctttcatctgttgaatctgggaattctccggtttcagagaaaggaattctgcaaatactgctagacttgcgttttattggtgatgtcctatcaggaggtacaagttcttccacaaacactactgaaatgcagacaaaacaggattctttgccaagcaccatctccaagacttccttcaggagaaaacagtcacaattacatgcagactcagctgtcatagagcctataaacaagttagtcaacaggctctcgcaaatactggatcctatagactgggccacgtatgaaccttacctgtgggagaatgagaagcaatcttacaagcgtcatgttgttctttttggttttttggtccaactgaatcacatgtacactggtactatgcaaaaattaccaacaaaatcaaatacagattcaaatatcatgagatgctctcaggttccaagattcaagtacctaccaatcagtgctccagctatatcatcaagatcacacaaaccatcactacagtctctgtctagcgagtccacatctaaaaatccttggaaatcctattcaaatggagatagatctactacaccagagtttgatgataatgcaagtcttgttggtgctgctccattgcttaagtcatttgttactcaggtggggaccaaatttggggagaacacatcgagatggggttccatgctctctgatggacaggttggtaagctaagtgacatccttcctggaccagcagctgggtttttctcttctttcacatctggagctcgatatgattcatagtaatgcaacggtgaccattgatctttagcccttactacacgtgacacggaaacccacatgtgtcatcaaaggaagaaaaagaactgttggtcctttggaaatctattgctcactgaatgatgccacatcgctggtcccgtgttgcttggcatatctgccgtgcctattcacatcttattgtgcctagactttcatggggaagctgaggaaattataatggaaaagatgagatttattctatatcggttgcccaaggttgaatgagtggttaggaaaaatcagatttgggttcagtatgtttcttgcttgcatttgacttggtacataggacagaacaagtgcaacgatgccgctgatactagctcactttggggactcctgttgtggatacgcggcacttgaagttgtgaaaagagttttggggggtccattctttcttccttgtctttggctcggttagttggcttttttttttacatcggatcagtggtggaactgcgaggttgtggttttatcatgtaggcaaatttgccaaatgtgtacatcggaaatatgggaataaaagcctctatcaatcagcattcagcatcatgcagcgctcaagggcctgtttggttggcatgctgattgccaatttgccatagtctttctgtatttgtctacatgtctgtctgggttgaagttgttacaataggtacagttgctgattttatacgtggctaagagcatctccaaccgtcttttctaaa

SEQ ID NO: 151566 - DNA, 4056 bp, Zea Mays
ccttcctcccgatcctctctcggatctcgccgcgcgctgccgcgctcgaaggtgagcggggccgcgatgcctgcggtgcccgttcccggaggcggtggctcctccgacgccgaggagctgttccgcaccaagcgcatcccggagattcgcgcggttgagggcgccacccgacgcgagatctccgccaaggaggaggagctccggcagctcgtcgggcgcagctaccgcgacctgctcgactcagcggactccatactcctcatcaagcagtcctccgatgcaatattctacaacctcgcccgcatctccgactccttgtcgtcgctctcgcctccccctgaaccctctctcgccgtaagcgccgtatcgccgtctccgtcagctggagggcgcgcgaggctctacgcgctggccgcgcgcgccaagtacctggttgacacaccggagcacatctggggccggctcgacgagggcctgctcctggaggcggcggggcggtacctgcgggctcaggtcgtgtacgggcgactctcccgcgacgccgctgccgccgcgcggttcccactcctcgcgcaccaggcgcagctcgtggaggcgttccggccgcagatcgcccagcgagcgcgcgagcgcctcgctgaccgccgcctccctgtagcggcccacgctgacgcgcttgcggccgtggccgcgatcgacgcgccatcgcttgcccctgctccggcgctccttctcttcctcacctcgcgccgcgcttggatctcccaagacctagctggtctcgcctcggatctgtcatcctacacctctgtgctgtgcgatatagcgaggatcgtgcggatcacgcttggccacgttggacagttgtttgtgcctgcactcagtgatatgccgttgttcttcaagacggtgactgagaagacgccgcctgagcagttgttcggtggcattccggaccctgatgatgaagcacggttgtggaaggagcacatgaaccagcttgaagctataatggtgctgcttaagccagatgttgttgcagcggcctgtacggattggctcaaggaatgttgcagtgaaatttttggtgtgattgctggtgagcaaaagttggttgatgccattgggagtggggagctgcttggatcagtgcaaagacttgtacgtgatgccctagatgggagagatggattggagagaagtttggagcagtggctgaaaagtgtctttgggtcagatactgagtcgccatgggatcagatccgtgggttgatcttgaaggacgacaaggatattttcgaggattggatggaggaagcatttgtgcgacggatgaaggacatcgtgcattcagagtttgatatattgggttctagtgttaacgtgaaggaatcaattcatgctatcggtgccaatgctgatccaaaggatgctggagatttccttgcatacctgcggaaatcttcaaagggtggtggtttctggttctcagagtctaagatcaagaaaggtggagttttggcacacttgaaaccaattgctgatgaaaatgatttccgtagctgcctaacatcgtattttgggccagaagttagtcggatcaggagtgcaattgacagtaaatgcaagaatatcctggaggatctgctaagctttgtggagtcacataattcaaccacaaggctgaaggaattggtgccataccttcaggagaaatgctacaagaccatctcgggagtactgaaagaattagaagctgagctcagaaagctctctgctttgttgggaaccaaaaaggagggtaacgacatacctgcagcttctattatagcggagaggtctctcttcattggtcgtctcttgtttgcgctgagataccattcaagtcatgtacccctgatactaggttccccaagggagtgggtaaaggaggttggtggtgcagcatttgccaggttatcatcacctacagcaagacatttaagggcatcttttacacccagaaggcacacatttgacagtcccaagagtcctggaaggcaattctccgatagccccagaagacaaactattgctgctgcagtatctttgtttggagctaatgatagatctaatcctagacttgatgaactcaataagaccctgcagtcactttgcatcatggctcataatgtatggatagcatgggtgtccactgaattatctcacattctttcatatgatctcaataaagacgattcactatcctctgcaactcctttgaggatacagaattctaatcgctatagttgtgtggtttggttgcattgttagggctgggaagtcacagtaattaaacaagaggaaacaactgagggtcccttggaaatgcaaatagctcttccatcgatgccttcattgtacatcatatcctttctttatcaagcatgtttggagattcataaggttggagggcacatcctggacaggattattttgcataattttgcttgggagctactgcagaaggtcatcaatatttatgaaaattttctttcatctgttgaatctgggaattctccggtttcagagaaaggaattctgcaaatactgctagacttgcgttttattggtgatgtcctatcaggaggtacaagttcttccacaaacactactgaaatgcagacaaaacaggattctttgccaagcaccatctccaagacttccttcaggagaaaacagtcacaattacatgcagactcagctgtcatagagcctataaacaagttagtcaacaggctctcgcaaatactggatcctatagactgggccacgtatgaaccttacctgtgggagaatgagaagcaatcttacaagcgtcatgttgttctttttggttttttggtccaactgaatcacatgtacactggtactatgcaaaaattaccaacaaaatcaaatacagattcaaatatcatgagatgctctcaggttccaagattcaagtacctaccaatcagtgctccagctatatcatcaagatcacacaaaccatcactacagtctctgtctagcgagtccacatctaaaaatccttggaaatcctattcaaatggagatagatctactacaccagagtttgatgataatgcaagtcttgttggtgctgctccattgcttaagtcatttgttactcaggtggggaccaaatttggggagaacacatcgagatggggttccatgctctctgatggacaggttggtaagctaagtgacatccttcctggaccagcagctgggtttttctcttctttcacatctggagctcgatatgattcatagtaatgcaacggtgaccattgatctttagcccttactacacgtgacacggaaacccacatgtgtcatcaaaggaagaaaaagaactgttggtcctttggaaatctattgctcactgaatgatgccacatcgctggtcccgtgttgcttggcatatctgccgtgcctattcacatcttattgtgcctagactttcatggggaagctgaggaaattataatggaaaagatgagatttattctatatcggttgcccaaggttgaatgagtggttaggaaaaatcagatttgggttcagtatgtttcttgcttgcatttgacttggtacataggacagaacaagtgcaacgatgccgctgatactagctcactttggggactcctgttgtggatacgcggcacttgaagttgtgaaaagagttttggggggtccattctttcttccttgtctttggctcggttagttggcttttttttttacatcggatcagtggtggaactgcgaggttgtggttttatcatgtaggcaaatttgccaaatgtgtacatcggaaatatgggaataaaagcctctatcaatcagcattcagcatcatgcagcgctcaagggcctgtttggttggcatgctgattgccaatttgccatagtctttctgtatttgtctacatgtctgtctgggttgaagttgttacaataggtacagttgctgattttatacgtggctaagagcatctccaa

SEQ ID NO: 151567 - DNA, 2029 bp, Zea Mays
gtcatccctgctccctcaggacatctttccagccgccatggagctcaccccagtcctcaacaccgagctctcctgcttccctcgacaccggtctctgctctgctcccacagccgactccctcccatggcgtccagctgaatttcccttaggcagccgccggccggacctctctctactcagagctccctgtccgtccttcccagccaaagctcatcctcatggcgtctggcatttctccctgtcgctcctcccatgccgtgctcggactaaagcttccctgcgcgccgacttcactgctcgcgccgtcgcccagcctgttggcgcgcgctagcttctgcgcgcgttctctgtccccaacgccgctctcttcccccagcgccgcgctctgctcgtggagctcctcctctgtccggtcaccctcgtcctagctcggcgctgcctgctagccgcaagcaaccgaggtctctccctgcgcgcgccgcacccagttgcctgcgcacgcgtcgctgtcaagttccgagcgcctggatttcttccccctgcgctcggtcacggtcaacgcgagtcgtgaaatttttgcttggttctttctgccgcgcccctggctcctctgttggcgcgtggccgtctcctgctccctgcgcgactgccgctactccctgacttgccgtggtgcccgtcgccctgcgcgcgctctgtttcctcgcgtggcttcatgctcgcctggccgcgccctgcttccatgaccgccgtcgaagcttccctgctgcaccgtcgagccttcgcttgccatggccactgtaactcagctcggccgaccgcgctgctccctgcgtgcccagcctcaagttcctgtgcgcgtgctccactgttccctgggcgagttcctcgctactacggttgtctggtgtttgcccgtgccgatccgcattcgctcatatcgccatcgtcgtgttgtcgctggtgatagcctcacgtgcgcgacacactcccgccccaaagcaaaccccatgttgctgtgtccctgtttcaatttgccatgctgcaccgtcatcgcttggtcgcgccgtgctgtttccctatacgcgtcgagtcctttttcctgctcgccgcgatgcccggtgtcctgcctgctttgctcacccgcgtcggctactcgctagtgctccaacttgtcagttgtcgttatcctattcgcgtcaatacgcgaccgtggttgtgttcgtcgagttcgccaacactttgttgccgattcgactgtcgtcgctgttgtgtgcctcgctgcatgctcgccgagtgttgacggttgtacctcagcactcgtgcttgccgctggctcgcgttaacgctcgcgcgtctactcgttgtcactgcatcgcactcactctttgtccatcgggcttcacgcgtgctcgcgtttgtcgtcgagctgttgaacccgtcctcccttgctcgtgacttcgtcgtcactagagccctcactaggttcgtgtcctcgccagctcgctccgtattcgatctcgtcatcgttccgcgcatcagcaagaaatctcaagagtcgggtgaagacggagccaacagcgtggtgttcaccaagtgcgcgacaaaaaactcagacatcctgcgtgactcaagttcggttcgtcaaaattattcagtcgaggaaaagatctgcagcaattgattaccgaagaaaagaaggcccctggatgacgtcaaccgaaaaccgtcgtcgtgcctgcgactatcgcgtcgaattagtcagggtaagtaaatttgttactcgtgttagtggattggtggatggtttgactaggtttaatatttattgattgtctgagtcgttttagtaatttggtcgatgtcgtaggatgaaaaagatctcaataggtctcagtgtttacgggattataggtgttaaaaatggaaaattatattaatatatatatgatacacaggttaatcggtaaattaagtcattaagatacacagttaaagagtaaataaaaagctaggaataaaagtaga

SEQ ID NO: 151568 - DNA, 155 bp, Zea Mays
tgacgaacgtgggcttgtacatatcttgttggagaaacatggaatggaacacatacagggcgtgttcggctggctacaagccgacactgttgcagctgtttggactgctgcagctgcaatccatagagagaaaaatactgtagaagccgcagccg

SEQ ID NO: 151569 - DNA, 2359 bp, Zea Mays
cgaaattaatgcccatacccctctcattgtcccatcaaactcgctactggcctcgggcccgcccgtcgtgaggtccgagctcgatgcagccgatccggcggcggcaccgaggctttgcactcctctgtctctccgccgccctcctcgctgccgccactctgctccccggcgccgccgtcgccgaaggtgtcacgccctccgaggcgcgccggctccgcgacgaggtgaaagatatgttctatcatgcgtttgatggatacatgaagtatgctttcccactcgatgagctgcggcccttaagttgccaagatcgattctttggataccttggctttactgggtgataaggagaaatttggtgctgctgtggagtgggttggtaagaatgtccactttgatattaataaaaccgtctctgtttttgaaaccaacatacgtatccttgggggtctgctatcagctcacctgattgccagtgattatgccactggtatgagaatccaatcttatgatgaccagttacttcatttagctgctgacttagctcagaggttgttgcccgcatttgacactcctacaggtattccatttggatctgttaatttattgtacggagtcgatgaaaatgaaagcaagataacatcaacggctggtggtggtactttgacactggaatttggcatattgagtcgcttgactaataatactgtttttgagcgagttacaaaaaaatcagtgcgtggaatatggtcacgcagatcaaaactcaatcttgttggtgcccatataaatgtctttactggtgaatggacacagaaggatgcaggaattggcacaagcattgattcattctatgaatatcttctaaaggcatatttattgtttggagatgaagaatacctgtacatttttcaggaggcttacaaagctgccatgcactatctccatcatgatccttggtacgtggaggttaatatgaactctggtgctactgtttggccactcttcaatagtctgcaggcattctggccagggcttcaggtttggttacacatatttctgataattgatgtggctttgtcgcacatattctagatgattgcttatgctgcttagatttaaggttttagctggagatgttgatcctgctattcgcacacatgctgccttcttcagcgtctggaaaaaaatggacaaaggagctacccgctacgaccagagttgattgaaagcacatattggttgttcaaggctaccagagattacagataccttgatgttggaagggacatattagcaagccttcaatatggtgccagatgcccttgtggttactgccacatatcagatgtggaaacccacaagcaggatgatcacatggagagttttttccttgcagaaacggtcaagtatctctggcttctttttgatttagctgctggccctgacaatattgttgaaaatggaccatataagtacatatttagtacagagggccatttgttacctgttactcctgagatagccttggaagatgaacattgttcatattttggagcattctgtaatggcggtgccgaccatggatatggtgctagtgctagttctactaagcatcgaaatggaaactatacccaattagatgatattcaaaccccttccagtcactattcaatgtccaatgtgttgtttacgccaggttacatcaagggagtttgtccaggattgactcatgcgcagaaatttgggatatcatactctgatgaagaggataactttatagagcagacttctgagagtcttgatcatcatggtgaatctgccatagaatctagcgtccaagaccaatcaagttctattatattgatctctcacccagtcgcaagccaacaggatgaggcttttgagagcgagtctggaagtcaagatcatgcaaatattgttgtaacttctgattctgattctgattccacaagccgtgataatactgttggctctcccggaatgaactcggaagaacttatggacgacatatagggcacctctagacaggacaaaagatgaagaggttgctcacagtgttgagtccaagatatcagctgaccctttgctcatgtagcaacccatttctgtggaatcttcagggtcaatggcttgccgaatgcagaacaagttagcaagcaagcaaaatgtctggtagacgattccagtatcttgccagcttcaacatcggaaattgatatttactttcagatagaatatattacagggcgtacattcactaatttgttcttttttttctgtatcgatcactaatagatattattttgattaatagagaatgcacgagttttgtaca

SEQ ID NO: 151570 - DNA, 2671 bp, Zea Mays
cgaaattaatgcccatacccctctcattgtcccatcaaactcgctactggcctcgggcccgcccgtcgtgaggtccgagctcgatgcagccgatccggcggcggcaccgaggctttgcactcctctgtctctccgccgccctcctcgctgccgccactctgctccccggcgccgccgtcgccgaaggtgtcacgccctccgaggcgcgccggctccgcgacgaggtgaaagatatgttctatcatgcgtttgatggatacatgaagtatgctttcccactcgatgagctgcggcccttaagttgccaagatcgattctttggataccttggctttactgggtgataaggagaaatttggtgctgctgtggagtgggttggtaagaatgtccactttgatattaataaaaccgtctctgtttttgaaaccaacatacgtatccttgggggtctgctatcagctcacctgattgccagtgattatgccactggtatgagaatccaatcttatgatgaccagttacttcatttagctgctgacttagctcagaggttgttgcccgcatttgacactcctacagataacatcaacggctggtggtggtactttgacactggaatttggcatattgagtcgcttgactaataatactgtttttgagcgagttacaaaaaaatcagtgcgtggaatatggtcacgcagatcaaaactcaatcttgttggtgcccatataaatgtctttactggtgaatggacacagaaggatgcaggaattggcacaagcattgattcattctatgaatatcttctaaaggcatatttattgtttggagatgaagaatacctgtacatttttcaggaggcttacaaagctgccatgcactatctccatcatgatccttggtacgtggaggttaatatgaactctggtgctactgtttggccactcttcaatagtctgcaggcattctggccagggcttcaggtttggttacacatatttctgataattgatgtggctttgtcgcacatattctagatgattgcttatgctgcttagatttaaggttttagctggagatgttgatcctgctattcgcacacatgctgccttcttcagcgtctggaaaaagtatggttttacccctgaaggttttaatcttgctacatccactgtacaggtaatgaaactgttaaactataatagtcaagagtattagcataatctcctatctaaggtttgccatttgcctctcattatccctaacaaaaacaatttttaccaaaccttatggaaggatgcactctaacccttgaacttcaaactctcatattaggcctttctacaggaaaaggattgtagataaattgtatgaatcgattgaagggttaatttttttcctgttgccctgtgatagctgggtgcacaaaagttgaaggacagaagagacttactgatttatacctgcactaatatttgctgttttcaacaattcatagaatggacaaaggagctacccgctacgaccagagttgattgaaagcacatattggttgttcaaggctaccagagattacagataccttgatgttggaagggacatattagcaagccttcaatatggtgccagatgcccttgtggttactgccacatatcagatgtggaaacccacaagcaggatgatcacatggagagttttttccttgcagaaacggtcaagtatctctggcttctttttgatttagctgctggccctgacaatattgttgaaaatggaccatataagtacatatttagtacagagggccatttgttacctgttactcctgagatagccttggaagatgaacattgttcatattttggagcattctgtaatggcggtgccgaccatggatatggtgctagtgctagttctactaagcatcgaaatggaaactatacccaattagatgatattcaaaccccttccagtcactattcaatgtccaatgtgttgtttacgccaggttacatcaagggagtttgtccaggattgactcatgcgcagaaatttgggatatcatactctgatgaagaggataactttatagagcagacttctgagagtcttgatcatcatggtgaatctgccatagaatctagcgtccaagaccaatcaagttctattatattgatctctcacccagtcgcaagccaacaggatgaggcttttgagagcgagtctggaagtcaagatcatgcaaatattgttgtaacttctgattctgattctgattccacaagccgtgataatactgttggctctcccggaatgaactcggaagaacttatggacgacatatagggcacctctagacaggacaaaagatgaagaggttgctcacagtgttgagtccaagatatcagctgaccctttgctcatgtagcaacccatttctgtggaatcttcagggtcaatggcttgccgaatgcagaacaagttagcaagcaagcaaaatgtctggtagacgattccagtatcttgccagcttcaacatcggaaattgatatttactttcagatagaatatattacagggcgtacattcactaatttgttcttttttttctgtatcgatcactaatagatattattttgattaatagagaatgcacgagttttgtaca

SEQ ID NO: 151571 - DNA, 2361 bp, Zea Mays
cgaaattaatgcccatacccctctcattgtcccatcaaactcgctactggcctcgggcccgcccgtcgtgaggtccgagctcgatgcagccgatccggcggcggcaccgaggctttgcactcctctgtctctccgccgccctcctcgctgccgccactctgctccccggcgccgccgtcgccgaaggtgtcacgccctccgaggcgcgccggctccgcgacgaggtgaaagatatgttctatcatgcgtttgatggatacatgaagtatgctttcccactcgatgagctgcggcccttaagttgccaaggtgaagactcccttggtggttatgcgctcactcttatcgattctttggataccttggctttactgggtgataaggagaaatttggtgctgctgtggagtgggttggtaagaatgtccactttgatattaataaaaccgtctctgtttttgaaaccaacatacgtatccttgggggtctgctatcagctcacctgattgccagtgattatgccactggtatgagaatccaatcttatgatgaccagttacttcatttagctgctgacttagctcagaggttgttgcccgcatttgacactcctacaggtattccatttggatctgttaatttattgtacggagtcgatgaaaatgaaagcaagataacatcaacggctggtggtggtactttgacactggaatttggcatattgagtcgcttgactaataatactgtttttgagcgagttacaaaaaaatcagtgcgtggaatatggtcacgcagatcaaaactcaatcttgttggtgcccatataaatgtctttactggtgaatggacacagaaggatgcaggaattggcacaagcattgattcattctatgaatatcttctaaaggcatatttattgtttggagatgaagaatacctgtacatttttcaggaggcttacaaagctgccatgcactatctccatcatgatccttggtacgtggaggttaatatgaactctggtgctactgtttggccactcttcaatagtctgcaggcattctggccagggcttcaggttttagctggagatgttgatcctgctattcgcacacatgctgccttcttcagcgtctggaaaaagtatggttttacccctgaaggttttaatcttgctacatccactgtacagaatggacaaaggagctacccgctacgaccagagttgattgaaagcacatattggttgttcaaggctaccagagattacagataccttgatgttggaagggacatattagcaagccttcaatatggtgccagatgcccttgtggttactgccacatatcagatgtggaaacccacaagcaggatgatcacatggagagttttttccttgcagaaacggtcaagtatctctggcttctttttgatttagctgctggccctgacaatattgttgaaaatggaccatataagtacatatttagtacagagggccatttgttacctgttactcctgagatagccttggaagatgaacattgttcatattttggagcattctgtaatggcggtgccgaccatggatatggtgctagtgctagttctactaagcatcgaaatggaaactatacccaattagatgatattcaaaccccttccagtcactattcaatgtccaatgtgttgtttacgccaggttacatcaagggagtttgtccaggattgactcatgcgcagaaatttgggatatcatactctgatgaagaggataactttatagagcagacttctgagagtcttgatcatcatggtgaatctgccatagaatctagcgtccaagaccaatcaagttctattatattgatctctcacccagtcgcaagccaacaggatgaggcttttgagagcgagtctggaagtcaagatcatgcaaatattgttgtaacttctgattctgattctgattccacaagccgtgataatactgttggctctcccggaatgaactcggaagaacttatggacgacatatagggcacctctagacaggacaaaagatgaagaggttgctcacagtgttgagtccaagatatcagctgaccctttgctcatgtagcaacccatttctgtggaatcttcagggtcaatggcttgccgaatgcagaacaagttagcaagcaagcaaaatgtctggtagacgattccagtatcttgccagcttcaacatcggaaattgatatttactttcagatagaatatattacagggcgtacattcactaatttgttcttttttttctgtatcgatcactaatagatattattttgattaatagagaatgcacgagttttgtaca

SEQ ID NO: 151572 - DNA, 1364 bp, Zea Mays
atttgctggaagcatggccgacacctatgacctatccatgtagagcaccggcccagaaactcctactgctcttcttagctcgccgaaatgacgcacggcctcgccgtcggcttcggctccctccgctgcggtccctccgtgtcgtcgtcctctgccaccattcatcgcaccctggtcgctccccctcgtcgaagcttacggatatgctcctcgaccttccctcctccacccgcgcccgccatcgagggtcgtgacgtcagcctctcggtgaccacgcggcggggcagggtgttgccggtgcttaagggatgctccctccttgtcccgcccgggcagctctggatgctcctcggccccaacggctgcggcaagtccacgctgctcaaggttttagcaggttttcagaatccaacggccggtacagtgtatataaacagaccatgcagctatgtcttccaaaatcctgatcaccaggttgtgatgcctacagtgggatctgatgtagcatttggtctcggtaagctcaaacttccgttagatgaggtcaggttaagggtatcaaaatctttggatgccgttgggatgttgagctactctcagaggccaatccaaactctgagtggtgggcagaaacagagagttgcaattgctggtgcgttagctgaagcatccaaagtattactgctggacgaactgaccacattcttagatgaacatgaccagataggcgtgataaatgcagtgagggactctgtggctgccgatggggaggtcgccgcattatgggtgactcatcggttggaagagctgaaatatgcagatggtgccatctatatggaagatggccagataatcattcaaggcgacgtctctaccatatcaaaatttataaagaaaaaacaggatgggggaagtgagatgcccttcggttaatatatgggaattcatcattcagtgcaaaaattggaccaactctccccatcattaatttatctgatctcggtgaagagatgacttcgtgtacctgtacctttagggttgtaattacagatacgtatttgtgctggactactacacgcggaacggaatgctatttggccgattcccacagagtgtcccatgaagagaagccgtatcacttgagcgtttgagcgtgacgctcctgggccaagctggcattatacttcttttctcaaaggaagcaccagagatttcgtttttagcagggcctttttgcttaaatcttaccgagtcatgctcctagcactgcaatactgcgtcaatttatactcattgttataaaaaaattatagactcgaatataatgtcccttttaagaaaaattatagtgcactctctttttt

SEQ ID NO: 151573 - DNA, 1246 bp, Zea Mays
cttgtgattatacatttaatcatgtggctcggtatatgagatatgtcattaggcatggacaatttgtcacaaaaacttttccatgcataccctgctagtgctccaattcatacaatatccacttaaatgcattcggagcatagttttaggtgagtcatgcaatctgattataatattcttgtaccatgctagagaaaaggtgccatcacttgtggtctagttgttccttagtacccttatttgttggggacataacatttataggagtcttgttgaatcaaatctaacttattgtctgctaaaccatgaactttatgatcttcatttttttagttttgacaaaacatttatgttgacaactcaatactcaaatgaacacattggaatcaaacaagttatagcgtgtacgaaagcttccacatggcggtcaagccaataactgcaaccccagactgttcatgtgcccaagtctttataccatgtctttatatggaagaacgactgtgattttcttagttgtgtcctttggatgcaggttgtgatgcctacagtgggatctgatgtagcatttggtctcggtaagctcaaacttccgttagatgaggtcaggttaagggtatcaaaatctttggatgccgttgggatgttgagctactctcagaggccaatccaaactctgagtggtgggcagaaacagagagttgcaattgctggtgcgttagctgaagcatccaaagtattactgctggacgaactgaccacattcttagatgaacatgaccagataggcgtgataaatgcagtgagggactctgtggctgccgatggggaggtcgccgcattatgggtgactcatcggttggaagagctgaaatatgcagatggtgccatctatatggaagatggccagataatcattcaaggcgacgtctctaccatatcaaaatttataaagaaaaaacaggcacgctactttggtcattttgaactctaaatccccaaagttttttggcaaagcttatcttgtgtatatggattaattccaaagcaacttattttgttgttgtcaactgtagttttgctggaacttctattttagtcatttttcaaagcaaattatgtgcgacatgcttgtctgcttgcattgcaatgttgagtgtttgcctgtgattcgattcacttgcaggcatatatgaatacggcctggcctgggaaaagcttggtccctgctgcctatactagattg

SEQ ID NO: 151574 - DNA, 1185 bp, Zea Mays
atttgctggaagcatggccgacacctatgacctatccatgtagagcaccggcccagaaactcctactgctcttcttagctcgccgaaatgacgcacggcctcgccgtcggcttcggctccctccgctgcggtccctccgtgtcgtcgtcctctgccaccattcatcgcaccctggtcgctccccctcgtcgaagcttacggatatgctcctcgaccttccctcctccacccgcgcccgccatcgagggtcgtgacgtcagcctctcggtgaccacgcggcggggcagggtgttgccggtgcttaagggatgctccctccttgtcccgcccgggcagctctggatgctcctcggccccaacggctgcggcaagtccacgctgctcaaggttttagcaggttttcagaatccaacggccggtacagtgtatataaacagaccatgcagctatgtcttccaaaatcctgatcaccaggttgtgatgcctacagtgggatctgatgtagcatttggtctcggtaagctcaaacttccgttagatgaggtcaggttaagggtatcaaaatctttggatgccgttgggatgttgagctactctcagaggccaatccaaactctgagtggtgggcagaaacagagagttgcaattgctggtgcgttagctgaagcatccaaagtattactgctggacgaactgaccacattcttagatgaacatgaccagataggcgtgataaatgcagtgagggactctgtggctgccgatggggaggtcgccgcattatgggtgactcatcggttggaagagctgaaatatgcagatggtgccatctatatggaagatggccagataatcattcaaggcgacgtctctaccatatcaaaatttataaagaaaaaacaggcacgctactttggtcattttgaactctaaatccccaaagttttttggcaaagcttatcttgtgtatatggattaattccaaagcaacttattttgttgttgtcaactgtagttttgctggaacttctattttagtcatttttcaaagcaaattatgtgcgacatgcttgtctgcttgcattgcaatgttgagtgtttgcctgtgattcgattcacttgcaggcatatatgaatacggcctggcctgggaaaagcttggtccctgctgcctatactagattg

SEQ ID NO: 151575 - DNA, 1098 bp, Zea Mays
atttgctggaagcatggccgacacctatgacctatccatgtagagcaccggcccagaaactcctactgctcttcttagctcgccgaaatgacgcacggcctcgccgtcggcttcggctccctccgctgcggtccctccgtgtcgtcgtcctctgccaccattcatcgcaccctggtcgctccccctcgtcgaagcttacggatatgctcctcgaccttccctcctccacccgcgcccgccatcgagggtcgtgacgtcagcctctcggtgaccacgcggcggggcagggtgttgccggtgcttaagggatgctccctccttgtcccgcccgggcagctctggatgctcctcggccccaacggctgcggcaagtccacgctgctcaaggttgtgatgcctacagtgggatctgatgtagcatttggtctcggtaagctcaaacttccgttagatgaggtcaggttaagggtatcaaaatctttggatgccgttgggatgttgagctactctcagaggccaatccaaactctgagtggtgggcagaaacagagagttgcaattgctggtgcgttagctgaagcatccaaagtattactgctggacgaactgaccacattcttagatgaacatgaccagataggcgtgataaatgcagtgagggactctgtggctgccgatggggaggtcgccgcattatgggtgactcatcggttggaagagctgaaatatgcagatggtgccatctatatggaagatggccagataatcattcaaggcgacgtctctaccatatcaaaatttataaagaaaaaacaggcacgctactttggtcattttgaactctaaatccccaaagttttttggcaaagcttatcttgtgtatatggattaattccaaagcaacttattttgttgttgtcaactgtagttttgctggaacttctattttagtcatttttcaaagcaaattatgtgcgacatgcttgtctgcttgcattgcaatgttgagtgtttgcctgtgattcgattcacttgcaggcatatatgaatacggcctggcctgggaaaagcttggtccctgctgcctatactagattg

SEQ ID NO: 151576 - DNA, 1205 bp, Zea Mays
atttgctggaagcatggccgacacctatgacctatccatgtagagcaccggcccagaaactcctactgctcttcttagctcgccgaaatgacgcacggcctcgccgtcggcttcggctccctccgctgcggtccctccgtgtcgtcgtcctctgccaccattcatcgcaccctggtcgctccccctcgtcgaagcttacggatatgctcctcgaccttccctcctccacccgcgcccgccatcgagggtcgtgacgtcagcctctcggtgaccacgcggcggggcagggtgttgccggtgcttaagggatgctccctccttgtcccgcccgggcagctctggatgctcctcggccccaacggctgcggcaagtccacgctgctcaaggttcttcctctgaactaggagttttagcaggttttcagaatccaacggccggtacagtgtatataaacagaccatgcagctatgtcttccaaaatcctgatcaccaggttgtgatgcctacagtgggatctgatgtagcatttggtctcggtaagctcaaacttccgttagatgaggtcaggttaagggtatcaaaatctttggatgccgttgggatgttgagctactctcagaggccaatccaaactctgagtggtgggcagaaacagagagttgcaattgctggtgcgttagctgaagcatccaaagtattactgctggacgaactgaccacattcttagatgaacatgaccagataggcgtgataaatgcagtgagggactctgtggctgccgatggggaggtcgccgcattatgggtgactcatcggttggaagagctgaaatatgcagatggtgccatctatatggaagatggccagataatcattcaaggcgacgtctctaccatatcaaaatttataaagaaaaaacaggcacgctactttggtcattttgaactctaaatccccaaagttttttggcaaagcttatcttgtgtatatggattaattccaaagcaacttattttgttgttgtcaactgtagttttgctggaacttctattttagtcatttttcaaagcaaattatgtgcgacatgcttgtctgcttgcattgcaatgttgagtgtttgcctgtgattcgattcacttgcaggcatatatgaatacggcctggcctgggaaaagcttggtccctgctgcctatactagattg

SEQ ID NO: 151577 - DNA, 784 bp, Zea Mays
actgccacgtcaccgcatttgcacccagctttcctcccatcccatggcttccctcctctgccccgcctcttcctgcccctctgcttcactgcgccgcacagccgcctcccccgctgcaccatccttcgcctcaagtcggcactacggagccccgcttacgttccgagtcgcctctcagccgccgcaggcccttgccgcggccccttacggctacggcagcgacctgctcaggcccatcgacacacagacgatcatcatagccgccgccgtcgtatccgcagtctccctctctctcgtcctcggcctcaagggcgacccggtgccgtgcgacaggtgcgctgggaatgggggcacgaagtgtgtgttctgcaacgatggcaaaatgaaggtggaaaatggagtcgttgagtgccgtgtatgcagaggagcagggctaatactttgcaagaagtgtgctggttctggatactccaagcggttgtagcggaatcccggtttgactggcattctgtgcagtttgacatccgaaagatggactttgtacagatgtatatacactcttctcttctctatcagcaaatatgtatgtccaggcagagatgagcttgaagggaagctgatttacagtctgctgatatattatcagttgcagttcatttatcatgcgcttcttctctgtttatcaaactgttcacacaagtctgctgatatattttattagcgtgcggcttcgtaatcataacgttataagcagaaccgatcgtccggttttgaatgtctacaa

SEQ ID NO: 151578 - DNA, 191 bp, Zea Mays
gcgcagacgaccgttgcagcgccgggctgattggcgcaccggacactgtccagtgtacaccggacagcccggtgccccccgccgaccgttggagctgtcacgcgtcgcgcgaagattgcgcggtcgatcgttggcttaccggacagtctggtgcaccactggacagtccgagtcctagtacccagctacgg

SEQ ID NO: 151579 - DNA, 1996 bp, Zea Mays
ggcattgattgcatctctagtgcccgtcctccgtcctccggagcggctatgggcgaagagagggagttcgtgggcgctaggttggacgccggcctccgcgctgcccgcttctcgtcgccgccgtctgccgacgagtttgcggcagatgtcgagcccaagaacgtccctgcggtctttcgcggcgtggttaaggagtgggcggcctcctcccgttgggatcctctacatggcggcctcgattacctgctggaaaaagtgggacctgacgtggctgtggaagctatgatgtcaaacactggccatgtgttctacggggatctcagaagccatgagagggtgtctgtttcattctccacgttcattcagtcgtgcaagtcttacctggatcatatgaatgcagctagtgattcatccaaagagcagggaatgcttggggagccagctagttcaagggagacatgttcgaacagttcagagaacttggagcaagtctatttggcacaggtatctattatgaatgcagagaacaaagaaggatgctcattacaagttctggaaggcgacatccaagagcctatatttctgagaggaaaatcattttcgtcaataaacttttggatgaataagggtcacttgagatcaagtactcattacgatccccaccataaccttctctgtgtggtatctggtcgcaaaaaagttactttgtggcctccatctgcatccccattcttatacccgttgcctgtgtatggcgaggcctccaaccacagctctgttagtgtggaggagccagattattcaatatatacaagggcaagatacatgaaggaatattctgaaacagtaattctaaactgcagcgatgttgttttcataccagaaggctggtatcaccaagttgacagtgacgacttaacaatagcagttaacttttggtggaagtcaagaataatgactcaaatgttagaacatatggatgcctactatctacgccgaattatgagcagattggtggaccaggagatgagcataatggcgcagaagagtccttttggtcatttgaaagattgcacggatattcagcatatggccaaaacattgacaggtttccagctattcaatttgcaaaaagattcaccactacgaactctggaaccctccactctgcaagcactctatgaactcatctcactggtccatgatggtgctgaagcggttagccaaatggacaaaatagaagccacatcccagaataaatcctccaaccaaagagatgacacagatacgagtgctgctgcagacgattcatccctcttggacaaagatcctgttgcaaaaatcattttgccagttgaaccacttgaattgcggactatgctgcttgcaatggtgcatactttcccaaggacgttagaaaatttgattctcaacatgcttggggtaggagcagagatactgactaggaagtttgatgagatggatcaacaaacaacaaaagaagaacagtctgagttctacaagatattctatagcgtgtttgacgaccagtacgctgcaatggatgcgcttctgaacgggaaggaattgttttcttttcagatattccagaatgtcctggacaagtatctcggggtgcatgttgaccgacccagcagatttgttactcgtacaaaccaatgaaatggagcgcctctaccctctagtatacaaaacctgaatcggcttgttgagccaagccaatgaagaacgtattatgctgattactgatgtttgagcgtctcgatagataatgtgtttttattggcttgcaaccatattttagggattttttttggacgaaggcggcagtaactgagagcggtgcgcatatgtgagatgcgtgactgctcttgaatgcgatgattacaaacgaaaattaccgttacgcctcgtttggattcatggaatcgaatttcattctaataatattaattctaacgatattaatttaggc

SEQ ID NO: 151580 - DNA, 1321 bp, Zea Mays
ttgttcttgggttccagctgaacccaactccaatgcgcatgcctggacttataataccatcatctgatgactctaaggtatttctcgcttactacaatgactccctagtgagagatgagacatcaggccaagttgttagctttggcggagttgctaaaatattaggggggctaaatccagattatggaaattctgcaccaaaagtaatgttctattctgctaggggtcctgaccctgaggacaatacactgtcaaatgctgatatcttgaaacccaatctagtagcacccggaaattcgatttggggtgcttggagttcacttggattggattctgctgaattttctggtgaaagtttcgcgatgctctctggcacaagtatggctgcaccccatgttgctggcctggctgctctaatcaagcagaagtttccttcttttagcccagcagctatagcttctgcattgtctacaaccacaactcttagtgacaggcaagggaaaccaatcatggcgcagcgaacatacagcaacccagactcgacgcaatctccagcgacagcttttgatatggggaatggttttgtaaacgctaccgctgctttagacccggggctcgtatttgattgcagttatgatgatttcttctcctttctttgcggcataaacgggtctagcccagtcgtgacaaactacactggcaacagctgcgtggcctccgccatgacaggagcagatctaaacctaccatcaatcaccatagccgtgctcaaccagacaagaagcataacgagaacggtgaccaacgtggcggccgacgagagctacaccgtcagttacagcgctccctatggaactgcaatctccgtggtaccgatgcattttcttattccaagcgggcagaagcagcttgtgaccttcgttgtgaacgccaccatgaacagctccagcgcaagctttgggaacgtcggtttctatggtgacaagggccacagggcgatcatcccattctctgtgatctccaaggctgtgtacagttcctgacgactgatgagccgagctgatgcagtggatgcaaatgcaatgcagaccagggcctgactgatccagccagcgtatgcagtggtgacttaactgcatggagccatggaggtggagcttacctttgactaggatttttttgttgttggttgtggtgtgtacactctgaagcatgttgatgtaagtagctgagtgattaaccagtaactgtaaaaagaatgtactaccagaatgttgccatgaatgggaaaaccttctgccaccagaatgttaaacagcac

SEQ ID NO: 151581 - DNA, 1458 bp, Zea Mays
caagctgctggcgaagcaataacacaacatgcatgaacatgttgtattacacaacatgtgaaaagaaacagagatgtgttatacacattacaagtttaaacaaagtattacagaaattaatttgataaattcctgattgtgttactttctaatgttagttagtttgcaatcattgaatggatttcctttatatggccactaacattttttagataataactagctagctaacatgccattgcacccaattttcatgagttcatatggcatgctatgttcatttgggtagatttgatataactcttgatctcaacgctaatgttagtgttaatgacattattgcgaaagggcctctagcgtaatttcgggtagcacctccaggtctcagtttggatccccctcgatggcgaattttgggcttggttgaaaaaatctcctcgttgtggctcgcccgctctcgggttacatcctgcgcgccaccctctggttgggccgttgtagagtgggtggtgacgacctgctagtgatgaggggcaaaggttctgggattttctcggccgtgaccatgtttcggtctcttcttagtataatatcgggagggcggtctttcccttcccggccgagtttttttgttaatggcattattcatagaaattattaaactagtattttctggcaatgcctatctaacctttgtacttatgttctttctgatgaatcatgatccctgacattgtaaacattttttctgtcgcctcatgtttacaggtatgatcagagcttggcagttctcaagcatgcaaaagcttgcagggagggcatggttacaaagtcttctatcatgcttggtcttggagagactgatgaagaggtgaaacaagccatgatggatctgcgggcaatcggtgttgacatccttactttgggccagtacttgcagccaacagaaagacatctaacagtaagagagtatgtgactcctgaaaagttccagttttggaaggagtatggggaatcggtcggtttccgatatgttgctagcggacccttggttcggtcatcctaccgtgcaggagagctctttgtccaaaatctggtcagaaacaacaaaactgggtcttcctcatcttagagcacattgtatccgtagtacgttgagagcagcaaaacaagagtagaacagcataaacatctggatcctccgaaagctgagacacagctctttttttccttttcttttcggatagtatgcacagatttgctctctgctgttagttgcccctgttgaatagagaaagaaaaagaggacgccggttcttttctgtatacacgaaaagctgttcaagtatagtggcctgtatgtttttggtcttctggatgattacacattgctttgttcaccatttcttttgatggaaagagagagagagagaaagaaagaaagcgaggaaagctgtc

SEQ ID NO: 151582 - DNA, 1614 bp, Zea Mays
gacccaattcatcgcaacgacttcggtaggcagaggtaggcgaggcgaagaaagaccaaccttggtatcatcgccggcctaatatcgaccccctgttctactacacaaggggtgaaacgggaacgcttacccgtcctccccgcctggaacccatcgcctccactgtgcccgacgccgcgcccgattccaccggccgacaacgatgcagagctccctcgcgcggccgctgcggcctccggtactggccggacgcggcggtagacggggcctggtagccgtggcacggtgccacgctgaggcggcgccaccggtggggacggcgtctagggcgcccgcggggccgtacaccgggagggatccggaggtgaagaagcccgcttggctgcggcagcgcgctgcgcagggcgagaagtacgctcgcctgcgggagtccatcggcgagctcaagctcaacaccgtctgcgtcgaggcacagtgccccaacatcggcgagtgttggaacggaggtggaggggccggcggcgaaggggacggcatcgccacggccaccatcatggtgcttggtgacacctgcacgcgcgggtgtcgattctgcgctgtgaagaccagcaacaagccaccgccgccggatcccctggagcctctaaacacggctttggctgttgcaagctggggagtagattatgtcgtgctaaccagtgtcgatagagatgacttacctgatggtggaagtagccattttgctcaaacagtgaaagctttaaaggagctcaaacctggaatactggtggagtgcttaacctcagattttcgaggtgacctggaggccatctcatctttggctaactctggcctagatgtttatgcgcacaacattgaaactgtgaggagtctgcagaggattgtgagggatccccgggcagggtatgatcagagcttggcagttctcaagcatgcaaaagcttgcagggagggcatggttacaaagtcttctatcatgcttggtcttggagagactgatgaagaggtgaaacaagccatgatggatctgcgggcaatcggtgttgacatccttactttgggccagtacttgcagccaacagaaagacatctaacagtaagagagtatgtgactcctgaaaagttccagttttggaaggagtatggggaatcggtcggtttccgatatgttgctagcggacccttggttcggtcatcctaccgtgcaggagagctctttgtccaaaatctggtcagaaacaacaaaactgggtcttcctcatcttagagcacattgtatccgtagtacgttgagagcagcaaaacaagagtagaacagcataaacatctggatcctccgaaagctgagacacagctctttttttccttttcttttcggatagtatgcacagatttgctctctgctgttagttgcccctgttgaatagagaaagaaaaagaggacgccggttcttttctgtatacacgaaaagctgttcaagtatagtggcctgtatgtttttggtcttctggatgattacacattgctttgttcaccatttcttttgatggaaagagagagagagagaaagaaagaaagcgaggaaagctgtc

SEQ ID NO: 151583 - DNA, 1131 bp, Zea Mays
gacagttagcactaataagatggaccgatccaaccacaatataacaaagacagttagcactaataagcccttgttcggttagctctcaatccatgtggattgagtgggattggatgggtttgaatcccaaacaagtcaaacttcttctcaattttttccaatcccatccaatccatgtgtattgggaataaccgaacaagccctaagatggaccgatcccaccacaatataacaaagcacgacccgttcaactagcatagtgtcagtgcctgacacatatgggttgcgcaaatatttcggtcctagggtcggcctaggtccgacacgcttaattggaccgacactgtccagtgcgcctaaccaagtgctctgggccccgctggccaatgaccacgccacgtccgaacccaactctaaatcatgtcttcgctccaatccaaccactcacactctctgcctccgctctgctctcttcttctcccactccggtggcagacgcggccacaatacactcttccatcgttggtgcaccccccccccccccccgctccatctgacccttggatttgcgtgtgcggggcattgtcgggattcgccgaacagtaaccctaactcctctcttctccctctctggtgtgatcttgagcaccggtgtcaagcactggcacacgacacgagatcatcctcgtcttgtcgtcttcgtcgaggtcacatgttgtcggctactctggtgctctagattcaaattcgttgaggaacagggtggacggatctgttgttcgtcgatcagtcgacatgggcgacggagattctagtgctccggttgtttagccattgaggaatcaggtctccattgattgacgatggtcggctcggacgagatacagttgagatcgatggcaacaaggaaaggcgttttgtgcgggttggccggagatgacgatgaggatgacctgtgtgaggatgttgtggagatcttcagccatagcagcgatgctaccgtccttatcggcgatggtcaaaaaggcggtgtagaggaaggtgcagaggatgagcaaagcgctctcgtccttctacctcggttgtgtgattatatttccagaaactcttaatagaattgtcttcttagaa

SEQ ID NO: 151584 - DNA, 1372 bp, Zea Mays
cactcgtccccttcctccccttccgtctcgcaacaggcgaggcgagagaactcgtcgtcgaagcgaaatatagccagcgcaccaatcccaattcccaacccgacgcaacgcaacgcaacgcacctcatcccggttgcttgcgccaacgtaggggatcgcccggccccgccccgctccgcttcgcgcccctccttcctgcctgccgtaaccgcgccgtgcaactgtgcaaggttcagtaggttgttgagtctagataccagatgatggacctgtccacgacttcagtgctggcagctaaagcttacaaatacaaagcagaatcacttgttaaggagtaccttcttgcagattcgtatgtttcatacactgctgtacttggtgggatcctgatgtgcaagatggcttatgacataacaagcataatcagctcattgtactacaagggttatggttcacttacaaaaacccaaaagcttgagtggaacaacaggggcatgtccactatccatgcgatattcatcacagtggtgtcagtgtacctggttttcttctccaacctattctctgatgagctggatggactagtaacttatcggagttcaaatctatccaatttcactttgggggtttctgttgggtatttcatcactgaccttgctatgatattatgggcttatccttctcttggtggaatggagtatgtccttcaccatatgctgtcgcttatttctatagtctatgctatgtattctggggaaggacagttgtacacatacatggttctcatctctgaaacaaccacacctggaatcaacctccgatggttccttgataccgctggactgaaaaaatccaaggcctatcttgtcaatggtgttacgatgtttattgcatggctggtggcacggatcattttgttcgtctacttgttttaccacatttacttccactatgatcaggtcaagcagatgcatacgtttagctgcattctgatatttgctgtgcctacaatactgctcgtcatgaacacaatgtggtttgccaagatcttgagaggccttaaaaagacgctagccaagaggcagtgaaaagaagaatggtaaaacaagctcaaggacatcgatagccaaaatccatcccctcgtacagtcactttacagttacatgcacttcccgagtaaagccgtcagtgcagctcgtagcacaagctaaagcccttgcacatgatcctgaaatacgctaaacacagctcatttttttccctggatgctctgccttgtacatacggccgtctgtattgggtgcttacaccttgagggatcgtttggtgaccaggaaaatagatgggaaagaaatccctttgttacggcct

SEQ ID NO: 151585 - DNA, 1425 bp, Zea Mays
cactcgtccccttcctccccttccgtctcgcaacaggcgaggcgagagaactcgtcgtcgaagcgaaatatagccagcgcaccaatcccaattcccaacccgacgcaacgcaacgcaacgcacctcatcccggttgcttgcgccaacgtaggggatcgcccggccccgccccgctccgcttcgcgcccctccttcctgcctgccgtaaccgcgccgtgcaactgtgcaagggtggggtggtggtgccatggcgagcacggtgtggagggaaggcggttgtggccagcattaggttgttgagtctagataccagatgatggacctgtccacgacttcagtgctggcagctaaagcttacaaatacaaagcagaatcacttgttaaggagtaccttcttgcagattcgtatgtttcatacactgctgtacttggtgggatcctgatgtgcaagatggcttatgacataacaagcataatcagctcattgtactacaagggttatggttcacttacaaaaacccaaaagcttgagtggaacaacaggggcatgtccactatccatgcgatattcatcacagtggtgtcagtgtacctggttttcttctccaacctattctctgatgagctggatggactagtaacttatcggagttcaaatctatccaatttcactttgggggtttctgttgggtatttcatcactgaccttgctatgatattatgggcttatccttctcttggtggaatggagtatgtccttcaccatatgctgtcgcttatttctatagtctatgctatgtattctggggaaggacagttgtacacatacatggttctcatctctgaaacaaccacacctggaatcaacctccgatggttccttgataccgctggactgaaaaaatccaaggcctatcttgtcaatggtgttacgatgtttattgcatggctggtggcacggatcattttgttcgtctacttgttttaccacatttacttccactatgatcaggtcaagcagatgcatacgtttagctgcattctgatatttgctgtgcctacaatactgctcgtcatgaacacaatgtggtttgccaagatcttgagaggccttaaaaagacgctagccaagaggcagtgaaaagaagaatggtaaaacaagctcaaggacatcgatagccaaaatccatcccctcgtacagtcactttacagttacatgcacttcccgagtaaagccgtcagtgcagctcgtagcacaagctaaagcccttgcacatgatcctgaaatacgctaaacacagctcatttttttccctggatgctctgccttgtacatacggccgtctgtattgggtgcttacaccttgagggatcgtttggtgaccaggaaaatagatgggaaagaaatccctttgttacggcct

SEQ ID NO: 151586 - DNA, 875 bp, Zea Mays
cactcgtccccttcctccccttccgtctcgcaacaggcgaggcgagagaactcgtcgtcgaagcgaaatatagccagcgcaccaatcccaattcccaacccgacgcaacgcaacgcaacgcacctcatcccggttgcttgcgccaacgtaggggatcgcccggccccgccccgctccgcttcgcgcccctccttcctgcctgccgtaaccgcgccgtgcaactgtgcaagggggacatcacagattctttggtatcttcctggaaatttccatcaattgttttctcctcaaccattgctggtcatgttgtttgtagtgattgtctgtcaggtgaaacatgttgtgtttggtgatgttcttactagcattcaaatgactcaagatacattagttatttgtcagttgttttgtatctgatggaccaatatatgctcaggattcatatttgggcacttgaggtgaaaaccatcttattcgattttgttgaactgtgataccactcattcttaatgaaatggatcatttccctttgccagtatcttgttgctttatttgcacccttgactatagttagtatagtttcagtattcgaggtgttgtcctatttgcaatatcaaacaggaagcataagataagagaaaagtgtatgtggcttcattgttagatttaaaatattgatactgtctaagtgattgtcaagctaggttgtcatatccatatggttcctcattacacatttaattgtgggatctgtatggtttcacagacgcatttataacattcattgtgcgtttcatggatcattatttaattgttgtatattaatgctccatttcttagggcatttctgcattcatgtgggcaagctggatgat

SEQ ID NO: 151587 - DNA, 637 bp, Zea Mays
cactcgtccccttcctccccttccgtctcgcaacaggcgaggcgagagaactcgtcgtcgaagcgaaatatagccagcgcaccaatcccaattcccaacccgacgcaacgcaacgcaacgcacctcatcccggttgcttgcgccaacgtaggggatcgcccggccccgccccgctccgcttcgcgcccctccttcctgcctgccgtaaccgcgccgtgcaactgtgcaagggtggggtggtggtgccatggcgagcacggtgtggagggaaggcggttgtggccagcatgtacttttctgtttcggtactctggttcgatcctgatggggttttcgtccatcgatcgcgtctcggtcctgcacgcaatgcagagggggttacggttctttctgttcttcctccccgcggtccgcgtcgggatgctggtctggtcgatgctttttttggcttaccgcggacgcgacgggatgcttcggccgttgttttcttttgatctctgtgacccttctgggaatcgattccatgccggattggtcgcaatgtgcgggaggttttttcttgtcctgttttttcctcgctggctggttggattctgccgcgaaaagttctcccccttatgcacctttcccccccccc

SEQ ID NO: 151588 - DNA, 770 bp, Zea Mays
tgctggagacagcctaatacagacactcttttcctctttctccattccccatcgcaaaactggaggacctagcttcgccgcagatgtcgtcggtcccggacgctgatctcgcctcagattccgtggccggcaaaaaagacacgcatctctgtattgatatgatatattgtatttatcacggacaaaagacacaaggacacagtggagtcaagcacgaaccagttttttttagcatccttaaagagtacaatttaccaagacatcgtgcacaaaagggttggaccaaggaagcttggaataacaagacgcagcgtatgaatgaaaaatctgtatcagcaaacttcattgtatctcaactgaaggatagagaacaaaggctcaagaaggaccataatgcagtgcatctgattttatcaaagagtggatttggttgggaccccaacctaaagatggctactacagtatcataaaattggcaagacctaccacaaaagttacagaaatggaaggataaagccttcccatactatgaagacctgcatgagatttacaatgatttataaaagtattttgctctacggaaagaagcagtagctagtgaaatgggatgagagctgcgaaactagagaatataacatttggcatttattttagtcttttttagtccgtatgaactattgtgtgttatttggtttgtacgcttttgaattgaacttgatggcaccaaacaggtgttcaattgattgctgtaaaagaaatttatgattata

SEQ ID NO: 151589 - DNA, 2885 bp, Zea Mays
gtcaggcgtcacttgacgacgtatacaggggcacagggctcaggttttccttcaaattgcgccgaaatactcgagatttcttggatttttttacttgtttattctattctccttccggcgcctctctagtctattctccttcctcgtcgagtcgtcgtcttcttcgatccactctttcccccatccctatctccctactttccacgcaactgcgtttcccccggactcttcttccacgattccgttggacccctaccgctcctcagtcagtcctcgcccctcccagcaccggccaacaatccctcacgttattccctgtagctactatgctgccctcttggatccctttttcacttgtctgagatttagccaccgcccggtaggaagaagaaggggaagcaccatattttctgttcctggcctgacgcagcgccggtgagatttcagtccgggatcggcaacgctgggaggactcgcgtgtgatttacgccgacttccgtgccgctctaggaagggtcacgtcgaggaggcttttgccgacgcggatttgcctggagccagccaagcagagcgcagaattgggggtgtttggccgtgcaaagccagaaagttctcggtttggctgccgaaaccgcttgaggcgaccaccatctcatggtcgtagtggtccgggtccggcacaagtaggggctcgcgtcttgcgcttggcagttgtgggaagccatggagccgtcgtcgtccatcacgttcgcgtcgtcgtcgtcgtacctgtccaacggctcgagcccctgttccgtcgcgctgccgccgccagggccgccccagactcccccgttgcctgccggccaggggtggggtggtggagtcgctgccgcagggagcggaggcagcgtggaggccgtgagcctgaaccggctcagcaaaaacctcgagcggctgctcctcgacccggacctagactgcagcgacgccgacgtcgatgtgcccgacggtgggccgcccgtacccatccaccgctgcatccttgccgcacgcagcgacttcttctacgacctcttcgccgctcgcggccgcgcaggggcagcgcgcggtgatgcggccgccggcgccggagtagccgcggagggggctgccagtggaaggccgcggtacaagatggaggatctcgttcccgccggccgcgtggggcgcgaggccttccaggcgtttctggggtacctgtacaccggcaagctccggccggcaccggtcgacgtggtgtcttgtgctgacccagtgtgccatcacgattcgtgcccgccggccatcaggtccgcggtcgagctcatgtacgcggcgtgtaccttcaagatccccgagctcacctcgctcttccagcgccggcttcttaattttgtagacaagactctagtggaggatgttattcctattctggaagttgcttcccactcagggctgactcaagtgatcgacaaatgtattcaaaggattgctagatcagatctcgacgatatatctttggataaggagctccctccagaagcagttgatgagataaaaaatttgcgcaagaagtcacaaactgctgatggtgatacgttcatttcggaccctgtgcatgagaaaagagtcagaagaatccacagggcacttgactctgatgatgttgagcttgtgaagttgcttcttaatgagtccgacatcacattagatgatgccaacgcattacactatgctgcttcttactgtgatcctaaagttgtctcagagctgttagatttggcaatggctaacttaaatttgaagaatagccgtgggtacacagcactccacttggctgctatgaggagagaaccagctataatcatgtgtctccttaacaaaggggcaaatgtgtcacaactgacagctgatggcaggagcgcaattggtatttgtcggaggttaacaagagcaaaagactacaatacaaagatggagcagggtcaagaatcaaataaagataggctgtgtatagatattctagagagggagatgatgcggaatcctatggcggtggaagatgccgtcacctcgcctttgttggcagatgatcttcacatgaagcttctctacctggaaaacagagttgcatttgctagattgttctttcctgctgaagccaaggtcgccatgcaaatcgcacaagcagacaccacagaagaattcggcggtatagttgcagttgcagcaagcacttctggtaaactgagggaggtggaccttaatgagacgccagtgacacaaaacaaaaggctccgttcaagggtagatgcactgatgaaaacagtggagctgggccgtcggtacttcccgaactgctcgcaggtgctggacaagttcctggaggacgatctgccggaaggtctggaccagttctacctccagaggggcacagccgatgagcagaaggtgaagaggatgcgcttctgcgagctgaaagaggacgtgctgaaggcgtttagcaaggacaaggcggagggcagcgtgttctcgggcctgtcctcgtcgtcgtcgtgctcgccgccccagaagtatgcccagaggtgatcaaggcaccagtttttgccgtatagtttgttatcatggtcttcgagacttggacccggacagcatatagggacatgtacacctgtgtatgtatagtgcttacaattggcgtaagtagaactatatgtatggaacataaggaaacatggcaggaacaccgtgcaaaaagatgaaaagatggccgaagtgctctatgcgagtgcccacctgattcgatggccctattcaacggcgccctgtcagcatgctgcatgcccactgagaccttcggttgcatagggataggaggagatttc

SEQ ID NO: 151590 - DNA, 1519 bp, Zea Mays
atggaactgcgactcacagtcacaggctgtcatctactcaccgtccgtagaagactggcgcgtgtgcaaaatggtatcatgcgtgctgttcttatggctggtgcttacccaatggtagggaaaatgctccctcctcgcaaaaatgctagaaaatcagttctggaaacagcgagtggtgccaaagttcgtctgcacccacactcctgcaactttaacctatctttcagtaaatcttctgggaatccactgctgatatacgatgagatcactcgaggtgatggtggaatgtatataaaaaattcttcagttgttgggtcatatcctttgcttctaatagctgcagaaatggttgttgctccacctgatgatgatagtgatgaagatgaggaagattctagtgaggatgaagctgaggaaagcacattggtacagcacaaagaagagattatgtcttcacctgacagcattgtttcagttgttgttgatcggtggctccggtttgacgctacggctctggatgttgctcaaatatactgcttaagagaacgtctagcatctgctattcttttcaaagtgaaacatccacaagatgttctacctcctgcgcttggagcgtcaatgtatgccatcacatgcatcctttcattcgatggtttgccttctatggttccacctaatgacctttcagcaaaccgaggttcaggccaggatttagcagaagctagcaagttctctcagggaagaagagcgggttatattccaccaagtggttttctgatgtccttgttagctgataggacccataatgcaccttctttccagaactcatctaaccatccaggaggtggttcagcgcatactcggccatccagggctcctgttggtaggtttgatcgatctcggcgacctttccgcaattctggacctgggacttcagcaccacgttctttcaaaaggcagcgcgacgctccacggtgagcagggcataaaggcagccttttgcatgccagccatttcggatgtgctttgtcaacggtgcctagtctaagaaaaggacgtgctacagaatcacaagctttgctgtgttccgttgtagaaatgaaaggaaaagaattatagcactgcatcagattcctttgtcgaagagtttttgtaggtatgcccctgagtgttttgtgtactttgctcagccgagctcatttgcaccgtagatctcagaggtgcctgtaatcttttggatggagttcggatgttaaaaagaagtgggaaagaaaagggaagacctgttatctgctcaaatgatgagccccataattgacggtatcactggaccatagatgaactttgtgctgtagtgccataggcaatatggtgtgacgggcgagtggaatttgccctgcatcgcaagcgttaaattttgtccttgtatgtacgtacttagtaaacttagtaataaccctttctttgaattcagttttatagtgagtccaacatgatatggcgcattttgttcttgttt

SEQ ID NO: 151591 - DNA, 3029 bp, Zea Mays
ttgggcgtgggccgcttccgcgtggttccagttccaggacctcagtcctcagccagcccccatcgaccaccatggtccacctgtctggtgtgcccgttcgtccaaacccgctgcgctacccgctcgccgtctcgactagctctaggttttcattcggcgcaccggaacagcgcaccatcaagagagcgaccgccgcacaggcgcgacaccgccgcccgccggtacagccaaaccgagctcgccgcatcgaaggggcttcccgaccgccgagcgtgcttctagacgacgacaacgagcacgaggaactgatggggcggaaggggcggaaggggaagggcgcagcggccggggggagcgccggcatgaaggaggcgacgctggtgcgcgtctcaaaggcgctcgaggacttccgcgcctccaacgccgaggtgtacacatttgaacctgatatatccaaacaagagcgagctgcaatccatgagatgtgtaggaaaatgggcatgatatccaaaagttctgggaacggggaacgtcgacgcctttctgtttataaaagaaaacagaagcgggggcctgaattggaacaaggccctagctaccttgggttttctgaagaggctaggcatgttttgcaggatttatttatgcattatcctcctggtgatgctgatttaagtggggatgttgaccagagttctagtgataaggctgcaaacatcaaatggagaacagataatgcgttttgcaggcccgcaatgagtaaacttgatataacgaagaaagttgagatgcttgcctcaaaaataaatggatccgaacagttgagaaaggtcatggaagatagaacaaaacttcctatttcatctttcaaggatgtcatcacttcaactttggaaaatcaccaggtggttcttatttctggacaaacaggctgcggtaaaaccacccaggtgcctcaatacatcttggatcatatgtggggcaagggtgaatcatgtaagatcatatgcactcaaccacgtcggatatcagctatttcagttgctgagcgaatctctgctgaaagaggtgaggctgttggtgacacagttggatataagatacgtttggagtcaaaaggcgggaagaattcatcagtcttgttctgcacaaatggtgttcttttgagattattgataggaagaggaactaacgcttcaaaagcacgaaaccagaagcgctcattagatgatgcagttttgggaataacgcacatcattgtggatgaaatccatgaaagggataggttttctgatttcatgctgactattctaagagacttgttgcctttgtatcctcatcttcgtatggtactcatgagtgcaacaattgatgctgagcgtttttcgcaatatttcaatggatgttcggtcatacaagtccctggttttacctatcctgtcaaaactttctatttggaggatgtgctttctattctgcagtctgcaggtgataaccatcttaccagtcataaaacagagggcagcgttttaactcacgatttcaaaagctcaatggatgattcaattaatctggctttggtcaatgatgaatttgatcctcttcttgagcttatttctgcagagcagaacacagaagtctacaattaccagcattcagagactggtataactcctttaatggtttttgctatgaagggtcagcttggggacgtctgtatgcttttatcttttggtgtggattgttcagcacaggatcatgatggaaaatccgcattagattgggcacaacaagagaatcaacaagaggtctgtgaagtaataaagaaacatatggagtgtagttcagaaaaatcaactgaagataacgagctgcttaacaagtacttggcatctattaatccagagcacattgatactctgctaattgaacggctgcttcgaaaaatttgtgtggattccaatgaaggagccatcttggtattccttcctggctgggaagatatcagtcaaacacgtgaaagattatttgcttctccattctttcaggattcatcaagatttcttgtgttgtctcttcattctatgatcccgtcctcagagcagaaaaaggttttcaaacgtccaccagtgggggttcgtaaaattattctctcaactaatattgcagagactgctgtgacaattgatgatgttgtgtttgtcatagatagtgggagaatgaaagagaaaagttatgatccatacaataatgtgtccacacttcatgcttcttgggtttcaaaagccagtgcaagacaacgcgaagggcgtgctggccgatgtcagccaggaacttgctatcatctttactcaaggtttagagcttcatccttgccagactaccaaattcctgaaataaaaagaatgcccattgaggaactttgtttgcaggtcaaactgcttgattcaaactgcagaatagcagactttctgaagaaaaccttggaccctccaattccagaaactgtaagaaatgctattgctgtgcttcaggatcttggtgctttaacacaagacgaacaactaacagaattaggagaaaagctgggttccctgccagtccatccatccaccaccaagatgctcctgtttgctatattaatgaactgcctggatccagcattgacattggcatgtgcagctgattatagagatccatttgtccttccagtagcgcctgatgagaggaaaagggcagctgcagcgaaagttgagcttgcttcgttgtatggtgggttcagcgaccaacttgctgttgtcgcggcatttgacttctggaggcatgccaaagatagaggccaagattctcaattttgtgcgaagtactttgtctcttcaaacatcatgaatatgctatcaagcatgaggaaacaacttcagaatgaactgtctcaaagagggtttgtccctgcagatgcatctgcctgcagcttaaactctaaagatccaggtactcaggtctctatgaaaatggattttttcctttaa

SEQ ID NO: 151592 - DNA, 1754 bp, Zea Mays
ccgtttccaaaatgcaaaactcgactccacgcgtcgcccttcttctccggagagatcgtttaaatagccccgtaccaaatccaattcgtctctcctcaccggagaacagaaacgatacggttaatagatagcgaagaagggcagcaccaccagtagcagcagccatgcccgctcgcgctcgatggcgactcctcgcgctgccgctcgcgctcttactcgttgccgggtcggcgcatggcctcgtgaagccggaggcagccgcggcgcccaagccccccgtccccaaggccatatcggacctgagggacgcgatcgtgaaggggctgggattccaggccgaggggctcaaggtgtccgggttcgacgtgcgagacgcgctcgtggggcacgcggtggcgtacgagttcgacatcgaggtcggcaggaaggtcctaccggtgcgcctgctggaggacgtcagccggtgggacttcgtcgacctccccatcttccgttcccaggccgacgctgacgatacggcgctcgccgagatccggcggaccgggacggggagcatcgttgagcctaccctgccgcccttccagctcgccgggcccatggagctctggatccagaacggcgacgacgtcaggcttgccttgccgcatgatgtggacgctggtaccttgaagaaggttgttctttctgatggtgcagtcgtaacagtgaagggtgctagagctgtgagcctccggttgccgcttgaattaccacttcctctcaaccgtaccacttacaagggtcgcctctcaagcctgatatccatcgcacaagccctgcgtggtgcagcccggtctaatcagaaacccctgctctctcttcgcgttgagggtccagtttccttgtcctcgactccttccatgtctcccaaggacaagctcaagctcaaacggttggccccaggccaagtggagctctcctcacaggcgggggcaatccctgctatcaccgaagacgaggatgaaccacataaccctggattgtggcctcttttgtctctgaatggttcagatggcagcctgcaggggtttgaggagctattggcctcagtacttggaaagaaggcaggcgagaagggtaccttcaagctactgaaggcacgggcctcggctcaaacctatgtcaagatggcattcacggtggagaagaagcttgctgaaggggatgtgaactggtcaaatattccagaatggaagacgaagcccaagaggatgagagcgcactatgaagtccttgctcgagtggaggagggtcaggcgatccctgagaggatagcgcaggtacagcctttccaggccaacgaggccatgtcggagagtgtgctcaccggcaacgtcacgaggtcgaagatggaaatcgtccatccaccgccggtttacttcactctctgagtgagggaagaactggatgctgtttgatgttctcttcagagctactacacgttgggtggtgggtagtttacgctggctcgtaggcaacaaagttgtacaagcggcaagagtttgttgcctatacactgactgcgttgacatgaatattgacgttctatgtgtactgaaaggctggcaagcctttaatattatcaattggaataatgaggaataagaaaattctgtacatctttagagggccaaagggctgagttcttagtactgagaaattgggtagccttgtccctgtctatatttatatcaactggaacttgttgagtcgtg

SEQ ID NO: 151593 - DNA, 1613 bp, Zea Mays
ctccactctacctaccgccccacgctccagtgctcgcccgccctccagaccgcacgcacgcacggcacgagctcgccgcgatgtcatggttcgctcgctccatcgctgccacactttcatctgcccactctgacgacgatgaatccgagcccgcctccggcgacaacagcccgccgcgcgcctccgaccccaccagcgccgagaccggagagactgaagaggaggaggaggagacagccgccgccgcggaggtgcctcagtccccacggatcgacgggatccggagtgacctggcggagatcgggggcagggtgaagaccggcatctcgatgctgtcgaacgccggcgcggtggcggagatctccaggttcgcgtcatcgttcctgccattcggtcccggggatcagggggaggaggaagagggcgaggcggtcggtgtgaccgaggaggtagtggtgttcgtcggtaacatctcaaagcatccgaagacatggctcgatttccccttgtttgttgatgaccgacacgcagatgattttgaactatcagatgaacagtatggacatgcagttgctatagagcggcttgtaccaagcctatcatacctcaggactgagctttgctctaccaatatgagtgaagcgtgcttctggaagatatattttgtgcttctccattcgaaactcagcaagcaagatgctgaaattctttcaacaccacaaatcctggaagcaagagaaggactactgcaaagttcaccgacaaagcacaagctgttatcagaaagcaggaatactacagaacctgaagagagtgagttgtcaccggcaagcatccaaaacaagcatggagtatctgaagcgccgtcattccaagaactaacttctgaccctgtgcctaatgttgaggctgacaagcatcctatctcaagtactgaggcagaaatagttgacaagtctgtaattcaagaagagttggtgatgaaaactgaggccaagagtttacccactgaggaatctaaccctgaccctgcggatgatgatgatgaaaaagaagtagatgattggctacaggatgtcgactctgtgcccagcaaaactggcaacaatactgcagttggggaggaggaagatgtatccttcagtgatctagaggatgactgaggggctgttattgagccaaccagctatcagtttactgttagacggtagcttcatgaagtgaagaacacttgctctgtggctttaccacttcactgcctggttcttccgattgcagtagcagaatcacgtaacaatgtccctcggtgtgtcccaattccatgttgtatctaagcagtcaccgttttctctgtacataaagttccagatgcggctgtgcattcatgctatatcgttgtccttacgagctgctttttgaaacacgagattctgaatgtaatatattagaatcatctataagctgtcggatatcatgtatctcttacatgttgatatcttcagagttccattttttttcagggaacatgatacatcatcatacatgtaatctcaaggatgaactctgcatgctaaagcttatgaggcgttgagcaggatctgttgcactcacgc

SEQ ID NO: 151594 - DNA, 1836 bp, Zea Mays
atttgcatccgtgccgaacacgcactgatcctcgtctccatccccacctccgcggcttagccactcgccacacttgccgttctccgctactattctactccactctacctaccgccccacgctccagtgctcgcccgccctccagaccgcacgcacgcacggcacgagctcgccgcgatgtcatggttcgctcgctccatcgctgccacactttcatctgcccactctgacgacgatgaatccgagcccgcctccggcgacaacagcccgccgcgcgcctccgaccccaccagcgccgagaccggtgagtccgatgagcagccggacaccccgagccgcggcgttaagggcgacatctcggagctgaccgagtccctcacccgccggttctggggcgttgcctccttcctcgcgccaccgccaactgaaggagagactgaagaggaggaggaggagacagccgccgccgcggaggtgcctcagtccccacggatcgacgggatccggagtgacctggcggagatcgggggcagggtgaagaccggcatctcgatgctgtcgaacgccggcgcggtggcggagatctccaggttcgcgtcatcgttcctgccattcggtcccggggatcagggggaggaggaagagggcgaggcggtcggtgtgaccgaggaggtagtggtgttcgtcggtaacatctcaaagcatccgaagacatggctcgatttccccttgtttgttgatgaccgacacgcagatgattttgaactatcagatgaacagtatggacatgcagttgctatagagcggcttgtaccaagcctatcatacctcaggactgagctttgctctaccaatatgagtgaagcgtgcttctggaagatatattttgtgcttctccattcgaaactcagcaagcaagatgctgaaattctttcaacaccacaaatcctggaagcaagagaaggactactgcaaagttcaccgacaaagcacaagctgttatcagaaagcaggaatactacagaacctgaagagagtgagttgtcaccggcaagcatccaaaacaagcatggagtatctgaagcgccgtcattccaagaactaacttctgaccctgtgcctaatgttgaggctgacaagcatcctatctcaagtactgaggcagaaatagttgacaagtctgtaattcaagaagagttggtgatgaaaactgaggccaagagtttacccactgaggaatctaaccctgaccctgcggatgatgatgatgaaaaagaagtagatgattggctacaggatgtcgactctgtgcccagcaaaactggcaacaatactgcagttggggaggaggaagatgtatccttcagtgatctagaggatgactgaggggctgttattgagccaaccagctatcagtttactgttagacggtagcttcatgaagtgaagaacacttgctctgtggctttaccacttcactgcctggttcttccgattgcagtagcagaatcacgtaacaatgtccctcggtgtgtcccaattccatgttgtatctaagcagtcaccgttttctctgtacataaagttccagatgcggctgtgcattcatgctatatcgttgtccttacgagctgctttttgaaacacgagattctgaatgtaatatattagaatcatctataagctgtcggatatcatgtatctcttacatgttgatatcttcagagttccattttttttcagggaacatgatacatcatcatacatgtaatctcaaggatgaactctgcatgctaaagcttatgaggcgttgagcaggatctgttgcactcacgc

SEQ ID NO: 151595 - DNA, 2608 bp, Zea Mays
aacggtcggatactgaagtactgaacggttcgagtttggaacacttcattccgccccgtccccaatctctccatctccggctctccaccttccacaaatccccaaatcgccacatcaaatcgaatccacccaccacggaccacgcattcgccatggagtttcccaagcgagggcgagcttttctccaaggttccctgcgaaggagccccaaggcgacgatacctggagctgccacgggggccgacgagaacgcaagctctaagcatctcgtgccggtgggggccgcgtcgccgaagaggaagaaggtgctcggggagaggaacgacagcggcgtcgggggcatggagggcgccgcgtcggcaccagtgcagcagccaaagctcgcgttgagccccccgacacccgcgagccgcggcgcggggccgtacgacccgaagacgaactacaccacgccgcggccggcgttcctgcgctacgaccccgaacggcgtcgcgagatcctcctccgggtgtcgcgtgcggcagaggtgatggacgacgactgctctagcaccacatccggcactgcggcctcggaggaggacggtggctcgtccttggcctcggacgcggcggcaggctcccttatctcgtcgccgccaaggagcgactccgaggccgagcttgatgacagcgaggaggaagaggaagtagtcccagctcgtcgaggccggtgggccaggcggttgcttctgttgctcgtctgtgtgtcctgctcgttctgctacatgtattgcgccaaaccctctggctttcctacttattcagaagacgcacttgatttggatagaggtattgggggcatgtacgatgcctatgatcatgaattagactcactgagattgttagggccagttcatatgatgggtccagaggatgtgctggaagaaattacaaatcaacttgtgcacgaggactctaaaagtgtggaccatctgtatggcaacagagctcctagaaatctggtggcagttgctatggtagggctagctgatatctgcctcaatgtttcttcaggagaatttacatgccaaattgggggtgaaaaaggtgagaatgtgcctgatttgaaggaagattctgaaatggacaaactcgatacagaactgacaatctcctttcagaatgacaagcaaagcagtgaagttgattgcctgggtggaaacgccccactggattccattggttccacttctactcacactgataacttggagggcagtttggaatcattccatctagaggaatgggatgattactcaaatcaatctgaactgcagttagtctccatggagagggctataaaatcagcaagttacaagctgaaagacagaacgggtttggaaagtgaggagttggatctatggcagtatgagaatacagcagaagctgctaaaacaatatgctctactgtaaaatttctgtggtctgcaatggaacctcacttgctgcaggtattggcatgcttgtcttttgcaggtttggtggctgcattatataggtattatcaaagatcaagagagtgctgcaactgcatcataacctatgactcacttgctgaacaaccattgttagttcaacatcaagttgcgcagctgtcagtgacttcagttcgagatgcacagctacctgttcactcttcggagcaacctatacaattggcaattcctaaccaaggcacggctggtagtttggaggttcctatggagttgacattgcccaagctggacccattggtcagtcttgaggatcctgcacaagagtcattgcccatgacagacccactggtcaccgtcaagattcctgtgattggtcgtgggatccatgatcagaaacttaaacgtggggattctgagaacattaaggcttcaaatggtatgtttctgaaccatagtgacgttgacagctccaagccaccagtggttgaactacttggagagttcgtgcttgcaagtagctcaagagaaagatctaccaagaaattgtatcagaatgctggagatgctacagataagaaattgttgaaacctttgaaaaaggatgaggatgttgaaaagatgcagatgcattcaagcatcatccaaagccctagtgttggaagagccaaaaaagagcaggagaaatctataaaccgggagaagaccgatgcgacgccaactccactgagacgctcaagccgcctccgcaacaaggtgacttctccctgaccaaaatccaaggtgctcagctcgtcgttcgctaacctttggatgctgggttcctctgtggtgtggtggaaagctgtggacgggacagcacctagttgttacccaagctttgatattgtactttaggagcagaacaatgttttaccagaatatatgctgcgtatttgtcccctcttaatatcctcctcatgtgcatgaatttctcgtaatggtggctacacttaagctttccggctagagatgtctgcaacgaacacatatgtggcctcttagtttattttagtcctacattggtggcgtacattattctgtctcgttttagtaactgatttgttttacatgtcataccagtgataccaccg

SEQ ID NO: 151596 - DNA, 2605 bp, Zea Mays
aacggtcggatactgaagtactgaacggttcgagtttggaacacttcattccgccccgtccccaatctctccatctccggctctccaccttccacaaatccccaaatcgccacatcaaatcgaatccacccaccacggaccacgcattcgccatggagtttcccaagcgagggcgagcttttctccaaggttccctgcgaaggagccccaaggcgacgatacctggagctgccacgggggccgacgagaacgcaagctctaagcatctcgtgccggtgggggccgcgtcgccgaagaggaagaaggtgctcggggagaggaacgacagcggcgtcgggggcatggagggcgccgcgtcggcaccagtgcagcagccaaagctcgcgttgagccccccgacacccgcgagccgcggcgcggggccgtacgacccgaagacgaactacaccacgccgcggccggcgttcctgcgctacgaccccgaacggcgtcgcgagatcctcctccgggtgtcgcgtgcggcagaggtgatggacgacgactgctctagcaccacatccggcactgcggcctcggaggaggacggtggctcgtccttggcctcggacgcggcggcaggctcccttatctcgtcgccgccaaggagcgactccgaggccgagcttgatgacagcgaggaggaagaggaagtagtcccagctcgtcgaggccggtgggccaggcggttgcttctgttgctcgtctgtgtgtcctgctcgttctgctacatgtattgcgccaaaccctctggctttcctacttattcagaagacgcacttgatttggatagaggtattgggggcatgtacgatgcctatgatcatgaattagactcactgagattgttagggccagttcatatgatgggtccagaggatgtgctggaagaaattacaaatcaacttgtgcacgaggactctaaaagtgtggaccatctgtatggcaacagagctcctagaaatctggtggcagttgctatggtagggctagctgatatctgcctcaatgtttcttcaggagaatttacatgccaaattgggggtgaaaaaggtgagaatgtgcctgatttgaaggaagattctgaaatggacaaactcgatacagaactgacaatctcctttcagaatgacaagcaaagcagtgaagttgattgcctgggtggaaacgccccactggattccattggttccacttctactcacactgataacttggagggcagtttggaatcattccatctagaggaatgggatgattactcaaatcaatctgaactgcagttagtctccatggagagggctataaaatcagcaagttacaagctgaaagacagaacgggtttggaaagtgaggagttggatctatggcagtatgagaatacagcagaagctgctaaaacaatatgctctactgtaaaatttctgtggtctgcaatggaacctcacttgctgcaggtattggcatgcttgtcttttgcaggtttggtggctgcattatataggtattatcaaagatcaagagagtgctgcaactgcatcataacctatgactcacttgctgaacaaccattgttagttcaacatcaagttgcgcagctgtcagtgacttcagttcgagatgcacagctacctgttcactcttcggagcaacctatacaattggcaattcctaaccaaggcacggctggtagtttggaggttcctatggagttgacattgcccaagctggacccattggtcagtcttgaggatcctgcacaagagtcattgcccatgacagacccactggtcaccgtcaagattcctgtgattggtcgtgggatccatgatcagaaacttaaacgtggggattctgagaacattaaggcttcaaatggtatgtttctgaaccatagtgacgttgacagctccaagccaccagtggttgaactacttggagagttcgtgcttgcaagtagctcaagagaaagatctaccaagaaattgtatcagaatgctggagatgctacagataagaaattgttgaaacctttgaaaaaggatgaggatgttgaaaagatgcagatgcattcaagcatcatccaaagccctagtgttggaagagccaaaaaagaggagaaatctataaaccgggagaagaccgatgcgacgccaactccactgagacgctcaagccgcctccgcaacaaggtgacttctccctgaccaaaatccaaggtgctcagctcgtcgttcgctaacctttggatgctgggttcctctgtggtgtggtggaaagctgtggacgggacagcacctagttgttacccaagctttgatattgtactttaggagcagaacaatgttttaccagaatatatgctgcgtatttgtcccctcttaatatcctcctcatgtgcatgaatttctcgtaatggtggctacacttaagctttccggctagagatgtctgcaacgaacacatatgtggcctcttagtttattttagtcctacattggtggcgtacattattctgtctcgttttagtaactgatttgttttacatgtcataccagtgataccaccg

SEQ ID NO: 151597 - DNA, 422 bp, Zea Mays
catctccgtgaaccgcccaagcgaaatgcccgctgccatctgcgaaacgcccgccgcgattcgcccgccagccatgcggtgaagatgtcggggcgcggcaagggcgggaagggcctgggcaagggcggcgcgctgcgccaccggaaggtgctccgcgataacatccaggggatcacgaatccggcaatccagcggctggcgcgcaggggcggcgtgaagcgcatctccgggctcatctacgaggagacccgcggcgtcctcaagatcttcctggagcaaggctgttggtttaggggttcttcgcgcgcgcatccggccaggcctccaaggtcggtggccatggctcagtgtcgccatcacctcctcctcatggttattgctgctccggtaagaccttactttcttcttgattgtttcctctt

SEQ ID NO: 151598 - DNA, 112 bp, Zea Mays
actaactatgaggaatgagttggtgattaatcaactcatccaatccaaaaaaaagaggagtgaaaagatgacggactatctaattactcaaattaaatatcctaagaggtta

SEQ ID NO: 151599 - DNA, 575 bp, Zea Mays
atgtctttagttgttgatgtgagaattcgtttgaatgatttgagaagtgaaggttgggatccattgtttgaagaagtcaaagctttttgtgtggaagctagtattgatataccagatatggatggtccaataccaagatttggtcagtcaagaagaggaggaagaaataatatcactcaagatcatttttatcgtgttgatatcttctatgctgctattgactctcttatatcatagttggatcatcgattcaatgaggtatatttgatgtgaataagcttgctagtcttatggagatatatttggaggatttctcttttgatgatcgcaagttaatcaaagatcggttactgacatttattgttcatgtgcgaagagttgatgaattcaaagcttgtcatgatcttgcaagcctagcaaaaacaatggttcaaattggcagggatattgtatttcctttggtctatcggctcattgagttagcattgttactcccagtagcaacgaccacagttgaaagggctttttctgccatgaaaattatcaaaactgagttgcgcaacaaaatgagtgat

SEQ ID NO: 151600 - DNA, 522 bp, Zea Mays
atgaaaatagtagtactagaaatactaatagttggaacaaaagcagacttgggctattatggctggcgtgtaagcttcaggggactcttgaaacttggcctctgccacaaacttcccatagtggatccttctggagagtgcctgcaagcaggttgtgtcacaaagagcactggatccagcattaccatcacttccttctttcaccaatcttggaagaagttcatcaaaatacattttccaaatctctttgttgatattgatagaatcagcaatgggatgcaaaacccttgggtattgcataggtggcaaccggggctcaggcagatccttggaaaagaaagggtgctcatctgggctcttgtatctcccaacctgtgcatggagcttttcagtttctctaactatatattcaaccaaagatcctccaaaaccatccatgtggaaagcattgctatcatatgtatcagcattgtaacaaaactgtgctctctccaaaaggccaaatatgatgctgtcttctag

SEQ ID NO: 151601 - DNA, 132 bp, Zea Mays
ttctaacatatgttgtatcggaagtttccttttctatttttctttttttttattctagccccaacctttccgatattgtttacaaagtttcaaattttgttgaattttacccaaggcattcctatcaccaca

SEQ ID NO: 151602 - DNA, 1520 bp, Zea Mays
aaggaatccggcggttaccgatcgagactagttccaaccaggagttggaaacgaaacctccacccaggaacccctgctcgagccggcggaggcggcggccggagcagattaacagagcttttcgagcttgcaaggaggattcaacatgcggaggaagctgctgcagttcccgtccctcgtcgcgcagcacgccctccgcggggccccaacacccagattccaaccccagccccaccaccaccgcttcctgcactccccctccgcgcccacatccgcatccccttcctcctccccgtcggcccacctcatatggaatcgcctctccggctctaccgggatctctcccttaccgaggaccgccgcggacgtcgcagcggccgcgcggaccgccgcgtcccggtggttggccaccgcgcgcggcgcccgctctctcgatctcttctcgctgccgcggtggcgcagggcctcggggcggcagttctcgccttcccctttcctccaaggcgcgacctgggcgtcctggatggagtccgccgacggggcggtgtggatgctcatcggtgcgaatgttgctgtcttcctgctgtggcgtgtggccgatccagggttcatgaggaagcatttcatgatttcactggacaatttcaagagtggacggttgcacaccttgctcacgagtgctttcagccatgcagagtttaatcacctctttgccaatatgtttggcctcttcttctttgggagcagtattacgaatgtgtttggtcctgcctttctattgaagttgtatgttggtggagcacttactggatcagtattcttcttgctggagaaggcttttctagcctatcggaaacaggattatgtaggatgggatacttcaagagctgctgaacttggtgcaagtgctgcagttaatgcaactatgcttcttcaaatttttctgtatcccaagggactagtgtatatttactttgtcattcctgttccagctgcacttatgggcgcaggtttgattggtgctgatttagtgaggttgaagaggcatggcgatgtatcaggttcagctcctttagggggcgccctggctgctgctcttgtgtgggctcgaattaggaaaggctggatctgatcttctaatgtcatatatgtggatggaaagtgcaaaggcaattgggtttctgctcctggatctgcagtcaccttctggcttattgggttgaaatttgcaattgttatcagataatttgcttagaattgagaggataccttataaaacatactctatccctgcattcttttttatttgtcgtggtttagtttaaaaacaaactagcggacgataaatatttgagagcagaggtagtactactttctgttctcgtgggctctgggctgggcttctggaggatattgtcaactctgtcagctgaaatttttagagtccagtgagcttttctggcaaagctgttacaaaaaaccatttggcaaaatgacttctacactgttttttttaaaca

SEQ ID NO: 151603 - DNA, 3797 bp, Zea Mays
gaacgactagcgaggggagaccgagagagcagaggcgctcagcacggagcgaggcgccgcgccgtttccttttctgctccactgcaaccggagtccggagcatagcaacctcgctgggctcccatatagcgggcccgcggagccgggatatactccagggaagtcgagcaaggagagcgtggattgtggactacaggggtaaagatcgagtgagcatcgcttcaccatgcgcccttctctctgctgcgcacctctttttcttctgctactattacatttggcatttgctagacctctctttcctctaccgagtaagacaaagaatgaagagaagaagcccatacagacgtttcggccatataacattgctcatcgtggatcaaatggggaaattcccgaggaaacagctgctgcatacatgagagctattgaagaaggggcggattttatagagtctgacatccttgctagcaaagatggggccttgatttgttttcatgatgtaacacttgatgatacaactgatgttgccaagcgtaaggaatttgccaatcgaagaagaacctatgaagtggagtggtttaatgttactggatggtttgtagtggacttcacactggaggaacttaaaacacttagagtgaagcagagatactcgtttagagatcaacaatacaatggtatgttttcaatcatcacgtttgaagaattcatttcaattgccctagatgcagacagaactgtcggcatatatcccgagattaaagatccagtttttatcaacaagcatgtcaagtgggctgatgggaagaagtttgaggacaaatttgtggataccttgcttaaatatggatacaaaggtcaatatatgtcagagaattggctgaagcagccattgtttatacaatcctttgctcccacctccattgtacatgtatcagattttattgactctcccaaggtatttttgattgatgatatcagtgtgagaacacaagacacgaaccagtcatactgggaaattacttcagatgactaccttgcatacattagtaaatatgtcgttggccttggtccatggaaggacactattgttccagcttcaggaaactacttgatgccacctagtgatcttgtcgcacgggcacatgctcataatctccaggtacatccatacacgtacaggaacgagaaccagttcctgcacttcaacttttttcaagatccctacaatgaatacgacttctggataaacactgtgggggttgatggactgtttacagatttcaccggaacccttcacaggtaccaagaattgacatccccacaccggaaggatgagactgcaaatagcctcctagtaaaaattagccaaatgatctcagcatatgaaggtctctgatcagcacgacgttgctgaaaattgtttgtgcttttgttaatcgatctgcaagagcacacgatccattcatcacggacggtgcaacgtgacactgtgactttgcaaggttaaataaacgagttgtttctggttgggacttgttagcacgagccgtactctccattaaagctcttaaaccctgtgagaaatttctagtgtgggaataattgttttcacgatagaaaccgtatcatggtttagcgtgccaggatggacgagttggtctcgggtctttgcacagttggcctacaattgtacttgccggagtgttgaaatttctagtgtgggaataattgttttcacgatagataaacgctcttgtcactcttatcctcttttatgctgcttaagtaacacgctgtttgttggttcatcagtcactgcctaccagggccaggtgcccaacatgccaattgccatagcacgtttgtttaagtttgactctaacagactggagacagtaatgaaggattctcagacgaattttggaggaatatgattccagccttttgacgacatataagaaggatcaaaatgcccaagaaatggattgaatatgattccagcgttttgagttttgacgatgtataaaaggattaaaatgtccaagagataggtgaattaagatttatataaggggcgtccgactgcgcgtggtcaacggctgcactattgtcggacgttacaagtcgatggatgcccggagtcggacgtgaaggcaacactactatgagaagctaaggaccttagaccctggtcgagaagccaaacagcaggatgaactcactgtgtatacatatgacatttctgaaatggcaatggcaagacttgaagaggaatttgtttatcttcttacacattacaaacaggaggttctctcttttcgctctacagaggatggtagtgtggaagacttttcaagcaggagcagctcatttaatgaggaacaattggaagggaaggcaacaccaaataatatcagtggaggaccagaatattttgtgcctgatttaattcaacctggtgcactctctgctgtcaagttcattgctaaattcatgttcctgtatggctatgataaggagtgttgccaggcttatataaactcaagacagagtgcaacagatgagtactttgggtctcttggtctggaaaacctcagtatagaggagcttatgaacacaagttggaacagaatgaattcattaataaagagatggaactgggcaattatggtttttcttcgggtgtaccttgtaagtgagaaacgctttagcaaacatgtctttggtgaactttcagtttcaactgcagacttgtgcttctctgagatttcatttaactcagttatacaacttctgagcttttatgtatctgtagcaattggtcccccaaaaacagaaaaagctttttagattgcttgatatgtatgaagtccttgctgatcttctccctgaagctgaatccttgtttgaatcaggatacaatgatatgatcctgaatgagtaccatgaagcactactgcaactgggagaatctgcaaggaagacatttgcagaattcaagtatgccatccaatcatacacttcatccagtgcagtagctcgtggagaagtgcatccacttacaaagtatgttatgaactacataaaggctctcacagcatacaacaaaactctcgattcacttctcaaggacacggatcgaagatgcctggtttctgacattcagctgatggcaaacccatatcctaatttcaccgcaacagctttcaatctacaatctgttactgcagttctggaggcaaatcttgaagctgggtctagactgtacagagatgatcgattgcagtacatcttcatgatgaacaacatccactacatggttcagaaagtgaagaactcggatctcaaaagctttcttggcgatgaatggatccggatccataacaggaaacttcagcagcaagctacgagatatgagagggcgtcatggaataatgttctcttacctcagtgatgatggcctgtgtgctgctggtgatgctgcttctcgcaaaaccatcagggaggagataaaaaatttcaatctgtcctttgaagaggtttaccaagttcagacagcatggtctgtcccagatgaccaacttcgcgatgatgtccggatttcaatatcactgaaagttatacaggcctacaggacgttcgtgggaagatattcaggcttgcttgatagcacaaagcatcgttacatgaagtacaggccagaggatttggagacacttttaatagatctttttgaaggaactcaaaggacactgcagcattctgccaaactagcatgatttttgcctttt

SEQ ID NO: 151604 - DNA, 2109 bp, Zea Mays
gaacgactagcgaggggagaccgagagagcagaggcgctcagcacggagcgaggcgccgcgccgtttccttttctgctccactgcaaccggagtccggagcatagcaacctcgctgggctcccatatagcgggcccgcggagccgggatatactccagggaagtcgagcaaggagagcgtggattgtggactacaggggtaaagatcgagtgagcatcgcttcaccatgcgcccttctctctgctgcgcacctctttttcttctgctactattacatttggcatttgctagacctctctttcctctaccgagtaagacaaagaatgaagagaagaagcccatacagacgtttcggccatataacattgctcatcgtggatcaaatggggaaattcccgaggaaacagctgctgcatacatgagagctattgaagaaggggcggattttatagagtctgacatccttgctagcaaagatggggccttgatttgttttcatgatgtaacacttgatgatacaactgatgttgccaagcgtaaggaatttgccaatcgaagaagaacctatgaagtggagtggtttaatgttactggatggtttgtagtggacttcacactggaggaacttaaaacacttagagtgaagcagagatactcgtttagagatcaacaatacaatggtatgttttcaatcatcacgtttgaagaattcatttcaattgccctagatgcagacagaactgtcggcatatatcccgagattaaagatccagtttttatcaacaagcatgtcaagtgggctgatgggaagaagtttgaggacaaatttgtggataccttgcttaaatatggatacaaaggtcaatatatgtcagagaattggctgaagcagccattgtttatacaatcctttgctcccacctccattgtacatgtatcagattttattgactctcccaaggtatttttgattgatgatatcagtgtgagaacacaagacacgaaccagtcatactgggaaattacttcagatgactaccttgcatacattagtaaatatgtcgttggccttggtccatggaaggacactattgttccagcttcaggaaactacttgatgccacctagtgatcttgtcgcacgggcacatgctcataatctccaggtatgacatttgtttgtattcattgtaattatctaaagttcagattttacgtggaattattgtaaaatattctatgctaactggaccagctttcatatgttaactgccatcttctatgttttttttttgtctaaatgcatctggtcacttaggataaccagaaggatcctacaaaacatcatagctctcttgtagttttggtctcacgtgcataagtgtattgactaaaaatatggccaatcacattgacactcacatctctctactttcttttgggaaggctacttacagctgtgtcctgatcctcaccgtgtcatatgtgttgaactgggaggactgccttccttccttcaaaaaatggataagagctccctaataacaagtggtctgcttcagtaaaactttggttgaatctcaaactggctcattaagcttgtgtttagctatgcattatggtgcaaactgtctgctgcaaaacgagcatgtggatcaaattgtcacactgctacatgccactttttttttctacgcttgtttcatcgaagcatgttaaactgcatcctgttgttgtgcaggtacatccatacacgtacaggaacgagaaccagttcctgcacttcaacttttttcaagatccctacaatgaatacgacttctggataaacactgtgggggttgatggactgtttacagatttcaccggaacccttcacaggtaccaagaattgacatccccacaccggaaggatgagactgcaaatagcctcctagtaaaaattagccaaatgatctcagcatatgaaggtctctgatcagcacgacgttgctgaaaattgtttgtgcttttgttaatcgatctgcaagagcacacgatccattcatcacggacggtgcaacgtgacactgtgactttgcaaggttaaataaacgagttgtttctggtt

SEQ ID NO: 151605 - DNA, 106 bp, Zea Mays
ctatggcactcaactagtaaaccgatgccattgcggacccaggggccacaacacaccaacactcatcacaaagaagcaaatcagtcataacacaaagacaaacaac

SEQ ID NO: 151606 - DNA, 104 bp, Zea Mays
gcgcgacatcgtatatttgataggagaaaaattaaaattgtggctagtactttaacgaatcatgcatttgtttggtggaacaatatgtatgactatgacaaacc

SEQ ID NO: 151607 - DNA, 1279 bp, Zea Mays
gaacggcaccgccgcggtgctcgtggacgccgccccggccggctgctgcacccccgcctcgccggcctcagcgtccatctccgaccaggacgagagcactgcagcacagcagggcggcgggtccgcacacgcgatggcgcgaagacgacggggtttccttccctcctcgagctcgaggtcgaggaccgaccgagaggctcggacggcgcggcgccgtgcgcaggggcagggctcgtcacgggcgcgctggtacttgctcagatggtgccgtgtcagaatacgcgcacaagtcagggggcaatctgcaaaccagacatccgatgctgcgtgagtggacgagagggctccggctcacatctgctgcgcccgccgcagcaagacgcgccggaggaggccaagcaagcagctctagtcttcgtcgcgtggttccacccacccccacacgcatcacccaccgcgcgccgcctcgtgcgtgcctctcaattccgtctcgttctgcagcggctctcgccggtggcctgcagcagcagcagccatgatgatggcgtgtgccctcgccgtcgcccagccagcagcatctctcgcgccgccatccggcaagaggaccctctccggcggccgccccccgcggctgccacctcccaggctttcaggcaagctaataaggagccgcgctgtcgttgccaaggctgcgcaggacgggtcggaatcgtccgggaccgggagcatagtgaaatacgtcacgagctctttcagcaccgcggaagacattttcgccctagctggtataggctttgccgcagtagctgcattatgggcttcggtcaacctcattgagatcatcgacaagctcccggtccttcctcttctctttgaactagtcgggatattggttgcatggcttttcatctacaacaatctcctcttcaagccaaaaaggaaagaatttctagagaacatcaaaagctcaggatctcgaatcctggggcagtaacctttgtaggcgacagttgacagcaaccactctgtcatgggttctctgcaagcatgccgaatgtaattatgcaatgtaactgtatgcgagctatgggtgttaacattttttattgtataagcatcaccaattttctgtacaggttagtgtgattaaaatcgttctcctagtaccaggacttggacttgtacgagcctaataagaacatacgcccgaatccttcctgaactgaatgcttcggctattgaatttcacgttcaagggcgaagggggtattttacatct

SEQ ID NO: 151608 - DNA, 208 bp, Zea Mays
gctgagttgttgaagccagacacagtggaaggaactgatattgaaattcctgaattcaatgtgtcttgcgagccccaaaagattagcccaaaattccagaataccatgaggcattttgatgcatcggaaattcggaattcctatatgcacctgcaatttgtgtcttgatgtgatgaaaccactgcagattgaacaactcatggaccaa

SEQ ID NO: 151609 - DNA, 1528 bp, Zea Mays
agcagttgcctgtgactgtccgttctgcctgttgcttctgatggaggcggtggcgtgtgtgtaatctgaaagtttttttccccatctgtggttgagcagaggttcctcgagaccatgaaggccatacagggggcactgatagtgtcctccagcattcagatcattctgggctacagccagctgtggggtattttctccagattcttcagcccagtggggatgactccagtggttgcgctgctcggatttggcctcttcgaaagaggtttccctgtggttgggagatgcgttgagattggcctgccaatgctgatcctctttgtcgtgctgtctcagtatctgaagaacatacagataaaagaaatccccatactggaaaggttctcccttttcatctgtgtcgcgttggtatgggcgtacgctcagatcctcacttcaggtggagcctataagaacagcgccgaggtcacccagaacaactgccgcaccgacagagccaatctcatctcttctgccccatggattaagatcccctacccactgcaatggggtgcgccgaccttcaacgccggccagtcatttgggattgtgtctgctgttttggtctcgctggtagagtccacagcctcctacaaagccgctgctcgtcttgcgagtgcgactccacctccggctcacatcctcagcagaggcattgggtggcagggaatcggcatcctccttgacgggctctttggaacggggactggctccactgtctcagtggagaacgtcgggttgcttgggtcgacaaggatcgggagccgacgggtcatacagatctcagctggcttcatgatctttttctccatgctggggaaatttggagccttgttcgcttccatcccgttcaccatctttgcggccgtgtactgcgtcctgttcgggctagttgctgcggtggggctgtccttcctacagttcactaacatgaactccatgcgcaacctctttatcgtcggcgtctccatcttccttggcctgtccgtcccggaatactttttccgctacaccatggctgctcatcgtggtcctgcgcacacgaaagctggatggttcaacgactacatcaacaccatcttctcgtcgccgccgaccgtggggctgatggtggccgtgttcctggacaacacgctggaggtgaagcaagccggcatggaccgggggatgccgtggtggcagcggttccggacgttcaagggcgacagcaggaacgaggagttctaccgcctgccattcaacctcaaccgcttcttccctccggcctaaaagtcaagtcactcagactcagattgctgagcagaggcatagtgtagcttatttattgttccattcgttcatctctacttgttcgtgttgtagattattttggggaggttcagtaagtatacttactgcccaatccactaaatgtggtcgcctaccgttttttatatatttttttacatgctccgtccaaaataagtacacttttcaatttggggagtcg

SEQ ID NO: 151610 - DNA, 2322 bp, Zea Mays
aacaaaggaaaagggcttagcctcacgagacaaaagacgcccgccccggccggcgaccagtacctcgccattgctagtgctagccgccgtcgctggtgtcccctcctcccacttgcgccgcctgtccccgcgccctcgaaaccttttctcccaaaacagatttcgtcccggcgctctcctgcaaagggcggctagctgtcgccggtggatacgtttcaccttgcttgggttctgcttcttcctgcttttccaagagagggccagcagcagacgaagcgagcaaagcgcgcaggaaccgctcggtctggtgattttaaggggcgaggtcgtgttcttgggaggcggagagacacgagctctctcttcctgtcctctttcccgcggcttctctcttgtcttgctccaagagggcaaaactcgtcggggtagggaaatggcggaggtgaagccggaggagataagccatccgcccatggagcagctccaggggttcgagtactgcatcgactccaaccctccctggggcgaggcgatcatactgggcttccagcactacatactggcgctgggcacggcggtgatgatcccgacagtgttggttcccatgatgggcggcgacgatggggacagggtcagggtggtgcagacgctgctgttcgtgacggggataaacacgctgctgcagtccctcttcgggacccggctgccgacggtcatcggcggctcctacgcgttcgtcatcccgataatggccatcatccaggacccgtcgctttctgggatacccgacggtcatgagaggttcctcgagaccatgaaggccatacagggggcactgatagtgtcctccagcattcagatcattctgggctacagccagctgtggggtattttctccagattcttcagcccagtggggatgactccagtggttgcgctgctcggatttggcctcttcgaaagaggtttccctgtggtaccgctcgctttgtcccgacccccatttcgtgttcccaacgtgggtatgctgacgaggaatggcttgctcatccgattgatgtctgataattgcatcaggttgggagatgcgttgagattggcctgccaatgctgatcctctttgtcgtgctgtctcagtatctgaagaacatacagataaaagaaatccccatactggaaaggttctcccttttcatctgtgtcgcgttggtatgggcgtacgctcagatcctcacttcaggtggagcctataagaacagcgccgaggtcacccagaacaactgccgcaccgacagagccaatctcatctcttctgccccatggattaagatcccctacccactgcaatggggtgcgccgaccttcaacgccggccagtcatttgggattgtgtctgctgttttggtctcgctggtagagcctcctacaaagccgctgctcgtcttgcgagtgcgactccacctccggctcacatcctcagcagaggcattgggtggcagggaatcggcatcctccttgacgggctctttggaacggggactggctccactgtctcagtggagaacgtcgggttgcttgggtcgacaaggatcgggagccgacgggtcatacagatctcagctggcttcatgatctttttctccatgctggggaaatttggagccttgttcgcttccatcccgttcaccatctttgcggccgtgtactgcgtcctgttcgggctagttgctgcggtggggctgtccttcctacagttcactaacatgaactccatgcgcaacctctttatcgtcggcgtctccatcttccttggcctgtccgtcccggaatactttttccgctacaccatggctgctcatcgtggtcctgcgcacacgaaagctggatggttcaacgactacatcaacaccatcttctcgtcgccgccgaccgtggggctgatggtggccgtgttcctggacaacacgctggaggtgaagcaagccggcatggaccgggggatgccgtggtggcagcggttccggacgttcaagggcgacagcaggaacgaggagttctaccgcctgccattcaacctcaaccgcttcttccctccggcctaaaagtcaagtcactcagactcagattgctgagcagaggcatagtgtagcttatttattgttccattcgttcatctctacttgttcgtgttgtagattattttggggaggttcagtaagtatacttactgcccaatccactaaatgtggtcgcctaccgttttttatatatttttttacatgctccgtccaaaataagtacacttttcaatttggggagtcg

SEQ ID NO: 151611 - DNA, 2393 bp, Zea Mays
aacaaaggaaaagggcttagcctcacgagacaaaagacgcccgccccggccggcgaccagtacctcgccattgctagtgctagccgccgtcgctggtgtcccctcctcccacttgcgccgcctgtccccgcgccctcgaaaccttttctcccaaaacagatttcgtcccggcgctctcctgcaaagggcggctagctgtcgccggtggatacgtttcaccttgcttgggttctgcttcttcctgcttttccaagagagggccagcagcagacgaagcgagcaaagcgcgcaggaaccgctcggtctggtgattttaaggggcgaggtcgtgttcttgggaggcggagagacacgagctctctcttcctgtcctctttcccgcggcttctctcttgtcttgctccaagagggcaaaactcgtcggggtagggaaatggcggaggtgaagccggaggagataagccatccgcccatggagcagctccaggggttcgagtactgcatcgactccaaccctccctggggcgaggcgatcatactgggcttccagcactacatactggcgctgggcacggcggtgatgatcccgacagtgttggttcccatgatgggcggcgacgatggggacagggtcagggtggtgcagacgctgctgttcgtgacggggataaacacgctgctgcagtccctcttcgggacccggctgccgacggtcatcggcggctcctacgcgttcgtcatcccgataatggccatcatccaggacccgtcgctttctgggatacccgacggtcatgagaggttcctcgagaccatgaaggccatacagggggcactgatagtgtcctccagcattcagatcattctgggctacagccagctgtggggtattttctccagattcttcagcccagtggggatgactccagtggttgcgctgctcggatttggcctcttcgaaagaggtttccctgtggttgggagatgcgttgagattggcctgccaatgctgatcctctttgtcgtgctgtctcagtatctgaagaacatacagataaaagaaatccccatactggaaaggttctcccttttcatctgtgtcgcgttggtatgggcgtacgctcagatcctcacttcaggtggagcctataagaacagcgccgaggtcacccagaacaactgccgcaccgacagagccaatctcatctcttctgccccatggattaagatcccctacccactgcaatggggtgcgccgaccttcaacgccggccagtcatttgggattgtgtctgctgttttggtctcgctggtagagtccacagcctcctacaaagccgctgctcgtcttgcgagtgcgactccacctccggctcacatcctcagcagaggcattgggtggcagggaatcggcatcctccttgacgggctctttggaacggggactggctccactgtctcagtggagaacgtcgggttgcttgggtcgacaaggatcgggagccgacgggtcatacagatctcagctggcttcatgatctttttctccatgctgggtgagcagaacatgtccctgctgcgtgcgaagggaggaggcaggctcctgactcctctccattttattttatcggttgcagggaaatttggagccttgttcgcttccatcccgttcaccatctttgcggccgtgtactgcgtcctgttcgggctagttggttggtcatcctgtttccttcctgatgatgtgctttggtgtaatgcaatgcaatgctgcctgggctgacggcttttctctgactctcagctgcggtggggctgtccttcctacagttcactaacatgaactccatgcgcaacctctttatcgtcggcgtctccatcttccttggcctgtccgtcccggaatactttttccgctacaccatggctgctcatcgtggtcctgcgcacacgaaagctggatggttcaacgactacatcaacaccatcttctcgtcgccgccgaccgtggggctgatggtggccgtgttcctggacaacacgctggaggtgaagcaagccggcatggaccgggggatgccgtggtggcagcggttccggacgttcaagggcgacagcaggaacgaggagttctaccgcctgccattcaacctcaaccgcttcttccctccggcctaaaagtcaagtcactcagactcagattgctgagcagaggcatagtgtagcttatttattgttccattcgttcatctctacttgttcgtgttgtagattattttggggaggttcagtaagtatacttactgcccaatccactaaatgtggtcgcctaccgttttttatatatttttttacatgctccgtccaaaataagtacacttttcaatttgggg

SEQ ID NO: 151612 - DNA, 2188 bp, Zea Mays
gacaaaagacgcccgccccggccggcgaccagtacctcgccattgctagtgctagccgccgtcgctggtgtcccctcctcccacttgcgccgcctgtccccgcgccctcgaaaccttttctcccaaaacagatttcgtcccggcgctctcctgcaaagggcggctagctgtcgccggtggatacgtttcaccttgcttgggttctgcttcttcctgcttttccaagagagggccagcagcagacgaagcgagcaaagcgcgcaggaaccgctcggtctggtgattttaaggggcgaggtcgtgttcttgggaggcggagagacacgagctctctcttcctgtcctctttcccgcggcttctctcttgtcttgctccaagagggcaaaactcgtcggggtagggaaatggcggaggtgaagccggaggagataagccatccgcccatggagcagctccaggggttcgagtactgcatcgactccaaccctccctggggcgaggcgatcatactgggcttccagcactacatactggcgctgggcacggcggtgatgatcccgacagtgttggttcccatgatgggcggcgacgatggggacagggtcagggtggtgcagacgctgctgttcgtgacggggataaacacgctgctgcagtccctcttcgggacccggctgccgacggtcatcggcggctcctacgcgttcgtcatcccgataatggccatcatccaggacccgtcgctttctgggatacccgacggtcatgagaggttcctcgagaccatgaaggccatacagggggcactgatagtgtcctccagcattcagatcattctgggctacagccagctgtggggtattttctccagattcttcagcccagtggggatgactccagtggttgcgctgctcggatttggcctcttcgaaagaggtttccctgtggttgggagatgcgttgagattggcctgccaatgctgatcctctttgtcgtgctgtctcagtatctgaagaacatacagataaaagaaatccccatactggaaaggttctcccttttcatctgtgtcgcgttggtatgggcgtacgctcagatcctcacttcaggtggagcctataagaacagcgccgaggtcacccagaacaactgccgcaccgacagagccaatctcatctcttctgccccatggattaagatcccctacccactgcaatggggtgcgccgaccttcaacgccggccagtcatttgggattgtgtctgctgttttggtctcgctggtagagtccacagcctcctacaaagccgctgctcgtcttgcgagtgcgactccacctccggctcacatcctcagcagaggcattgggtggcagggaatcggcatcctccttgacgggctctttggaacggggactggctccactgtctcagtggagaacgtcgggttgcttgggtcgacaaggatcgggagccgacgggtcatacagatctcagctggcttcatgatctttttctccatgctggggaaatttggagccttgttcgcttccatcccgttcaccatctttgcggccgtgtactgcgtcctgttcgggctagttgctgcggtggggctgtccttcctacagttcactaacatgaactccatgcgcaacctctttatcgtcggcgtctccatcttccttggcctgtccgtcccggaatactttttccgctacaccatggctgctcatcgtggtcctgcgcacacgaaagctggatggttcaacgactacatcaacaccatcttctcgtcgccgccgaccgtggggctgatggtggccgtgttcctggacaacacgctggaggtgaagcaagccggcatggaccgggggatgccgtggtggcagcggttccggacgttcaagggcgacagcaggaacgaggagttctaccgcctgccattcaacctcaaccgcttcttccctccggcctaaaagtcaagtcactcagactcagattgctgagcagaggcatagtgtagcttatttattgttccattcgttcatctctacttgttcgtgttgtagattattttggggaggttcagtaagtatacttactgcccaatccactaaatgtggtcgcctaccgttttttatatatttttttacatgctccgtccaaaataagtacacttttcaa

SEQ ID NO: 151613 - DNA, 1606 bp, Zea Mays
agcagttgcctgtgactgtccgttctgcctgttgcttctgatggaggcggtggcgtgtgtgtaatctgaaagtttttttccccatctgtggttgagcagaggttcctcgagaccatgaaggccatacagggggcactgatagtgtcctccagcattcagatcattctgggctacagccagctgtggggtattttctccagattcttcagcccagtggggatgactccagtggttgcgctgctcggatttggcctcttcgaaagaggtttccctgtggttgggagatgcgttgagattggcctgccaatgctgatcctctttgtcgtgctgtctcagtatctgaagaacatacagataaaagaaatccccatactggaaaggttctcccttttcatctgtgtcgcgttggtatgggcgtacgctcagatcctcacttcaggtggagcctataagaacagcgccgaggtcacccagaacaactgccgcaccgacagagccaatctcatctcttctgccccatggattaagatcccctacccactgcaatggggtgcgccgaccttcaacgccggccagtcatttgggattgtgtctgctgttttggtctcgctggtagagtccacagcctcctacaaagccgctgctcgtcttgcgagtgcgactccacctccggctcacatcctcagcagaggcattgggtggcagggaatcggcatcctccttgacgggctctttggaacggggactggctccactgtctcagtggagaacgtcgggttgcttgggtcgacaaggatcgggagccgacgggtcatacagatctcagctggcttcatgatctttttctccatgctggggaaatttggagccttgttcgcttccatcccgttcaccatctttgcggccgtgtactgcgtcctgttcgggctagttgctgcggtggggctgtccttcctacagttcactaacatgaactccatgcgcaacctctttatcgtcggcgtctccatcttccttggcctgtccgtcccggaatactttttccgctacaccatggctgctcatcgtggtcctgcgcacacgaaagctggatgggttcgtctctgtctctttgcccccatttcaatatcctcatggctccatctccaggtcgtcaaacagtacctgagacatgacctgggctgggattgaatcatgaatggcagttcaacgactacatcaacaccatcttctcgtcgccgccgaccgtggggctgatggtggccgtgttcctggacaacacgctggaggtgaagcaagccggcatggaccgggggatgccgtggtggcagcggttccggacgttcaagggcgacagcaggaacgaggagttctaccgcctgccattcaacctcaaccgcttcttccctccggcctaaaagtcaagtcactcagactcagattgctgagcagaggcatagtgtagcttatttattgttccattcgttcatctctacttgttcgtgttgtagattattttggggaggttcagtaagtatacttactgcccaatccactaaatgtggtcgcctaccgttttttatatatttttttacatgctccgtcc

SEQ ID NO: 151614 - DNA, 1548 bp, Zea Mays
aacaaaggaaaagggcttagcctcacgagacaaaagacgcccgccccggccggcgaccagtacctcgccattgctagtgctagccgccgtcgctggtgtcccctcctcccacttgcgccgcctgtccccgcgccctcgaaaccttttctcccaaaacagatttcgtcccggcgctctcctgcaaagggcggctagctgtcgccggtggatacgtttcaccttgcttgggttctgcttcttcctgcttttccaagagagggccagcagcagacgaagcgagcaaagcgcgcaggaaccgctcggtctggtgattttaaggggcgaggtcgtgttcttgggaggcggagagacacgagctctctcttcctgtcctctttcccgcggcttctctcttgtcttgctccaagagggcaaaactcgtcggggtagggaaatggcggaggtgaagccggaggagataagccatccgcccatggagcagctccaggggttcgagtactgcatcgactccaaccctccctggggcgaggcgatcatactgggcttccagcactacatactggcgctgggcacggcggtgatgatcccgacagtgttggttcccatgatgggcggcgacgatggggacagggtcagggtggtgcagacgctgctgttcgtgacggggataaacacgctgctgcagtccctcttcgggacccggctgccgacggtcatcggcggctcctacgcgttcgtcatcccgataatggccatcatccaggacccgtcgctttctgggatacccgacggtcatgagaggttcctcgagaccatgaaggccatacagggggcactgatagtgtcctccagcattcagatcattctgggctacagccagctgtggggtattttctccagattcttcagcccagtggggatgactccagtggttgcgctgctcggatttggcctcttcgaaagaggtttccctgtggttgggagatgcgttgagattggcctgccaatgctgatcctctttgtcgtgctgtctcagtatctgaagaacatacagataaaagaaatccccatactggaaaggttctcccttttcatctgtgtcgcgttggtatgggcgtacgctcagatcctcacttcaggtggagcctataagaacagcgccgaggtcacccagaacaactgccgcaccgacagagccaatctcatctcttctgccccatggattaagatcccctacccactgcaatggggtgcgccgaccttcaacgccggccagtcatttgggattgtgtctgctgttttggtctcgctggtagaggtgaggatccatattttgttttggaatcccattcgggagcgggaccaaactgaccttaacgcaatgtgcctctcttggacagtccacagcctcctacaaagccgctgctcgtcttgcgagtgcgactccacctccggctcacatcctcagcagaggcattgggtggcagatgtgtttttatcacaagccttttgatgctagttccttggctggccaaaaaaaaaaaaaaa

SEQ ID NO: 151615 - DNA, 1443 bp, Zea Mays
cattgaccttgcaattgtgatttaacctccatttttcaactttgtgattttacccctccgtttcgaaaatgaagctaccgtttgcccgtccctctcaacgccgagtgaaaatcaggtttattgttttaaaaaataaaaatatgaaaacaaagggtgaaaggttcgaaccaccctcctattctgtaagggcgcaacaccaacaggggtaaaatcacaattacataatataatgaggggtaaaaccacaataaattgtgtgggcatttttgcatcagatttaacactgtgtgctgcacataatggtgcatgggtatgacagcttcgttttcaaaacggaggagtaaaatcacaaagttgaaaacgaggtgcaaaataacaattgcaaggtcagagagaggtataatcacaaatgccccttactttatcagtgcatctattagtatgcttgaaggattttctattctttttccagtcgttttctcttctcaagttttgtgaaagcatcatgatgaggttcctattcaggcaatatttacactaggaatgtgtctacacaccttcacattaattcctgtgttggttcttacagccagtatttacttaaaactcatcatctgttgttttctgtttttctgcagcaaaaaattaacaaattccttgcatacaaaagggccggaaagagctttaatgctgaagtgcgcaacaggaaggactatagaaatcctgactttttgcagcatgctgtgcgataccaagaaattgatcagatagggacctgtttcagtaaagatgtttttgatccttatgggtacgataaaggtgactactatgatgagatagaagctgaaatgaagcgtgaacttgagagaaaggaacaggagaagaaaaggaatccaaaagttgaatttattactggaggagtacaaactccacatagtgcatcaataccgaagatcccaggtttggcgggtgtctgtacactaccggtacctacagaaggtgtacagaaagagactaggccaaacaagaaatcaaaatgggataaggttgatgatgatgttaagaatcatgtagttcctagtggacacgacaacttatcagcaactgcttctgtggcactcctgacttcagctaatgttggtgctggatatgctgcttttgcgcaacaaaagagaaaagaagctgaagaaaagagaagcgatcataagtcagacagaagatcgtagcaccactttttttttttcattctgagcagtcagcgtatcatttagtttttcagtaacatagttttgtattgtgggtaaggaaaagaaggaaacagttaaaatcagtccgagggaaatggttccagaaaagcccctcagagcgacttgttgtcttatacaggtatcagaaacttaacgttttaggccaagaaaaagagaacagtgagcgttctgcact

SEQ ID NO: 151616 - DNA, 1725 bp, Zea Mays
atactgtacaggccaattcgttcgcagactcgccaaactgctgccccgagcggccgagcccccccccccccccccccccccgacctcgaaatcctccgtcttcctcctcgccgtgtcgggcctcgccttgcatcgtccccaaatccaacccaaactcctcaatctccgtcactggcatggcgtccgataccgagggcatcgccgccctcttctcaatgtacaacgacgacgaggaagatgaggacgccgacgagcccaaccctccgtccccagcgccgctcaccaccgtcacctcctcgtcgccgctgtcccctcaagccgggggcgaggaccctaacccttccctggcgcctccgtcgcctccccgtcccgaggagtcggccagtctcaaaaccctagtgagtccccacccttccccggcgcgggcgctgctaccgccacttccctcgcggcgctcttcgtcgcccttcgcagcgtcgcccccctctccgctacggggaccatcctccgcgccgccagccgacctgccgcgcccgccccggcgcggggcgcttgcaatcgtggactatgcgcacgacgagatggctatgtcgcccgagcaggaggatggggagatcatgagccacacatacagattcgtttcagatgctcaggctgcagaggggaatcttgaagaacgaactctctctggcacagttcatatcatgacaccaaatactccagcagaattgtctcagcatgctgatgcacctgagcagaaccaattagggacagacatggcagtggatataactagagcagaaattgaagacgcccaggtggaggaaactactgatatttcaactaatggtgaaaatgatgatccattgagtcgtttccttcctccacccgtgactacaaaatgctctgcagcattaaagcaaaaaattaacaaattccttgcatacaaaagggccggaaagagctttaatgctgaagtgcgcaacaggaaggactatagaaatcctgactttttgcagcatgctgtgcgataccaagaaattgatcagatagggacctgtttcagtaaagatgtttttgatccttatgggtacgataaaggtgactactatgatgagatagaagctgaaatgaagcgtgaacttgagagaaaggaacaggagaagaaaaggaatccaaaagttgaatttattactggaggagtacaaactccacatagtgcatcaataccgaagatcccaggtttggcgggtgtctgtacactaccggtacctacagaaggtgtacagaaagagactaggccaaacaagaaatcaaaatgggataaggttgatgatgatgttaagaatcatgtagttcctagtggacacgacaacttatcagcaactgcttctgtggcactcctgacttcagctaatgttggtgctggatatgctgcttttgcgcaacaaaagagaaaagaagctgaagaaaagagaagcgatcataagtcagacagaagatcgtagcaccactttttttttttcattctgagcagtcagcgtatcatttagtttttcagtaacatagttttgtattgtgggtaaggaaaagaaggaaacagttaaaatcagtccgagggaaatggttccagaaaagcccctcagagcgacttgttgtcttatacaggtatcagaaacttaacgttttaggccaagaaaaagagaacagtgagcgttctgcact

SEQ ID NO: 151617 - DNA, 1068 bp, Zea Mays
aataaaaatcattttcattgtcatatctattatgagcccgtgatgatatattatcacaaatgttatgctactagtacagcgtccctatgacagtgacaaatcatttgccagccacccttaatagtaacaatatgtttaacatcatgtttttagtgaaccataagtgccaaaattccactgcaaatttttttatgcagaggaaatcatggacgttggttggttgcctgcctcagcgccggcggcagcaagggagtaggaggcgaatcactgccctgccacgaccatacaatgtcacctaacgatggcttcagttcctgcctgtagaactctcggaactcgggcgagtcaccgccaatcttcctcatctccaccacgcgcaccgatggcgccacctcgaagatctctgcctcgatgacaagcgtgcctctccgacagtactgaccgccctccatctcgaccctgcccctcttgtttagcttgatgtcgagattccgcgtctcagcgatctcctccagcttggacatgatcgccgccgtggattctctggaagagaaccgtgcctctgacctgtgctcctcgtcaaacatcttggacaggtccagcccgctcgatcgggagatgatgtcaaaggcgttcatgctcgaaggcctcacggcaacggtcggtggtgaagacaccgtcaccttcgaccgcttcctcttcctggtgttctcctcgtcgtcggcgtcggcgtcggcgtcggcgtcgtcgcgctggtggtggcggcacctgcaggctttttccttgccgagcacctcggaggtctcccacaagtcgaggggcttgtcggtggtgagagggcagagtcctttctggaaccatggatttgccgtgacctttgagatggtgatcctagtcctggggttggggtctagcagcctggcgaggagcttgcgcgcctcgacagagaaccacggtgggcacttgtagttgctctgtgtgatcttccggtacaccagtatcaggttggtgtcgttgaacgggaggtagcctgccaggagcacgaagaggatcacgccacatgaccag

SEQ ID NO: 151618 - DNA, 213 bp, Zea Mays
atggcagatggatcgagacggaagaacgggcggttgatcgatggggaggaagaggtgaagaggaagcagggcggcagatcaagaggggcgctgcgcggcatgggaggagggagaggccgggaggggagaccgggagaggagcatggcagccggcatgggaggagggagaggccgggaggggagaccgggagaggagcatggcagccggtctaa

SEQ ID NO: 151619 - DNA, 339 bp, Zea Mays
atgggggcgaacctcggcgcggccgcgcacaacgtcccaccggcgcacatggagttcccaggtgctcgtggcagcgacgtccgtggattcttcgccaaggacaacgtcggagcaaccgtccatgctacgactacgaggcaaggcacgtactacggatggtgtagggtctcgtttcgtttgcatgcgcggtcgtggatcagcagcaagcatcggcacggaaactgtggccgatcaaaccatgcacaacagtgggcgtggcctcggcgctgccggtggtggacagcagccgcgactcagcgcacatgggaaaatcaaatattgtattggtgctctatataa

SEQ ID NO: 151620 - DNA, 97 bp, Zea Mays
ctccgatcacaacgcagaccctcgttcgtctctatcttcgtgcagtgtacgctcgttccctctctctccgtgttcgtcgcagatggagacacctacc

SEQ ID NO: 151621 - DNA, 1231 bp, Zea Mays
catttccccccttttcccgcaacttccgtgacgacttcaccactacatccatgccaccggcgacttcatggcctccccattcagcctctccttcccaagacaaagatggttccagggaggaagggatttaatgcacaagggaacccagcagtgatatgggctgtcatattgatagctttattgttgtggtcacatacacatttaattgaaaatgggcttgtcacaggtagaactactgatgttcttgctgttgccaacacagtggcagaattgcttcagaatcattgttgactccccctaagcatatatatttgaaagatgttagaagtggtgacctaactaagtatttcctttctcattttttggcgtctaattatgtgttcatttcattactgaagcaattcaaaatatggatgttacttaatcaattcagaaagttgctgatgcttatgattgcaaagttctggaaacacttgcaagcattatgtttctgctggaatttgctctaggtattttcctgcacaagttctatggttttgttcttagctaacactacaagtgtggatgaatctgggaagcagcatttccttgatgcatcagttgcttacaagcgtgtagtcctgaacgacatcgaataccttgctaggtttgggtactccaaggagcaggatctctggaatagtagactctccttatgcagtgtcaactcttgacatccctacaacaatatttgatcaggatgatatggagcaatggtggcagcactagttgaagatgatcagcttgtgaagtcttttacacaagttgttttccacgttttgtcgagctcaagtaaattccttcacaatgttggccttcagtatgtctccaagacaagcttagtttcatcaaaagtgcaagaactctaatctcaactagagactaagacaagaaaaacgatagactttggcgaaaatggaaaccttgaaggcgtcacaagaatttgcagccactgtagctaatcaaccaattgaggtcaaggcgtcacaagaatttgcagccactgtagctaatcaaccaattgaggtcgaagattttaagaagttgctaatagaaaataatactcggtcgaagatttaaagatagactcttaatgtttgatgaaattatatgcacaatttggattgcattcaagtgtacgttgatttttattaattggtgatgaaataaaaatgtcatagtttgtttgaca

SEQ ID NO: 151622 - DNA, 1346 bp, Zea Mays
catttccccccttttcccgcaacttccgtgacgacttcaccactacatccatgccaccggcgacttcatggcctccccattcagcctctccttcccaagacaaagatggttccagggaggaagggatttaatgcacaagggaacccagcagtgatatgggctgtcatattgatagctttattgttgtggtcacatacacatttaattgaaaatgggcttgtcacaggtagaactactgatgttcttgctgttgccaacacagtggcagaattgcttcagaatcattgttgactccccctaagcatatatatttgaaagatgttagaagtggtgacctaactaagtatttcctttctcattttttggcgtctaattatgtgttcatttcattactgaagcaattcaaaatatggatgttacttaatcaattcagaaagttgctgatgcttatgattgcaaagttctggaaacacttgcaagcattatgtttctgctggaatttgctctaggtattttcctgcacaagttctatggttttgttcttagctaacactacaagtgtggatgaatctgggaagcagcatttccttgatgcatcagttgcttacaagcgtgtagtcctgaacgacatcgaataccttgctaggtttgggtactccaaggagcaggtaggtagtagggtaactaatgattatcctctaagtaccatatatgttgaatattgccttaacgttgggggatttatataggtgtatctcttactatcatgttgtccctgtgaggcaggatctctggaatagtagactctccttatgcagtgtcaactcttgacatccctacaacaatatttgatcaggatgatatggagcaatggtggcagcactagttgaagatgatcagcttgtgaagtcttttacacaagttgttttccacgttttgtcgagctcaagtaaattccttcacaatgttggccttcagtatgtctccaagacaagcttagtttcatcaaaagtgcaagaactctaatctcaactagagactaagacaagaaaaacgatagactttggcgaaaatggaaaccttgaaggcgtcacaagaatttgcagccactgtagctaatcaaccaattgaggtcaaggcgtcacaagaatttgcagccactgtagctaatcaaccaattgaggtcgaagattttaagaagttgctaatagaaaataatactcggtcgaagatttaaagatagactcttaatgtttgatgaaattatatgcacaatttggattgcattcaagtgtacgttgatttttattaattggtgatgaaataaaaatgtcatagtttgtttg

SEQ ID NO: 151623 - DNA, 539 bp, Zea Mays
catccacctgcgacacatttccccccttttcccgcaacttccgtgacgacttcaccactacatccatgccaccggcgacttcatggcctccccattcagcctctccttcccaagacaaagatggttccagggaggaagggatttaatgcacaagggaacccagcaggtaatttcatcctaatgactctcgtcttctgtagggttcgggctggcggtgcgcaatagggttagaggctgtagggtactggctatttttctccatttttcatcttattactatcctactgggtacatatacgtgtagttgagcggattggtttagctagctgctacatgtgcatatccaatttgaatggacgcaagtttgcaagagctattatttcaggtttacactactacatttgatcctcattcatgtcattttgctcattggagtagtgcaggcgatgttaaaaggagatctcaagtcttcctttctagtcgcagacttccatctgcaattttagatttgggccttgacctactgatctgttctcaag

SEQ ID NO: 151624 - DNA, 1698 bp, Zea Mays
cacaccgcctcgacctcgagtccaccactgactccaccacctccccctgttttttttcgacctcgctctgctcatccgcacggccagacagccatggtggtggtgctcgccaacccgcctgtcgtggaccagatcccgctcctgcggtccccgggccccagggacagcttctcgtgcgtgccggtcgtcgacctgtccggccccggcgcggcgcgcgcgatcgtcgacgcctgcgagcgcttcggcttcttcaaggtcgtcaaccacggcgtgcccgcggccaccatggacgtggccgagtccgaggccgtcggcttcttcgcgcaggcgcaggccgacaaggaccgcgcgggcccccgcgcgtcgtacccgttcggctacggcagcaagcggatcggcctcaatggcgacatggggtggctcgagtacctcctcctcgccgtcgactccgcgtcgctctccgacgcctgccccgtcccatccggcgccgcgttccggagcgcgctgaacgagtacgtcgcggccgtgcgggacgtcgcggcgcgcgtgctggaggcgatggcggagggcctgggcatcgcggacgcggccgcgctcagctcgatggtgaccggcgccggcagcgaccaggtgttccgcgtcaaccactacccgccctgccccgcgctgcagggcctgggctgcaccgccaccgccacgggcttcggcgagcacaccgacccgcagatcatctccgtgctccgctccaacggcacgtccggcctgcaggtcgcgctccgcgacgccgcgcaggcgcagcagtgggtgtccgtgccctccgaccgcgacgccttcttcgttaacgtcggcgactcgttgcaggtgctgaccaacgggaggttcgagagcgtgaagcaccgggtggtgaccaacagcctcaagtccagggtttccttcatctacttcgcgggaccggcgctggagcagcggatcgcgccgctggcgcagctgctggcggagggcgaggagagcctgtacagggagttcacgtggggcgagtacaagacggccgcgtacaagacgaggctcggcgacaacaggctggcccagtttcagaggtgtagcatctaagctagctgcttagctagcactctagcagggcggcccccggccggtcaagcacacaccagctttacaggacgacaacagcaacaaccatgacgaacgaggacgagcgagtctgcttgcgagaaatgatggcgaagaagaagaagaagaacaaggtagagacgagacgatgatgatgtgtacagctggggagcgaccactctagtagctagatttttttttgtggtggtggtgggtagctgggtgcagggagcagggtttccgcaagttgctaatatggcctgttttggtgcatgcggtggggttacttgcctatttcggtaatgctggagctggacgggcaatgagccgcgcgccactagttagcgttaaccgaagtgggaggagtacttagcttagcagcgaagggccgatcgatcctctctggctcctccccagcagcttcccaagttagcttgcttctgcttcgccttcctagtttttttttggtgtgtgtgtgtgtgtttttaagcaccaagtcgcgtgtatgtattatcgtcgtgtacatggaggtttgtgtgtgcgctaatgtagacctcctgtttacctttt

SEQ ID NO: 151625 - DNA, 472 bp, Zea Mays
caccacacgtccacatactcccaaatctccctccagcgccgcagctagcccgagaagccgacgaggaggaaaccgaccgccgacgccgagcaccctcggttcctggctttcccggcgcccaatctagacagctctttctcgttcgtctgtatccatggccgccgcctcgagcaagaccatcgctgtcctcctcgccgcgctgctcctcgcgctggtcgcgtccgcggtggccagcaggaagctggaggaggaggacgctttcctgggaagcctttcgccggcgcctgcccccgccgagggcggagccgcggggctcgctagcggcacgccgggggcgtgggccgtcgccgctctgaccgtctttgttaagctgacttgtaccctgttcagcatcatgtgattaggcggataagaaccattagatcattctattagtttgaagtagaagtatgattactctttcttttttctc

SEQ ID NO: 151626 - DNA, 1868 bp, Zea Mays
gttgaccgctgttgccacagttctcaccaaggcaggggctggtgtctggggagagttgccagcaaagtgccaaaagaaaggggaatcgccatcataaaaaagcagggcgtgggcgggggacgggcatagcagagcagagctgagctgagctgcctccaactccgactccgacccacacccacggcacggcagtcggcagcagccagcgtcgagcgcagtgccctcttgtctgctgccccgcgcccagtctcactcacacgctcccacttccgagtctcgctcgcagcctgtgctcctggggtccgatcggagggggctggctgaggagatggagccagattcggcgacgacgaggctcgcattgctggcgctgcttctcctggcggcgcccgcccgcccggcctcagcggctccggtggaggatggcctgctcagcaatggtgactttgagacggcaccagccggcggttttgtaagatctgcgtctgttgctgagggtgcatcgtcaatccctggttggacaatcaatggcacagtcgagctcatttcagcaggccagcaccagggtggcatgatcctgattgttccacagggagaccatgctgtaaggctagggaatgatgctagcgttgggcaggtggtggacgtcgagaagggctcggactacgctgtcacattcagcgctgcccggacatgtgcacaactggaggcactgaacgtctccgtgctaggtggcgtgtcgcagacagtagatttacagacgttgtacaacatagaagggtgggacgcgtacgcgctggcttttcaggcgacggaagagcaggcgcatcttcagttcatgaaccctggcatggaggacgatccaacttgtggccccatcctagacaacgttgctgtcaagaagctcttcactccggacaaaccaaaggataacgtggtgctgaatggagactttgaggagggcccttggatgttcccgaacaccagctttggcgtgctgctcccaactaaccttgatgagcagacatctgccatacctggctggatgatcgagtcaaaccgcgctgtccgctacatcgattctgatcagtacaaggttccccaggggaagcgtgccattgagcttctgtcaggcaaggagggtatcatctcccagatggtcgagacgacccctgagaaggtttacagcctgacggccatgctgggcgcggcgggggactcgtgccaaccaccaatggccatcatggcgttcgccggggaccaggcccagaacttccattactcaccattgggcaacgccacgagccaggctgtgaacgtgacgttcactgcgcgtgctgagaggacacgcgtggcgttctacagcgtgtactacaacacgaggagtgacgaccacagctcgctgtgcgggccggtgatcgacgacgtccgcgtatggggcttgaacaccgcggctgggttgaaggcgagtgctggactggttcttggcattgttggcgtcgttggcatggtgctgttctgaaatctggatctctcagtggctgtagcctgtagtcttgggaagcatggatgtgtaatctcatctgttagttcgaggaggggcagggcttactggttttggtagtaagcttgaagtttgtcgagtaatatgagcttaggctaaaaaaaaaagctaccagaacccacatgttattgcctgtgttacttcatttgtgattcctgaagtaacatgcaattctatgggattgtgtggtttgtttgccctagcttgtactgtaatatgagatgttagaactgttacaagttcatctcctcacaatatgaaaatattgttattgtaaagttaaaatcgtgcattatgccgtctt

SEQ ID NO: 151627 - DNA, 717 bp, Zea Mays
gcgagagcacgcactgctggcggcgcggctaagaccgagagccgccgcgcacattgttcgcgcgaggccagccgccggttgcattgcatggcgcagcagctgccgcccaggatcccgaccgaggtgcaccactggcccgaggggggccagcacggcgcggcggcggcgtgggcggacgacttcgccgagttcgcggcggcgcggcggggcgcgcaccgcaggtcgctcagcgactcggtcgccttcgtcgaggtggcgccggccgacggcggggccggcgagttcgaccggctcgacgacgaccagctcctgtccatgttcccacccgacgaggccggcggaggcgggtcgtccgcggccgggtccgagaacggcggcagcagcgacagcgacggcgataagcgtggcgcgcgcggcggcccggcgggaggcgctccctccaccggcagtggcggcggcgagcagaacggagtcgtggatgcgcaagcgccggcggcgactggaggacaagctgccgtcgtcgcctccacggagctcatccgggaccctaagagggtgaagaggatccttgccaaccggcagtcggctcagaggtcgcgggtgaggaagctgcagtacatctccgagctcgagcgcagcgtcacaacactgcagaacgaggtgtcggtgctgtcccctcgcgtggcgtttctggaccagcagcggaccatactgagc

SEQ ID NO: 151628 - DNA, 769 bp, Zea Mays
gcgagagcacgcactgctggcggcgcggctaagaccgagagccgccgcgcacattgttcgcgcgaggccagccgccggttgcattgcatggcgcagcagctgccgcccaggatcccgaccgaggtgcaccactggcccgaggggggccagcacggcgcggcggcggcgtgggcggacgacttcgccgagttcgcggcggcgcggcggggcgcgcaccgcaggtcgctcagcgactcggtcgccttcgtcgaggtggcgccggccgacggcggggccggcgagttcgaccggctcgacgacgaccagctcctgtccatgttcccacccgacgaggccggcggaggcgggtcgtccgcggccgggtccgagaacggcggcagcagcgacagcgacggcgataagcgtggcgcgcgcggcggcccggcgggaggcgctccctccaccggcagtggcggcggcgagcagaacggagtcgtggatgcgcaagcgccggcggcgactggaggacaagctgccgtcgtcgcctccacggagctcatccgggaccctaagagggtgaagaggatccttgccaaccggcagtcggctcagaggtcgcgggtgaggaagctgcagtacatctccgagctcgagcgcagcgtcacaacactgcaggtacgtatacacgcacaattactatacataatatcgatagtacgtatatgaagcttctacgactgcattcttgctcagcgtaaataatccaattatattctaccttcagcgtaaa

SEQ ID NO: 151629 - DNA, 1237 bp, Zea Mays
gcccaccaaaccgcgccacccattgttgtcgcttctcacttctcactcaccaaccaacccaaccgagcaacttggctcgtaccgtacgtactacctgctccgacacgccgaggagctagagaggaccgcgcgcgtgctgctgacctgcgggagctaggacagacacgatacgacagataccatgtcgacgacgacgacgaaggcgagcgacccggggtccgcgtggttcggcagcggtgcacggacccggtcggcggcggggataagccacaacgcgcggctcgtcaccaccgcggtcgccgcgttcgtgtccgtgctcggcctcgccctcttcctccacctctacgtctgccacgtgcgccgccgcaaccgccgccgcgcggcggcagtgctgccgacgaccacggccgccgcggcggcggcggcggccccgaagcgcgggctggatcccgcggccgtcgcggcgctgccgaccgtcctctacagggacgcgggcggcgccgacgatggcgccgagtgcaccatctgcctcggcgccgtgcaggaaggcgagctggtgcgggcgctcccggcctgcggccacgtgttccacgtcccctgcgtcgacacctggttcgcgtccagctcgtcgtgcccggtctgccgcgccgaggtcgagccgccgccgccgccggcactgagctcatcggctctgttcgtgcaggcggagaaggtggtgcaggacgccgtcaaggaggaggccggcagctccacgccggagagggggatcggtgcctgcgcgtcgctgatgaagatgctcagcagggagaggccggcgccgcggaggccacacgccgacgccggggacttggacgacttggaacggcagcagcattctgttgccgtcaataattagcctattgttttttattagaaaaaaaaggaaagaaaggcggcctttttagtctggtcgttctccacatcatttgtatatcccgcatttgcgtgagtggtgcagtagtaagacaggtctgtgactgtgagctcttgactttttttgatgaatgtaagagcccatttcaaaagaattggtatggttcgaatctctacaatttagttcaaatttgaactcaatcccttttttttgtccactatatatttcgctcgagtttcgctgcttaattagcaggctgcaaggcatggatgcgaagcttcaagttttttgtcctacacctttgctgtgtgaaaaaaaaagata

SEQ ID NO: 151630 - DNA, 381 bp, Zea Mays
atggatgacgacgacgacaatggtcggtaccctagaaccatcaacgaagagctcattgagttagggcagcttcccgatgacgtcgacgacatgggagatgctgctgctgccttgttcggtgtcgatagcactcataatcccgggccggtaagtgatgctgctggctctaatgaacttgattcattgacttcttctagcactggtaaacgtcgatctgttgtttgggatgacttcactgaagtcacagaaaaccgtaatggtaagaaggtgcgcattgcaggatggctcatccggcgaatcgctgcacttctctactctagcgttcatgatgagatgcagagacgtaagccgttgaagaacatctttaggacatccgtgtga

SEQ ID NO: 151631 - DNA, 956 bp, Zea Mays
cggttgccacacccggcccagcacaggcgtagggtttattggcatctgtctcctgtcgcgccggccaccacagcgcagaagaacacagcacccgcctgcctcgccgccgcaatggccgccgccgcctccgctgcgagatccttcctccggtccagcggctcatcgtctctccgcagcgcggtggccagagccgcctcgcgtgcgggaccgggaccggctccgctgccgaggcggatgcccacctctgccccccgtgtactcctaaggtcgccggtggaaatgagcagcgtgtgtctggagtccttgatgcccatgcacagcgccacggcttcagcgctcatgacgtcgcttctcgccgccccggcttgcaagggattcggttggctatcagaaggtcaagctgaaactagatgaacttcatgggacccaaaagctggtaatgatgacgtgtgacggtctctagatgggaattagcagattattatcccgtcacctcagatcttcaggcctgtgattagtgcgatggaggtcaacttggatgaagactagactgctatttattttgccatctctgttgccttggttttgcccattataaatggaacatagagcaatgtagctttcgtcgctgttaatttatatgatgttattctagagcttgagcccagattattgtgtttctatttgtagatggatgatttgtcgttactggagatctgcagtgatggtatcttgtctggattatggatacctcgtgaatttaaagtacttggttggcgtctcagttaacatgttttgtgctctgggattgcagtttgtatgaaatttgcagaattgatcctgagatttattttggctggttagctgtcaaaaagactttggtcttgacgacttgcctgatcaagtagatctggaatgaataaacttaatagaagggttttcacaccttttgcgtt

SEQ ID NO: 151632 - DNA, 917 bp, Zea Mays
cggttgccacacccggcccagcacaggcgtagggtttattggcatctgtctcctgtcgcgccggccaccacagcgcagaagaacacagcacccgcctgcctcgccgccgcaatggccgccgccgcctccgctgcgagatccttcctccggtccagcggctcatcgtctctccgcagcgcggtggccagagccgcctcgcgtgcgggaccgggaccggctccgctgccgaggcggatgcccacctctgccccccgtgtactcctaaggtcgccggtggaaatgagcagcgtgtgtctggagtccttgatgcccatgcacagcgccacggcttcagcgctcatgacgtcgcttctcgccgccccggcttgcaagggattcggttggctatcagaagctggtaatgatgacgtgtgacggtctctagatgggaattagcagattattatcccgtcacctcagatcttcaggcctgtgattagtgcgatggaggtcaacttggatgaagactagactgctatttattttgccatctctgttgccttggttttgcccattataaatggaacatagagcaatgtagctttcgtcgctgttaatttatatgatgttattctagagcttgagcccagattattgtgtttctatttgtagatggatgatttgtcgttactggagatctgcagtgatggtatcttgtctggattatggatacctcgtgaatttaaagtacttggttggcgtctcagttaacatgttttgtgctctgggattgcagtttgtatgaaatttgcagaattgatcctgagatttattttggctggttagctgtcaaaaagactttggtcttgacgacttgcctgatcaagtagatctggaatgaataaacttaatagaagggttttcacaccttttgcgtt

SEQ ID NO: 151633 - DNA, 883 bp, Zea Mays
cggttgccacacccggcccagcacaggcgtagggtttattggcatctgtctcctgtcgcgccggccaccacagcgcagaagaacacagcacccgcctgcctcgccgccgcaatggccgccgccgcctccgctgcgagatccttcctccggtccagcggctcatcgtctctccgcagcgcggtggccagagccgcctcgcgtgcgggaccgggaccggctccgctgccgaggcggatgcccacctctgccccccgtgtactcctaaggtcgccggtggaaatgagcagcgtgtgtctggagtccttgatgcccatgcacagcgccacggcttcagcgctcatgacgtcgcttctcgccgccccggcttgcaagggattcggttggctatcagaaggtcaagctgaaactagatgaacttcatgggacccaaaaggcctgtgattagtgcgatggaggtcaacttggatgaagactagactgctatttattttgccatctctgttgccttggttttgcccattataaatggaacatagagcaatgtagctttcgtcgctgttaatttatatgatgttattctagagcttgagcccagattattgtgtttctatttgtagatggatgatttgtcgttactggagatctgcagtgatggtatcttgtctggattatggatacctcgtgaatttaaagtacttggttggcgtctcagttaacatgttttgtgctctgggattgcagtttgtatgaaatttgcagaattgatcctgagatttattttggctggttagctgtcaaaaagactttggtcttgacgacttgcctgatcaagtagatctggaatgaataaacttaatagaagggttttcacaccttttgcgtt

SEQ ID NO: 151634 - DNA, 844 bp, Zea Mays
cggttgccacacccggcccagcacaggcgtagggtttattggcatctgtctcctgtcgcgccggccaccacagcgcagaagaacacagcacccgcctgcctcgccgccgcaatggccgccgccgcctccgctgcgagatccttcctccggtccagcggctcatcgtctctccgcagcgcggtggccagagccgcctcgcgtgcgggaccgggaccggctccgctgccgaggcggatgcccacctctgccccccgtgtactcctaaggtcgccggtggaaatgagcagcgtgtgtctggagtccttgatgcccatgcacagcgccacggcttcagcgctcatgacgtcgcttctcgccgccccggcttgcaagggattcggttggctatcagaaggcctgtgattagtgcgatggaggtcaacttggatgaagactagactgctatttattttgccatctctgttgccttggttttgcccattataaatggaacatagagcaatgtagctttcgtcgctgttaatttatatgatgttattctagagcttgagcccagattattgtgtttctatttgtagatggatgatttgtcgttactggagatctgcagtgatggtatcttgtctggattatggatacctcgtgaatttaaagtacttggttggcgtctcagttaacatgttttgtgctctgggattgcagtttgtatgaaatttgcagaattgatcctgagatttattttggctggttagctgtcaaaaagactttggtcttgacgacttgcctgatcaagtagatctggaatgaataaacttaatagaagggttttcacaccttttgcgtt

SEQ ID NO: 151635 - DNA, 733 bp, Zea Mays
cggttgccacacccggcccagcacaggcgtagggtttattggcatctgtctcctgtcgcgccggccaccacagcgcagaagaacacagcacccgcctgcctcgccgccgcaatggccgccgccgcctccgctgcgagatccttcctccggtccagcggctcatcgtctctccgcagcgcggtggccagagccgcctcgcgtgcgggaccgggaccggctccgctgccgaggcggatgcccacctctgccccccgtgtactcctaaggtcgccggtggaaatgagcagcgtgtgtctggagtccttgatgcccatgcacagcgccacggcttcagcgctcatgacgtcgcttctcgccgccccggcttgcaagggattcggttggctatcagaagctggtaatgatgacgtgtgacggtctctagatgggaattagcagattattatcccgtcacctcagatcttcagatggatgatttgtcgttactggagatctgcagtgatggtatcttgtctggattatggatacctcgtgaatttaaagtacttggttggcgtctcagttaacatgttttgtgctctgggattgcagtttgtatgaaatttgcagaattgatcctgagatttattttggctggttagctgtcaaaaagactttggtcttgacgacttgcctgatcaagtagatctggaatgaataaacttaatagaagggttttcacaccttttgcgtt

SEQ ID NO: 151636 - DNA, 699 bp, Zea Mays
cggttgccacacccggcccagcacaggcgtagggtttattggcatctgtctcctgtcgcgccggccaccacagcgcagaagaacacagcacccgcctgcctcgccgccgcaatggccgccgccgcctccgctgcgagatccttcctccggtccagcggctcatcgtctctccgcagcgcggtggccagagccgcctcgcgtgcgggaccgggaccggctccgctgccgaggcggatgcccacctctgccccccgtgtactcctaaggtcgccggtggaaatgagcagcgtgtgtctggagtccttgatgcccatgcacagcgccacggcttcagcgctcatgacgtcgcttctcgccgccccggcttgcaagggattcggttggctatcagaaggtcaagctgaaactagatgaacttcatgggacccaaaagatggatgatttgtcgttactggagatctgcagtgatggtatcttgtctggattatggatacctcgtgaatttaaagtacttggttggcgtctcagttaacatgttttgtgctctgggattgcagtttgtatgaaatttgcagaattgatcctgagatttattttggctggttagctgtcaaaaagactttggtcttgacgacttgcctgatcaagtagatctggaatgaataaacttaatagaagggttttcacaccttttgcgtt

SEQ ID NO: 151637 - DNA, 660 bp, Zea Mays
cggttgccacacccggcccagcacaggcgtagggtttattggcatctgtctcctgtcgcgccggccaccacagcgcagaagaacacagcacccgcctgcctcgccgccgcaatggccgccgccgcctccgctgcgagatccttcctccggtccagcggctcatcgtctctccgcagcgcggtggccagagccgcctcgcgtgcgggaccgggaccggctccgctgccgaggcggatgcccacctctgccccccgtgtactcctaaggtcgccggtggaaatgagcagcgtgtgtctggagtccttgatgcccatgcacagcgccacggcttcagcgctcatgacgtcgcttctcgccgccccggcttgcaagggattcggttggctatcagaagatggatgatttgtcgttactggagatctgcagtgatggtatcttgtctggattatggatacctcgtgaatttaaagtacttggttggcgtctcagttaacatgttttgtgctctgggattgcagtttgtatgaaatttgcagaattgatcctgagatttattttggctggttagctgtcaaaaagactttggtcttgacgacttgcctgatcaagtagatctggaatgaataaacttaatagaagggttttcacaccttttgcgtt

SEQ ID NO: 151638 - DNA, 1228 bp, Zea Mays
cggttgccacacccggcccagcacaggcgtagggtttattggcatctgtctcctgtcgcgccggccaccacagcgcagaagaacacagcacccgcctgcctcgccgccgcaatggccgccgccgcctccgctgcgagatccttcctccggtccagcggctcatcgtctctccgcagcgcggtggccagagccgcctcgcgtgcgggaccgggaccggctccgctgccgaggcggatgcccacctctgccccccgtgtactcctaaggtcgccggtggaaatgagcagcgtgtgtctggagtccttgatgcccatgcacagcgccacggcttcagcgctcatgacgtcgcttctcgccgccccggcttgcaagggattcggttggctatcagaagctggtaatgatgacgtgtgacggtctctagatgggaattagcagattattatcccgtcacctcagatcttcaggtccgttccgattttaaggaacatccatgacatgatacgtttattacaattttctagcaaatttctgttttcttacaaaatgtcctctgtggtagctgattctgataggcatagcgtgcaataatgatgtttatttctccaataagggctagttggggaactccaattttttgagggattttcgttttcccaagggaaaatgaactaatttcccttgaaaaaaatgaaaatcccttgggaaaatgttgttcccaaactagctctaaatattatgttacctcagttgtatttgttttcttgactttattgcatctctataggcctgtgattagtgcgatggaggtcaacttggatgaagactagactgctatttattttgccatctctgttgccttggttttgcccattataaatggaacatagagcaatgtagctttcgtcgctgttaatttatatgatgttattctagagcttgagcccagattattgtgtttctatttgtagatggatgatttgtcgttactggagatctgcagtgatggtatcttgtctggattatggatacctcgtgaatttaaagtacttggttggcgtctcagttaacatgttttgtgctctgggattgcagtttgtatgaaatttgcagaattgatcctgagatttattttggctggttagctgtcaaaaagactttggtcttgacgacttgcctgatcaagtagatctggaatgaataaacttaatagaagggttttcacacc

SEQ ID NO: 151639 - DNA, 904 bp, Zea Mays
cggttgccacacccggcccagcacaggcgtagggtttattggcatctgtctcctgtcgcgccggccaccacagcgcagaagaacacagcacccgcctgcctcgccgccgcaatggccgccgccgcctccgctgcgagatccttcctccggtccagcggctcatcgtctctccgcagcgcggtggccagagccgcctcgcgtgcgggaccgggaccggctccgctgccgaggcggatgcccacctctgccccccgtgtactcctaaggtcgccggtggaaatgagcagcgtgtgtctggagtccttgatgcccatgcacagcgccacggcttcagcgctcatgacgtcgcttctcgccgccccggcttgcaagggattcggttggctatcagaaggtcaagctgaaactagatgaacttcatgggacccaaaaggtgaacactttttatagatcccaccaataatgactgttgatggctagattccatcactatttcacgcgtcggaatgatttgtggaaagaagagcccactatcttcatcttatggaacttgccttaaagtcatctattgactattgtgcacttgcacattagcatgtacaatatggaacaaaagaagtctgcattttcatgagccatacattgtattgagccacatatttttattgttccttttggaactgcaaaatgcacctagcgctgctgtgccacgatcgttgtgccgtgtctaagattcccattgtcactttgagcgatcttttattgaagttctggaccttttggcaatatgagagatttctttcctgggtcgacttttgcctatggtttgctgaagtcgaactattgatgggtttacaaatagcgtttataaatttgaatacaacgtcatcattaattacaaatt

SEQ ID NO: 151640 - DNA, 601 bp, Zea Mays
cggttgccacacccggcccagcacaggcgtagggtttattggcatctgtctcctgtcgcgccggccaccacagcgcagaagaacacagcacccgcctgcctcgccgccgcaatggccgccgccgcctccgctgcgagatccttcctccggtccagcggctcatcgtctctccgcagcgcggtggccagagccgcctcgcgtgcgggaccgggaccggctccgctgccgaggcggatgcccacctctgccccccgtgtactcctaaggtcgccggtggaaatgagcagcgtgtgtctggagtccttgatgcccatgcacagcgccacggcttcagcgctcatgacgtcgcttctcgccgccccggcttgcaagggattcggttggctatcagaaggtggtttcccatggcctcagtttcatttcctcgtgtcgcaatgttagattaatttgttatttaccatatttgcttgttggcacataggagatagcttatgccccatcacaattcatacgtgcacccgttttcctttgtggatgcatatctttttagaccatcaattcagtgataagaatttgatgttttggggggtggggggggggg

SEQ ID NO: 151641 - DNA, 103 bp, Zea Mays
cttggccaattagccaccaaattcaaatacagacataaacattaccttctatattttttaccagaatatgtcatatatggacattggcattgaaatgaagttg

SEQ ID NO: 151642 - DNA, 511 bp, Zea Mays
ggcgcgggcgcgtcgctctccctgcccggcgcagcggcggcgcacgggcacagccagtacctgcccctcaacgaggacgactccctggacatggtcctcttcgacgtgctccgagaggcatccggccccggctccgcctccgccgcggcgcccgacacctaccagccgccctcgtcgctgcctacgctcaaggcgctcgcttccggcgccgcgcgcaggggcagcaggaccgcgtacgcaccgaaggcggccacggcgggccaccatataccgcggggtgaggcggcggccgtggggcaagtacgccgcggagatccgtgacccggcgcggcacggggcgcggctctggctcggcaccttcgccacggccgaggaggcagccgccgcgtacgaccgcgccgcggtccgcatgcgcggagccaaggcgctgctcaacttcccgccgggggtcgcgggctgcgggagcgccgcaaccgctacggcgaagcaggctgggctgacggaagccaag

SEQ ID NO: 151643 - DNA, 600 bp, Zea Mays
ctccaaaaatgttccatataaccgccgggcaatgcaagtgcaaccaccctcccccggtttgtccccgtcgcggcactgcagcaagccatgggcgtgagcaccactgacctgcccgcgccaccccactccgtcaacctgcccggccgcatggcctcctcctcgtcctcttcctcttcctccgttgccccgtggccgcgttcagccaagcaccgcggcgcgcccgccgtggtccgccgcgcccagctcgtcctgtcccgcgacgtcgggtggtgcgggcaacgcgtgtggcggaagctcctcaggcggctggcgcaggaaaccaggtgcatctgcagctccccgacggcggccacgggcaggcccaggcccgtcacgttcggctacgacgccgccagctacgccaagaacttcgacgacgggcgcagcccagccgcgccacgcggcgcggccgcccccatcgtcgttcgtcgccaatgcggtggataagccgagacgcaactgatccgatcgacgttcttctctccccctcgtggcctcgtcgatcccttcccatttctcctttttttttgtttctcttaataatttttctcgttgctttta

SEQ ID NO: 151644 - DNA, 192 bp, Zea Mays
atgaagcaacctgaacaaatcaatgacggcggcgtccgtgcaaccggagttggaggcattcccgcggtcatcaacggtgccggcgcggctatcgaccaggaggctgtcgtggtgagggtcgcacctgccggcgctgccaggggcacaaaccaaggtcacagctcccgatgcggccaggcgtgtgcctcctga

SEQ ID NO: 151645 - DNA, 110 bp, Zea Mays
atgcaacactgtgctgcaaatcagacaagtattttgtttcttaaattggtttcagaaaccaataacaaaatggcaggtcatataagaagctactttaagcaagagtagtt

SEQ ID NO: 151646 - DNA, 1915 bp, Zea Mays
cagacacgccgcgcatggcgatggcgagagagagagagagagagagtaggggagggatcattgaaagccgcagcgcccatgtcccaggcccgtctgttcgccaccatttgtccattccccctccatcattcctccccgctttctccaccatcagggcgaaaattttatgcgagctttggaaagcgcgagctagtttatccggccgggcgtggtcaccgaggcagtagcggcgagagaggggaggatctgatcgatgtcgtcgggcgaggacgggtactgcagctcggattcgccgcgggcggaatcccccgaccagccgcaggcagctgcggcggcggacgcggacgcggacgcggagtcgcctcgcgccggagccgggccgaacaagcgcgacctccacgcctcgtcgccggcagctaagcgcagccggagatcggtggagaagcgggttgtgtcggtgccgctggccgagtgcggggaggggccgccgccgtctgactcgtgggcgtggcgcaagtatgggcagaagcccatcaagggctccccctacccacgtgggtactaccgctgcagcagctccaaggggtgccccgcgaggaagcaggtggagcgcagccgcgccgaccctgccgtgctgctcgtcacctacaccttcgaccacaaccacgaggcgccgcggcccaagagcagctgctgccaccagcaaggcaggccgccggcgccgaagcctgatgagcccgtggccgagcaggaggatgagctgggtccggagcatgagccggaagacgagcaggagccggagcagaaggtcgtcccaggtctggccgggccggaaacggcgccggcaaccgcaacgttggcgccggtggcagaggaggacgaaagcttcgacttggggtggttcgaccagtacccgacgtggcaccgttcggcgctgtacgcgccgctgctgccgccggaggagtgggagcgggagctgcagggggaagacgccctgttcgcgggcctcggcgagctgcccgagtgcgccgtcgtgttcggccgccgccgcgagctcagcctggccgctaccgcgccgtgctcctgatggtccttaaagtcttttttacactagtagctctgatcgctgcacggggcatctgttcaaggccgtctgctgcctaagctttctgtccccgtgtccgtgttgattgggtacgcgcgttcgccgtccaaggttcgtttgtcccgtttgcgatgtggttccagccagaaagcagcgaaaggtttggcatttgtgatcagatcatggatggagacatggctcgcgccgccacgagctgagctacggcgtggtgagctccgcgcgccaagcagacaggcttcgtccgatgcggaaggggaatctgcccacctgacggcaagtcgtgggggcaacgcaccggcttgtccgtgtggtgtgccgccgcggtggttgggaacacgcacgcgatcgagggaggccacgtgcgccgcgggtgctacggatccaaccccatccccacctgcgggccgcgtgctgtcctgcccgatcgcagccggctagtggttttgtaacgaactgccagtcagtcatcagggtggaggcagaggcatggagcagagccgcgacacgcgacggccatgctgggagtgggaggaccgggaaactagctggccacgcgtcgcaagggtacgctggccgctttctttgggtgattggatatgagcgatggcgggacgtaccagctgagctgacaagctcggccctttattattactagaaaaagacagcgccctatcgggcactgtatgaggtatatatacataagtatcaggcaagaagaaaatacgaacaataggacctaaaaaaacagcaggaaaaaatacgaacaatggaacccaaaaaaaaacagca

SEQ ID NO: 151647 - DNA, 1282 bp, Zea Mays
cagacacgccgcgcatggcgatggcgagagagagagagagagagagtaggggagggatcattgaaagccgcagcgcccatgtcccaggcccgtctgttcgccaccatttgtccattccccctccatcattcctccccgctttctccaccatcagggcgaaaattttatgcgagctttggaaagcgcgagctagtttatccggccgggcgtggtcaccgaggcagtagcggcgagagaggggaggatctgatcgatgtcgtcgggcgaggacgggtactgcagctcggattcgccgcgggcggaatcccccgaccagccgcaggcagctgcggcggcggacgcggacgcggacgcggagtcgcctcgcgccggagccgggccgaacaagcgcgacctccacgcctcgtcgccggcagctaagcgcagccggagatcggtggagaagcgggttgtgtcggtgccgctggccgagtgcggggaggggccgccgccgtctgactcgtgggcgtggcgcaagtatgggcagaagcccatcaagggctccccctacccacgtgggtactaccgctgcagcagctccaaggggtgccccgcgaggaagcaggtggagcgcagccgcgccgaccctgccgtgctgctcgtcacctacaccttcgaccacaaccacgaggcgccgcggcccaagagcagctgctgccaccagcaaggcaggccgccggcgccgaagcctgatgagcccgtggccgagcaggaggatgagctgggtccggagcatgagccggaagacgagcaggagccggagcagaaggtcgtcccaggtctggccgggccggaaacggcgccggcaaccgcaacgttggcgccggtggcagaggaggacgaaagcttcgacttggggtggttcgaccagtacccgacgtggcaccgttcggcgctgtacgcgccgctgctgccgccggaggagtgggagcgggagctgcagggggaagacgccctgttcgcgggcctcggcgagctgcccgagtgcgccgtcgtgttcggccgccgccgcgagctcagcctggccgctaccgcgccgtgctcctgatggtccttaaagtcttttttacactagtagctctgatcgctgcacggggcatctgttcaaggccgtctgctgcctaagctttctgtccccgtgtccgtgttgattgggtacgcgcgttcgccgtccaaggttcgtttgtcccgtttgcgatgtggttccagccagaaagcagcgaaaggtttggcatttgtgatc

SEQ ID NO: 151648 - DNA, 1496 bp, Zea Mays
cttcagaagtcgccgcgacaaggtgctgaattttgactttctaccagaaatcggagcgaaccaaactgccgggaaaacccctcgcctgcggcttcgcgtcggccgccgccgctgccgacactttaccgcgtgccttgcgcccccgcgccgccgatgcgatcagcgacgcacgccagatccgagcttctgtaggaccttcagccgtcgccgtcccatgggggactgcgtcgtcgaggacggccacgggcaccactactcggaggcggtggagggcgcggtttcgttgacggtagccgtggagctcgatgagcgggcggaagagtcgcgggaggaggaggagggtggcgggcagcggaagaaaatgggcgggatcccaagggagccgtcgttctcgcggtggtgcagggacccctctgccgcctccgcctccaataccgccgctgctgcggcgaccagtgacagcgacgcctcagaggagttcgagctgccgctcctgccatcctcctcgggcggcggcggctcaccgatggacattgaggtgggggcaacggcgagatctgatgatctgccgatctcgccgaggttgcttgcgaaggtcatcgggttgatagcgtgttggtacacactgagcacgtgcttgacgctgtacaacaaggagatgctgggaaagcacatgtggaagttcccggcgccattcctgatgaacacagtgcatttcacgatgcaggccgtggcgtcgagggccatcgtgtggttccagcaacgaggcctagagggagggccaagtaaaatgtcgtggaaggattactgtttacgagttgtcccaacagctttggctactgctcttgatataaatctgagcaacatttcacttgttttcattactgtgacatttgctacaatgtgcaaatctgcttctccaattttcattcttctgtttgctttcatgttcaggcttgagaaaccgagctttagccttcttggaatcatgctggttgtttcatttggagttctactaacagttgctaaagagacagaatttaatctatggggatttatgtttattatgcttgctgctgttatggctggtttccgctggtccatgactcagattcttctccagaaagaggaatatgcattaaagaatccttttaccttgatgagtcatgttgccccggtgatggcaatagtaacagcaattatttccatcgtgatggatccatggcatgacttcagagcaagtcacttttttgatagttctactcacataataagaagcagtgtgttgctgcttctaggtggggctttggcctttttcatggttttgacagaatatgtccttgtttctgtgactagcgctgtcacagtgactgtagcaggaattgtgaaggaagctgtcactattctggtataactaaactttgattttggtttccatgttagtttatacaaagttcatctatgctagttcattcatgtgattgtgaccctgcaat

SEQ ID NO: 151649 - DNA, 106 bp, Zea Mays
cataaacaacccattatgtgtaataatcgtgttgggtgacctatggcccaacgggcctataacagtccatatcatttaaatagcaaaaatatgctaaaatatacat

SEQ ID NO: 151650 - DNA, 1870 bp, Zea Mays
acctaacccaacccgaccagaaaccaccgcgcactgacgccgcccggctccgtctccggctcccgctcccgctcgaggtcgaggcccacgcagcaatctggtcttctggaaatctccatcaatccgattccgaacggcagaaaattttcccttcccccggccaccaaccaaccaaacccgagcaaccagcctgagccacctcccatgcgccgcgccgcagcctgaggaggaggaggaggacgcggtggtctggagagggatggagggcgcgtcctcgctgccgcccttcctgagcaagacgtacgagatggtggacgacccggccacggacgccgtggtggcgtggacgccgctggggaccagcttcgtcgtcgccaaccaggccgagttctgcagggatctgctccccaagtacttcaagcacaacaacttctccagcttcgtgcggcaactgaacacctacggctttaagaaaattgatcctgaacaatgggagtttgcaaatgatgatttcattaggggacaacagcaccgactgaaaaatatacacaggcgtaagcctatattcagccattcatcgcatactcagggttctggaccattaccagataccgaaaggagggattatgaggaggaaatcgaaaggcttaagtgtgacaatgcagctctgacctcagagcttgaaaagaatgcacagaagaaacttgttacagagaaacgaatgcaggagctagaagataagttgatctttttggaggatcggcagaaaaatctgatggcgtatgtcagggatattgtacaggcaccaggatctttctctagctttgtgcagcaacctgatcatcacggaaagaaaaggagactaccagtacctatctctctctaccaagattctaatgctgaggggaaccaggttgtgcatgggggcttcatcaccaacccaccagcttgcagggaatcattcgacaagacggaatcttcgttgaactcattggagaatttccttcgggaagcgagtgaagcgttcaatatttcatatggtgatggcctccctggcccttcatctgctgtcgttatcacagagctccattcatccggagaaagtgatccccatgtgccatcacctgtctcaagaatgcatacatcttcggctggtgcgggagattcgctctcttcccgcgatttaacagagtcaactagctgcgctgagagccctcgcctcgctcagatccaaccctgtacagattcacggactaaggtgtctgagatcgatgtcaatcgggagcctgctgtcacagaaactggtccgacaagggaccaacctgccgaggagcctccccacgtagcagctggggtgaacgatggcttttggcagcagttcctcacagagcagcccggtcctgatgtacaccaggaggcccaatcagaaaggagagatggcgatgatgataagggcgatcagacgaggataggggaccgagaaaatttttggtgggggaagaagaatgttgagcagatgagagagaagctggggcgtctcacctcggtggagaaaacctgactgtatttcttgtagctggaaaaaaaaagttagcacagaaacacatataggacgctggtgcctctgactgacatgtactttgcagtgtaccatatatcttcgccaccagatatgctgactgacatcgacctcgtagtcgtacttcttccacctgtacttttgccgagtttacagtgagatttagttgttgctatactttttttcttttttcttttgagatggactagtcgctatacttctgttaggagttctgcattcgtacttggttagtagacacttcctggtactgttgtccaacgacgtggttat

SEQ ID NO: 151651 - DNA, 2445 bp, Zea Mays
caagcgggggcataattgtgatatggtatacactattcttttaatagatagtaaagatagatactataataataaataggaggttgagatcgcgaggggagcaagcggaggtataattatgatatggtatacactattcttttaatagatagtaaagatagatactatactaataaatacaaacaggacgatagttgatgtagcggttgattcaaccttacataaaaccaaatatagcacgaaattaaggaaaaacaataaatgaagaaaaagaaaagccagtcaaacccaaccacctcggcatcggggtctccttcccctcctccggttgtccggtcccccagaaaccgtgtccttccgtcgtgacagctcccgaccttctggcggtcttcccctctcgtagtcggcgcgaatcccgaggtggaggaggaagaggtagagggggcgggccccatcatccatgagccttgcgggctccgcgctggaggcagcgctactggcggtggggcgcggcctcgacgcagctggagaccaccggctgctttactgcaagggagacggaaggctcgtcgcgctcgaggaccgtgcgcgggacctcccgctccccgacggcggcgtcctcccgagcgtgccccacgacgtcgaggtcgagcagtgccgcagagacctcgagcgcatccgccccttcccgtccgggtccggcccaagctccgccgcagcggacggtccctttgtctgcagcttcgataagatggctgagtatttcaacaggaagtcatgtttgtccgagacagtaccgctgggttccttcaactctctcttcagcttcaccggttcttggaagaatgatgcggcgaccacgaaggcccttgcgattgatggctattctctgcctctgtttcgagttaaaattaggaattctgaactgacgctgcttgagagcgttaagcgaaggatcccaaatgtttgggatccatcagcattggcaagctttattgagaactatggtacccatattattatctctgttacggttggtggtaaggatgaggtatacattaagcagcattcattgtcccaattgtcagagctggagttcaaaaattatgcgagggaaattgggagggaaagatttgcagatgtggaaaataagtcaaatgcatcttctatcaattacagtgagaaggatatgacagtaatattcagaaggaggggtggttgcgaccttgttcaaagttttagtgattggagaggaactgttgcctcagcaccagatgtcataggcatcacctttctatcaattgtctctcttgttgacgatataccaggaaagaagcaccttgctcgtgcagttgagctatacttgacctacaaacctccaattgaagaattacagtacttcttagattttcgagtcccactagtttgggctccagctccaccaggtattgctggtcaccataggaaagaaccagtctgcccatcgcttcagtttagcttaatgggcccaaagctcttcattagcacagaacagatctctgttggccgtcgaccagttgttggcctcaaactgattttggaaggagccaaacagaatcgtctggctattcatttgcagcaccttggctcattaccaaaaatattcctacctcattgggactcctatattactattggacctccaaaatggcaaggtcctgaagaacaggacagccgatggtttgagccaatcaaatggaagaactttgctcatgttagcacagcacccatagagtacactgaaacaaatattacggacctatctggtgtttatattgttacaggagcacagttgggagtgtgggattttggtgcaaagagtgttctccaccttaaacttttgttctccagggttcctgggtgcacaattagaagatcagtgtgggaccacagcccatcaagttcctcggtacatagaacagatgaatcttcgtcatcctcaagtgataatgctaaacttctgaagatcgttgacctgacagaaacattcaagggcccacaagatgcgcctggccattggctgatcacaggtgctaagttgggtgtcgagaaaggcaggattgttgtgcgtgcaaagtactccttattgaattattaaccaaatgtttaaatcattcaatcactctgatattgagcactgtgttttaaggtagcatttgttcttttgtttttcatgtatggcttttgttcccccttgtaacatgatgtggatcatgtttcttgttgatgatgccgtgagtgaagcactacattcgttctcgaatatttgacgtccactagtccactagttcattactaatcagcgataaataaaaaagaactcgaatatttggcgtccgctagttcattactaaacaacgataaataagaaagaatggagggagtggcatatgaagatgttatggt

SEQ ID NO: 151652 - DNA, 379 bp, Zea Mays
ggaaattaccggatttgtgtctcggaattttccggaattgtttctcggaattatgtctcagaatttttcgaaattgtgtcttagatttttcggatttttccagcatgtgatttttcgcatcgcctgtacgtctctagataaggattacttatttttatattttttggacgccttaagatttttttgggatagatggtgttggaacgcagttgggattaacgatttggtctctcgaactaatccacccttttctatacacatgttatgtattagtaatatataatgatatagagccgatagtctgtcttttccacacactaggttttagggttttcctgtgaggttatgaaaaactctttacgtgtggagaaaatatttc

SEQ ID NO: 151653 - DNA, 392 bp, Zea Mays
actcagctagatgatgataggaggcaacgtgaggagctggagaagaggatggcggagatgttcgcgtacatgcagagccttggcgccgcacagggtcatgctccaccacctccgttgttccctgcaactgaccctctgagttcactactcctggtcaatcgacggcgtcgaacaaccctcatgcttcgtccagcccttcgccgaaccagtccagatgcccaccttgttgatgatccagacttggtcttgtgagtgttggtgatgtttggctagacttggtcttgtgagatacttggtgatgttagtgatgatgatccagacttatatctgttttgtgatgatcctgacttatatttgtgagacttatattagtgagactttgtgatatatat

SEQ ID NO: 151654 - DNA, 723 bp, Zea Mays
tagagatgggtgcataaggagagagattatggtaaatcattaagcatcagcatagacgttaattcctaaagtgtaaaacaggcggttagataggttcaactgcctttttaacttgcattgagcattggtgctaactcaccttaccttccaagcatcaggtgccaatggtatggtaaagaagaaacggtttttggctaagcgcccccaccccccattgtgcatgctcaatagtccgagcccaaccggacacccctaacacacgccaggtcattcaacgcatgccggcatcgctcgctccttacgctactcgtttgtcttctgtaggagctaccgtttcagccgccgccgctggcaccctcaggtgcttcccaatcctgccaaaagtcccagcaatcgccgagattcatcgagaccccagccccctagacgaccagatcctgcgctcgacagctgcggctccgcgaaggcgccaggcagcctgcggcttgtgtggcggcatggtggtgccccagctgctcagggagtatgcaacgccagcaacagcatccaaggtcagcaccccctttgcccccttaatcccttatctagtctagatccgccactggtaggaagggaaaagagagcgggcgcacctgaccggtgctcttcgccggagaaggaccagaggaagacctggggcccctggcctacggctgcatcgtcggtcgcccagtcatcgccaag

SEQ ID NO: 151655 - DNA, 536 bp, Zea Mays
ttttttttacaaaaataagttaaaatacagctgagcacgagggagtgtggaaggtgttttttttttaaacacatcagccgaaagatgatgcacatgcttaacaggtaaaccagctgggtggatacacatacacagcacccagccacccacaacagtcaaacaaaatgaagtactatttgatcacggaggctcaatggcatcattgcacaacgaagaacacagatcggacattaggtcataggatttccaaaaacaccttcacttacaatcatgaggcttataagaaaacactcaatagtcatcaccataaaggacctgggtgtgtagcccctgctatacatcagatatcagacaactacgatttattcaagtaaattattaaatatggggctaggacgcacacagcattaaactacaactgctgtacacgatttgcacatgtttgcagcttgctacagggcataaagttcaaaacatgcacggaagctattatgctagtttgctactgcacatacaacaaagggaaggtacgaaac

SEQ ID NO: 151656 - DNA, 320 bp, Zea Mays
atgcatgtacctcttcctttgtatcttccattctcactatgtagtggactagtattaatttttgccagatttggcttcctcgtgcctgcaccagttatgcggctccctgtggatcacccctttggaacaaccgcttgccacccctcattagatgtgcactcttcagtaaaccatcttgaggtatgtggattgcagtgtcacttgatatttcatctttcactttcacatgctcaacaaaggttccattctcttttactccatagtttccattctcggtaataaatttttatcattgttaggtgcgagactcctttgatcta

SEQ ID NO: 151657 - DNA, 1354 bp, Zea Mays
actgtagctcttagttcttctcctctctctctctctctctctcctctcccctctcctgtcgcactctcctgttccggccaccagcgtgcccagcatggtgcaacgctcgggtagaggagggcggagctggtcttcaggggtagcttgaactggcgaccggattggtttggagaccggtttgtccctgatttggtgccccaagtgcaagatggcccgagtgattgaactgagggtgaagagggagaatgagaacctaggccaagtgtttatcaagtgccctaggagtgttgacgctttgattgccattactttgtgtttttcgaaatctgattttggattatttgatttgcttttgtatgtgtagatgccaggaaggtgcccatactacagatggcagagggagtattttgagaaattggtgaaggagaggttgattgccttgttattcgatgattgggaggaagatgatggagaggtggattccaagaaggtttctgaagtaggaaatagtgaagacattgcaacttctgtttgtaatggttgtagtacctgtggtagtagtggtgatgtacatgttttaatgatctgtctgtaatgatgtatatgaacaattgaagaagttggaagggaatgttgaactttgtcaatacagttcacagatcattgaaaacagaaaacagtcacaccatagcattgttgaaaccatcagcattcattacatcccaacatgaccttgttcatagcattcaaaagagacatcattacaacattcaaaagagacatcattacattcatggctcagcttaaactgttcttagccctcagattacaaaagagatatgcaaccaccttttcagggctcagcttagactattcttagcccttagattacaaaagagacatgtcatagcactcgaagggacatgctcctcggcttcaagcattgaacttgatcttctttcttgttgcaagctatttccttcttagggggagcatcaaccattgaactgggaccgtcttcttgcactgacatgttcacttcaactcgtggtggttccaatgttagtacccttcttgtggatacctataattctgcttccttggctgcttgctcagcctctagtgccctcctagccttttctcttgcagcttgtgcccttgttcttggagatggttcagctagtggttcagcttgtgcacctgttgcagcttgtgggtgagctagtgcacctgttgcagcttgtgggtgagcttgtgcacctgttgcagcttttgggtcagctgctgcacttgagcagcttctggttcagcccccttagctttcttcctctctccagttgtcttggtctttctg

SEQ ID NO: 151658 - DNA, 700 bp, Zea Mays
agggttccaagaaattgggtgtgctgtggcgaccgggctttccctacgggctggtcatcatttcgggagcgtcgtggctacctccggtgctgcggccagcgcgactaggccagatcgacccagcgcgatgacggctgtgcgcggcgtcctcggacatcgctccgccagctcaaatctccaagcgctcgagctcggaactcctccaaccggtcatcagctgccagcaatcgacctccatccgcagagcactcaccgaaaggtggctctggatatctcctgctctaacagctccacaaaaattgcattcaacacaggcgacaaacattcgagaacagaggtagtacaaaacatgtactgttgtacatgatatgctagtctataatcaagaacgatagcagacgccttcgcaacacgactcaggatacccgcacataggagctgctacagtgaactacctacgtcaaaagatggtgctggcaggattccgctcgaaaagatccctaggatatagtacgaccatagcataccgatgctaggtagagattcttagaccatttgtcctgcaatgaaacaagagtacattttgtcagaaccagccgtcagttgcagataagatactgaatgaggtactactgcaggcttgttaaccttcacatgtttactagggaaattaattgtcctcagtgtctcttgggtttca

SEQ ID NO: 151659 - DNA, 798 bp, Zea Mays
cgagcagacgctgtcgtactggaccgtactcctctcttcctgtgctcctccatttcaattccatggctccgcctccgtctaactaattgatgatgaaaattggttcatcagtctcacgttggacgcatggagtatcgaagaggagtctgagatttgttctctgttcgtcagctatggaggagctgaagaacacgagcccacgaggcagcgcagggacaagaagtgccatattggagagatagctgcaaagtcatccgagcctagaatagccggttcaaaacgacgatgaaggcgttatccacgtcggcagaaattctccaagccgcccgatcgtgaatcaatggcattcattgcggtctcgatagcgtgtggaatacgactctcaccccctcgttccgaggagcgaggagcaggccgcctgcgtaatgtcgaagtactcgatcagcagcttctcttctcgacgtggcgcctccgccaccctcctccccgcgcgagtacctctggtctgggctccagcacgctgaattagtgcatcaaggttcatgactcagactgcatatggcactatcaaaacctgtttacacgaaacacggtgttatgaagtcaagttacaaatggagcatgttagcccaaataggaaaagaaagctaagtaagtgatctcgcaccaacttaattcagaacaagcaacaaaaaaggatgaatatcttactagatgtctaccttgtgatttgttcatgaaatttgtcatgaagatcatactaatgtgtgctatgcccctttgagcatacctcgtgtc

SEQ ID NO: 151660 - DNA, 952 bp, Zea Mays
aatctgatgaaccaagatgatacagataatttaggcttggaggattgcgtgcaagttgatcctcttgtagctaatatgaattcccagacaaaaccaaagggccgctcaaaaaatttcactgatgatgaggacattctattgttgtcagtgtatctcaatgttagcaaagatcctactgctggaagggaccaaaaagatagcagattttgggaaagaattgaaaagtattatcatgtcaatttaacatttgaatcagatcgcaattgctcttcattgcgtcatcgatggggtataatccaaaaggaagtaagtcttttccaaagttactatgaagccatacaaaggaagaatgaaagtggaaagacaatgaatgacaagatttctgatgctaaagctatgttccaaaccttaagaaaaaaggcttttactttgtttcatgcttggaatattcttagacacgagccaaagtggtcatcaataaaggactccacaatggctaccaagaagctggatcctcacaacggtaatgaagacgatggacatgacacccctagaccaccaggaaggaaagccgagaaagaaaaattgcgagcacggaagcaagaggacaatgacaatgatgcattgatggaagaactaaaaaaattagagagtcaagattggagatagaaaatgatcgaaaggcacgagaagacaagttattagagctggagagtagtaaacttgatcttgagcgtgaacaacgtgacgacaaggtgatgagaaccgacacaagtacaatggatgatgagtcaaaacaatattttaagttagtgaaagaggaaattttggcgcgacgttttgggagaaagcaagattgaggggtcatgttattagagttggttttagtcatactgaacatatttgtattttttctgtctcttcaatatagtatttttcctgaaacgactac

SEQ ID NO: 151661 - DNA, 2446 bp, Zea Mays
aaagcattcctttttttcctaatagccttttgcacctcttcattccaccaccaagtgtctttcagtcgcgtcgacttgcttcaatcagtatttatgaaaatatgaactagatattggtcgtataatgtttgaaccttgtaaagttaggatcacttatgagttattgcactacgttagtgcttgtaattagaatgagcatattttttttattcatgtaggtagaaaaatcaaaacttgatgagaaaagaaaactaggtgaacaagacatggttcggctgatgcaagaaaaggagaatgcagaaaatactattgcttcccttcagcaagaaatacaggtcttgagtaggatgcatgaacagtaccacgagagaaaggaaacagaagccaggcagatggaggaacacttggctatgagacttaaggaggctgagtttcttttaatgcaatcagaaaagaaagttgaagaaattgaatctgtttcccaactgaaatctcaactttggaccaggaaggcaaacattttccagagttttatggataatcaaaaattgtccattaaggacataaggatatcatctcagtccattaagcaggaaatgtttgcccttcaaatgaaatggatagatgaaatatctagcattggacgtgagttgaaaggcttggtagatgctgctgacaattaccataaggttcttgctgaaaatcagaagctatttaatgaggtacaggaactaaaaggcaatatcagggtttattgtcgtgtcagaccatttcttcctggtcaagatggaaaaacaaccattattgattatattggtgaaaatggtgagattctcatcacaaatcccttcaagcaagggaaggatgtgtgtcgaatgttcaagtttaataaagtgtttaatacacatgcttctcaagctgaggtattctctgatatccaacctctgatcagatcagttcttgatgggtttaatgtgtgcatttttgcctatggtcaaactggatccggaaagacttacacaatgagtgggccaggcacatcaaaagaagattggggtgttaactatcgagctttaaatgacttgttcgacatctctctaagtagaaggaatgctttctcatatgaggtgggagtgcagatggttgagatttataacgagcaagtgcgggatcttctctcaaatgatattgcacaaaaaagacttggaatttggagtacatctcagcctaatggacttgttgtccctgatgcaagtttacatccagtcaaatcaacactagatgtgctacagttgatggaaattggacaaacaaatagagcagttggatcaacagctctgaatgaaaggagcagtcgatctcacagcattctgactgtgcatgttagaggggtggatctgaagaatggatctacttccagaggatgtctacatctaattgatcttgctgggagtgaaagagttgagcgatctgaagcaattggagatagattaaaagaagcacagtatattaacaaatccctctctgctcttggtgatgtgattttttctttggcacagaaaaatgcccatgttccttatcgaaacagcaagctgactcaagttctacagagctctttaggtgggcaagcaaagacactgatgtttgttcaaattaatccggatactggatcatattcagaaacaataagcactttgaagtttgctgaaagggtttctggagttgagttaggtgctgcaagaagtaacaaagagggtaaagatataaaagagctgctagaacaggtttcatctctgaaagacacaatatcacggaaagatatggaaatcgatcaactcctgaagaacaaagccaaatctccaggttcatcaatagatagaaatgacagtcgccaacagatccggcgactatcagggactggatcaagtgaagccgaatgtgaagataacatgtctgatgatggctgctcagtagcaggaaccgagtattcagtaggtggtgcttcagaggcgacagcagaacggatgcagaaggccccatcaaggatagccaggctattccacacaaagaatggacagcctgcaaactccaaaccaaaaccaagggagtctgctctgaaaccaccaggtcgcacgacatctacaggaggaagccaggcgacaggaggatctttagtgaaaccccctaagaggcggtagagaaataaagattccatcatctaggatttgccatgttgatgggggtatgtgacgatgtcactgtaacgggttcacttgtcatcaccatgatgagcagccgactgtaggctggatgttgtatgagctggacgccatgaggttggtttctcagccctgctgaccatcacgttagttatcgactatgttactgaccatcatcaactttttatctatactatacttaaagcaccagtttcaacggtcgtccc

SEQ ID NO: 151662 - DNA, 2320 bp, Zea Mays
ctagagccggcctaccgcggggtacgtggcgacacctctcctgcaacgtgtccggcgcggacgacaggcatcgccgtcgccgtcacccaatggcctcggtgtccgtcgtgctgctacagcgctcctcctcgcgcgtccgaggatatatacggctccagcgcatcgccagctcttcagttacgttggttttggagggcgaggggcattggtggtggagcaacagccgcggccgcgacgagaggtttggcgcaagaacggtgcaccatatggcgggatcagtagagggggaaaacggcggcgtgccggtgggtggtcaagttgcgatggcgccgggcgtggtgaccggcggtgtggaggatgcctatggcgaggaccgcgcgaccgaggaccagactgtcacaccgtgggccgtctgcatcgcaagtggtcactccctgctgagggatccaaggcacaacaaagggctctctttcacggagaaagagcgggacacgcactacctgcgaggattattgcctccggtagtgctatctcaggacctccaggagaagaggatgttgcagaatgttaggcagttccaggtcccgttgcagcgctacactgcgctaatggaccttcaggagagaaatgagaggctattttacaagctcttgattgacaatgtcgaagaactgcttcctgttgtgtatacaccaacagtgggggaagcttgccagaagtatgggtcgatcttcagacgaccgcagggtttatacatcagcctcaaggagaagggaaggatcttggaggtactgaggaactggacagagaagagtattcaggttattgtggtcactgatggtgagcgcattttaggcctgggagatcttggttgccagggcatgggaattcctgtggggaagcttgcactgtatactgctcttggaggtgtacggccatccgcttgcttacctattaccattgatgtgggaacaaataatgaagacctactgaaggatgaattctacattggcttaaagcaaagaagagcaactggccaggaatactctgaatttctggatgagtttatggccgcagttaggcagaactatggacaaaaagttcttgtccagtttgaggactttgcaaaccacaatgcatttacacttcttgagaagtacaggacaaaccatcttgtatttaatgatgatatccagggcacggctgctgtagttcttgcagggattattgctgctctgaagtctgttggtgggactctagctgatcatacattcttgttcttcggtgcaggagaggctggtacgggcattgctgaactagttgctctcgagatatccagacaggcaaatgtttcagtagaagaggctcgcaaaaagatctggctggttgattcaaagggactaattgtggcctcacgtgaagagactctccagccatttaagaagcgatatgcacatgagcatgaacctgtcaaagatcttttaggtgctgttaaggctatcagaccaactgcactcataggatcagctggtgtaggtcaaagtttcactaaagaggtgattgaggttatgtcttcgattaatgagagacccattgtccttgctctatcgaacccgacgtcacagtctgaatgtactgctgaacaagcatatacatggagtcaggggcgtgccatatttggcagtggaagcccatttgatccggtgaaatataatgacaagctgtttgtgcctgcccaggcaaacaatgcatacattttccctgggtttggtctaggggtggtgatctcaggagccgtccgggtgtcagacgatatggttcttgctgctgctgaagcactagcggaacaggtaaccccggagcatattgagaaaggcctgatctacccgcccttctccatcatcaggaagatttcagctaacatagctgcccatgtcgccgcaaaagcttatgatctcggaatggctacccagctccctcggccaaaagacctggtgaagtacgctgagagctgcatgtacagccccgtctaccgatcgtacaggtgatgtgagcggacagtgctggatgcacctgaggatatatatgcatacctgctatgcttgttgttcatgtcgtcactgtgacgagtccgctgctgatactgcacgtgcgtactctatgtatgtagctgtgtaataaagttcaggggatgtaaattgacactcctaccaagtatgctgatgtatgttctcatgcgtgtcggggtttcttatacatggtttgtgttagatttagtatgaagatgacctctattttatttgatacaaatcgaataaat

SEQ ID NO: 151663 - DNA, 2584 bp, Zea Mays
gctgttcctgtttgcgacactccctgctaccactcagccgagccgagtagccgaccgaatcggcgtctcctccctccgcagctccgtttctccgacgcgctcagccgccggctaaccatctcaattctcacgacgtcaccgcctagtcgccctcactgacgacgcggcgccatgcctcctccccaggatggggtcgatgactccgcggcgcgggtcccgctcctcccgccccctgctccgcgccgcgcggccgtgaggctgcacccgctcccgctcctcatcgccgcgacactggcggcctcctaccgcctcctcttcctcgcgcccgcgccatcctactaccagtccctcctcctctccctcggttccaacgacaccgccgccgcccacctgcacgcgctcaccatccgcccccacctagcgggcacgggcgccaacgccctcgccgccgcgcacgtcgccgccacgctctcctcccactccttccggacccgcctcacgagctactccgtgctcctctcctaccctgcgtaccgctctctctcactctccgcgccggatcgcgacactgtgctcttcgctttgaagcaggaaacctacgcaggcgacccttacgaggcggtctccgccgaggccgtccccaccttcctcgcctacgcggcctccggttcggtctccgccgaggccgtctacgccaactacggccgcgcagaagatttcgcttacctcgccgcccgcggcatcgacgtcaccgggaaggtcgccgtcgcgcgctacggcgaagtgttccgcggcgacatcgtcaggaacgcgcgggatgccggcgccgccgcggcggtgatttactccgacgcgaaggactacgcggccgggaagaccttcccggacggaccgtggatgccgccgacaggcgtgcaggtgggtagcacgttcaagggggtgggggaccccacaacgccgatgtgggcgtcgtcggagggctgcgagcgcctgaccatcgcggaggcgatgagctccgatgacatgccggggataccggcgctgccggtgtcctggaaggatggggagaccatactacagctcatcggcggcgatgtggcgcccgagaattggcaaggaggcgatggcgcggcggcctataggtttgggcctggcccggcagtgctcaatctgacctacacagggaatgagacgatggttactattcagaatgtcatttcggtgattgaagggggagaagaacctgaacggtatgtaatccttggaaatcaccgtgatgcatggacatttggggcagttgatccgaacagcgggacagcatccttgcttgagctagctcaacggttgtctgagctgcaaaagaagggctggagacctcgacggaccatcatcttgtgcaactgggatgccgaagagtatggattgacaggatccactgaatgggtcgaggagaacagggcaatgctaacttcaagaactgttgcttacctaaatgttgattctgcagtggctggtcatggattttatgcatctgcaactcctcaacttgatgaattgcttaaagaagctagtaagcaggtccaaaatccggacaatgggacacagagtctctatgatttgtggatgtcttctaacagttctcctttgattggaagattaggagggggaagttcggattattctgcatttgttcaacacattggtattccatcagtggacatggcgattgggtcagactatccggtctatcatagcttgtatgatgacttcatatggatggaaaagtttggagatcccttgttccagaggcatgttgcagctgcaagcatgtgggggcttgttgctcttaggctctcagatgaggagatcctacccttcaactacagcaattatgccacagagcttgagaatggagcattgggcataagtgaaagagtacagggaatgcctgtcagcttatcacccctgcacaagtcaatcaaagagttcagaaaggcagttgcaaaagtggattctgaattgaaggctctacagacatggaaaatttggtccccatggagaaacaaccccttaaaggtcagagacatcaatgatcggttgatgatgaccgaacgggcattcacagaccgggaaggactgtctggacggccatggtacaaacacctgatttacgcaccttcgctgcacaacgattacggggctgaagtgtatccaggcattggtgacgccattgagagggtgaagaaaacaaatacttctgaatccttgcaatctatacaacatgagatttacagggtctctcgagtcataaaccaggcagcgcttgttttaagtggagggctcacgtgaatgcagtagctggactgatacagtattgcatagtatggtgatattaaggggaaaaataaatttcactggcagtcattacatttgtgccgagttcttattttgattctggtacctataaattgcatattactctttccaaacttatccggttcctattttaaatcgtattctcaaaatttgtcatgggttcttatttcaaatttcaataaacactcggctccataaacttattgtt

SEQ ID NO: 151664 - DNA, 2999 bp, Zea Mays
ctcagccgagccgagtagccgaccgaatcggcgtctcctccctccgcagctccgtttctccgacgcgctcagccgccggctaaccatctcaattctcacgacgtcaccgcctagtcgccctcactgacgacgcggcgccatgcctcctccccaggatggggtcgatgactccgcggcgcgggtcccgctcctcccgccccctgctccgcgccgcgcggccgtgaggctgcacccgctcccgctcctcatcgccgcgacactggcggcctcctaccgcctcctcttcctcgcgcccgcgccatcctactaccagtccctcctcctctccctcggttccaacgacaccgccgccgcccacctgcacgcgctcaccatccgcccccacctagcgggcacgggcgccaacgccctcgccgccgcgcacgtcgccgccacgctctcctcccactccttccggacccgcctcacgagctactccgtgctcctctcctaccctgcgtaccgctctctctcactctccgcgccggatcgcgacactgtgctcttcgctttgaagcaggaaacctacgcaggcgacccttacgaggcggtctccgccgaggccgtccccaccttcctcgcctacgcggcctccggttcggtctccgccgaggccgtctacgccaactacggccgcgcagaagatttcgcttacctcgccgcccgcggcatcgacgtcaccgggaaggtcgccgtcgcgcgctacggcgaagtgttccgcggcgacatcgtcaggaacgcgcgggatgccggcgccgccgcggcggtgatttactccgacgcgaaggactacgcggccgggaagaccttcccggacggaccgtggatgccgccgacaggcgtgcaggtgggtagcacgttcaagggggtgggggaccccacaacgccgatgtgggcgtcgtcggagggctgcgagcgcctgaccatcgcggaggcgatgagctccgatgacatgccggggataccggcgctgccggtgtcctggaaggatggggagaccatactacagctcatcggcggcgatgtggcgcccgagaattggcaaggaggcgatggcgcggcggcctataggtttgggcctggcccggcagtgctcaatctgacctacacagggaatgagacgatggttactattcagaatgtcatttcggtgattgaagggggagaagaacctgaacggtatgatcaaaatccccaatcaccttacccccaatacctccttccaaactccaatttaggtaaggggcactgtatcatctacagtacaaatccgtctgtgggctcaagcattcagcctgaatgcgatggatggaaatttaaccttcgttaggtgaatgtgactagcaaaattgaagtgtatgagacactttttttctttgaacagtgtgtatggcacactttttcattgaaacggtgtgctcacacacactaaaagtatttgtaatcatactacagaggcagagttatggaactttgggtggctagtgatgaaacagtcaccatgaaccacttagtgttaaagatatatcacagatcttgtatggtatttcgaactacttagtcgcttacaaattgcaatctcattctttgaaagtttaaaaaaatctgtacaaattctgtgcaattatcattctaaaacatgcaggtatgtaatccttggaaatcaccgtgatgcatggacatttggggcagttgatccgaacagcgggacagcatccttgcttgagctagctcaacggttgtctgagctgcaaaagaagggctggagacctcgacggaccatcatcttgtgcaactgggatgccgaagaacaggatccactgaatgggtcgaggagaacagggcaatgctaacttcaagaactgttgcttacctaaatgttgattctgcagtggctggtcatggattttatgcatctgcaactcctcaacttgatgaattgcttaaagaagctagtaagcaggtccaaaatccggacaatgggacacagagtctctatgatttgtggatgtcttctaacagttctcctttgattggaagattaggagggggaagttcggattattctgcatttgttcaacacattggtattccatcagtggacatggcgattgggtcagactatccggtctatcatagcttgtatgatgacttcatatggatggaaaagtttggagatcccttgttccagaggcatgttgcagctgcaagcatgtgggggcttgttgctcttaggctctcagatgaggagatcctacccttcaactacagcaattatgccacagagcttgagaatggagcattgggcataagtgaaagagtacagggaatgcctgtcagcttatcacccctgcacaagtcaatcaaagagttcagaaaggcagttgcaaaagtggattctgaattgaaggctctacagacatggaaaatttggtccccatggagaaacaaccccttaaaggtcagagacatcaatgatcggttgatgatgaccgaacgggcattcacagaccgggaaggactgtctggacggccatggtacaaacacctgatttacgcaccttcgctgcacaacgattacggggctgaagtgtatccaggcattggtgacgccattgagagggtgaagaaaacaaatacttctgaatccttgcaatctatacaacatgagatttacagggtctctcgagtcataaaccaggcagcgcttgttttaagtggagggctcacgtgaatgcagtagctggactgatacagtattgcatagtatggtgatattaaggggaaaaataaatttcactggcagtcattacatttgtgccgagttcttattttgattctggtacctataaattgcatattactctttccaaacttatccggttcctattttaaatcgtattctcaaaatttgtcatgggttcttatttcaaatttcaataaacactcggctccataaa

SEQ ID NO: 151665 - DNA, 2566 bp, Zea Mays
gctgttcctgtttgcgacactccctgctaccactcagccgagccgagtagccgaccgaatcggcgtctcctccctccgcagctccgtttctccgacgcgctcagccgccggctaaccatctcaattctcacgacgtcaccgcctagtcgccctcactgacgacgcggcgccatgcctcctccccaggatggggtcgatgactccgcggcgcgggtcccgctcctcccgccccctgctccgcgccgcgcggccgtgaggctgcacccgctcccgctcctcatcgccgcgacactggcggcctcctaccgcctcctcttcctcgcgcccgcgccatcctactaccagtccctcctcctctccctcggttccaacgacaccgccgccgcccacctgcacgcgctcaccatccgcccccacctagcgggcacgggcgccaacgccctcgccgccgcgcacgtcgccgccacgctctcctcccactccttccggacccgcctcacgagctactccgtgctcctctcctaccctgcgtaccgctctctctcactctccgcgccggatcgcgacactgtgctcttcgctttgaagcaggaaacctacgcaggcgacccttacgaggcggtctccgccgaggccgtccccaccttcctcgcctacgcggcctccggttcggtctccgccgaggccgtctacgccaactacggccgcgcagaagatttcgcttacctcgccgcccgcggcatcgacgtcaccgggaaggtcgccgtcgcgcgctacggcgaagtgttccgcggcgacatcgtcaggaacgcgcgggatgccggcgccgccgcggcggtgatttactccgacgcgaaggactacgcggccgggaagaccttcccggacggaccgtggatgccgccgacaggcgtgcaggtgggtagcacgttcaagggggtgggggaccccacaacgccgatgtgggcgtcgtcggagggctgcgagcgcctgaccatcgcggaggcgatgagctccgatgacatgccggggataccggcgctgccggtgtcctggaaggatggggagaccatactacagctcatcggcggcgatgtggcgcccgagaattggcaaggaggcgatggcgcggcggcctataggtttgggcctggcccggcagtgctcaatctgacctacacagggaatgagacgatggttactattcagaatgtcatttcggtgattgaagggggagaagaacctgaacggtatgtaatccttggaaatcaccgtgatgcatggacatttggggcagttgatccgaacagcgggacagcatccttgcttgagctagctcaacggttgtctgagctgcaaaagaagggctggagacctcgacggaccatcatcttgtgcaactgggatgccgaagagtatggattgacaggatccactgaatgggtcgaggagaacagggcaatgctaacttcaagaactgttgcttacctaaatgttgattctgcagtggctggtcatggattttatgcatctgcaactcctcaacttgatgaattgcttaaagaagctagtaagcaggtccaaaatccggacaatgggacacagagtctctatgatttgtggatgtcttctaacagttctcctttgattggaagattaggagggggaagttcggattattctgcatttgttcaacacattggtattccatcagtggacatggcgattgggtcagactatccggtctatcatagcttgtatgatgacttcatatggatggaaaagtttggagatcccttgttccagaggcatgttgcagctgcaagcatgtgggggcttgttgctcttaggctctcagatgaggagatcctacccttcaactacagcaattatgccacagagcttgagtaagtccaaaatttgagaatcgtgacagttggtccttgttatcagaatggagcattgggcataagtgaaagagtacagggaatgcctgtcagcttatcacccctgcacaagtcaatcaaagagttcagaaaggcagttgcaaaagtggattctgaattgaaggctctacagacatggaaaatttggtccccatggagaaacaaccccttaaaggtcagagacatcaatgatcggttgatgatgaccgaacgggcattcacagaccgggaaggactgtctggacggccatggtacaaacacctgatttacgcaccttcgctgcacaacgattacggggctgaagtgtatccaggcattggtgacgccattgagagggtgaagaaaacaaatacttctgaatccttgcaatctatacaacatgagatttacagggtctctcgagtcataaaccaggcagcgcttgttttaagtggagggctcacgtgaatgcagtagctggactgatacagtattgcatagtatggtgatattaaggggaaaaataaatttcactggcagtcattacatttgtgccgagttcttattttgattctggtacctataaattgcatattactctttccaaacttatccggttcctattttaaatcgtattctc

SEQ ID NO: 151666 - DNA, 2302 bp, Zea Mays
ctcagccgagccgagtagccgaccgaatcggcgtctcctccctccgcagctccgtttctccgacgcgctcagccgccggctaaccatctcaattctcacgacgtcaccgcctagtcgccctcactgacgacgcggcgccatgcctcctcttcctcgcgcccgcgccatcctactaccagtccctcctcctctccctcggttccaacgacaccgccgccgcccacctgcacgcgctcaccatccgcccccacctagcgggcacgggcgccaacgccctcgccgccgcgcacgtcgccgccacgctctcctcccactccttccggacccgcctcacgagctactccgtgctcctctcctaccctgcgtaccgctctctctcactctccgcgccggatcgcgacactgtgctcttcgctttgaagcaggaaacctacgcaggcgacccttacgaggcggtctccgccgaggccgtccccaccttcctcgcctacgcggcctccggttcggtctccgccgaggccgtctacgccaactacggccgcgcagaagatttcgcttacctcgccgcccgcggcatcgacgtcaccgggaaggtcgccgtcgcgcgctacggcgaagtgttccgcggcgacatcgtcaggaacgcgcgggatgccggcgccgccgcggcggtgatttactccgacgcgaaggactacgcggccgggaagaccttcccggacggaccgtggatgccgccgacaggcgtgcaggtgggtagcacgttcaagggggtgggggaccccacaacgccgatgtgggcgtcgtcggagggctgcgagcgcctgaccatcgcggaggcgatgagctccgatgacatgccggggataccggcgctgccggtgtcctggaaggatggggagaccatactacagctcatcggcggcgatgtggcgcccgagaattggcaaggaggcgatggcgcggcggcctataggggaatgagacgatggttactattcagaatgtcatttcggtgattgaagggggagaagaacctgaacggtatgtaatccttggaaatcaccgtgatgcatggacatttggggcagttgatccgaacagcgggacagcatccttgcttgagctagctcaacggttgtctgagctgcaaaagaagggctggagacctcgacggaccatcatcttgtgcaactgggatgccgaagagtatggattgacaggatccactgaatgggtcgaggagaacagggcaatgctaacttcaagaactgttgcttacctaaatgttgattctgcagtggctggtcatggattttatgcatctgcaactcctcaacttgatgaattgcttaaagaagctagtaagcaggtccaaaatccggacaatgggacacagagtctctatgatttgtggatgtcttctaacagttctcctttgattggaagattaggagggggaagttcggattattctgcatttgttcaacacattggtattccatcagtggacatggcgattgggtcagactatccggtctatcatagcttgtatgatgacttcatatggatggaaaagtttggagatcccttgttccagaggcatgttgcagctgcaagcatgtgggggcttgttgctcttaggctctcagatgaggagatcctacccttcaactacagcaattatgccacagagcttgagaatggagcattgggcataagtgaaagagtacagggaatgcctgtcagcttatcacccctgcacaagtcaatcaaagagttcagaaaggcagttgcaaaagtggattctgaattgaaggctctacagacatggaaaatttggtccccatggagaaacaaccccttaaaggtcagagacatcaatgatcggttgatgatgaccgaacgggcattcacagaccgggaaggactgtctggacggccatggtacaaacacctgatttacgcaccttcgctgcacaacgattacggggctgaagtgtatccaggcattggtgacgccattgagagggtgaagaaaacaaatacttctgaatccttgcaatctatacaacatgagatttacagggtctctcgagtcataaaccaggcagcgcttgttttaagtggagggctcacgtgaatgcagtagctggactgatacagtattgcatagtatggtgatattaaggggaaaaataaatttcactggcagtcattacatttgtgccgagttcttattttgattctggtacctataaattgcatattactctttccaaacttatccggttcctatttt

SEQ ID NO: 151667 - DNA, 984 bp, Zea Mays
atgaccatgaggcgcgtcgtgcgatggctcaagtggatactgacgggcaggaaggaggagcacagaggactcgaggcggagaataggcggcggacgaccggaggccaggacgcgggagctcgacaacgccgtgccgcgatcgtcatccagaaaacgttcagaggctacctggctaggagagcgcttcgagcgctccggtcactcgtcaagatccaggcgttggtgcggggctacctggtcaggaagcaggcagccatcacactgcacaggttgcagacgctcatgcgcctgcaagccgactccatcgccgtcaagaatgctcccttccggaaatccatggaacaagaagagaggatctttgctcgggaccttcagacgaagccgccggcgcaccgccggaggctgtccgacagcacggactccaactacgagcgcagcccgcggatcgtggagatggacgacacgggctacctccgctcccggtcctcacggatcaccaccagcagctacatgtacaacccggaccacctactagcggagcgtcaccgccacgcggcgccgacgccgtcgtgctcgccgctccccggcggcaagcagcagcccgcgcggcgctcgtaccggcggagcacccgcgactcccggggctctaagcctgcgcagacgggcacgccccggatcgcctcgtcccacgattcctcgcccgccaagagcgtcgaccagcacggcctggccgtggccagcacgccgcggcggcgggacagggaggggctcgtcagcccgcggtacatggccggcaccgcgtcgtccgcggccaggacgcgatgccacagcgcgccgaggcagcggcggacggcggcggacgccgagcacgagcaggcgccgaggaggtcgtgctcgcacgcgacccgaacaacggccggcttctccggaatcggcgtcggcgacgaggctgccagagactactacctggacagcttctggtga

SEQ ID NO: 151668 - DNA, 2532 bp, Zea Mays
atggtgaagttcacggctgaagagctccgtgccatcatggacaaaaagaacaacattcgtaatatgtctgttattgctcatgtggaccatggcaagtctacacttacagattcccttgtggcagctgctgggattattgcccaggaagttgctggtgatgttcgcatgactgatactcgtgcagatgaagccgagcgtggcatcacaatcaaatctactggtatctctctttattatgagatgactgatgagtcactgaagaactacaagggtgagagggatggtaaccaatacttgatcaaccttattgactcacccgggcacgtcgatttttcttcggaagtcacagctgctcttcgcatcaccgatggtgctctggttgtggttgattgtattgaaggtgtctgtgtgcaaactgaaactgtgcttcgccaagcccttggtgagaggattaggccagttcttaccgtgaacaagatggacaggtgcttccttgagcttcaggttgagggtgaggaagcttatcagactttctcccgtgttattgagaatgccaatgtcatcatggcaacatatgaagataagctccttggtgatgtccaagtatacccagagaaggggacagttgccttttctgctggtctgcatggatgggcctttacactcactaactttgcgaagatgtatgcatctaagtttggagttgatgaatctaagatgatggagaggctatggggtgagaatttctttgaccctgccacaaagaaatggaccaccaagaacacaggttctcctacctgcaagagaggatttgttcagttctgctacgagccaatcaagcaaatcatcaaaacctgcatgaatgaccaaaaggagaaattgtggcccatgttgcaaaagcttaatgttaccatgaaggctgatgagaaggagttgattggcaaagctttgatgaagcgtgttatgcaaacgtggcttccagccagcactgcacttcttgagatgatgatattccaccttccttccccggcaaaggctcaaaagtatcgtgtggagaacttgtatgagggaccccttgatgatgtttatgcaactgctatcagaaactgtgatccggagggtcctcttatgctgtatgtttcaaagatgattccagcatctgacaagggcaggttctttgcctttggtcgtgtcttctcagggaaggttgctactggtatgaaagttcggatcatgggtcccaactatgtccctggccagaagaaggacctgtatgtcaagagtgttcagcgtactgttatctggatgggaaagaaacaagagtcagttgaggatgttccttgtggtaacactgttgctatggttggtctggatcagttcatcacgaagaacgctacactcactaatgagaaggaggttgatgcatgcccaatcagagcaatgaagttctctgtctcccctgttgtgcgtgttgctgttcagtgcaaggttgcttccgaccttcccaagctagtagaaggtttgaagcgtctggcgaagtccgatcctatggttctgtgtacaatggaagaatctggtgagcatatcattgctggagctggtgagcttcatcttgagatttgcctgaaggatctgcaagaggacttcatgggaggtgctgaaattattgtttctcctcctgttgtgtccttccgtgaaaccgttcttgagaagtcctgccgcactgtcatgagcaagtcacctaacaagcacaaccgtctgtacatggaagcgcgccccctggaggagggtcttgctgaggcaattgatgatggccgcattggcccacgtgatgatcctaaggtgcgctcccagatcctctctcaagagtttgggtgggacaaggatcttgccaagaagatttggtgcttcggacctgagaccaccggcccaaacatggttgttgatatgtgcaagggagtgcagtatctcaatgaaatcaaggattctgttgtggctggtttccagtgggcatcgaaggagggtgcactggctgaagagaacatgcgcgggatttgcttcgaggtctgtgatgtcgttcttcatgccgatgctatccacaggggtggtggccaggtcattccaactgccaggagggtcatttatgcttctcagctcacagccaagccgaggctgctggaaccagtttacctggtggagatccaggccccagaaaatgcacttggtggcatatacggtgttctgaaccagaagagaggacatgtattcgaggagatgcaaaggcctggtaccccgctctacaacatcaaggctttcctccctgtcatcgagtcctttgggttctcaagccagctgagggctgcaacctctggtcaggcgttcccccagtgtgtgtttgaccactgggacatgatgggctcggatcctttggaggctggctcccaggctgcccagctggtgctggatatccgcaagaggaagggtctgaaagaacagatgactcctctttctgagtttgaggacaagctctaa

SEQ ID NO: 151669 - DNA, 851 bp, Zea Mays
atctatcgatcgagctttcgttatcctcctcttacattacaggtcatagctaagcaggtctgacaggatgtcgtggcagacatacgtcgatgagcacctcatgtgcgagatcgagggccaccacctgacctccgctgccatagtcggccacgacggcgccgtttgggcccagagcaccgcattcccacagttcaagacagaggagatgaccaacatcatgaaggacttcgacgagcccgggttcctggccccgaccggcctcttcctcggccccaccaagtacatggtcatccaaggcgagcccggcgctgtcatccgcgggaagaagggatctggaggcataactgtgaagaagacagggcaagcgatggtggtcggcatctacgacgagcccatgacccccggccagtgcaacatggtggtcgagaggctcggcgactacctcgtagagcaaggcctgtgaatggattcatttaacctcgctcgctcgcttgtccatggttcgagcatccagcagcaacgataccaacatcagcattatttaattggtagcctcctctagctacgcacgcattttagtcccctacacgcccttggattgtgcgtggctctgttaatcatctctcatccttcgtctgccatttctcccctgcccgtcgccgatcaccagagatttttgttccttgttggtaccatgcattttggcaaataattttgtaattccacccccaaattaaagtttggttgtcgtatggtttgtaaacccagaacaatatatatatgtgtgtgattgaactgttcctgtctattctttttgtaaacgggaatatatatgtatgcattttgtgtga

SEQ ID NO: 151670 - DNA, 878 bp, Zea Mays
atcgatcgatcgagcttaattgcgccactgctcgttatcctcctcttgcattgcattgcaggtcgtagttgagcagcagcaaccactgcacaggatgtcgtggcagacgtacgtcgatgagcacctcatgtgcgagatcgagggccaccacctgagctctgccgccatagtcggccacgacggcgccgtttgggcccagagcaccgcattcccacagttcaagccagaggagatgaccaacatcattaaggacttcgacgagcctgggtttctggccccgatcggcctcttccttggccccaccaagtacatggtcatccaaggcgagcccggcgctgtcatccgcgggaagaagggatctggaggcataactgtgaagaagacagggcaagcgatggtggtcggcatctacgacgagcccatgacccccggccagtgcaacatggtggtcgagaggctcggcgactacctcgtagagcaaggcctgtgaatggattcatttaacctcgctcgctcgcttgtccatggttcgagcatccagcagcaacgataccaacatcagcattatttaattggtagcctcctctagctacgcacgcattttagtcccctacacgcccttggattgtgcgtggctctgttaatcatctctcatccttcgtctgccatttctcccctgcccgtcgccgatcaccagagatttttgttccttgttggtaccatgcattttggcaaataattttgtaattccacccccaaattaaagtttggttgtcgtatggtttgtaaacccagaacaatatatatatgtgtgtgattgaactgttcctgtctattctttttgtaaacgggaatatatatgtatgcattttgtgtga

SEQ ID NO: 151671 - DNA, 649 bp, Zea Mays
atcgatcgatcgagcttaattgcgccactgctcgttatcctcctcttgcattgcattgcaggtcgtagttgagcagcagcaaccactgcacaggatgtcgtggcagacgtacgtcgatgagcacctcatgtgcgagatcgagggccaccacctgagctctgccgccatagtcggccacgacggcgccgtttgggcccagagcaccgcattcccacagttcaagccagaggagatgaccaacatcattaaggacttcgacgagcctgggtttctggccccgatcggcctcttccttggccccaccaagtacatggtcatccaaggcgagcccggcgctgtcatccgcgggaagaagggatctggaggcataactgtgaagaagaccggacaggcgctggtgatcggcatctacgacgagcccatgacccctggacagtgcaacatggtggttgagaggctcggtgactacctcgtagagcaaaggcctgtgaatgcatcccatacaacgacaccaacgccaacattaattaattagtagtctccatgccctgggattgtgcgtggccgctccgttgaacaccacccatccttcgttcggcattttttccccccttgtttatataattttattgtatcgttttggcaaata

SEQ ID NO: 151672 - DNA, 321 bp, Zea Mays
tggggacatttgggtaagtaatgaagcaaatccacactatcttgcaattttcagagtttattggttattctatgcccagtatctagtttagtttacagaactaatatgatatatatcctctccaggtatttggctccagagtatgcattgtcaggcaagttaacagcaaagtctgatgtatattcttttggggttgttcttttggagcttattacaggaagaaaacctgttgatgcttctcagcctttgggagatgaaagtctggttgaatgggctcgtcctcttctgatgaaggcaatcgagcttcgggagtttggggac

SEQ ID NO: 151673 - DNA, 697 bp, Zea Mays
gctggacgcgttcttcgcggtgccgcggcggtccagaggattgcttcagctcaagcggaagacgcaggccgtccaccccattcagacgtcgtgggctggcgacggggccggctgggcgctggattccaaaggtaaaaaccaagtcggtctctttcgctgacccattaatctctgctgtttggccctcagctgctatggatgagctggaaggtggaaaagatgttattttggctgatgattggaatcctggcgaccagacagcacaacagcctcagcttgctgctcctaccaagattgcaaggcatttcacgaggcctctcaataaggaacaaatggaggcaattatggagctggcaatgcagggaaaagaaaaggaagggaacaagaagaagggcagcaaggtgacacctctcaaggctcctctcatagaggctgttccgaggacctgagttgtttttaggagatgtgtgggtaggtctggtgcagaatgttagcacacatgtgtactagtctttgggtcgcccaactgcttttgatgactgctttgggtagtaggttgtgggcgaggcaatggtgttctttcttgtggcttgctctgtcggtagttcagtctgttgtaattctggtggtgagtcgcatgatgtctccggatggaagcgtgctgttgacgctggttggctggtcgagtcctgttttt

SEQ ID NO: 151674 - DNA, 437 bp, Zea Mays
aaattttttatttctcataccacgacatgaaagaaaaaaaaagatatatatggcactcagtgatgtacaacagtgtctatggcggcgggtggcgtgcggcgagccctcgtggcgctgcgctccggttccccgtctactatctctgcaacgctctcccgccaggcggcagctcgctcctcggagctggcgggtgcgcccctgccgcgtgcctctcgccggcgcctcgggatctcgaggtagcctgcctgccgcctggagcttttgaatctctagcggagcatttctattcttctccttggctcagatccggtggtgcagggtgccggttgtggcgctcggcggcgtgcagggttcgctgatgccgatgcacagcgccaccgcgtcggcgctgctcacctccatactcgggcttaagcctgactcttggggtgtaggct

SEQ ID NO: 151675 - DNA, 1226 bp, Zea Mays
acaccgcgcaggaacaaccaccaggcacagccaacaagcttgctagtgtgtggtttctctcatcaggtcaggaggagcatggccgaccataaggaggagcagtctgtgatggacaagatctccgagaagttccacggcggggactcctcgtcgtcgtctgactcggacgacgagaagaagaaggggtcttcttcggcgtcggcgacggaggccatgaaagccaagatctaccgtctcttcggccgcgagaggcccgtccactctgtcctcggcggcggcaagcccgccgatcttgtcctatggaggaacaagaagatctcaggcggggtactcgctggtgccacggccatctggctcctgttcgaggttatggagtaccatctcctcaccttggtgtgccactgtctcatcgtctcgctggccatcctgttcctgtggtccaacgcctccagtttcatcaacaagtccccaccaaacattcctgaggtgaaaatccctgaggatgtgtctgttaatgttgcactgacactgagatacgagatcaacaggggctttgctaccttgagggagattggacatggacacgatctaaagaaattcctaattgttatcgcaggtctctggctcttttcagttcttgggagctgttgcaacttcctgacactgttctatattgtctttgtggcactgtacactatacctgttctgtatgagaaatatgaggacaaggttgatgcttttggtgagaaggctatgatcgaactgaagaagtattatgccatcttcgatgagaagtgcctatcgaagattccaaagggcctcaaggataagaagcactagattggtagtaaggtacttgatatgaatcaacacccacgttaagtcacaccttccttgaaggatggtgcttggtcctggtctctagttgatagtatataatctgtatgggcaactctggtgtgactgacactttgatctgctgaaaattgttgatcttgtttttggtttcaactttcagcatacttgcctggaagcttgaaacatatcacgcgctctatcaatgtcatgtgaactttgccatacacctttattgttgacttggcgccttttgcaagtactaggctagtgaagtgtgcacatttctgttcatacgcagggatagtaattggtctagtttgataatgtggtccattgtcttcaggtgtgtgtgcatcccctatgcatag

SEQ ID NO: 151676 - DNA, 1753 bp, Zea Mays
tgttacgccgtcggcaaatcttcagttctagccgcctctcatagtcaacgaggttgcgtgataagaccctgcactcctgcagtgcatgatctgcgtcaaactttaggtgctggctactgctatttagcagatggtccaacaaggcacgcgcaagtgttgatagatcatcgtcgcatccaaatacatcgaatgcatgggcagcgtcgtggtgctgtactcatggatggtccgtggccacctccaccccatggtgcagctcgccgaccgcttggcgggacacggcgttcccatcaccatggcaattgccgacgtcccgtcatccagcgagtcccatgacaccgtcgcccgtctctctgccacctacccctccgtctccttccatctcctccaggcggcaacagcccgctccggcgacgaggccgaccccgacgccgaccccttcatcacgctcatcgccgacctccgcgccaccaaccccgcgctcctcgcgttcgtgaggtccctcccgtccgtgaaggcactcgtcatcgacttcttctgcgggtgcgcgctcgacgccgccgcggaggtcggactcccggcctacctgttcttcacgtccggcgcgtccccgctttctgtctatctgcacatccccgtcatgcggcccgacgtctcctttggggacatggggcgctcgttgctacacttccccggtgtgcacccagttcctgcctcggacttgcctgaggtcctcctcctcggtcctcgcaacgagcagtacagggcaaccattggtctcttcgagcagctgcccagagcgaagggcatactagcgaacacgttcgagtggttagagccccgcgccgtgagggcaatcgagcagggcagcccccgccccggtgagccagtgccgaggctgttctgcgtcggcccgttagtgggcgaggagaggggaggagacgggaagcacaacgagtgcttgacgtggctggacgcgcggcctgcgcggagcgtggtcttcctctgcttcgggagcgctagctcgttgccggcagagcagctgcgggagatcgcgctggggctggagaggagcgggcacgccttcctctgggccgtgcgcgcgccagtcgcgcccgacgccgactcgacgaagcggttcgagggccggggcgacgcggcgctggaggcgctgctcccggatgggttcctggacaggacgcgcgggcgcggtctggtggtgccgacgtgggcgccgcaggtggaggtgctgcggcaaccggcgatcgcggcgttcgtgacccactgcgggtggaactcgacgctggaggcggtcacggcgggcgtgccgatggtgtgctggccgatgtacgcggagcagcggctgaacaaggtgttcgtcgcggaggggatgaagctcggcgtggtgatggagggttacgacgaggccatggtgaaggcggaggaggtggaggccaaggtcaggctggtcatggagtcccagcagggagaggagctcaggggcaggctggcggtggcgaaggatgaggccgccgccgccgcgctggagacggccggatcgtcaaaggcagcgttagatgacttcatcagcaacctgcaaatttcgaggaaccagtgaacctatgtatctatcacagtgagtgttggattgtgcttaagctaatattgactttctggtgtgatgaccaactctccaagagatacctaaatcttttggccatttggactaaataagctccaaactgttacacag

SEQ ID NO: 151677 - DNA, 89 bp, Zea Mays
gccataggaaactctgcatcgcccgaagggctcggactcgggctcagccctggaagacgacgaactccgcaccgcccgccccagggctc

SEQ ID NO: 151678 - DNA, 1689 bp, Zea Mays
cttttggcttttccattcgcggtgccagtggtgggctgtttgcttttgtcgtcactggtgaacgggactatttcatttcgactcgtgtgttcgtgagctctgtgagaaacaaagaccatgacgcaggagaagacggtggtgctgtacccctccctgggcgttggccatctgaaccccatggcgcagctggccaaggccatcctccgccacggcagcgtcgccgtcaccatcgccgtcgtcgacccgcccgagaagcacgccgtgctagctgctgcgctggcccgcctggcagcggtcagtccctccatcacggtccacctcctccccatcccgccctgcgccaccagcaagcagcattcccaccccatcatgcccatcctggatgcgctccgcgccgcgaaccccgcgctccgggcgttccttgccgcgcgagtccctgccgtcgccgccctcgtggtcgacatgttctgcaccgacgcgctcgacgtcgccgcggagctcgcgatccccgcgcacttcttctacccgtccgcggccggcgacctcgcggtctacctccaggttccagatctctgccgcgccgcgccgtccccgctaagggacatgggcaaggcggcgctgaacttcgccggcgtgccggcggtccgcgctctcgacatgcccgacaccatgcacgactgggagagcgacgtgggcagcgtacggctgcggcagctcgcccggatgccggaggccgcgggcattctggtgaacagcttcgagtggctggagtcgagggcgctggaagcgctacgtggcggccactgcctgcccggccgctcgacgccgaaaatctactgcgtcgggccgctggtcgacggtggcggcagtggcaccgaggggaacggcgagaggcacgcgtgcctcgcgtggatggacgggcagcccaggcagagcgtggtgttcctctgcttcggaagcctgggcgccttctcggcggcgcagctgaaggagacggcgcgcgggctagagcgttcaggacacaggttcttgtgggccgtgcgaagcccaagcgaggatcaggactctggcgagcctgatctggaggcgttgcttccggatgggttcttggagagaaccagaggcagaggactggttctgaagaactgggcgccccagacacaggtgctgcggcacgaggccgtgggtgcctttgtaactcactgcggctggaactcggtgctggaggcggccatgtccggcgtgccgatgatctgctggccgctgtacgcggagcagaggctgaataaggtgcacgtggtggaggagatgaaggttggggtggtgatggaaggctacgacgaggagttggtgacggctgacgaggtggaggccaaggtacgactagtgatggagtcggaggaagggaagaagctcagggagaggacagcgacggcgaaggaaatggctgctgatgccatcaaacaaggcgggtcgtcttacgtcgaacttggtgagtttttgaagggtttaggacgcaagtgatggatagctatgcgtatgaatgataataatctgtctgtatatcagtataagatgaatgcttaacgcagtctggaagataagtattatatggctacttatcattattattgttgtttacactccatctcaccaaattataagttactttggtcacctaagagcaac

SEQ ID NO: 151679 - DNA, 1905 bp, Zea Mays
cagccattcaatgaaaacaacctgagaaagaagtgaaatggcggccccgtacgtacatacatatgcctgtctcgtgttccattgcgcaattggcattcccacgtcgagaactgcctgcctcaaggccgtcatggcgcacaagaccgtgatcctctacccttcgctgggagtcggccacctgaaccccatggtggagctggccaaggtcttcctccgccgcggcatggccgtcgtcatggccatcgtcgactcgcccgacaaggactctgtgtcggccgaggcgctggcccgcctcgccgccgccaacccggacatcgcgttccgccacctccccgtcccgtcccgcggcacggaacgttgctctactaacccggtcatgcgcgccatcgacgtgctccgcgccgccaaccccgcgctcctgggcttcctgcgcgcgctacccgccgtcgacgccctcgtgctcgacatgttctgcacggacgcgctcgacgtcgccgccgagctcggcgtcccggcgtacatcttcttctcctccgcgctaggcgaccttgctgtcatgctccacctgccgtactactaccctacggccccgtcctcgttcaaggacacgccggagacggtgctgcacttccccggcgtgccaccgatccgcgcgctcgacatgggtgcgacgatgcaggaccgggacagcgacgtcgccaaggcacgcctgtcccagtgcgcgcgcatgctcgaagcgaggggcattctcgtgaacagcttcgactggctggaggcacgggccctggaagcgctcagccgtggcctctgcacgccggggcgctcagctccgccagtccactgcatcgggccgctggtcctcgctggaaacaagggaggggccagcgagaggcacgcttgtctggaatggctggacgcccagccggaccggagcgttgttttcctcagcttcggcagcctggggaggttctcgatgccgcagctgagagagatagcacgtggactggagaactccgggcagaggttcctgtgggtcgtccggagcccgcctgagcaccggagcaactccgtggagccggacctggacctggagccgttgcttcccgagggtttcttggagcgtactagggaaaggggcttcgcggtgaagaactgggcgccgcagagcgaggtgctacggcacctttccatcggtgccttcgtgacgcactgcgggtggaactcggcgctagagggaattgcgtctggcgtgccgatgatctgctggccgttgtacgcggagcagaagatgaataaggtgcacatggtggaggagttgaaggttggcgtggtgatggaggggtacgaggaggagctggtaaaggcggaggaggtggaagcaaaggtgaggctggtgatggcgcccggatctggcgacggagaggagcttaggcagaggctcgtgacggccaaggatatggctgtggaggttctcaaggaaggcggctcatctcacgtggcgtttgacgcgttcttgacagacttgctgaagaacacccgtacggagaaaagtggcttcttgtgaggtgcaacggctatctgtattccagattatcgaagagcattgattaggagacgaccgctgttctaccatcaattccgtagctcaagcgaccttgttaagaacataatcacaatttttaggttataaagttagacgtgatcgacctagagcctgttcgtttggctttaatatgtacctactacttatacaacgttttgtctttatagattacacgttacatcgtcacttgttctactcgaatgtaaattgagaaatgacatgtactaatgctcgggttgtatacgtgttcattgtttatctggtgtttccacaatagaaactactgagacattatcattcat

SEQ ID NO: 151680 - DNA, 699 bp, Zea Mays
agaacgagatcatcgatggagaaccagcagcagctgcaaggagacgacgagtcgccgtcgcacacgttccccagcttcccctacttcaccgtgccgtcgccgcagccgagcttattaccgccaccatcggaatcggatgaccagcgcaataccctcgccacagcgcttcagcagcaaccgtcatcggcgtgcaataataacgacctgcagctgcttcctctccagctgggggcggctacggtggactggtcggcgctgcttcagcagcatgccagcttgatgggtcccctcttgccgggactactactgcagcaaccgccggcgcccctggacgaccagagcgcggagaacgcagggagtagcagcagcaaggagaagggcggcgcggcggcggggaggaagaagaaggcgagcaggccgcggttcgcattccagacgaggagcgtaaacgacatcctggacgacggctaccggtggaggaagtacgggcagaaggccgtcaagaacagcgaacaccccaggagctactatcggtgcacccaccacacgtgcaatgtgaagaagcaggtgcagcggctggccaaggatacgagcatcgtggtcactacttacgagggcgtccataaccacccctgcgagaagctcatggaagcgctcagccccatcctcaagcagctccagtttctctcgcagttctaa

SEQ ID NO: 151681 - DNA, 1543 bp, Zea Mays
caactgccacatcgtctgcatcgctccctctcagcttcctcattggccatccttcgtcttccatggagaggctccttgccggcctactactcggcttcctattattggcaagggcggcgtcggtggaggcagcagcggcaagaagcccggcggcaccacggtgggagttgggaaagggggagtgggcgttaacgttaaccctaccaaacccggcggcgccggtacaaccgttggcgttggcaaaggtggcgtcggcgtcggcgtcaatcccgggtacggcaagccgggtggcaccacggtgggcgttggcaagggcagggttggcgtccacgtgaacccgggcaagaagcccgtccacgtccccgtcggccctttccagtacgagtacgccgcatcggagacgcagttgcacgacgaccccagcgtggcgctcttcttccgagaggaggacctgcagcccggtaagaagacgaccgtccagttcgccaacaccgcgatggccggcgccaagttcctcccgcgaagcgatgccgaggccatcccgttctcctccgagaaggtccccgagatcctcggccgcttctcggtggacccggactccgtggaggcggcggagatggcgcagacgctgcacgactgcgaggcgcccgcggccaggggcgagaggaaggcgtgcgccacgtcgctggaatccatggtggactttgccaccgccagcctcgggaccagccacgtgagggccgcgtcgacggtcgtggggagggagggctcgccgaggcaggagtacaccgtgacaggcgtgaagcgggcgggcggcgggcgcctggtggcctgccacgcggagccgtacgcgtacgccgtgttcgcgtgccacttgacgcagcagacgcgggcgtactcggtgtcgatgctgggcagggacggcacggccgtggacgctgtcgcggtgtgccacgccgacacgtccggctggaaccccaagcacgtcgcgttccaggtgctcagggtgaagcccggcacggtgccgatctgccacttcctgccgcaggaccacgtcgtctggacccgcggcggctgagagtggtcgccgtttgcatgcactggtcatgacgccgccgtttgcttagattatgtttgtatagtttcgaataatcagacatctctgttacttctgctagctctcaggctaagcaagcttctaattgatctccgacgacgcttgttggatctacttctctggagacatctgatgatgaattgaatgcacctcacgatcacgacaacttgttttcgtcgatcttcgtggcgcaatgggcttcactgcctaccctgccgcgtgcctcagcccacaggcgtcggccggggcataacctcctcatcaattcatgtatgtaactatgtatcatcaccacctcatccgttgatcgagatcagtgcagaactactacgacatcaacccgctgctagctgttcaagacgcagaccagttctccgacagcctcgtggccatctccagccgctgggctgcctgccggcgtcgatc

SEQ ID NO: 151682 - DNA, 1683 bp, Zea Mays
cctggttttggttataaatattggcaaacaactgccacatcgtctgcatcgctccctctcagcttcctcattggccatccttcgtcttccatggagaggctccttgccggcctactactcggcttcctattattgatcgcgtcagtaggaagccatgcaactcgtgctccagatcagtactggaagtctgctcttcccgacactcccatgccgagctccctctcccaactcctcaacaccccagctggcaagggcggcgtcggtggaggcagcagcggcaagaagcccggcggcaccacggtgggagttgggaaagggggagtgggcgttaacgttaaccctaccaaacccggcggcgccggtacaaccgttggcgttggcaaaggtggcgtcggcgtcggcgtcaatcccgggtacggcaagccgggtggcaccacggtgggcgttggcaagggcagggttggcgtccacgtgaacccgggcaagaagcccgtccacgtccccgtcggccctttccagtacgagtacgccgcatcggagacgcagttgcacgacgaccccagcgtggcgctcttcttccgagaggaggacctgcagcccggtaagaagacgaccgtccagttcgccaacaccgcgatggccggcgccaagttcctcccgcgaagcgatgccgaggccatcccgttctcctccgagaaggtccccgagatcctcggccgcttctcggtggacccggactccgtggaggcggcggagatggcgcagacgctgcacgactgcgaggcgcccgcggccaggggcgagaggaaggcgtgcgccacgtcgctggaatccatggtggactttgccaccgccagcctcgggaccagccacgtgagggccgcgtcgacggtcgtggggagggagggctcgccgaggcaggagtacaccgtgacaggcgtgaagcgggcgggcggcgggcgcctggtggcctgccacgcggagccgtacgcgtacgccgtgttcgcgtgccacttgacgcagcagacgcgggcgtactcggtgtcgatgctgggcagggacggcacggccgtggacgctgtcgcggtgtgccacgccgacacgtccggctggaaccccaagcacgtcgcgttccaggtgctcagggtgaagcccggcacggtgccgatctgccacttcctgccgcaggaccacgtcgtctggacccgcggcggctgagagtggtcgccgtttgcatgcactggtcatgacgccgccgtttgcttagattatgtttgtatagtttcgaataatcagacatctctgttacttctgctagctctcaggctaagcaagcttctaattgatctccgacgacgcttgttggatctacttctctggagacatctgatgatgaattgaatgcacctcacgatcacgacaacttgttttcgtcgatcttcgtggcgcaatgggcttcactgcctaccctgccgcgtgcctcagcccacaggcgtcggccggggcataacctcctcatcaattcatgtatgtaactatgtatcatcaccacctcatccgttgatcgagatcagtgcagaactactacgacatcaacccgctgctagctgttcaagacgcagaccagttctccgacagcctcgtggccatctccagccgctgggctgcctgccggcgtcgatc

SEQ ID NO: 151683 - DNA, 1444 bp, Zea Mays
cagccttatcttgagcacggacttcatcttctccaacctccaagctccagcaccgggccgcacggctcttcctgctctgtgcgcgcgttccctacccagcgacgctcctccaagcttctccctccctgcgcgtttctctgctcacggcgctccctgtccgctcgtccaacagctgcccaagtccggcctctgcttggatctcgtctgtgccatggagctctcccctgccgcgcccagtccaagctcctcccctgccggcgtccagcacccggccggatctctgatggcgcgcgtgcccttctcttggcggcgctcactttctgcttctctctgtctctagctcgccgcagtgcttttcccttgctcccatggcgcgccggccgctcctctctgcccagcatagcagcttctttctctgcttctcccagtcggccgaggccccgcccgtccgtgctccttcttctagctccagctcgcggcgttccctctgctgagccatggctgtcgtgcctccgctcccttgttttccctgcgcgcagcaatgaggtttctgccgcctagccttcgctctcttcaacctccagctcgccacggcgctcggtcctgctcgatgttcctttgctcgcctagattcccccttgccatggccgtgcgtgccggctcactgcttgctcgaccgcgttcctggatcggccagcgtcgcgtgtagtgtaggtgtttgcggtcggtggatcctcgtcgtcgatactgcgcttgctgatggccgaagctcgggtcgttcgtggtgctgtcgcgccatcgcctcggtctggccgtcggccaggacctctcaatactcagctccctgttcgtccacagtgcgccctgttttctttgtcttgtcgtcgtcgttcagtcaccgcgccctcagctcgcgcagcttgcttgtggcccggtcactcgccctcggccacagccttgatctatcacggtctggctcaccgtcaacccgctcgaactctgccctggctaagcctttctgctcgtgccgttgtggcgttatcgtcgttcgtcttcatgtggtggatacaacaacgtcgtcgtttactctatggggttcatggtcgactttgtcacccgaagagtgattctggagttggataaaaatgtgagaaaagtccgtgcaacaattgccagaagcccgatcggatatccaaactgagaaccgtcgtcgtcctcgaggttatcaaatcgattcgatcgtggtgagccaatttattatttcagtttattgaattagataattatatagccacgatgatttttcttgtcgttagcataggcacattgtgtgacgacttctagattggtagccgtacctgttgctgatcctcttaagtgtctttggaaggatttcccttcctttgttttctttttatattataatggcacataaaattcttat

SEQ ID NO: 151684 - DNA, 846 bp, Zea Mays
atggcaggggcttcggatccgagcatcgccatcgcattggaagaacagtccaagtcgttgaaagctcaagccaaatcgctggactctacccagaaactcctccagcgcatctgcgaccgcttcgacgcccaggatgcgcgctaccgcgtcctggaagcttccgtggccagccaggcggtggatctggcgactctccgcgccggggagggtgacgcggtgtccaacctgcgggcggatctggagcaccaagtggcgtcgcgggtagcggagatcgagtccttcgtgtgggaccgcgtcgacgccatcgccgcggacgccagcacccgggtggctgcgctggagaacgtccacgcggtgttcgacagttggcggccccggatcgagaactccgtcgactcggtgcgcgctgaactctccaaggtcgccaagctgctcgagcgcggggcgctaacggagtcggaggcctctcctggcatcctcggcgtccatcaagcggcagcggggcgtcaatcgacatccgcgacgaacgcagcaggccatactgggcaccgcgctgcacaaccgacacgggaggtgggtgctgggtatgtctacgcccatacccaacaccaactcccggacaatggtatgcccagggatccctactcccagttcattcaacataatcatgctaatggggaaaatagggtccacaatcactacaatccttaccacaccgagggtactgctgccgaccatttacccactcctccctccctcggtcacttgcccaagctcaacttccctccattcgacggagacaaccccaaattatggcaagctaggagttctgccaactacttctag

SEQ ID NO: 151685 - DNA, 700 bp, Zea Mays
atactgcgcttgctgatggccgaagctcgggtcgttcgtggtgctgtcgcgccatcgcctcggtctggccgtcggccaggacctctcaatactcagctccctgttcgtccacagtgcgccctgttttctttgtcttgtcgtcgtcgttcagtcaccgcgccctcagctcgcgcagcttgcttgtggcccggtcactcgccctcggccacagccttgatctatcacggtccggctcaccgtcaacccgctcggactctgccctggctaagcctttctgctcgtgccgttgtggcgttatcgtcgttcgtcttcatgtggtggatacaacaacgtcgtcgtttactatatggggttcatggtcgactttgtcacccgaagagtgattctggagttggataaaaatgtgagaaaagtccgtgcaacaattgccagaagcccgatcggatatccaaactgagaaccgtcgtcgtcctcgcggttatcaaatcgattcgatcgtggtgagccaatttattatttcagttcattgaattagataattatatagccacgatgatttttcttgtcgttagcataggcacattgtatgacgacttctagattggtagccgtacctgttgctgatcctcttaagtgtcattggaaggatttcccttcctttgttttctttttatattataatggcacataaaattcttat

SEQ ID NO: 151686 - DNA, 250 bp, Zea Mays
cgtccccgaggtcccgaggaggcggcacttccaaggccggcgagcaagcgacgcccgtcgacgtgcgagtagcgacggcgacgcatgaggcgcgatgttcgagcgagcggcgtcacggaaagcccgagatgcgcgcagcgatgatcgcgcgtgacatcctccgatccagcgcagttttcttttcgattatagtgttttatgcctactacatgtattatttacgccaaaaactgtacgattttatgcttaa

SEQ ID NO: 151687 - DNA, 107 bp, Zea Mays
gagagcataaccagcagaaaattctaaacgaattggaacataataggtcagcaaaacattgtaaaacgttgcatgacctttattcatgtgcttccaaaatcaattaa

SEQ ID NO: 151688 - DNA, 255 bp, Zea Mays
atggatggaatgctgggggaggcgcggtttctgggggacaggatttcaccgcggcgacgccatggatggaaggggcacctgggggaggcatgttttacgaatgaaaggccatggatggaagtgggcgtgcgcgttgatggcaggcgggcacagcgcgtggggaagacgagcgcggcgagcgggatgcagaacggcagaaccgtaggcaatgtggacgcctacaatagatgcttaagagatagtagagataagtag

SEQ ID NO: 151689 - DNA, 656 bp, Zea Mays
aacgtttattttgttcgagcagccggttcgttcgaacttcgaagggttttagcggcagccggagataggtgagcgggcgaaggaatggctgatcgcagccggcgctctctgccgccgctgtcatgaatcttgtcgaggtaactagcccaacttcccccttcccgttccccacgccgagctggacctggatgccacagatcgttctgctgacgcctgccaagcggagagaggagtacgtgcagggcctgctggaatctaatggaaatgaatggaataacgactggtacgcgtgttgtttagctcccgttggcagtttaactgtaggataacgtgtactagtggtagattctgtcgccttgggaaaaaattagcaatttaatagtggcttgtgtttttgttgctgaaatcgctgattgttggcaatgttcgttgtgcattccaaagttattattatctttaatcgttcgcttcaaagaggcaacgctcggtccaacaggaatcttggcgctgttggttgctcagatctctcggatgaagtggtctctgaacagctttacaagctttgcactttttgttttttccttagtcgagttatatggagcaagcccctagccataaatcatctattgctgtctgtttgcttgattgattcagtt

SEQ ID NO: 151690 - DNA, 2332 bp, Zea Mays
gttcccagctgcatgccgcaagtgtcaaactccaattagtcaccagccttgcttgcttgcttgtcccagctaagccgaggacaggacacgcgaagaagaggaacgatcagtcaccagccttgtttgacatcctgagcagcttcatctcctcctcctggcaagtttcttggcaagctggtgctcaaacaatggcgtgttaattaggaataggatagaacaggatcgttgcatcacgcagccaaggagacatggctaggagcagagaggtggcgggctggggcacggtggccggaggaggcggcgcggcggccgtggagaaggcggtgcggtgcctcggcaggggcgtcgacatgacgggcgacctgaggctgaagcactgcaaggacgcggggggctgcctggtcgtccggagcgccgggaggaaggcggcggagaaggccgtcgtgccgggcttcggcgtcgtcgccgacctgcccgccgacgtcaggtgcggcaagggcgaccggatcaggttcaggtccgacgtgctcgagttcaacaagatgtcggaggcgttcaaccaccggaattcgctggcggggaagatcccgtcggggctcttcaactcctgcttcgacctggagagcggctcgtgggcggaggacgccgccgccaccaagtgcctcgccttcgacggctacttcatctcgctcctggacctccgcctcgactgccggccgctcgccctcgccgaccacgtcgtcggcgacgtgccggcggcatgggacccggcagccatagcaagtttcatcgagaggtacgggacccacatcgttgtcgggctgggcttgggtgggcaggacgtggtgtacgtgaagcaggacaggtcgtctccgctgtccccgtccgagatcaaggagcacctcgacaggctcggtgaccagctcttcaccgggacctgcaccctgcccccttccaaccgcaaactcagggaacacaaatctaaggtccctgaggcgttcaatgtgttcgatgcccaagtgacacagcaagggctccaaggaataatggctactccagtgtcctgcaaagagggcgtgacggtgatacactccaagaggggagggaacgcggcggcgagcgaccactcggagtggctgctcaccgtgcccgcgacgccggacgcgataagcttcaagctcgtgcccatcacgtccctcctcaagggcgtgagcggcgtcggcttcctctcccacgccatcaacctgtatctcagatacaaacctccgacaggcgagctgaggtacttcctggacttccagcaccacagactgtgggctccagtgctcggtgacctgccacttgggccctgctccaaccggcaggctcctagtccggccttgaacttcagcctcgtcggttccaagctctacgtcagctcgagcgaggtggttgttccaagactacccgtcaccgggatgagactacatctggagggcaagaaaaataaccgcctaggcatccacctgcagcatctgtccaacaccccagcgttcatcggcggaacaccggccaatgagcagccgccggcggcggtgtggcgcgggtcggagacgatctccgacgcgcggtactacgagccggtccagtggaggatgttcgcgcacgtgtgcacggtgccggtgaagtacgaccctcgctgggccggcgccggcgccggcccgccgtcggcgtacgtcgtctccggcgcgcagctccacgtcaaggcccacgactcgaccaacatcctgcacctcaggctcctgtacgcccggctgccgggccacgccgtggtgcagtccaggtgggcgcacggcgccgccaccaggctgtcatcgggcagagggagcttcttcctgtccaagtcgctggcctcgggctccggcggcgtcgacaaggagcagcagcacccggggagggttcacgtcgactccggcgtgttcgccggagggccgcccgtgcctgtcgggacccagaggctgctcaggtttgtggacacgtctcaggtcaccatggggccgcaggacagtcctgggtactggctggtcactggcgccaagctggacgttgagaaggggaagatctcactccgcgtcaagttctcgctgctcgctccagtttcttgacacgctagtcttctttctgctaggagaacaccgctgtgcagaaggccgaaattaggggggactccttgcgcagtgatgagtgattgtatcaaggtcatatttgattttacacagccttccgtacatatttttgctactactttcttgtacaatatattcttaaaatccttcagatttttcatgcaatt

SEQ ID NO: 151691 - DNA, 1134 bp, Zea Mays
agagaccagaggcaacccggtctccgtctcgctcctttcaccatggatcaatcggcagctgcacctccccggcaagacgctgctgcgacgaagaagccgacgacgctcctcgacgcgtacgaggtggagtgcatccgccgggagctgcagcggctcgtcctgaagcacaaccagagcgctgccgccgggggcgacaccgccgcggcagcgcttgcgcacggccaccgccgcagcgacgacagccacctccaccaccagcagcatcgcgcgagcagcggcgcaaagaaggcgacgagcgccaagagagtcagtccgtcgccgtcgtcgctgacgccaccggggcccgagaagggcgcccgacgcggggcgccgctgctagcgcggcacgccgtcgcgatctgcagcggcaccgtgcccctggccgccgctcccgccggccgcagagggcgccgcgccacgttgatatgcagcggcaccaccgccgcgcccgtggccagcgctcccgttggcggtggccgaaggaagcagcgcgccgacgcgttatgcagcggcaccaccaccgcgcccgtggccagcgctaccgtcggcggcggccgagggaagcagcgcgccgttgctttgtgcagcggcagcaccaccgcgcccgtggcctgcgctggcgtgggcgtcggccgccataccgggagggagagaaggtagtgtagcgtgccactagtcagactaacactcgagtactcgacaaacaggcatgccgacatgcagttaggagccttttttctgagtattttgtctctagtagtgttttggtttttgtccaaccaatgacaagaattgcgtccgcggccgtgactacacgtgtccaaatggatcggtccgatagtgggcccgtgattcggcaccagcatggttcggctcgactagaaacgtgtctggcccggcctagcctggtaatcgtgctgggcttgagtcaccgtctggcccacgatgcaggtataggttcgatccagttaaaggatagacatggtaatggctcgcataagagactggtttggtaacggtcagtctgttcttagcaacaagactgatgattctattattattatacgagagtattctgaattgtaatatgtgttt

SEQ ID NO: 151692 - DNA, 886 bp, Zea Mays
gatcatctcacgtctgagctggacaaactgaccactcatgagaagtacaaggggacagatcagattcacactgcaagtggtgcaggtatgaacatctgcaatgttggtcatgctgttattgatacccctactaaacccttgcatctcaataataccttgcacgtcccaacagcacaaaaaagtcttgtttatgttcatcgtttctcatctgataatcatgcctcacttgaatactttccaaatcattttttgattaaggatctggacacgaggaaggttcttcttcaaggtagatgcagagatggtctttatccccttccatcaaacagttcttggcaggggcattttggcgccatcaagtcctctcatctcttatggcacaatcgtatgggtcatccatcattacagatcattcgaaaattagccaaatataatcagattatatgttctagtgagtcaagtagtttgtctgtctgtgacgcttgtcaacaaggcaagagtcaccaattaccttatccagtgtcaacaagtgtctctaccaagcctttacaactcgttttctcggatgtatggggcccagcccccgagtccgttggtcggaaaaaattctatgtcagttttatagatgattttagcaaattcagctggatttatttgttgaaacataagtctgaagtgttccaaagatttactgagttccaaaccatggttgagcgcctatttgacaccaaaattattgctatgcaaacagactggggaggcgagtatcagcgcctaaattctttctttactaaactcggcatcattcattatgtgtcctgcccacatgcgcatcagcaaaatggacctactgaacgcaaacatagacatattgttgaagttgggt

SEQ ID NO: 151693 - DNA, 826 bp, Zea Mays
caagaagaagaagaagaagaagaaacgcgttttcatttccacatcccaagagaacaagcaaccgaaggccaagtcaacccacgaatctgcgacctcccgtccccctggcaattcccaacccatgaaatccccgtatccaacgaatcaacaccaccacaacctctttcccccaccccctcaagaaaaccgcatgaatcggtcaggggacgccgaatcggaccccgagaccgatagatcaagccttctctaccaaatccaacagggaaaacaaacacgagaaggggagcagagcaaaccctaaccctgcgcgaggcggacgcggagtcggagatggcgtgcgtggattggaatcgcgaggaggagcttcgaaatgggggcgtcgtcgggccagagaaggtgggggagccagataaaaaaggtggagccgacgcgaagttacttgcctgcccctggtgttttgcattatttgcaagtaagtggtggcgtcgagtgttctgggcgaggtgtggtgggcgttgtggagtcgcaaagaggcaaagagtagagatggcaatggtaatacctcatactcatacccacaacataaaaataactctatcggatcagtcatatatactggcgggtatagatttactctcatacctatacccatacccatgtgggtatgggtcacccaacgggtcacccgtacccacaaaagctaaacatctatcaaaatattatatgatacaaatgtcagggaaatttggcaaggaacaatcatctaggttgttgtaaggtataactatgtctttcttgttacttatctcatgtgatatgtgcattc

SEQ ID NO: 151694 - DNA, 841 bp, Zea Mays
attgttcccgccgtcttccccaattcgccgccaggccagggtaaaaaaaaaaaagaggaagaaaacctcctgcaattcccattccatcgatccagctccggtccaagccaaagctttcttcgccccaaaccttgttcaactccaatgtcggacttcttcttcgggagcccgttccgccgcctcttccacgcgcgccccttccatgccgtcgactggtcctccgccgcggcggcggccatggactgggtggagaccccgtcctcccacgtgctgcgcgtcaacgtgccgggactcggcaaggacgacgtcaaggtccaggtcgacgagggcaaagtgctcaccatcaggggcgccccgcccgcggccaaggagaaggggaaggaggacgaggaggaggggacggtgtggcacgtggcggagcgcggcaagccggagttcgcgcgggccgtggcgctgccggagaacgtgcgcgtggacgggatcagggccggcttggagaacggggttctcaccgtcgttgtgcccaaggaagtcgccccggcccggcccaagcccaggtccatcgccgtctccagcaagctctgatgagtctgaggcgatgagtggcagagtgtacggtgcagtgttaaaccatgccgcaaatggcgggtacgtctgaattctggtcgtgtgtgtgtccgtgtcacctagaaaacgcgcacctcgtgtaaattgtgatacaatttcatgcaagtaatccgagtgagtgaaaatggctgctagccaaaaacggtcgattctgaatatgcagtttgcaataaactaaattaaaaggaaaaggcatgtttgaatatgttaaaga

SEQ ID NO: 151695 - DNA, 998 bp, Zea Mays
ccagcaacacaagccctcgattaatttctacttccactcgtgccgcgccctcctcctcctgtcctgctccaccgctcattggcaccagcgcagcagcgcatctctcgctcgtcgttggtccttgtcaacgatctcgccgcttccatggccgccaaacctgcagagacgacagggacagggagcaacaaagctgagtcctccttctcctcctccatggcggtggcggccgacgtttacaaaggcgagctgacgccgctgcagcggcacgtcgccttcttcgaccggaacaaggacggcgtcatctaccccgccgagacataccaagggttccgcgcgatcggggccggcgtcacgttgtctgccttcagctccgtcttcatcaacggcctccttggacccaagaccataccggagaacgagaaggctccagctttcaagctccccatctacgtgaagaacatccaaaaaggaaagcacggaagtgattcgggcgtgtacgatgccaatggaaggttcgttgctgaaaaatttgaggagatcttcaagaagcatgcccacactaggccagacgccctgacaggcaaagagctgaaggagctgctcaaagcaaacagggagcctaatgacttcaaaggatggctgggtggtttcacagagtggaagatgctttactccctctgcaaagatgaaaaagggtttcttcacaaggacactgtcagggctgtctacgatggcagcctgtttgaaatgttggaacgcgagaggaacgctaaggagtctactaagacgaaatgagaagagcatcgtcttgcacccgttcgtgtggtcggtagtagaatttgtaaattgcggtgtgctgtgtgcatgtggaccagaaaaatagtacactagtttgattatgtacgtcattagatgcatatatgtttatttatatttatggagcaagagatttcttataaatatatcgctctatagtagatgtgcggggtgcagacatc

SEQ ID NO: 151696 - DNA, 1328 bp, Zea Mays
actggcttctaccaggatgacctctgcttcattactagctgttgggaaggaatagccgtcagaagaagcaggaatagccggtggcatggcaatggcgggtcggcaacgtgcgcctgaagcagcttcttcatatttgccgccagtgacggcagcggctttgcttctatgggtctttattagctgtgcacatgtggaggcaagcgttgattttgccaacctgactgctcttcagaagcatgctgaattcttcgaccggaataaggatggtattattacagcctcagagctctttgaaggatacgttgcaattggatgcgatgccgaatatgccagggttacagccgcatccatcagtgctggtgttggtcctataacaagccctgctgatgcaccactgcctcacacatccatatacgtagagtatatccatagggcgatgcatggaagtgatacgggtgcatacgacgctgaaggaaggtttgttcctgcaaagtttgaagaaatattcacgaagcatgcgaaggtcaggccggatgcgttgacgttcgaggagattgaggagatgattctagcaaatagagacccattagaccctgaatcatgggctgcgcctgaaggagaatggggactaacatacaagcttgcaagtgataagcaaggctttcttcacaaggactctgcaagaggcatatatgatggcagtgtgttctacaagcttgaggaacagaggacgtctgcagcaagcgaaatgtgatggagttcagcattcagccagatgcaaccagcatatataataaacacgaaaatgtgttaggaaattactagactgttatgtgaatcgggttttattggttgctggctccgctcccgcccagattacgccagcctgggccggtatagatacatgcccgtctcacatccccacgtatgcaagtaaacagatgaaaaaacagctaggttgcgcgaccgtatataggctggactcacgccatgcaggtaaccattcataagccaaaatatagtcaatgtacgcgctggacctgaacgctgctgaccaggtaaccaatcaggcgaataatgtattgtgcagtataagttacggcttttatgttaagccttcgaaatttgaagtttataaagcacaccattggcatgcgactggacaatatgaacataagttaccaagttcaccagttgaaccctcttgcgaatacaaggttgacttgtcccttttggttcgagttgattatgagtgattgtccatgggtagcactctagggtagtggtgggttgaccagtgtgtgaaattatgtatgtgcaaccatgtc

SEQ ID NO: 151697 - DNA, 1357 bp, Zea Mays
tgcttcttgttggtcttctttcctttgggcaccctttcgaaagctgtaggtgcaggaattagcaagaagagaaggaagcaagcatgtcgaagcctgttgcagcagcaatggtccccgtggtggcgctgatgatggtgctgtgcgcgtgcacgatgcccgcgcgcggcggggacgactacacggcgttcgtgtacgccgggtgctcgcaggggcggtacgaccccgggtcgcagtacgccgcggacgtggacacggcgctgtcgtccctggcgaacagcgccggcttcaccgcctacgccaactacacctcgccgtctccgtcgggcctggagggcgtgtaccagtgccggtccgacctgcccgccgcggtgtgcggcgtctgcgtgaagtcggccgtgtcgaagctggcctcgctctgcagcgcggcggcgggcgccgcggtgcagctgcgcgcctgcttcgcgcggtacgggaacgactcgttcctggggaagcaggacacgacggtgctgttcaagaagtgcggcggcggagatggcgacgacgcgggcgtggcggccatgcgcgacgcggcgctcggcgcgctcgtggccgccggcggcggcggcggcgacgggggctcgtaccgcgccggcgcggcgggctacgtgcaggccatgtcgcagtgcgtcggcgacctcggcgctaaggcctgcaccgactgcgtctcggccgcggcctcgcagctcaaggccggctgcggctacgcctccgccgccgaggtgtacctcggcaagtgctacgcgcgcttctggtccaatgccggcggcggaggagtgccggtcggaggtggcgccggtaccggtggcggcggtgtggggggaggagctgcaggcaatggatacgcgtatggtggattcgttcccaacacgtacgggcagcacgacgagtccgggaaaaccctggccatcatcatcggcctggtggcggcggtggccattgtcatcgtcttcctctccttcctccgcagggccggcgccgtcggcggcaaaagctaagtgcgcgcgggattggtcaccaccaacggactggatcggtcggtgcaggctctttataattggctcgaaaaccgctttacggtgcgagcgagctgaaaggcggctttccctgtgcagtcatgtgaacctgaagattccgtccagtaccagctactcgtagagccacgatgtgatatacattttccggcaaacaaaaaaataacagattatgtggactctctgcccgttattatatactatatatgtatacttatatagagagtgtacttattatggagcatgagattcagcatatatatattgtccaagtttatgtgtcg

SEQ ID NO: 151698 - DNA, 150 bp, Zea Mays
atgggatcgaggaacgggaacgtggtacgcggtacgctactaaaactaggatttaacactactggaacgagattgttcccatgttcctggaacggaacgaacgttcccggaacgaggaacgtggctaagttcccagttcccggttactaa

SEQ ID NO: 151699 - DNA, 2265 bp, Zea Mays
atggacgtggcggtcttcggggcgcggtgcaccctgcggtatgagatggacctgcagttcttcaatgtcactggcaacagcaagatgctgtccctattcaaagcaaggtggcaccccagtgttgatattggtaaatcatgcgtaaatgggtgtgctgaaatgatggagaacaatagggaacatagaattgctcttgttgctgctggattagctgctagaatcacttcagatatttttaataatgacctcagtggaccctatgcatttcttgaggattcagataactgtatcactttctgcaagtacaaatacacaaacacagaatatctttccctttatgtacttttagctagaccttccagtaatatttcgcttgaggggagcgggagcggcggctgcgacggccgcggtgctggggaggaggatgcctccgcgctcgccaactccctcgacgcgctttgcaaggcctgcaagcctgaggtgcgtgtactcactccttcactcgtgcgcaacttgttccttctccaacgtgttccagaacaccacagcatgcctctgtccacatacttcattggttcttcatttaattggaattcaaacaaggatttcggtaaatatgagtgtcaacttttgctttgcattcttctgtatagtacaacacacattgtttcttgcatttggaagttgttggtctcatgtaggacacagtggcgccaaggttccagactgtggcgggactgggctctgcagccgctgcaaaggagagtgcttcgtcttcaagcaactctcgaaggagacggccaccaggtcacacaaggccgccaagaacatggccaccggatacacttcggggctgtccaccaatggacctactgcaacaagtactcctccacccgcgtgcctgcataaaatggcaggggttctaccaacaatcaacacacatgtgaagcgaagctgggacgtgcatgtatgtggatccacgacacgtgcatctgtaggaaccctgattttggtatggtttctacactcaaattcatcagtatgatataaggcaatctgctggctggtatttaagagtggccctctcttcatatcatcgaaaggtaaaactattagtggcacacgttggttttttcctttgtttccaacatgtaacattatattaggggtatgtgcagtttagggtaagtaatatactcctttgtgctcagtaagtaattgatagaaggtagaagaaggtagaaacatatgtgcagtttagagtttacctctttatgatttctgggtagccacaatattttcacattgcaattcaagtccttagtaccctggtaatcaaactaacatgtcagagcatcaggcaaattcattgtgcacctgcctattgtatgctaaagaaatcagtttttttgcatgtgttagttgtctcctaacctgctgcattttcaatttttgtgttctgtgttttgtaatttgggagcaccttcaccattgtgttattagagctaggcaccttcaccattgtgttattgatgatctttcttggtctgaatggagtttttgcacctattcacatgccagagagtttatgcattgtcctccttttttggatacactttctgttaaaaaatgctacacagttgcattctacttaccttgtgattttgatggagctctgttgttgtgcttctttgacatttgtcggtcctttgagcattaggtctgcatcatgcattatgttgttatctattgatctatatatcccatattgtggagatcactaaaatcttagtaatttaagttctgttcaaactttcaattccatcgtccgtgaaaaattgataagtatgaatgtgttgacttgactccattttatcttctccttatttgagcttgtattcttattttttaatacattgctgccctgcactgagatttctattgtaaataaacaaagtgctatttaaattttgatttattccttacgaatgtctgttggtttcaggaaagtgctgagagaggtggcatctagaggatgtcatgtcgaacgtgtgaagtttttttagaaatatgtatatttgtgtgaagctttttagaaacttggctccattttattttctatgttcctctcggctttgtttcctatcctttccaatgacttgctatgcatttgcactgtatttggcatgtctaaaactgctacacaaaacttgatatatattttgtctaaaaatactatatccttgttatgcttgattgatcttt

SEQ ID NO: 151700 - DNA, 703 bp, Zea Mays
agtttcatcgccacccccatgtgagcaatccgggacaccgcggagatgcctcgtgaggaaagcggtacggcgaggcagagcagcgtcggtggtcgtggaaggatggagcaacaaccccacatgttttgttctaatgacacagtggcgccaaggttccagactgtggcgggactgggctctgcagccgctgcaaaggagagtgcttcgtcttcaagcaactctcgaaggagacggccaccaggtcacacaaggccgccaagaacatggccaccggatacacttcggggctgtccaccaatggacctactgcaacaagtactcctccacccgcgtgcctgcataaaatggcaggggttctaccaacaatcaacacacatgtgaagcgaagctgggacgtgcatgtatgtggatccacgacacgtgcatctgtaggaaccctgattttggaaagtgctgagagaggtggcatctagaggatgtcatgtcgaacgtgtgaagtttttttagaaatatgtatatttgtgtgaagctttttagaaacttggctccattttattttctatgttcctctcggctttgtttcctatcctttccaatgacttgctatgcatttgcactgtatttggcatgtctaaaactgctacacaaaacttgatatatattttgtctaaaaatactatatccttgttatgcttgattgatc

SEQ ID NO: 151701 - DNA, 797 bp, Zea Mays
agtttcatcgccacccccatgtgagcaatccgggacaccgcggagatgcctcgtgaggaaagcggtacggcgaggcagagcagcgtcggtggtcgtggaaggatggagcaacaaccccacatgttttgttctaatgacacagtggcgccaaggttccagactgtggcgggactgggctctgcagccgctgcaaaggagagtgcttcgtcttcaagcaactctcgaaggagacggccaccaggtcacacaaggccgccaagaacatggccaccggatacacttcggggctgtccaccaatggacctactgcaacaagtactcctccacccgcgtgcctgcataaaatggcaggggttctaccaacaatcaacacacatgtgaagcgaagctgggacgtgcatgtatgtggatccacgacacgtgcatctgtaggaaccctgattttggtatggtttctacactcaaattcatcagtatgatataaggcaatctgctggctggtatttaagagtggccctctcttcatatcatcgaaaggaaagtgctgagagaggtggcatctagaggatgtcatgtcgaacgtgtgaagtttttttagaaatatgtatatttgtgtgaagctttttagaaacttggctccattttattttctatgttcctctcggctttgtttcctatcctttccaatgacttgctatgcatttgcactgtatttggcatgtctaaaactgctacacaaaacttgatatatattttgtctaaaaatactatatccttgttatgcttgattgatcttt

SEQ ID NO: 151702 - DNA, 373 bp, Zea Mays
ctcccctacaggctgtataaaccaaaccgcggcggcctcctctgccgtgaattccattcccctccgctcgctcatggtgcaccacctcggggtctgcaagatgtcgctgccgcccaaggtcagcccgcacaggcccttcgccatcatcaacggcgcccaggaccagttgttcggccccgtgctgcgtagcgggtacagtgaagacggagtggagatctccatctccaacgccgggctcgccaacctcctgcccgccgacgccgactctgactcgaccggtcttggcatgggcgatggtatgagcgcgtccatcagtcggctctgctcttcgatgtacgactgccaaaacacctggccgttgttgttcgcctga

SEQ ID NO: 151703 - DNA, 130 bp, Zea Mays
ccatcaacaggggctccacagggaggtatttattccataaagttatcaagttatagtggaattaccaaccggactggctttctccaagcgagggttttgtcttttccgcttcctcgcgcaaagaaaaaaa

SEQ ID NO: 151704 - DNA, 1918 bp, Zea Mays
gggccgcggactggacagcccaccacactcttccactcccctcccccgccccgccaccgatccccaccgccgaacaaccgacgggtgctgctgctcctgctcctgccgccacctgctacgtagcatacgcggacggacgtaccaccaaacccccaccgaactagctgccggtccatcgcgctacgccgctacctacgacgatcgggcaagcgaagcgcgcgagttcgacgtcgtcgtcctctggcatcatctctatccgccgtcctgtggtatcgtcagcagcaccggtgtcgtcgtcgtcgatcgtttccggttgtgaggagaggcggcgatgaagaggaccacgagcaggagcggcgcgtcgcccgccgccggcctgtggctccggccgggccggctcggtgaggttctcgccgtcgcgactctgctggcctcggcgttgctgccgtcggcggcggctgcgaccgacgcgccgccgccggcgtcgtcgccgcggcacgactacgaggacgcgctgcgcaagagcctgctctacttcgaggcgcagcggtcggggcggctgccgcacggccagcgcgtcacctggcgcgaccactcgggcctcaccgacggcctcgagcaaggggtggacctggtgggcgggtactacgacgccggcgaccacgtcaagttcggcttgcccatggccttcaccgtcaccatgctctcctggagcctgctggagtacggcgccgacgtcgccgacgccggcgagctcgcccacgcgctcgagtccatcaagtggggcaccgactacttcatcaaggcgcacaccaggcccgacgagctctgggcagaggtcggcgacggcgacacggaccactactgctggcagcggccggaggacatgacgacgtcgcggcaggcgtacaaggtggaccgcgaccggccagggtccgacgtcgccggcgagaccgcggccgccatggccgccgcgtccatggtgttccgggagcacaacccgcactacgccagcctcctcctccaccacgcgctgcagctgttcgagttcgccgacaagtaccggggcaagtacgacagcagcatcgcggagctcctctgggccgcgctctggctccaccgcgccaccggacgcgccgagtacctggactacgtcgtcgacaacgccgacgacttcggcggcaccggctgggccatcaccgagttcagctgggacgtcaagtacgccggcgtccagatcctcgccgcaaggctgctgctcagcggggagcactcgccgcggcacagggagacgctggagcagtacagggcgaaggcggagcactacgtgtgcgcgtgcctgggcaggaacgccgcggacggcaacgtggagcgcagccccggcgggatgctgtacgtgcggcagtggaacaacatgcagtacgtgacgagcgccgcgttcctgctgtccgcctactcgggctacctctcctcgtcgtcgtcgtcgtcgtccgtgacgtgcgcggcgggcggcggctcatcggcggccgccagcgccggcgaggtgttcgcgctggcccgggcgcaggtggactacgtgctgggcagcaacccgcgcgggatgagctacctggtgggctacggcgcccggttccccgccagggtgcaccaccgcgccgcctccatcgtgccgtacaagcacagcaaggagttcatcggctgcgcgcagggcttcgacgactggttcgtccgcaagggcgccaaccccaacgtcgtcgtcggcgccatcgtcggcgggcccgaccgccgggaccgcttcagggaccacagggagaactacatgcagaccgaggcgtgcacgtacaacacggcgcccatggtcggcatgttcgccatgctcaacaggctggccagggacgaggcgggtgtaaatagatag

SEQ ID NO: 151705 - DNA, 3494 bp, Zea Mays
gctgagctctcagccatggaagtggtcgatctctcccccacgtcccgccccctctcaccgctcctctccaccgcacccgcccgccgcctccgcctcctccctccccgctgcgtcgtcggcctgcgcgcctctccccggacccgagcctcagtagaacccgctacccaggaattgggaacagcggatgcagtggagtggagtggggatgccatacgtcggcgtttccttgaattttatgcagcccgtggccacaagatccttccgagctcgtcgcttgtgcctggcgacccaactgtgttccttaccatagcgggaatgcttcagttcaagcctatattcctcggcaaggaacctaggcgtgtgccacgcgccactacctctcagaagtgcatacggacaaacgacattgaaaacgtgggtcgcactgctcgacatcagaccttctttgaaatgcttgggaatttcagttttggtgattacttcaagaaggaagcaaccacatgggcatgggagctggcaaccaaggagtatggattgcctgcagaaaggttgtggattagtgtttttgaagatgacaatgaagcattcaacatctggcacaatgaggttggtgtgccaaaggagcggatacagaggatgggtgcagaagataacttttggactagtggcgcaactggaccttgtggaccttgctctgaaatttattatgatttctatcctgagagaggatcatcagatgtggatttgggcgatgatagccgattcattgaattctataatcttgtctttatgcaatataacaaaaaagacgatggatctctagaaccgttgaaacaaatgaacattgatacaggaatgggccttgagcgtatggcacgcattcttcaaaagctggtgagccgcggccctgtgctcctgcggtggcttgccgaggtccagcgcgggcggcgagtccggcaactcggcgacgggcgcggagccgatgcgctcgggcggcggcgcaggcgtgaggagctgcacgacctcgacgttccagagcacccagtcctgtgtggtggtgcggtggggcacgtcgtgggtgacggagttcctctagggcgggagccccccgttggcgcggaggaagtggcccgccttggtgcggaggcgcgcctggaagctgtcccgcaggggctcccagtccacagatgcgttggccaggcgcggcgcagcgggcgccgtttgcgtcaccttccgccccgtcatccccagcaggaacggctccccagaggcggtgaggttccaaacaactatgagacagacttgattttcccaattatagaaaaggcagctagcatggcgatggtgtcctatgcaaaagctgatgatgccacaaagacaaatctcaagataattggagatcacatgagagcagttgtttatctcatatcagatggggtaattccctcaaatatcgggagaggatatgttgttcgaaggctaataagaagagtagttcggatgggtagattgataggaataagaggtgacgggcatggaaactctgaaggtgcatttttaccttcactagctgaggtagtgatcagccttagcactgagatagattcagatgttgaatcacgacggagatcgatccttggagaacttcaaagggaagagatgcgatttgttcagactttggaaagaggagaaaagttattagctgaacttctggatgaagctttattaaatgctggtaataatggaaacaagccttccttatctggaaaaaatgttttccttttgtacgatacatatggtttcccagtagagattacagctgaaatagccagtgaacaaggcgttactgttgatattgagggatttgatattgaaatggaaaaccagaggaaacaatctcaagctgctcataatgtagtcagactttctgtaggaaatgagaccgagatagtaaagaacatcccggatactgaatttttgggatatgattctctctctgcttctgctgtcattaaaggtctcctagttaatggaaacccagttaatgaagtttctcaaggttctgaagtagaaatattattagaccggacaccgttctatgctgaatcgggtggtcaagttggagataatggtttcttatatgtgaatggaggggaagatagaagacaaacaacagttatagaaatcaatgacgtccaaaagtctctgggaaatatatttgtgcacaaaggcatgattaagcaggggtctgtagaggttggcaaggaagtagatgcttctgttgatgcaaaattgaggcagggggctaaggctcatcacactgcaacacatctactacaatctgctcttaaaagcgtagttggttcagaaacttcacaggctggttcccttgtggcgtttgaccatctccgatttgacttcaatttccatcgcccactttctgaagaggaattaacaacaattgaagcacttataaaccaatggattggcaatgcagcacatgttgagacaaaagtcatggctttgcaagatgcaaaaaatgctggtgcgattgcaatgtttggagaaaaatacggtgaacaggtcagagtcgtagaggttcccgggatctcattggaactctgtggtgggactcacgtcagtaatactgctgagattcgtggtttcaagataatttcagaacaaggaatagcttctgggatcagaaggatagaagcagttgcaggtgacgcttttgttgactatgtgtgtgctcgggacaattacatgcggcgcttatgcttatcccttaaggttaaggctgaagatgtgaacagtagagtagaaacaattcttgaagagctaagagcaaccagaaacgtagcatcatctctacgcagcaaaattgcagtgctaaaagcagcttctcttgcaagtagagctacaactgtggagccccagaatgtcaggattgtggtcgagaacatgggtgatgtcgacgcagatgggctgaaaagcgccgcggagtatctcatagataccctcaaagaccctgctgcggtgattttaggatcaagcccaggggatggtaaagtcagcctggttgctgccttcagccctgcaatcgtcgaaatggggctgcaggccgggaagttcgtgagtggcatagccaaactctgcggcggaggcggtggaggcaagcccaatttcgcccaagctggggggcggaagccggagaacttgcccgacgcccttgagaaagcccgagctgaaattgtggcacgggtatcaggttcgagctgattctccgctgcctcacacctgatactggaagtatagggataggattcatatgaaatgtatatgtaattgtcattggcattctaagcgaaaacacttgtatttctccctaccttgccgtgtacgctttctgcagatgacggagcaaattttgtagcttgtaattgtaactagtggccgaacagaacggggaaaagatcaaatcttcacacagc

SEQ ID NO: 151706 - DNA, 3575 bp, Zea Mays
gctgagctctcagccatggaagtggtcgatctctcccccacgtcccgccccctctcaccgctcctctccaccgcacccgcccgccgcctccgcctcctccctccccgctgcgtcgtcggcctgcgcgcctctccccggacccgaggactcggctgcgttggaggtagtctcagcagaaggcattctttttgtaagaacggattcttcgcaacaagcagttcgtcagcctcagtagaacccgctacccaggaattgggaacagcggatgcagtggagtggagtggggatgccatacgtcggcgtttccttgaattttatgcagcccgtggccacaagatccttccgagctcgtcgcttgtgcctggcgacccaactgtgttccttaccatagcgggaatgcttcagttcaagcctatattcctcggcaaggaacctaggcgtgtgccacgcgccactacctctcagaagtgcatacggacaaacgacattgaaaacgtgggtcgcactgctcgacatcagaccttctttgaaatgcttgggaatttcagttttggtgattacttcaagaaggaagcaaccacatgggcatgggagctggcaaccaaggagtatggattgcctgcagaaaggttgtggattagtgtttttgaagatgacaatgaagcattcaacatctggcacaatgaggttggtgtgccaaaggagcggatacagaggatgggtgcagaagataacttttggactagtggcgcaactggaccttgtggaccttgctctgaaatttattatgatttctatcctgagagaggatcatcagatgtggatttgggcgatgatagccgattcattgaattctataatcttgtctttatgcaatataacaaaaaagacgatggatctctagaaccgttgaaacaaatgaacattgatacaggaatgggccttgagcgtatggcacgcattcttcaaaagctggtgagccgcggccctgtgctcctgcggtggcttgccgaggtccagcgcgggcggcgagtccggcaactcggcgacgggcgcggagccgatgcgctcgggcggcggcgcaggcgtgaggagctgcacgacctcgacgttccagagcacccagtcctgtgtggtggtgcggtggggcacgtcgtgggtgacggagttcctctagggcgggagccccccgttggcgcggaggaagtggcccgccttggtgcggaggcgcgcctggaagctgtcccgcaggggctcccagtccacagatgcgttggccaggcgcggcgcagcgggcgccgtttgcgtcaccttccgccccgtcatccccagcaggaacggctccccagaggcggtgaggttccaaacaactatgagacagacttgattttcccaattatagaaaaggcagctagcatggcgatggtgtcctatgcaaaagctgatgatgccacaaagacaaatctcaagataattggagatcacatgagagcagttgtttatctcatatcagatggggtaattccctcaaatatcgggagaggatatgttgttcgaaggctaataagaagagtagttcggatgggtagattgataggaataagaggtgacgggcatggaaactctgaaggtgcatttttaccttcactagctgaggtagtgatcagccttagcactgagatagattcagatgttgaatcacgacggagatcgatccttggagaacttcaaagggaagagatgcgatttgttcagactttggaaagaggagaaaagttattagctgaacttctggatgaagctttattaaatgctggtaataatggaaacaagccttccttatctggaaaaaatgttttccttttgtacgatacatatggtttcccagtagagattacagctgaaatagccagtgaacaaggcgttactgttgatattgagggatttgatattgaaatggaaaaccagaggaaacaatctcaagctgctcataatgtagtcagactttctgtaggaaatgagaccgagatagtaaagaacatcccggatactgaatttttgggatatgattctctctctgcttctgctgtcattaaaggtctcctagttaatggaaacccagttaatgaagtttctcaaggttctgaagtagaaatattattagaccggacaccgttctatgctgaatcgggtggtcaagttggagataatggtttcttatatgtgaatggaggggaagatagaagacaaacaacagttatagaaatcaatgacgtccaaaagtctctgggaaatatatttgtgcacaaaggcatgattaagcaggggtctgtagaggttggcaaggaagtagatgcttctgttgatgcaaaattgaggcagggggctaaggctcatcacactgcaacacatctactacaatctgctcttaaaagcgtagttggttcagaaacttcacaggctggttcccttgtggcgtttgaccatctccgatttgacttcaatttccatcgcccactttctgaagaggaattaacaacaattgaagcacttataaaccaatggattggcaatgcagcacatgttgagacaaaagtcatggctttgcaagatgcaaaaaatgctggtgcgattgcaatgtttggagaaaaatacggtgaacaggtcagagtcgtagaggttcccgggatctcattggaactctgtggtgggactcacgtcagtaatactgctgagattcgtggtttcaagataatttcagaacaaggaatagcttctgggatcagaaggatagaagcagttgcaggtgacgcttttgttgactatgtgtgtgctcgggacaattacatgcggcgcttatgcttatcccttaaggttaaggctgaagatgtgaacagtagagtagaaacaattcttgaagagctaagagcaaccagaaacgtagcatcatctctacgcagcaaaattgcagtgctaaaagcagcttctcttgcaagtagagctacaactgtggagccccagaatgtcaggattgtggtcgagaacatgggtgatgtcgacgcagatgggctgaaaagcgccgcggagtatctcatagataccctcaaagaccctgctgcggtgattttaggatcaagcccaggggatggtaaagtcagcctggttgctgccttcagccctgcaatcgtcgaaatggggctgcaggccgggaagttcgtgagtggcatagccaaactctgcggcggaggcggtggaggcaagcccaatttcgcccaagctggggggcggaagccggagaacttgcccgacgcccttgagaaagcccgagctgaaattgtggcacgggtatcaggttcgagctgattctccgctgcctcacacctgatactggaagtatagggataggattcatatgaaatgtatatgtaattgtcattggcattctaagcgaaaacacttgtatttctccctaccttgccgtgtacgctttctgcagatgacggagcaaattttgtagcttgtaattgtaactagtggccgaacagaacggggaaaagatcaaatcttcacacagc

SEQ ID NO: 151707 - DNA, 390 bp, Zea Mays
tttcagcttcctctgtctacacaggcttacgagcagtatcttgagctaaatgaggcctggggacaaatcactgtgaccaacgcaaaggacacttggaaacttatttggggatcagagattttctctacaaagaagacttacaggcatcttatgggacattttcaagttcaccacattttcaaatcgctttggaaaaataaatgtcaacctaagcataaagttttttattggctgtggctgaaaaacagactgaacacaaggaatatgctgaggaggaaaaacatgacacttgagtcatacacatgcgaaaactgtatctggcaaaaagaggaaacactataccatctcttcctcagatgcaactttgctaaggcctgctggaattcaatt

SEQ ID NO: 151708 - DNA, 833 bp, Zea Mays
cggagtcgtccacgccccttcctgtgtgtaggtgcttgtgtgcgtcctcagtgaagtggcgcaacctgccatgagccggcggaccacgttgctcgcctgaaaccgccgccacatcggccacagaccacagtagtcgtgtccctctataaattgaatgtatcaccctctgcgccttctctttgctcacccgagcaaacccttccgttcacccgttcgtccaccgtatctgccaatcaccagaattccttgaatttgctcaccgccatcgctgtggaaccgcctcaacccgagagtgtttcatcccatagctcccgtgttctagctccctctagttgtactgatgctcctcgacttgaccgtttcagctctaccgttgcgtcttcatcgggacaccgcttcgccgccggtgtgcactgttgaacgccgcccgacgtcgaccgtccgttctacgctttccctgtttgtgtttgtgtttgtgtgagcatcgagtgttgggtgagtctctaatgctcgccatgccttacgtttaggttctatgacgttgagtcaccgggaacgggctcgtcggacttcggtgtccgccgtcgccgtcagcagtatagctctcaagcctctgtgaaccgtctgtgcccttgatggtgttcaccttggttcggggtagctgtggatgagctctttttggtcagaggggccctcaccggcgggcgtgaccggctgttggccggtgtttgaccggagcccgtcgtggacttggaagtgtgaaaaggaggggcctcggtgtaattgtcagtgaaacaaataagggttaattatatctatgtcattataatttt

SEQ ID NO: 151709 - DNA, 812 bp, Zea Mays
cggagtcgtccacgccccttcctgtgtgtaggtgcttgtgtgcgtcctcagtgaagtggcgcaacctgccatgagccggcggaccacgttgctcgcctgaaaccgccgccacatcggccacagaccacagtagtcgtgtccctctataaattgaatgtatcaccctctgcgccttctctttgctcacccgagcaaacccttccgttcacccgttcgtccaccgtatctgccaatcaccagaattccttgaatttgctcaccgccatcgctgtggaaccgcctcaacccgagagtgtttcatcccatagctcccgtgttctagctccctctagttgtactgatgctcctcgacttgaccgtttcagctctaccgttgcgtcttcatcgggacaccgcttcgccgccggtgtgcactgttgaacgccgcccgacgtcgaccgttctatgacgttgagtcaccgggaacgggctcgtcggacttcggtgtccgccgtcgccgtcagcagtatagctctcaagcctctgtgaaccgtctgtgcccttgatggtgttcaccttggttcggggtagctgtggatgagctctttttggtcagaggggccctcaccggcgggcgtgaccggctgttggccggtgtttgaccggagcccgtcgtggacttggaagtgtgaaaaggaggggcctcggtgtaattgtcagtgaaacaaataagggttaattatatctatgtcattataatttttctatgttttgatatgtgccattaaactttttaagcttataaatgtgccattaaacttctaatcaaatct

SEQ ID NO: 151710 - DNA, 2005 bp, Zea Mays
ccaacagggtcatcaacaggccaaaaccgatcgccggcggcaccgcaccagcacggcagtcctgtgacatgttggctagtacgtacccgtaagcttttctgttggaaagtcgagctcacgtcactgcgtttgacacggcgcgcgcccgccgccctcgaggctcctgtccgtcgcgcgacgccacgacgcccccgggccaagccagtctgcaccacgcggcacacgggcacacggcccgcgagcgactgaaagccagcactgcccgtctgccccgccccccgccaggccgccactccgccgaacaccacccagcggctcgctcgacacctacacgtttcacgcacctcgcgtcctcgccccgctctgttcgagttcccgttgtaggcgcacgccatggccgcggccattctccgccgccttgtccccaccgccgccagccagctcgtggcgccgctgccgcttctcgcgcgtggggtctccgactccgcggacgcggtcaccgttgacacctcggtgcccttcaagtcccacatcgtggacccgccaccgcgcgaggccaccacctcggcgcgggagctgctgtccttcttccgcgacatgtcgctcatgcggcgcttcgagatcgcggcggactcgctctacaaggccaagctcatccgaggcttctgccacctctacgacggccaggaggccgtcgccgtcggcatggaggccgcagccacccgcgccgacgccatcatcaccgcctaccgcgaccactgcgcgtacctcgcgcgcggcggggaccccgtcgccgccttcgccgagctcatgggccgccgggacggctgctccaggggcaagggcgggtccatgcacttctacaagcgggacgccaacttcttcggcggccacggcatcgtcggcgcgcaggtgccgctcgggtgcggcatcgccttcgcgcagaggtacaggaaggagggcaccgtcacgtttgacctctacggcgacggcgccgccaaccagggacagctcttcgaggcgcttaacatggccgcgctctggaagctgcctgtcatattggtctgcgagaacaaccactatgggatggggacggcagagtggagggcctccaagagcccggcttactacaagcgcggggactatgtgcctggcttaaaggtcgatggaatggatgttcttgctgtgaagcaagcttgcaaatttgccaaagaacatgcccttgaaaatgggccaattatccttgagatggacacctacagataccacgggcactcaatgtcagatccaggtagcacctaccgcacaagggatgagatcgctggcataaggcaggagcgtgatccaattgaaagggttaggaagctcatgttggtccatgagttcgcaacggcccaagagctaaaggacatggagaaggagatcaggaagcaagtcgacgctgccattgctaaagcgaaggagtgtccactgcctgatccatctgagctcttcacaaatgtttatgttaatgactgcggtttggagtcgtttggtgtagacaggaaggaggtgaggaccgttcttccgtaggctggcaaacaaaaaaaaggttctactgatacagtacgaagaagtttgctgcgtatgtatatggacgcatcacaccgcagtagtttcctcacttgtggttatggtcctatggaccccgggttataatttcctctgctcgtcgagctatcacaatgtgcagccgagattttgtcaggtgctcatgtcatgccgatgtttcgtcttctgctctactgcaacacttccacagatcccctttctgagcagtgcccccacgtaaacagtagtagttggctgcattagctagggggcggctaatagctttttattagttacaaaacagtttctttgttaactatagctgtttctgaacagtgcccccacgaaaacaatagtgatcacgttgtgtcgttgtgacacaccattgtcaagtccatcaagagctttttaaacc

SEQ ID NO: 151711 - DNA, 100 bp, Zea Mays
gaggtacttattggcctcatttgttctggtcactatggaatgttgtttagtagattatatgagctttccatcgggtgcttatactctgaatttgctggcg

SEQ ID NO: 151712 - DNA, 115 bp, Zea Mays
gataggttaggacttctcttatcaagttttgaagtttggacttctgtacgagctaaacctgcctcgctttcaatcgtaatttttcttacacatctaaataccgatgatagttcac

SEQ ID NO: 151713 - DNA, 1625 bp, Zea Mays
ctacccagtccccactactgctactgcgagacagcgcagcacaggctgccgcccgctggccgctgcgagcagagagaatccaagaacgcgcaagagcccccctcgtcaccaccgtccatgggcggcgctgcgggcgaggcgatgtgggccgctgttgtggcggcgacggtggtcttcttggccgtcgaggtttcgggtgccgcgtcggcgttgccacggtttgcggaggcgcctgagtaccggaacggggaagggtgtccggctgcggcggcgggggtgtgcgacccgggcttggtgcacatcgccatgacgctcgacacgcactacctgcggggctccatggcggcggtgtactcgctgctcaagcacgcgtcctgcccggagtccatcttcttccacttcttggccgcggaggccggggcagtggacggggcggacccggagccggagctgctgcggcgcgcggtggcggcgtcgttcccgtcgctgcggttcgagatctacccgttccgcgccgaggccgtggccgggctcatctcggcgtccgtgcgcgccgcgctcgaggcgccgctcaactacgcgcggaaccacctagcggacctgctcccgcgctgcgtgccgcgggcgatatacctcgactccgacgtgctcgccgccgacgacgtgaggcggctctgggagacgcgcctccccgccgccgccgtggtggcggcgcccgagtactgccacgccaacttctcccgctacttcacgccagcgttctggtcagacccggtgctcggggcccgcgtcttcgccgggcgccgccggccgccgtgctacttcaacaccggcgtcatggtcatcgacctccgccgctggcgcgccggcaattaccgccaacgcatcgagcgctggatggaaatccagaagcagaagcgcatctacgagctgggctccctgcccccgttcttgctcgtcttcgccggtgaggtcgaggccgtcgaccaccgatggaaccagcacggcctcggcggcaacaacgtccacggtagctgccgcccgctccacgctgggcccgtcagcctcatgcactggtcgggcaagggcaagccctgggaccgcctcgacgccggcaggccgtgcccgctcgaccacacctggaagtcgtacgacctctacatccccggcgactctggaggcgccgcctcgccggcgtccgggccggcattgtccgcatccgtgttctcttggtagagagatagcttctagttccattgtcttgctgtggctgttgccgccgctgctatgatctagctgccgctcgtggtgggctgtacagggcggcgttgggagcggcggtggcgacatgacaggggaaatcaggaatgagttgatagagaagggggagcctttgccctcgggggtagaattcagataagttattggggagagattttgattctttttggtcgggctggtgattcttgggttcccaattctctcgattggatgttgtaaagacttggaattttgttcaattattgatcattctttcattcatgtgccatgccttcttgacctgaatccttttgctattttttttttacctttattacattagatgaactaacctaactgtactg

SEQ ID NO: 151714 - DNA, 633 bp, Zea Mays
ccactactgctactgcgagacagcgcagcacaggctgccgcccgctggccgctgcgagcagagagaatccaagaacgcgcaagagcccccctcgtcaccaccgtccatgggcggcgctgcgggcgaggcgatgtgggccgctgttgtggcggcgacggtggtcttcttggccgtcgaggtttcgggtgccgcgtcggcgttgccacggtttgcggaggcgcctgagtaccggaacggggaagggtgtccggctgcggcggcgggggtgtgcgacccgggcttggtgcacatcgccatgacgctcgacacgcactacctgcggggctccatggcggcggtgtactcgctgctcaagcacgcgtcctgcccggagtccatcttcttccacttcttggccgcggaggccggggcagtggacggggcggacccggagccggagctgctgcggcgcgcggtggcggcgtcgttcccgtcgctgcggttcgagatctacccgttccgcgccgaggccgtggccgggctcatctcggcgtccgtgttctcttggtagagagatagcttctagttccattgtcttgctgtggctgttgccgccgctgctatgatctagctgccgctcgtggtgggctgtac

SEQ ID NO: 151715 - DNA, 810 bp, Zea Mays
gaggcagagggtcggaactgatcctattctgtcctattctagcgcgctctgacggaggcgtcgcgttcgatcctcacaatgcagtgaaatcactctgctctcctctgcttccttctataaatctaatagaataactccgtcaagaagcaacgagcatagaacaattcaacagaggaagaatcaggcagggagctctcccattcgcatcccaggccaacctcaaccccaatccaatccgttgcaggtcgcaggatggctccgcgtgagcaccaccagccccaggaggaggaggaggaggacaccgcaggcgtcgtcaagctcatcagcgccgagggcttcgaattcgtcgtcgacaagaaggccgccatggtctccaacaccctacgcaacatgctcacatcgccaggcggtttctccgagacgcgccagggcgaggttcgcttcccggagatccccaccaatatcctcgagaagatctgccagtacttctattggtcgctccattattccagcccttggttcaacactttggatggcctattgaagagttatctggtccagaattttgatgtgatggagtctgacaaggccaataagactgtcacatgtaatgttatttgattaccaaaacatgaagagcagtcaagataggttgagatcgatcgctatatttgttggttcctaggactcttggtggaagatatgaggttgctcccaacactgaatttatgtatggctgaagtaaattcactgttctgattttggtgtccacattcttatttgtttcccagtcagcaaactgaagttcag

SEQ ID NO: 151716 - DNA, 868 bp, Zea Mays
gaggcagagggtcggaactgatcctattctgtcctattctagcgcgctctgacggaggcgtcgcgttcgatcctcacaatgcagtgaaatcactctgctctcctctgcttccttctataaatctaatagaataactccgtcaagaagcaacgagcatagaacaattcaacagaggaagaatcaggcagggagctctcccattcgcatcccaggccaacctcaaccccaatccaatccgttgcaggtcgcaggatggctccgcgtgagcaccaccagccccaggaggaggaggaggaggacaccgcaggcgtcgtcaagctcatcagcgccgagggcttcgaattcgtcgtcgacaagaaggccgccatggtctccaacaccctacgcaacatgctcacatcgccaggcggtttctccgagacgcgccagggcgaggttcgcttcccggagatccccaccaatatcctcgagaagatctgccagtacttctattggtcgctccattattccagtggcaaggaaacagcagagtttctgatcgaacccgagatcaccctggagctgatgatggccgcaaactacctggacacttgatgaggagcctgagggatctaaccctaggaaccgtttggttgtgaaatttgaaaaggtaatgtaaacgttatccgataacactgtaaattttaaaaagtaagctattacttggattgtttggttcagcgtaagagattatgttgtggcttaaacaaacacgctccaacgtaatcagttactgttgtaatcaaatcaccttacattctactgaaccaaacagcaccatagtgtcttatgaaatatgaaagaacgaagcaatggttactagtgatta

SEQ ID NO: 151717 - DNA, 609 bp, Zea Mays
gatccggggctcagcagcaagtccatcgtgctgcagatcgacagcaagtcgcagcaggtttccgcaagtgccctccggcattcactgcaggacagactcagcaaggggacgtctggtggatcagggaggggccgtgctgatgagatttacctcaagctgcggacgagtacagctccctcattaaagctgattgatttacctgggatagaccagcgagctgttgatgattccatgatcaatgagtatgctgggcacaatgatgcaatactgctcgttgtcataccggcaatgcaagctgctgatgttgcatcatctcgagctctgaggttggccaaggatatcgattcagatgggacaagaactgttggtgttataagcaaagttgatcaagcagatggagatgcaaaagttatagcctgtgttcaggccctactatcaaacaagggtccaaaaaaccttcctgagattgattgggttgctctaattggacaatctgttgcgattgcgtcagcacaatcagctgggtctgaaaactctctagagacagcttggcgagccgaagctgaaagcttgaaaaacatcttaactggagctccgcagaataagctt

SEQ ID NO: 151718 - DNA, 167 bp, Zea Mays
gatctggttggaaaattgttgcaagttttgaaggcaagtttccagacagaatcaaacagctaccgttggaccgacatttcgatctcaacaatgtcaaaaggattgtcttggaagccgatggttatcaaccatatttgatatctccagagaaagggttgaaatcctta

SEQ ID NO: 151719 - DNA, 1482 bp, Zea Mays
atggccttttgtttgtttggtattgacagaatggaaaggcagcgtcgagaggatgagttaagaaaccgatcttctaagaaaacacaggaagctgaacagtcaacatctaagagggccttcagtccccaaacagatgctgagcaaggtggtggcagcttaaaatcaatgaaagacaaatctggccagcaagataaagacgcaaaagagggatcgaatttgcaggttgctggtcctgctggtgaaattactgcaggttacctcttaaagaaaagcgcaaaaactaatgggtggagtaaaaggtggtttgttcttaatgagaagagtggaaagcttgggtacacagagaaacaagaggagagacattttcgtggtgtcatcactcttgaggagtgcaaccttgaggaggtagaggaggaagaaccatctaaaagctcaaaagactcaaaaaaggcaaatggatcagaaaaacccccaagtcttgtatttaagattactaacagggttgcatacaaaacagtcttaaaagctcacagtgctgttctgttaaaggctgagagcatgcctgacaaggttgagtgggtgaataagatcaaagctgttattcagagcaaagggggttctttcaagggtccaagtactgagggtggttcaatgaagcaaagcaattcggatggcgctttagatgctatggcgcggagaccagctgatcctgaagaagaacttagatggatgtctcaagaagttcgtggttatgttgaggctgttttgaatagtctggcagcaaatgttccgaaggctattgtgctgtgccaagtggagaaagcaaaggaagacatgcttaaccagctatacagctcgataagcgggcaaagcaacgctaagattgaagagcttcttcaagaggatcataatgctaagcgcagaagggagaagtaccaaaaacaatcatctctcctgtcaaaacttactcgtcaactcagtatccatgacaacagggcatctgtttcctcgtattctaatgacagcactgaagttgagagccctcgaacaccaagccgctcaggtgaggactggaggtctgcctttgattcatcttcaaatgggcctgttgctacaagcacaaacagtgaatcaaggtcgagaagtgctgatggtcgcagccggcgctatgagaacggggatgtgagctcaggtgccaactctggcagccggcgcacaccgaaccggttgccaccagcaccgccaaaatactaatcgtgctgattggtattcatgaacattatgtattcttgcctggcacacgccccttgcttgtcatatgggttattggagcgtatttcagatcggccgctagagattgtgttgtagtggagtctggtgattgcgtgaacattgtgttcgcaggtcgctgcgactcagatgagttgtttatagaaatatataggtaaccatggtctctatctttactgtttattatctccg

SEQ ID NO: 151720 - DNA, 4078 bp, Zea Mays
ccatcccgatcccgaaaccggcggcgatgcatttcttctccggcagcggcggggcccgctccggcgcactactccccaccacctccaagccgaaggcgcaccaccacctccgttccaagtcctccctctctgcgcccgcctcctcccgccgccgcgggagcctccactccgcgtccactccctactcccgccgcgccctctgcctcgccacgactgccttcgcggtgctgtttatcctggcctttctccgtctcggcttcccctcatcccgctccgccgcgctgtctgcgcccgtccgttcccgcgcgcgcctcagccgcaggcccgccttccgcctccgggactcggccgcggccgaggccgcagcggccgctgtggcgaaccggatcggacgtgaggcgcccgtggatattacgacgagggacctttacgaccggatcgagttcagcgacgtcgacggcggtgcgtggaagcaggggtgggaggtcaagtacaggggcgacgagtgggataccgagaagctcaaggtcttcgtcgcgccgcactcgcacaacgaccccgggtggatccgcaccgtcgaggagtactaccagcgccagtcgcgccacatcctcgataccatcgtcgagtccctctccaaggattcgcggaggaagttcatatgggaggagatgtcatacctggagagatggtggcgcgacgcgccgcccaaaaagcaagaggcactggctaagcttgtccgtgataggcagctcgaaatcgtgagtggtggatgggtcatgaacgatgaggcaaactcccactactttgccatcatagaacagatgatggaggggaatatgtggcttaatgatactattggagttattcctaaaaattcttggtcaattgacccatttggttattcatctacaatggcttatttgcttaggagaatgggtttccgtaacatgttaatccagagaacacactacgaggtgaaaaaggagcttgcaatgaaaaagaatcttgaatatttgtggagacagaactgggatattgaagaaacaactgacatatttgttcacatgatgcccttctattcttatgatattccacacacatgtggaccagaaccagctatctgctgccagtttgactttgctcgaatgcgtggtttcagttatgaatcctgtccatggagagttgatcctgttgagacaaatcctgacaatgtgaaagagagagcaacaaagcttctagatcagtataggaaaaaatcaaccctgtacagaacgaatacacttctcattcctttgggtgatgatttccgatatgttagtatggatgaagcagaggtacaattccgcaattatgagaaactctttgattacataaactcgaatccacatcttaatgctgaagtcaaatttggtaccctggaggattacttctctacattgagagatgaagctgaaaagataaactattcacggtcaggtcaattgggttctgctgagctgcaaggtttcccaacactttcaggagatttctttacctatgcggatagaaatcaggattactggagtggttactatgtatcaaggccattcttcaaagctgttgaccgtgtactagaacagacactccgtgcctcagagattttgggttcatttgttctaggatactgtcagaagtttcagtgtgcaaaactccccatcagtttctcacacaaactgacagcagcaaggaggaatttggctctttttcagcatcatgatggggtaactggcacagctaaagatcatgttgtggtagactatgggacgcgaatgcacacttcactgcaagatctacagttatttatgtccagggcaatcgaagttcttttaggagatttccacgatagatctgaccctacattattatcacattttgagcctgtgcaggaacggtcaaagtatgatgttcagccggtacataaggttcttcttcctcatgaagggaaggcacagtcagttgtattttttaacccattagagcagacaagggatgagattgttatggttgttgtaagtagtccagatgtttctgttattaattcaaatgggtcctgtttgccaagtcaactttcccctgagtggcagtttgtcagcgatgaaaagatttcgactggtcggcaccgcctttattggagagcttctgttcctccactaggtttggagacctactatgtggttactgggcaggattgtgaaaaggctattcctgctgtagtgaaaacatacacagctgcacaggaatttccttgccctgaaccatatgaatgttcaaagctggaaggcaaaacagtggagatgaagaactccaattacactctttcttttgatacatgtcatggtctcctccagacagtaactcgtcacaagtatggggaacaaactgtggtaggtgaagaaattggcatgtatagaagccatggaagcggggcatacttgttcaaaccacttggggaagctcgctcaattgttgaggaaggaggatatttcatccttactgaagggccattggttcaagaagcccattctctaccaaagacagagtggcctaagtcacctctctcacatagtacacgcatgtacaattgtggagattctatacaggacatgctgatagagaaggaataccatgttgatcttgttggccatgcttttaatgatagggaactgattgtcagatacaagacagatattgacaaccaaaggatcttctattctgatctaaatggctttcagacgagtaggaggcagacatatgataagattcctctacagggaaattattacccaatgccatcacttgccttcttgcaggattcacatggtaatcgattttctgtacactctaaacagtcattgggcgcagcaagcttgaaaaatggatggctagagattatgttggatcgtaggttggttcaggatgatggccgtggtctggggcagggagtaatggacaacaagcccatgaatgttatatttcatctcctcatggagtccaatgtctcagctttgccccaaacccatagcttgcttactcttcaaccttctctcctctcgcaccgtgttggggcgcacctgaactacccaatgcatgcttttatgagcaaaaaacctcatgaaaaatccttcaagctggttcaacagtcatttgctccattaactgcttctttgccctgtgatgtacatattgtgaacctgaaggtcccacagcccctaagattttctcacacagaagcagcagagccaagatttgctgttctgttgcacaggagaggctgggacgcatcatactgcaaaaggggtggactggagtgtacaacagttggggaagagccagtaaatctgttctacatgttcaaagatttgtcagctgtgaatgtgaaggcgacttcgctgaacctcttatatgatgaccctgaaatgctaggttaccttcagcagatcggtgatgttggtcaggagggaaacgttcttatctcaccaatggagattcaggcgtacaagttagacttacagccaccatcatcgcaggaagagtagtttgtggaatcagtacatgcatattgaacagttctacaagacagtgaagatggatcttcccgaaatactttaatagtggcagctagtaccggaacagcagtgttgcatgtatatatgtcattttcttggcatacagttagtgattggacctatggaagttgctggaagttgtcgttgaggcatttggttgcagccttgttatccacgaaggtgcatgcccttgttcttggtatcatgctcaacagattggaaagatctggagcacattgaagcagagctaatttgatttgggtagacctatgtgttcacacgaccagtgttgattcgtccaatgctaacacgacaataacttgtatcagagcaagttttgtaattctgtcttgtttgcatcctttttgtaggtgccatcatcccgctgaccaaaaaaaactcggtttatactgtgtgtacaaaattttgcttgtaagcatgcgaggattgcaggaaatgctttctttttc

SEQ ID NO: 151721 - DNA, 3480 bp, Zea Mays
atttattttcctattctattagagctaatctggactagccaataatattcaaataccaaattgacacatgacttggaaaattatttagtcacgatgaaatttattgatctttatgattttattaaacagatgatggaggggaatatgtggcttaatgatactattggagttattcctaaaaattcttggtcaattgacccatttggttattcatctacaatggcttatttgcttaggagaatgggtttccgtaacatgttaatccagagaacacactacgaggtgaaaaaggagcttgcaatgaaaaagaatcttgaatatttgtggagacagaactgggatattgaagaaacaactgacatatttgttcacatgatgcccttctattcttatgatattccacacacatgtggaccagaaccagctatctgctgccagtttgactttgctcgaatgcgtggtttcagttatgaatcctgtccatggagagttgatcctgttgagacaaatcctgacaatgtgaaagagagagcaacaaagcttctagatcagtataggaaaaaatcaaccctgtacagaacgaatacacttctcattcctttgggtgatgatttccgatatgttagtatggatgaagcagaggtacaattccgcaattatgagaaactctttgattacataaactcgaatccacatcttaatgctgaagtcaaatttggtaccctggaggattacttctctacattgagagatgaagctgaaaagataaactattcacggtcaggtcaattgggttctgctgagctgcaaggtttcccaacactttcaggagatttctttacctatgcggatagaaatcaggattactggagtggttactatgtatcaaggccattcttcaaagctgttgaccgtgtactagaacagacactccgtgcctcagagattttgggttcatttgttctaggatactgtcagaagtttcagtgtgcaaaactccccatcagtttctcacacaaactgacagcagcaaggaggaatttggctctttttcagcatcatgatggggtaactggcacagctaaagatcatgttgtggtagactatgggacgcgaatgcacacttcactgcaagatctacagttatttatgtccagggcaatcgaagttcttttaggagatttccacgatagatctgaccctacattattatcacattttgagcctgtgcaggaacggtcaaagtatgatgttcagccggtacataaggttcttcttcctcatgaagggaaggcacagtcagttgtattttttaacccattagagcagacaagggatgagattgttatggttgttgtaagtagtccagatgtttctgttattaattcaaatgggtcctgtttgccaagtcaactttcccctgagtggcagtttgtcagcgatgaaaagatttcgactggtcggcaccgcctttattggagagcttctgttcctccactaggtttggagacctactatgtggttactgggcaggattgtgaaaaggctattcctgctgtagtgaaaacatacacagctgcacaggaatttccttgccctgaaccatatgaatgttcaaagctggaaggcaaaacagtggagatgaagaactccaattacactctttcttttgatacatgtcatggtctcctccagacagtaactcgtcacaagtatggggaacaaactgtggtaggtgaagaaattggcatgtatagaagccatggaagcggggcatacttgttcaaaccacttggggaagctcgctcaattgttgaggaaggaggatatttcatccttactgaagggccattggttcaagaagcccattctctaccaaagacagagtggcctaagtcacctctctcacatagtacacgcatgtacaattgtggagattctatacaggacatgctgatagagaaggaataccatgttgatcttgttggccatgcttttaatgatagggaactgattgtcagatacaagacagatattgacaaccaaaggatcttctattctgatctaaatggctttcagacgagtaggaggcagacatatgataagattcctctacagggaaattattacccaatgccatcacttgccttcttgcaggattcacatggtaatcgattttctgtacactctaaacagtcattgggcgcagcaagcttgaaaaatggatggctagagattatgttggatcgtaggttggttcaggatgatggccgtggtctggggcagggagtaatggacaacaagcccatgaatgttatatttcatctcctcatggagtccaatgtctcagctttgccccaaacccatagcttgcttactcttcaaccttctctcctctcgcaccgtgttggggcgcacctgaactacccaatgcatgcttttatgagcaaaaaacctcatgaaaaatccttcaagctggttcaacagtcatttgctccattaactgcttctttgccctgtgatgtacatattgtgaacctgaaggtcccacagcccctaagattttctcacacagaagcagcagagccaagatttgctgttctgttgcacaggagaggctgggacgcatcatactgcaaaaggggtggactggagtgtacaacagttggggaagagccagtaaatctgttctacatgttcaaagatttgtcagctgtgaatgtgaaggcgacttcgctgaacctcttatatgatgaccctgaaatgctaggttaccttcagcagatcggtgatgttggtcaggagggaaacgttcttatctcaccaatggagattcaggcgtacaagttagacttacagccaccatcatcgcaggaagagtagtttgtggaatcagtacatgcatattgaacagttctacaagacagtgaagatggatcttcccgaaatactttaatagtggcagctagtaccggaacagcagtgttgcatgtatatatgtcattttcttggcatacagttagtgattggacctatggaagttgctggaagttgtcgttgaggcatttggttgcagccttgttatccacgaaggtgcatgcccttgttcttggtatcatgctcaacagattggaaagatctggagcacattgaagcagagctaatttgatttgggtagacctatgtgttcacacgaccagtgttgattcgtccaatgctaacacgacaataacttgtatcagagcaagttttgtaattctgtcttgtttgcatcctttttgtaggtgccatcatcccgctgaccaaaaaaaactcggtttatactgtgtgtacaaaattttgcttgtaagcatgcgaggattgcaggaaatgctttctttttcgaggcattttcatgggtcctggctacaaagctcaccagctttaacgttgtttgatcctgtattgtttgctgcaatatattgccaaaccagagcacct

SEQ ID NO: 151722 - DNA, 993 bp, Zea Mays
atggaggttcattgccaaaccaggttttgccagaatgaagatggtttccccaagatgttgagagcatgcacagttcgcctcggaatcaggagccagccagagtatgatggtcgtgaattcgtcgagcatggcacagagaagtgtgtcgtgactgtatacattggatccagtccgcaccatgtggaatggagtgtcactgatgctgggcacagattcaaagacacctgccaagtcgtcgctcgcaaggcattgagggccctgtgtcagatctatgaagaagaagtggccgacaccccgctcagattctttccgccctttcagagagaccatcccgcttggatggccaggatgcgtgcattggaagagcagcagctgcttgaggatgaccccacagtcgtgtacctcactgcatacctgctcaccctggatgccgactcaagcccgtgtagctgccttggaagtcgtgaagtcattgctgtggaagccctgaagcaagccaaggatgagcacgtccagaagttgatggaggcctacttggtcacccataaccaacatagagccctgcggatccaagagcccgcttcatccaaccctgttcaacccatcagagctgaagacccccagattcttgaaggtcacccggtctctatcagaggagagaagaaggcttgggaactcccggaaggagccatagtcttggaaggaattccagtcttccctcaggctatggataagcaagagcaccccgaatccgcccaagatcccccgccagagttgtttgagcccctcaccatgaagaaaattccagtaccatcccgtgagctcaaagaagaagctgcaagcaccccaccagcatcgccgccctctgaggagctacaagagccagtcccgcttgaagaagagttcaaccctgtcctgccatctcagtcgccgccaaaagaagtcatcaacatcagctccctcttaacccatccaggagatgtctcagattga

SEQ ID NO: 151723 - DNA, 2210 bp, Zea Mays
ttttgtttcgctggaaagccagagccggccaggaggaggagggccggtcacttggtgttggcggtggtggattccacttcctccggcgcgcgcggcagggccaggggctggccgtagaaacgtatcgccggaggagactgtcgtcgtcgtcgcctcatttatttgctagcttttgcgctggtttctgtccgagtgcgggatgtgtaagccaaaagaagctgcgtttcttggggatcgggcgctgtatataagcatgtgattcgcgcaagaagcagccgagaggagttgccagagcgtcaagtctggttcgccgcacggcgtcgcgacgccgacggtcatgtcggggaagacgacgccgacgaaggcgacgctgagccggccatgcgttctggtcatagtgatggcgggcgtggagaggttcgcgaacaagggggtggggtcgaacctggtgacgtacctcaccagcgtcgtgggcatgagcacggcggcggcggccaagagcgtcatcgcctggaacggcgtcagcttcatgctgccgctcgtcagcgccgtcctggctgactccgcccactgggaccgctactgcaccatcgccgcctcctccttgctctacgtcttgggaatggtagcgctcacgacatgggcgctgctggggacacggatgccgcgctccacgctcttcttcccgctctacctcatgtccatcgggcaaggcggataccagccttcgctgcaagcgttcggcgccgaccagctgagcatcggggacgacgacgacgacggtgacggcgacaccgagcccggcgcgtcgtcgacgccggaggagaaggccaaggtgaagagcatgttcttccggtggtggtacttcggcatgtgcagcggcagcctgctggggaactccaccatgtcgtacgtccaggacaacctgggctggggcctcggtttcgccatcccctgcgccgtcatggctctgtccgtcgcggcctttttctgctgcacccctctgtacaagcggcaccggcaggtgcagcagccgaagggcaccggtattaggccgtccccgagtagcgtcttcaacttcaagtcggttctcggcgctagccgaaagatcagtctgccgccgtcgagatcatcagacgacaatggcgacgccatttctgagcttgagttgcaagagaagccactgaaaactgatgaagcatcagagtcctcccctgacgaggctgccgctgctcccggcgtggccaaggtcatactcggcctcctgccgatctgggcgatcctgctcgtcttcgcggtgatcttccagcagccgatgaccttcttcaccaagcaaggcatgctgatgaaccacacgatcggcgtcggcgtcggctccggctccctggtgatcccgccggcgatgctgcagagctcgatcaccgtctccatcatcctgctcgtgcccatgtacgatcggatgatcgtcccgctgaccaacgccgtcacggggggcagcgacggcatcacggtgctccagcggatcggcgtcggcatggtcctctccgtggtggccatggtcgccgcggcgctcgtcgagtcgcggcggctccgcgcggagcccgccctgctgagcatcttctggctcctgccgcagtacgtcctgctgggggtctccgacgtgttcaccgtggtggggatgcaggagttcttctactcgcaggtgccggcctccatgaggaccaccggcatcgggctctacctcagcgtcttcggcgtcggcggattcctcggcgcgtccctcatcaccctgctcgagatggccacggcgaggcccggcaacgcccgcggatggttctctgacgacccgcgggaggcgcggatagataacttctactggttcttggctctcctctgcttcgtcagctttgtcgtcttcacgcacttgtgcaagtactacaacgacagatctgcgtcagggaggtaggatcgacccgagtaattaagctgggggtggacgagaggatcttcgatcttgattttgcttgacaccttgagtgaaaactcattacttgtattttcagggcgattctagctagagatagttcgtctgtgtaatgttttcagaaagacatgtaattcaggactctagacgtaatggttgtgttccaacacttgtacaaagcttgtcttgtgatttgataggcaaaagataatactctctccgattc

SEQ ID NO: 151724 - DNA, 809 bp, Zea Mays
gccagagcgtcaagtctggttcgccgcacggcgtcgcgacgccgacggtcatgtcggggaagacgacgccgacgaaggcgacgctgagccggccatgcgttctggtcatagtgatggcgggcgtggagaggttcgcgaacaagggggtggggtcgaacctggtgacgtacctcaccagcgtcgtgggcatgagcacggcggcggcggccaagagcgtcatcgcctggaacggcgtcagcttcatgctgccgctcgtcagcgccgtcctggctgactccgcccactgggaccgctactgcaccatcgccgcctcctccttgctctacgtcttggtaactccatcatcgtcgtagcctcttaattaattcattcattacatgtccgataatctttatgacatattattagctgtctggcttagagtgcatgccaatcaggagttctggaacaagtatgaaatctagaattaatggctcctatgtccgtttctgaacattgtaataattaattacggtggaaccaaaatgagcaaatgcgatgcgatccttaaaaacacttctgaacctctgtttttttcatagcaaaacggaggtgaagcccactttgagggctagtttggaaactctatttttctaaaaaaaaaatctattttttctcagaaaaatagaaaatctttaaaaaatagggttccaaaccaaccctcaattattattactttgtctaaaaaacaggttaccaccactgtccctccttgtccagggaatggtagcgctcacgacatgggcgctgctggggacacggatgccgcg

SEQ ID NO: 151725 - DNA, 444 bp, Zea Mays
atggctatgatggcgtctaggctagggcatttcaaggcggcggcaggatggggaacaggaggtgctgcggtgggtaaaagcagggtggttttcgtgaaggctcgtacgctgcagggggatttaagtgcaaaagatccctctacagttagatcttcatctgaaggctcacgtcgcgcgctttcacgcttgcaccttattcccgcttgcacagtagtcgacgccattagtttggctaagataacaactttaaaggctttgtttgggagaagggtattggagaggattgatggagctagaatctcttactattcaattttgaatagaaaattaaccaccatattacggatggcggatacacacataacgcttcacggtcccttccccgcttctgatcttcccagtacgaaattggcagcaacagctacgtatcgacaaagctgttga

SEQ ID NO: 151726 - DNA, 2212 bp, Zea Mays
gtttccgtcccccatcctcctccgccccccagccgccgcatccaatggagtcctcgctcctcctctctaccccgcgcccgctcaagcccttccatccgcatcacttccccaccgctcgtcgtcgcgacgcgtccttccgcgggaagccccctccgccgccgcccctgccaccgctcggacgcggcagccgccggttgggtcgggcggtgccgcgcgcctcgagcgaggcgttcggcgacggattccgcagccaggacaggcctcccggggttagcagcgggggtgttcgccggaggacctaccgcgaggcgcagggcgaggcggccgtgccacccgtggccgcggccgcgagagcagtcgcgccctacgtcgccccggtcggggcagtactcatgctgagctttgtcatatggaaggtggttcagaatatgattccagggaagaaaaaggatcatggttctggaaaacatgcgccttctggtatcatgtggtccttcgctgctggctccaatttggcaacatctaccctcagtgctgaaaaggagtcgcggaaaaatctgaacaagttctacaaagaacttcgaactttgaaaactgttaacatggctggtcgtcagtttggagatgagggcctgttttttctagcagaaagcttagcctatgacaagagtgcagaagaggtggacttttctggcaatgggataacagctgtggggatagaagcctttgatggagttcttcagataaacacaactttgaaaactctcaatttatctggaaatgacatcggggatgaaggagctaagtgtctttcagatatattggttgaaaatgtgggtatccagaaactcctcctgaacagtatcaatattggggacgagggtgccaaggcactttcgaacatgctgaaaaagaataaatcaatacgtattctacagttcagcaataatgcaattgaatacagtggttttgcaagtattgcagaagcccttttagagaataatacgatacggagcttgtatctcaatggcaactatggtggtccccttggtgcatgcagcctagctcaaggaattctagggaataagtctttaagggaaattcacttgcatggtaatgggattgggaatgagggaatacgtgagttgatgtctgcattatctgctcacaaagggaagatcacagttgtggatattggcaacaacaacattagcccggaaggtttacatcctgtagccgagttcctcaaaaggacaaagtccttacagtggttcagtctctacatgaacgatattagtgatgagggagctgaaaaggttgctgaggctctgaaagataacaaaacaatttctaccatagacttgggtggcaataacattcactccaaagctgttagtgcagtagcggaaactttgaaggataatgcagtgctgacaacactggatttgagctacaatccaattggatcagacggagtaaaggctttgtgcgatgtcctcaagttccatgggaagatccaaacccttaagctcggctggtgccagataggcatggaaggtgcagagtgtattgccgactgtctcaagtacaacacaacgttatcgacattggatctgcgggcaaacgggcttggaaacgatggtgctatatgcttggcgcgaagtttcaagataatcaacgaatcgttgacgtcccttgacctgggtttcaatgagattcgagacgacggagcattcgcattggcacaggcgctcaaggctaacgaggatctggcggtcacgtcattaaatctcgcaaacaacttcttcacgaaattcggacaggtcgctctttctgaggcgcgggaccatgtgtacgagatgaccgaacgggagatagacatttatttttaggggggtaccggttcccctgtgcacacagttagcacaggacatgaccgatgcttgtttgtcgagtaggttgaagaataaggtcgcgcggtagagcgatggtttatcctttgtataggaaaattttggtgggttagttaaatatttttagttactatgtaggttagccattcgatcaggtgtctatatgcaagttttgctggaaacgtcggtgtcgttttgaaccattcgtattattggttgaaaatggaatggatatgacgggcatcacatgcaaactgattcttttttgtggaggacttcactgatgtggtggtgtgtgt

SEQ ID NO: 151727 - DNA, 1265 bp, Zea Mays
gtttgtgatgaagcactgtcgtcgcccatgacgggaaaacggctccatatacgtactactaacgtacacaccacagcgactctccggccatgcagttgccggctgcacaacttgtgcaagtgcatgcatgcatggatttggatccatgcatggccacagcccacagcccacaggggaggggaaggtgaggccgcgccgcgaggaaccgcgtcgaccttgtcgtcgatgttggcttgcaaggcgagcccgagccggccgtgcgtcgtcccccttgtttgcctgctggtggtggcggccgcagtcgtcgtcgtcgctgcctcggcgccgccggcggaggcggcgttcgacgacaactacgtggcgcagtggggtagagatggttatcaccttgtcgtccggggcacggaggcgaatgtcaccatggaccagagctctggtgccgggttccggtccaagtccacgtacggctcagggttcttccacatgaggatgaagctgccctccgggtacacggccggcgtcgtcacgaccttctacctcatctcgcagccggaggatgggagccgcgacgaggtggacttggagttcctgggcgacaaggccggcgtgcccatcaccctccagaccaacgtcttcgtcgacggccgcggcgacagggagcagcggacgcgcctctggttcgaccccgccgccgacttccacgactacaagatcctctggaacccataccagctcgtgatgttcgtggacgacacgccggtccgggtgctgaggaacctgacgggcgccgtgccggggtacccgttcccggggaagcagacgatgctgatccgcgcgagcgtgtgggacggctccgactgggccacggacggcggccggaccaaggtggactggtccaggggccccttcaccgccggctaccggggcttcgacgtcgacggctgcgccaacaacgggagcgacgcgtgccaatcgcccgacctatggtggaacgccgccgagtaccggaacatcaccgcggagcagcgggcggcgtacgaggacgtgaagaggagttacatgaactacgattactgcgccgataaggccaggttcaacagcaccaccgtacccattgaatgcaactacgcttgataagccagctaggagtggcgttgtatattatacatacacgaaaagatatgtctgcttatttgttgcattgcaagggtttaaatatgcaaatgcttataaggactacaaaaatatattactttgtcactaaa

SEQ ID NO: 151728 - DNA, 922 bp, Zea Mays
atggcatcgtctcctcagaccgtgatccagatgtcttcgccgcgggccaacgccgccacagcaccgcagacgacgcccaataaggtcgtcggagccgacgccgacaaccgtgtgccggcgatggcggcaacagcaggctccggcgggacaatggcggacaaggtgatgacgagcgcggcgaacctggcgcagctgctgccgacgggcacggtgctggcgtaccaggcgctgtcgccgtccttcacgaggcacggcgtggactgcacggcgtcgaaccagtggctgacggcggcgctggtgggcgtcctggcggggctctccctcctgctctccttcacggacagcgtcgtggggaccgacggcaggctgtactacggcgtggccacgccgcgcgggttcaacgtgttcaacctgtccggccaggaggagggtctgcagtgggcgcccggccagctccggaggctgcggctccgcccgctcgactacgtgcacgccatcttcgccgccgtcgtcttcctcaccgtggcgttcagcgacgtcggcctgcagcgctgcttcttcccccacgccggcgccaacaccagcgagctcctcaagaacctcccgctcgggaccgcgttcctgtccagcttcgtgttcttgatcttccctaccaccaggaagggcatcgggtacagcgacaccaccccgcaccaaaaggcatcggatgacgacgatgcaacgacaccagtactactccccaccaaaagccaccagcatacggtctagctagccggttcggatgcaattcagaatttagaatacatgttttgcaggaaattaagctagggttcatacttgtatgtagtagctaggtaatagatgcatgttaatttgatgtgtgattcttttcgttcattcataaatacatgtttggaaaata

SEQ ID NO: 151729 - DNA, 123 bp, Zea Mays
ttttttttttggacgaaatgacaggagctctgcctttcattaagaggagaaaattaatgtacaatagaagggagttccggaaagaacaaccctattacgatctcacataactgtttgcacccc

SEQ ID NO: 151730 - DNA, 2014 bp, Zea Mays
gcgggaggggtttctgatggcgccgaagcggaagcctgccgcggcggcgaagtcggaccctgatggcatattccgcggcgtctccgctttcatcgttcccaacggcgtccaggctcgccgcctcgtggtgtggaagcagaggctggtgcagatggggggccgagtcgtggagaagcccacgaagggcgagctggcgggggtcaaccacgtgttggccatggacgccaaggcgctactccgggagcttgacgccgcttggctccaccgcttccgcgggagtgtggtgtccttcgaatggattgaggagtgcctcaagtctggggagaggctgcccatccacaactttgcaatcaattacgaaaaggaatttaagccaaagaatgcggtttgcactggaaatctagttgcgtcacggccctctaaaaggaccaaaatgtcgtctgagtatcctggggaccaccagataattagtggaggggatagggagaaggaactagcagctggagggcctccaggtgcaagtgcacatgtggttgaaggatcaagtgcggggaagcagcctaaccagtatgcaagtagccaaagtagctcagcagattccaaggacaccataggttcgcatggtacatttggcatagaggaagcctcttctggaggacccagcatatatgctccagcagacttgaacaagaacatcaccaaaatttttggaaggcttatcgatatatatagggccctgggagatgacagaagatcatttagttattacaaggccataccggtgattgagaaattgccattcaaaatcgaaagtgctgatcaagttaaaggtctccctactatcgggaaatctttgaaagaccatataaatgaaatagtcaccactggaaaactttccaagctggaacactttgagaatgatgaaaaggtacgaacgatcagtttattcggtgaagtttggggagttggtcctgcaactgcgctcaagttatatgagaagggacaccgtactcttgatgatctacagagagatgagtcacttacaaatgcacagaggattggattaaagttttttgatgatatcaagcaaagaataccccgacatgacgttagcgagatggagaaacttttacaagatgttgggactgatatcttgcctggggtaacaattgtttgtggaggatcatatagacgcggtaaagcatcttgtggtgacatggatattattataactcatcctgatggagaaagccatgtaggatttttatccaagtttgttcaacggctgaaggaaattaactttttgagggaggatcttatctttagcatacacagtgttgatgggactgatagcggggttgacacatactttggtctttgcacataccctgggcgtgagctgcggcaccgcatcgacttaaaggtgtacccgaggaacagatatgcatgtggtctgcttgcatggactggaaatgatgtactaaatcggcgatttaggctactagcagaatccaaaggatatgtacttgacgatactggattatacctagctacacgcggcagtggtggaaagcatgctggcagatcagacgccatagttaactgtcacaccgagaaggatgtgtttgagacgcttggattcccttggctggaaccacatgagcgcaacctttagggcttgtttggaaactcaaacccctagggatcccaacctttactaggtaagcaatccatggggatgtcatttggataagccatttagttctccttataggacttctcattcctagggttgcctccctcttgcttccaaattaggccctagctgtttttgaacgttcatctagagaatgtgttttgtacagttagttatatatgttacctgtatctttaacctacctcgactttctgggtactaacagccttttgtactgattgttgttcatacttcccctttttgtgctgtcactagtaggcagtttttgttcagcttcgctttctatgcttctcccaa

SEQ ID NO: 151731 - DNA, 2087 bp, Zea Mays
gcgggaggggtttctgatggcgccgaagcggaagcctgccgcggcggcgaagtcggaccctgatggcatattccgcggcgtctccgctttcatcgttcccaacggcgtccaggctcgccgcctcgtggtcgcgctctgtcttcccccacccccctctcgttggcgcctcgagtcgttattgtgcgcttaggcatttgggggatggtcgatgcaggtgtggaagcagaggctggtgcagatggggggccgagtcgtggagaagcccacgaagggcgagctggcgggggtcaaccacgtgttggccatggacgccaaggcgctactccgggagcttgacgccgcttggctccaccgcttccgcgggagtgtggtgtccttcgaatggattgaggagtgcctcaagtctggggagaggctgcccatccacaactttgcaatcaattacgaaaaggaatttaagccaaagaatgcggtttgcactggaaatctagttgcgtcacggccctctaaaaggaccaaaatgtcgtctgagtatcctggggaccaccagataattagtggaggggatagggagaaggaactagcagctggagggcctccaggtgcaagtgcacatgtggttgaaggatcaagtgcggggaagcagcctaaccagtatgcaagtagccaaagtagctcagcagattccaaggacaccataggttcgcatggtacatttggcatagaggaagcctcttctggaggacccagcatatatgctccagcagacttgaacaagaacatcaccaaaatttttggaaggcttatcgatatatatagggccctgggagatgacagaagatcatttagttattacaaggccataccggtgattgagaaattgccattcaaaatcgaaagtgctgatcaagttaaaggtctccctactatcgggaaatctttgaaagaccatataaatgaaatagtcaccactggaaaactttccaagctggaacactttgagaatgatgaaaagtttattcggtgaagtttggggagttggtcctgcaactgcgctcaagttatatgagaagggacaccgtactcttgatgatctacagagagatgagtcacttacaaatgcacagaggattggattaaagttttttgatgatatcaagcaaagaataccccgacatgacgttagcgagatggagaaacttttacaagatgttgggactgatatcttgcctggggtaacaattgtttgtggaggatcatatagacgcggtaaagcatcttgtggtgacatggatattattataactcatcctgatggagaaagccatgtaggatttttatccaagtttgttcaacggctgaaggaaattaactttttgagggaggatcttatctttagcatacacagtgttgatgggactgatagcggggttgacacatactttggtctttgcacataccctgggcgtgagctgcggcaccgcatcgacttaaaggtgtacccgaggaacagatatgcatgtggtctgcttgcatggactggaaatgatgtactaaatcggcgatttaggctactagcagaatccaaaggatatgtacttgacgatactggattatacctagctacacgcggcagtggtggaaagcatgctggcagatcagacgccatagttaactgtcacaccgagaaggatgtgtttgagacgcttggattcccttggctggaaccacatgagcgcaacctttagggcttgtttggaaactcaaacccctagggatcccaacctttactaggtaagcaatccatggggatgtcatttggataagccatttagttctccttataggacttctcattcctagggttgcctccctcttgcttccaaattaggccctagctgtttttgaacgttcatctagagaatgtgttttgtacagttagttatatatgttacctgtatctttaacctacctcgactttctgggtactaacagccttttgtactgattgttgttcatacttcccctttttgtgctgtcactagtaggcagtttttgttcagcttcgctttctatgcttctcccaa

SEQ ID NO: 151732 - DNA, 1346 bp, Zea Mays
ctacagctagctaggtagaggcagttgctcgagatgggagcgcacgagccactgcatccccacaagcagatgaggacatcgtcgtcttcttccaaaggcgggtacttcgtgcccagatccgtgtgcgcttggcttgtctgcggcttcgtcgccttggccctcctccacgtcctgtgctgcactccccccggcactcaagaagccgtgttgtctcccctgctgcagtacgtcgacgacacatacaacttcgtctcatctgggccgcagagctgcaactacacggaggggaggtgggtgtacgcgccgggccacgcgcggcggtacaacggcacggagtgccacgtgaaggacagccacgactgcatccgcaacgggcggcccgacacgggctacctggactggcggtggcagccggcggggtgccggctgccggcgttcagcgcccgggcgttcctctcggcggtgcgcggcaagcacgtggccttcgtcggcgactccatgtcgcggaaccaggcgcagtccctggtctgcctcctgggcgccgccgtcccgcaccgcgtcgtgtaccgggacccggacccgcgcaagttcaacctgtggcgctgggcgttcccggcgtacgacgtgacggtgtccttctactgggcgcccttcgtcgccagggccacgggcaaggcgctgaacgacagcctgccgcagaacatgaaccacgtgcacctcgacgcgctcgacgaccggtgggcggccgacgccgacaccatggacgtggtggtcttctccatcgcgcactggccgctgaacggcgccatctactacaacggcagcgcgcggatcggccaccacggccaccaggagctcagcccggaggaggacatcggctacgcctggcccatgaaggtggcgtaccggatggcgctggaccggctggtctctggcgctggcgccgacggcggccgggcgcggaccgtggtcatcgccaccttctcgccgggccacttcgagggcaacaccctgaccaccatgtgcccgaggaaggagccgtacaaggagggggagaaggagccgcgccacctcgacatggagctggtcggcctcgtctacgaggaggtggaggcggcgagggccaggcatggcggcggcgcaagcagggtggaggtgctggacgtgacgaagctggcggtcatgcggcccgacggccaccccgggctttacatgcaccgcgacccgttcgcgcacggcggcccgcagccgtggatgtcgtccgactgcgtccacttctgcctgcccggcccggtcgataccttcaacgagatactgcagcagatcatcaggaagaaggggtgaaa

SEQ ID NO: 151733 - DNA, 87 bp, Zea Mays
gagcttggaggtcatgcatggaggctgctggattcgtggattctcagtgtctcgcagaagctccgatggcctagttcgagacggagc

SEQ ID NO: 151734 - DNA, 1414 bp, Zea Mays
ccagttcagactatccatcaaacattaagcatgcgataaacaacgtccttcccgtcatcgcccaacagctagaattccacttctaccatcgaccccataacatcacacaacctaacgacataataacggatctagccataattaccaagtgcacacctcgcattactggtatttctaacttaatcgtattcgtatacaaagcgtcttattttacgatcataaaaccgatagtaaaaatagcgaatcggctcaccacaccacaactcgatttggtagttgcctgaacgacgacggccttcagcttgacgacgagattgaatagagaatggtgagcatgaggatttcacagcgaggatgagcgacaacttggatttttgatccgacatttaatcgaacacaacggaagcgaggaactggggctgcacagggacgttcggccgggcacggcaagcggagagaggaacgcgcgcccggtgagggagatccgacgagctacagctgggcgtgacgagcagcggagagaagcaggcggccgagttgggagggaggctgcgcgcagaccgaacactggcgaactcgcgcgcgtggggaaacagcaagcgcgatgcccagggagttcggccggacgagcgcagggaccaaacaccggccatgggaggaatctcaggcgccgagcagggaaccagagacgcgacaatagggaggagacgcggccatgggaaggcgatccggtgagctcgcagcggatccgagctgggggctgggcaccgagcaagctgcaaccgggaggaaataggagcgaccgagcgccatgggagctccaaggccgagaactgacgacgcgcggctatggagatgaggaagaagatgggaggagctcggctgggcgctagttgcaggaagaaccggccaggcgtggtcgagcaggggcgcgacactggagcaggcgcgccgtccgagcaggggcagagaggagctaaagaggcgccgaccatggaagagctagagcagggacgaacgccagcgacggccatccaatacaggggagatgggacgccagccaccaacagaaagagagggaaacagagtcaaccgaacttgggcaggggcgagctcgaccaccaggagcaaagagagggcggccatcagggcgtgagcatagggaccgccatggatggggaagacgccatgggggagcttggtcatggactctgcagggatgccgatctggggaaactcgccatgggtgatccggccgacggcacctgagggagatgaagccgagcggagggctgttcgtgcgaggaaaaagcttggggcagaggagcagggagctccatggactgagggggcgcgcgtcaggaagcggcgcggttggctgaagaagaagacgcgcgtgaagataaggagcaag

SEQ ID NO: 151735 - DNA, 887 bp, Zea Mays
gtaggagagtctcctgtcgtcgacgacattgcatggagatggagaagatgatggggtgtcagatcccggcgtttggaatgtggaactactgtagtgatctctccatcacgcagtacttcgactcagccatgcaggccaggctgatgaagcgctggaactgccgtggcagcgccgccgccgccgccgtcgtggttggcgagaaaggcggcgtcgccggcggggaacagcttgtcttgtttcggaccccttctttccaacgcaagcctgcagcccagatcaaggtgataaggagggaagtggagaagcactgtgacggcgccaacgagttgcaggacggcggcgtgcgagctgctgaagccgctgttgcatacccagtgatgaagcgtaaggttatcgttagtcaagctgtggatgaggatctgtacaaagtgccccaaccaccgatgtacgaaaaacctagaaagatgagaagggtggtttggagcatgtggatcgggtgcctgggtttggactgcgttgcctgacaaacaggattgtaatttttgtatttcttcagtacgcacactccataatttaaataattatcaaccctctttaggggtttgaatgcttttttgtgcttcttgatgtatttattttgcttgaataatcatttagtttccttctagatattattttttccctttgtaagagcatctctcagaggaaccttaaattaagtccttgttgggggtatgcttcattgccgaagattctaaagaaagaaaacaccttcgtcacaatgacagatcttctcaggagcaagggccgaagctattatctatagagcttcggcacaatgacagatctcaagacgaaggtccgaaccgacttaaagatggattgac

SEQ ID NO: 151736 - DNA, 318 bp, Zea Mays
atgacgagtctagatctgagatattggacaaccaaggctggtaacccgatgtccatgtcttcgtcgtgtccttctccgacaacgaacatgtatgagtgcatcttcccttcccttcctgctgtacgaaaccttggaagtgggggaggcgatggatgggggtccctaatttgctgcctatggtacccattcgatggctcggcatcgcctgtctacatggcctttgctttaccacctcggcatcgcctttctacatggtctttcctttaccacgatgtcgactcggatgaaggccagaagacagaccgtggtccattatga

SEQ ID NO: 151737 - DNA, 2087 bp, Zea Mays
cacggccgcatccaccacctccgtttccaccccacttgatagcgacgccgccgcacaggaactcaggaacccctctcgcatctcccctcgcttccccgcgacagcgacggccggtcgcttcaagtgacccaagcacctgcgcccctcctttctccttttctcccctcggcccccgtccctctcagcccctatgacctcttccgcttccccgaaccctagccccgtcccagtccccactccgatcaccaccgcgaacgggaccacctcatcaccgaaggatcagccgccgcctccgcctccgctgccgcagcagcagcagcagcaggggggcggccaggaggaggcagaggcggcggatgggggaggcgccgaggctgcggaggcgggagtattagctggtgttgcggccgaggctatggaagtggatgggggctctggcgcgggggatgcggaggcgggcggctcggtggggggaggagtaggcgctggggcgggtggaggagcgcagcaggcctcgccggcgaccgtgttccggattcggctcaagcagtcgcctgcgagcctccgtcacaagatgcgcgtgcccgagctgtgcagaaacttcagtgcagttgcttggtgtggaaaactgaatgcaattgcttgcgcttcagagacttgtgcacgtattccaagctcaaattcaagccctccattttggattcctatacatatcctgaatccagagagaccaacagaatgctctgtattcaatgtgaaagcagttcattgaatggtctcctcggtcctgccctcgtgcattgctagtggcaaattttcatgggcggatcactatatggacacaaccaacaaagggtcctgtaaatcttgtacgtgatgcaagcttgtggcagtgtgaacatgaatggcgtcaagatctttctgtggtgaccaagtggttgtctggaatttctccgtatagatggcttcctacaaactccactagttcaaacctgaagaccttcgaggaaaaattcctcacccaacagcctcagagtgcaggttctgttcaacttcattggtcacaatggccttctcaaaactcagcacattctagatggttttctactagcaaagggcttctaggagcaggacccagtggcataatggctgctgatgctattgtaacagaatctggagctttacatgttgctggggtaccccttgttaatccatccactgtagttgtttgggaagtgatgccaggtcttggaaatggtattcaggcaactgcaaagataaatgcagcaagttctgttcctccatctctgaatcccccttcatggccgggttttgctccactagcagcctacctattttctttgcaagattatcttgtttctgagggtgcacagacaaaaaagctgacagacaataatgagactactgaggctgcatcaattcattgttgtccagtttctaatttttcagcttatgtcagtccagaagcagctgcacagtcagctactactaccacctgggggtctggggtcacctcagttgcttttgatccgactcgtggaggatcggtcattacagttgtaatagttgaagatgaacggagctcctctgagtgcagtgttgacagggcgaacagactcagctttgacccttacgatcttccaaatgatgttcgacaactagctcaaatagtttattctgctcatggtggtgaagttgctgttgctttcctccgtggaggagtgcacattttctcaggtccaaattttgatcaggttgacagctaccatgtcaatgttggctctgctattgctccaccagccttttcatcaagcagttgctgcttagcatcagtttggcatgacacgctcaaagatcgaaccatattgaagataatacgtgtgcttcctcctgcaattcttagcacacaaacaaagatcagctcagcagcatgggaacgtgcaatagcagatagattttggtggagtttattggctggagttgattggtgggatgctgttggttgtacacagagtgctgccgaagatggtataggtaagggcattgctgatgatgatatgctttag

SEQ ID NO: 151738 - DNA, 2041 bp, Zea Mays
cacggccgcatccaccacctccgtttccaccccacttgatagcgacgccgccgcacaggaactcaggaacccctctcgcatctcccctcgcttccccgcgacagcgacggccggtcgcttcaagtgacccaagcacctgcgcccctcctttctccttttctcccctcggcccccgtccctctcagcccctatgacctcttccgcttccccgaaccctagccccgtcccagtccccactccgatcaccaccgcgaacgggaccacctcatcaccgaaggatcagccgccgcctccgcctccgctgccgcagcagcagcagcagcaggggggcggccaggaggaggcagaggcggcggatgggggaggcgccgaggctgcggaggcgggagtattagctggtgttgcggccgaggctatggaagtggatgggggctctggcgcgggggatgcggaggcgggcggctcggtggggggaggagtaggcgctggggcgggtggaggagcgcagcaggcctcgccggcgaccgtgttccggattcggctcaagcagtcgcctgcgagcctccgtcacaagatgcgcgtgcccgagctgtgcagaaacttcagctcaaattcaagccctccattttggattcctatacatatcctgaatccagagagaccaacagaatgctctgtattcaatgtgaaagcagattctccacgtgactttgttcagttcattgaatggtctcctcggtcctgccctcgtgcattgctagtggcaaattttcatgggcggatcactatatggacacaaccaacaaagggtcctgtaaatcttgtacgtgatgcaagcttgtggcagtgtgaacatgaatggcgtcaagatctttctgtggtgaccaagtggttgtctggaatttctccgtatagatggcttcctacaaactccactagttcaaacctgaagaccttcgaggaaaaattcctcacccaacagcctcagagtgcaggttctgttcaacttcattggtcacaatggccttctcaaaactcagcacattctagatggttttctactagcaaagggcttctaggagcaggacccagtggcataatggctgctgatgctattgtaacagaatctggagctttacatgttgctggggtaccccttgttaatccatccactgtagttgtttgggaagtgatgccaggtcttggaaatggtattcaggcaactgcaaagataaatgcagcaagttctgttcctccatctctgaatcccccttcatggccgggttttgctccactagcagcctacctattttctttgcaagattatcttgtttctgagggtgcacagacaaaaaagctgacagacaataatgagactactgaggctgcatcaattcattgttgtccagtttctaatttttcagcttatgtcagtccagaagcagctgcacagtcagctactactaccacctgggggtctggggtcacctcagttgcttttgatccgactcgtggaggatcggtcattacagttgtaatagttgaagatgaacggagctcctctgagtgcagtgttgacagggcgaacagactcagctttgacccttacgatcttccaaatgatgttcgacaactagctcaaatagtttattctgctcatggtggtgaagttgctgttgctttcctccgtggaggagtgcacattttctcaggtccaaattttgatcaggttgacagctaccatgtcaatgttggctctgctattgctccaccagccttttcatcaagcagttgctgcttagcatcagtttggcatgacacgctcaaagatcgaaccatattgaagataatacgtgtgcttcctcctgcaattcttagcacacaaacaaagatcagctcagcagcatgggaacgtgcaatagcagatagattttggtggagtttattggctggagttgattggtgggatgctgttggttgtacacagagtgctgccgaagatggtataggtaagggcattgctgatgatgatatgctttag

SEQ ID NO: 151739 - DNA, 1898 bp, Zea Mays
gatgctgacaaaatgactgttgagccagctctgcttccaaacatccagggttacgttgatgctgttcttgatttagcatcacatttcataactcgcttgcggcgttatgcgagtttctgtcgaactctggcgagccatgtggggccatcttctaccacaggcacttctagaaatatggttacaagtccaacaaacagttctccttcgccatcaaataatcaaggtaatcaagggggatcaacatctgcaacagggaactcacaaatgcaggagtgggtccaaggtgcaattgctaagattagtaacaattctgatggtgctgccactgcaacacagaatccaatgagcacgaggacatcatttatgcccatcagcattaatacgggcactttccctggcacacctgctgtgagacttattggggattgccattttcttcatagattatgtcaattactgctattttgtctgcttttccgaagaaggcaatcaccaaggttacttgccagttcgcaaaaaaatcaagattctgccatgcagaaaatacaacacatgatgaatgctaagacagaagataacagttcgacagtaagatctggtctaggggctgccaaagtagaagaaggtcactctgcgcgtggtggacaatttgttcttggtggtgcaaagggtcctgaagaaaatccaattggcaaatctgttagaataggttctggcaacgctgggcaaggttatacttcagatgaggtcaaggtcctttttcttatactggttgacctatgtcgaaggacatctaccttgccgcatccattgcctgcctctcaggttggttccagtagcattatcataaggctgcactacattgacggcaactacacagtgctccctgaggtagtggaagcgtctcttggtccccatatgcagaatatgcctcgtccacgaggagctgatgctgctggacttctacttcgagaattagaactgcaacctcctgcggaagaatggcatagacgcaacatgtttggtggaccctggtcagaaccagatgattttggtccattggacaatatgcctcgtctaaaaattagtggttccatcaactctcatttgtctgacatggaagtggatgctgtcagttccattgggattgatctttggccaagaaagcgtaggttatctgaaagagatgctgcatttggtctgaaaacatctgtaggtcttggaggttatctaggtgtcatgggatctcgaagagatgttgtcacggctgtgtggagaacaggtctcgatggtgattggtacaagtgcatacgttgtttgcggcaaacttgtgcatttgcgcatcctggtgccccaaatcagacaaatgaacgtgaggcttggtggatcagtcggtggagccatgcttgcccaatgtgtgggggttcatgggtgaaagttgtttgagcgctgtatttggcaacaacttcgctgctaattgctttcctgacaaacatgtatggagttccatagttatgcatctaacgctaggctactaggatcaggttcagccgttcatgccagatggttggtctacaggcacatgcacgtggcacgaccactgtggaagtctggtagaattaggagctattctgggggtctgaatatgtaactgacatttgcattatgctgtctagtgtattattaaccagtgactttccttgctaaaaaggtgtagcatcgttacttgttcagcgctggacgtacttttcatgttttgtcaaaggtttagtagcgcatggtgtgtgttggtaaggttctactcctttttctttttaagacaatgatacacagcttccagcgtgttccagaaaaaaaaacaaaagatcaagtattacttcttgggatcgtgttccatt

SEQ ID NO: 151740 - DNA, 1586 bp, Zea Mays
ggtgggtcgctatagagcaaggataactatcaaatcttatagcctgaacgtacctgtagatgttagtgactaaaaattaattaaaacaagtaaacattgatcgctaaattgcatggtaatttatttttttaatattgcttgtatgtttatttcatggtttgtttatgtatgcacatgactatagtatgcaactgtgttctttatgcttatatgatattagattcgagttgaaagtcgtttcaaatgtttattatttatttgcattcgtaataatttattcaaatgtttaatatttatttggtaatttcttttatgattttttgagtaatttaaaaatacatttcgaaataaataaaaaaagaaaactcttcctaaccctaaggcccactagggggcccatctacctaaccctagcagctgcgcgctccctagcttctctcccagccgccgccgcctctacctcttcctacgcttccttctctccaccgcggtcccgcaccacgggcacgcgccgtcgcctcgcccccacggcctacgccgccgccgcggcagctgcggctgaggccccgctccccatgacgccccgtccgaccattcattcgttcaccggccagcgtcagccagccaggcgtccagctccaacacgtgttgccaaatgccaacactccagtctccaggttgaagcgcccagggtgcagccgaagctgagcgagcccttcttggggttcacccagaccgcagagatttggaactccagggcttgcatgatcggcctcatcggcaccttcattgtggagctggtgctgaacaaggggattcttcagatgattggggtggaggtgggcaagggtctggaccttcctctttgaagggtgaccaaatagtgacattatcgtttgctggtgtattatgctggccgaaaaacatgagggtttcacttgctttttgacttggtggctacatatgcatgttcatcatgcatgtccttggatatccggatgttacaacatcaactatgttaatgacttggtggctggccgtttgacagggttaattggtgaacaaaaacgtgtgccttgtgaaacagagaaagataattgatgccaccgtgaaattagtactggtttataagataagatcaatgcaaaaatgggagaaggtggtcttctccgttgcgctcctgaaatatttgagcagtctggagtggctagtttgttttcagacattggactttctcctcattcaacatcaattctcatgagtacccttaatgctttgctgatactcccttgtataactgccgcaatgctgctgatggatgtctgcgggagaagataaaacatgagacaccatgaaaattagtgatgtagttgtgggcttttgaacaatagctggagtgatataaaacattagtgatgtagttgtgggcttttgaactgcttcaagctggagtgatgtcgctgtggtgcttttgtgactgatcatctctggagcttttgtgaatgatctagctaacaatctgtaaatgatctagttgtgaatgatattataattgtgatgcttttgtgaatatataattgtggtgc

SEQ ID NO: 151741 - DNA, 869 bp, Zea Mays
gtagttacgtcttcttagttgacggagagtcctagagtcgagacaagggagggagggagggagggagagagagagaagagcgagagggagtagtagtagtataaattttgggcaggtgtggagagcagaagcgagccaagcaaggagagcagcagcttagcctagcactgctgcagcttgcttgctttgctttgcttctccagtattcttcttggccaggcctcagagcagagctttggcttggctagtcgtcgtccgcggatagtctccgctgcaccgtgtgcgtgcaagcaaggcaaggcaaccagccagccgcggcgacgaccgatcgtcaacaagctcgatcgccttggccggcggccgggcgggccaccgcaagccgcgagcgatggaggagcagctgggcccggtggcggtgacgcacctgctgcagcacacgctgcggagcctctgcaccggcgacgccccgcagtgggtctacgccgtcttctggcgcatcctgccccggaactacccgccccccaaatgggatctccctggcgccgcgtacgacaggacccgagggaacaggaggaactggatcctggcatgggaggacgggttctgcaacttcgcggcggccagcagctctgccgccgcgtccgcgtgcggccaagagggggcagcggcagctgcggcggttgcatatgccggggactgtgaggcagctgtgcaggatgcggtgaagcaccagcaccagcaggcgcagggcctgcagcctgagctgttcttcaagatgtcccatgacatctacaactacggcgaagggtaggtggctgactagtccgcatgcacaccacgattagcgagccggttaaccttcctctcct

SEQ ID NO: 151742 - DNA, 1754 bp, Zea Mays
gtagttacgtcttcttagttgacggagagtcctagagtcgagacaagggagggagggagggagggagagagagagaagagcgagagggagtagtagtagtataaattttgggcaggtgtggagagcagaagcgagccaagcaaggagagcagcagcttagcctagcactgctgcagcttgcttgctttgctttgcttctccagtattcttcttggccaggcctcagagcagagctttggcttggctagtcgtcgtccgcggatagtctccgctgcaccgtgtgcgtgcaagcaaggcaaggcaaccagccagccgcggcgacgaccgatcgtcaacaagctcgatcgccttggccggcggccgggcgggccaccgcaagccgcgagcgatggaggagcagctgggcccggtggcggtgacgcacctgctgcagcacacgctgcggagcctctgcaccggcgacgccccgcagtgggtctacgccgtcttctggcgcatcctgccccggaactacccgccccccaaatgggatctccctggcgccgcgtacgacaggacccgagggaacaggaggaactggatcctggcatgggaggacgggttctgcaacttcgcggcggccagcagctctgccgccgcgtccgcgtgcggccaagagggggcagcggcagctgcggcggttgcatatgccggggactgtgaggcagctgtgcaggatgcggtgaagcaccagcaccagcaggcgcagggcctgcagcctgagctgttcttcaagatgtcccatgacatctacaactacggcgaaggtctgatagggaaagtggcggcagaccacagccacaagtgggtgttcaaggagccccaggagcacgagacgagcaacctcatctcctcctggagcaaccctgcagactctcatccgaggacgtgggaggcgcagttccagtgcggcatccagaccatcgccctgatcgctgtcagggagggcgtcgtgcagctcggctccatgaaaaaggtaacggaggacctgagctacgtggtgatgctccgccgcaagttcgggtacctcgagagcatcccgggggtgctgctcccgcacccgtcgtcggcgggcgtgttcgcgggcggtgggtgcgtggggcccccgccggacatcgccgcggcgtggtcgtcgggcctgatgcaaccgccggccgccggcgccgggccgccgctggagctctacgacccctacggcgccggcgcgatggccgccgggccaggcgccgccgccgccgccgccgccgctgcgtccatgcacatcatgccgtcgatgagcagcctggaggcgctgctctccaagctgccgtcggtcgtgccgccggcgccgcagccagccgggtccgtgcccggagcagcgccgccgtccaaggacgacgattacgacgacgtgcaggtgcagcagtgccatggcatggacgacgtggcggcgagcaacggcgcagcagcggtcgagagcgcgagcccgagcggcgctgcctccgcgcccatgtcgtcgtcgtcgtcctactttgtcaacgtgggcagtagtattaatcccggtgatcatgggttttagctcgtcgtggcagcccggccggctgctcgtctcgtatgatggcatggccatggcgtgcttgttaattaattgtgctggtcttcgctagggcgaaacctatcgatcatatattaccagttgccgtcgctatatgctaattaattaatgtagttaaccc

SEQ ID NO: 151743 - DNA, 1934 bp, Zea Mays
gtagttacgtcttcttagttgacggagagtcctagagtcgagacaagggagggagggagggagggagagagagagaagagcgagagggagtagtagtagtataaattttgggcaggtgtggagagcagaagcgagccaagcaaggagagcagcagcttagcctagcactgctgcagcttgcttgctttgctttgcttctccagtattcttcttggccaggcctcagagcagagctttggcttggctagtcgtcgtccgcggatagtctccgctgcaccgtgtgcgtgcaagcaaggcaaggcaaccagccagccgcggcgacgaccgatcgtcaacaagctcgatcgccttggccggcggccgggcgggccaccgcaagccgcgagcgatggaggagcagctgggcccggtggcggtgacgcacctgctgcagcacacgctgcggagcctctgcaccggcgacgccccgcagtgggtctacgccgtcttctggcgcatcctgccccggaactacccgccccccaaatgggatctccctggcgccgcgtacgacaggacccgagggaacaggaggaactggtacgcgctgctagctgcagccacacacagcacgctctcatattccttcctccttcctttgtggttctgtgcatgtcttcggtggagtcactcccatgtgaatgccctcgggtgtgttcttgcgcgtctcgcttaggatcctggcatgggaggacgggttctgcaacttcgcggcggccagcagctctgccgccgcgtccgcgtgcggccaagagggggcagcggcagctgcggcggttgcatatgccggggactgtgaggcagctgtgcaggatgcggtgaagcaccagcaccagcaggcgcagggcctgcagcctgagctgttcttcaagatgtcccatgacatctacaactacggcgaaggtctgatagggaaagtggcggcagaccacagccacaagtgggtgttcaaggagccccaggagcacgagacgagcaacctcatctcctcctggagcaaccctgcagactctcatccgaggacgtgggaggcgcagttccagtgcggcatccagaccatcgccctgatcgctgtcagggagggcgtcgtgcagctcggctccatgaaaaaggtaacggaggacctgagctacgtggtgatgctccgccgcaagttcgggtacctcgagagcatcccgggggtgctgctcccgcacccgtcgtcggcgggcgtgttcgcgggcggtgggtgcgtggggcccccgccggacatcgccgcggcgtggtcgtcgggcctgatgcaaccgccggccgccggcgccgggccgccgctggagctctacgacccctacggcgccggcgcgatggccgccgggccaggcgccgccgccgccgccgccgccgctgcgtccatgcacatcatgccgtcgatgagcagcctggaggcgctgctctccaagctgccgtcggtcgtgccgccggcgccgcagccagccgggtccgtgcccggagcagcgccgccgtccaaggacgacgattacgacgacgtgcaggtgcagcagtgccatggcatggacgacgtggcggcgagcaacggcgcagcagcggtcgagagcgcgagcccgagcggcgctgcctccgcgcccatgtcgtcgtcgtcgtcctactttgtcaacgtgggcagtagtattaatcccggtgatcatgggttttagctcgtcgtggcagcccggccggctgctcgtctcgtatgatggcatggccatggcgtgcttgttaattaattgtgctggtcttcgctagggcgaaacctatcgatcatatattaccagttgccgtcgctatatgctaattaattaatgtagttaacccaatgatttggcaatgttgtcgtcatctctcagcttattctgttc

SEQ ID NO: 151744 - DNA, 1236 bp, Zea Mays
atggctgaagcggccacttcttcgtcttcgtccggatccttcgccccgcgccgcctccatgacgccggtgtcgtcagggaatcgctcccgtacagtgttctcgctgcacccccgccgccgcctctgcctccggtgcaggtgcaggttgcgggttccggcggcggcggtggagggaagattaaccccgcggtgcttttcatcatcgtgattctcgcattagtgttcttcatctccggcctgctccaccttctcgtgcgcgtcctgtcgaagaagcagcaccgccgcggcggcccaagggacacggcgtcggcggcggcgccgaggactggagtggaggcaggcggggttgacgtggcgttgcagcgccagctgcagcagctgttccacctccacgactccgggctggaccaggccttcatcgacgcgctgccggtcttcgcgtaccgggatatcgtcgtgggcggcggcggcgacggggacaaagagccgttcgactgcgcggtgtgtctgtgcgagttcgatgccgaggaccggctccgtctgctgccgctgtgcgggcacgccttccacctcaattgcatcgacacgtggctgctgtccaactcgacctgcccgctctgccgcggggttctcttcatccccgggctcatgggcgagggcaaccccatgtttgatttcgaggagagactggaggaagggcggttgtccgaggactgtgacgacggatttggattgcctgggctgaaggcttcagggttggcacagacaccggtggctgagaagaaggtattccctgtgaggttggggaagttcaagaatgtcggaacccagggtgcggtggaaggtggcaatgccaatgccagtgtgttgagtagggatcaagtggagagtagcagcagcagcagcttggatggaaggagatgcttctccatgggcacctatcagtatgttcttggcacttctgagctccgagtagctctccagcctggccgtattagaaatggcactggtggtgcaatgatgggaagacctcctggtttaagttcgatcaatgctgatattatggaggggaagaagatctgtacacgcaacaaaggggagagtttctctgtgtcgaaaatttggcaatggtctcatattaagggcaagctacctgctggttcggatgaatgttcggatgccgggagccttccttggatgaagagaggaggtgctgcggatacatcaaacttatga

SEQ ID NO: 151745 - DNA, 2566 bp, Zea Mays
cctcccgcgttcctccactccacggctcccccaccccactcatcacactctcccaccgcacctcgccgccgcggggcaccgcgccataaagtgcgttcccggctgcacggacgtcgaggagcagctcgcaagtgtttcttggtgcgtcgatcggcaagatgatcaccggcacggacttctaccacgtcatgacggccatggtgccgttgtacgttgccatgatcctggcgtacggatccgtcaggtggtggcgcatcttcacgccggaccagtgctcggggatcaaccgcttcgtggcgctcttcgccgtgccgctgctgtccttccacttcatctccaccaacaacccctacaccatgaacatccggttcatcgccgccgacacgctgcagaagctgatcgtcctggcgctgctcactgcatggagctacctctcccgccggggctgcctcgagtggaccatcacgctcttctccctgtcgacgctgcccaacacgctggtgatgggcatcccgctgctcaagggcatgtacggcgacttctccggcagcctcatggtgcagatcgtggtgctccagtgcatcatctggtacacgctgatgctgttcatgttcgagtaccgcggcgccaggatcctcatcaccgagcagttccccgacacggcgggcgccatcgcctccatcgtggtggaccccgacgtggtgtcgctggacgggcgcaacgacgccatcgagacggaggccgaggtgaaggaggacggcaagatacacgtcaccgtgcggcgctccaacgcgtcgcgctcggacatctactcccggcggtccatggggttctccagcaccacgccgcggcccagcaacctgaccaacgccgagatctactcgctgcagtcgtcgaggaaccccacgccgcggggctccagcttcaaccacaccgacttctactccatggtcggccgcagctccaacttcgccgccggggacgcgttcggcctgcgcacgggcgccacgcccaggccgtccaactacgaggaggacccgcagggcaaggcgaacaagtacggccagtacccggcgcccaacccggccatggcggcgcagcccgccaagggcctcaagaaggcggccaatgggcaggccaagggcgaggacggcaaggacctacacatgttcgtgtggagctccagcgcgtcgcccgtgtccgacgtgttcggcaatggcgccgccgagtacaacgacgcggccgccgtcaaggaggtccgcatggccgtcgcctccccgcgcaaagttgcggcggacgggaggaaggagcggggcgaggacttcgcggagcgggacgacttcagcttcgggaacaggggcgcggcggagagggacgcggaagccggcgacgagaaggcggcggcggcggctgcggctgcgcaggggaatgcaggcgccgtggcggcgcccgcggcgatgccaccgacgagcgtgatgacgcggctgatcctcatcatggtgtggcgcaaactcatccgtaaccccaacacctactccagcctcatcggcctcatctggtcgctcgtctgcttcaggtggaacttcgagatgccggcgatcatcctcaagtccatctcgatcctctccgacgccgggctcggcatggccatgttcagcctcgggctgttcatggcgctgcagccacggataatcgcgtgcgggaacaaggtggccacgttcgccatggccgtgcggttcctgaccggcccggccgtcatggccgccgcctcctttgccgtcggcctccgcggcacgctcctccacgtcgccatcgtccaggccgcgctgccgcagggcattgtccccttcgtgttcgccaaggagtacggcgtgcaccctgacatcctcagcacggcagtcatcttcggcatgctcatcgcgctgcccatcacgctggtgtactacatcctgatggggctgtgaaaaagccagacaagctgctcgttcccgcaggccaacagcgatgccggatggggatgtggagcaggaggagacagactaggggggacaagacaactgcgcaggggcaggggcgggggcggggggcggcaggttaattcgtaggagtatgcttttaggtgtagacatcatggaacgcgattagagagcaaacaaaaaatgtttttaggacaaacccaacgtcatatgcaaaaatccttgggggtgacagtttgcgttgcaaagcatccggtcatgagttttgatttgggtgtgttagggacttttcatgcgcatggctttccatgccctatataaaatggatgcgtgtcacttcgatggaatgctagggctcttctttcttgttcatctagggtatatatacttcttggactggcaccacgcatgtccctgcttcagtacttgcttaacagtatctgacatcaaagcgggcgagtggggtgatttggtcgttaatccttcagcatcaaacccttgctgtgcaaccgtactagttcgattttagaataaagccagcggatgtggtcaaaaatagagtgaaataaaaatacacacatcgtattttc

SEQ ID NO: 151746 - DNA, 99 bp, Zea Mays
ttagtgcagatagaagaagtattattatactgttgtgtgatttttaaatctagaattcaaaacaaggatttaaattgagctagtatacttgaattggat

SEQ ID NO: 151747 - DNA, 182 bp, Zea Mays
ccgcctgccatggagctcgccgagccctcccgagccgaggcccctgctcccagcgtcgcgatccccagctcctctgctcactcggctgctcgcgccgtcgccttgctgctcgcccgtctgcgcggcacttcgtctatggccgctgtccgccgtcgagttcctgtacacgcgcctctggttcg

SEQ ID NO: 151748 - DNA, 139 bp, Zea Mays
cgttcgaaattacacaagcaagttcttcaggtatctcgagcttgcctgtatatgggttgtttacctatttacagggagttagggacaccccatcgtacaactttgtgtgaagttacaaccatgacctcaaaccctatac

SEQ ID NO: 151749 - DNA, 1168 bp, Zea Mays
tggaagagaacatctaacaatacacaacttttccacatttgtttcataagcctaagaataaacggtgaaattagagatcactgacattgcagttaagggcaacaattcagcaaacagggttgccaaaaaaaaacgagagtaaagacaccaaccatatagagatactacttttacatggcaaaattgttcggtagggggcatttgtgccaagccttcataagccttgcatctgcatatgcattccccggagcccagcttggttcacagaatcacacacatccatacggatgcaggcatcaagcaagcagccagagagagggggaagcacagggagatggacaaacaacgacgacgatggccgagaaggtagtagtagtacagcagcagcagcagcagcagcatcagcaccagagaaggcagtagtagtaccagcagcggcagcagtggccaagcgggcttcaacgggataaatgcattcagatctccattcttaatgcaaacactataatcatcaggctggtatatcaaaatgactaccccataacaaaaccgaaccattgaactatttgcctccaaaatgaacagaaactcaaaaaaaaattcaaggtactatgcattggcgtttttgcaagtggagtggactcatgctttcacaaataatcttcttttagcacaaaatgcaattgtacatcagggatacttgtcaaagcgctctcagccaggatggtcgaagtaaataagaatggtctgatatttggaatatgataggcaacactggacaagccaagcttcaaaagagcagaaagccaaacatgatcaaagaacagaaagccaaacatgatcacaagagaagagacaacttgcaagaaaataagtcgaatctgatattggaaacagagattccccaagacagtgatcatgcagttacttccctgatactgggaacactgaagatgtccttgtcctgtttcttgctattactgttttcatgcagtcaattgttgtgatggcaactcatgcagactcaaaacataactcttccaaactgcaccaaaagcgaaaaaaatatataataaaaaagaaagaaagcaagaggcacatgttacaagaaaataaatagggttttcaaaacaatattacaagattgctgtagattccccaagtcatc

SEQ ID NO: 151750 - DNA, 3954 bp, Zea Mays
cgagtcactgggtggcacataaatcagatccaaatttcgacaagtcacaaaatttcgagagctggcgacatagatgataacatttggcaataataaaatcattcacagctccatttgatttattagcacaaacttaaaccacaaaaactgaggtcaaatcacattgcatttaggacaatacaacaaaacacagtgaaagacaagcttctaggcagagatcactcaaaataaatggaaatattttatcaggggcattctcctactgccaagccttcataagccttatgtccacataaggattccccagagctcacttagccagcttggttgtggccaacgagacaagacagacagacagacagatgagccccaagaaagcagtagtactggtactagcagtagcagcaggccatcaaccagagcggccaagcagacttcaatgggagaaatacactcggatttccattcttgatgcaaaaaacatcataatcatcaggctggtataccagaattcatgcccccataacaaaaccaaaagactactagtactagcctcaagaaatcagaacttttttcaaggacttctgcatttctggaaacgtaataatgaaagacttttttttctgaaagcacaatgcaacataattatatttgtcattgaagtatatgatctatcacagcagccaagcaacaaacaagtttagttagatcttagatctccatttttagcacaaaggtaatcattgggctggcataccagaacactgatcaccaccatgacaacactgaaactcgaaaaatgtaagctgcaaccacaagcattcacccatcttaaatgaatcgtcatcgaaaagaacttatcttatttgcgatgcagatcacctgacagctggtcagattgcatgacaaaaattgataagaccaaaacaattccacagtttgcgttaatcaaaaataaaaatcagaagaaggtcacttgcaatgatgttaggaaaatctgcttgccaaaaacaaaagagtaaaacatcaagctcagaggtaacccgtcacaaataaaaattgttgcaaagatatgcagatctcctgcatattcgaggaaaacaaaacaaaattgttcgatcagggggtttcttatatctggcaaaccttcataatcattgcatctacatatacactttccagtgtttgtgtgtgtgtgtttgttgatggaatcacaaacacacagacaaacatccagaggggagggggagagggagaggggggagagagttagggagagagatgatgatgatgatggaaaaggcgcagcagcagcagcagcaacagcagcagagcatcaaccagatccagagtggccaggcacatccattaacaggaaaagtgcattcagatcatcacacttgatgcaaattaccattaatcatcaggcttgaatatcaaaatgaccccataacaaaacaaaaacactggactactagcttcaagaataaaaccaaataaatcaaaactttttcaaggcactataaatggcagttatgcacaaataatcttcctcaagcaccctatatgtctgtcaaagacttatcctttttattttttatctacgcacatcctagtcggagcccagtcagccagcttggtggaagaaaatcagagtggaatatgcaaggatagatcgatggactgaacttggaataggaggaagtacatgatccaacacagcatcaacgaatatgtgtattccaatctccactgttagtgcagaggcatcaggatggcaaaccagaacaccccatgacaaacactgaaactagaatacatgtaggctgcaaaccgcatgcttttgcattatgccaatttatagaacacccatgactataatacatctaggttgcaaactgcatgcttttgcattatgccaatttctagaagttgcttaaaccaatccatggtttaacaagcatctacacatctactaacccttgcagcttaatactcataaggaaaaaggaaataaacaaaaaaaaactcagaatactgaagaatactcaaataacaccaaaaaccaaacatgatcacagggaaaaaagacagcatgcaagaaaataagcaaaaggacctgatattagcatcagagattcctctagaccgggatcatcatgctattgcatccctgattcagggaacactgaagatcttctcgtcatctatcaatgtttctatgcagtgaaatggtgagacattaaatattttaactcccggatgcatggcagacataaatcctccaacacctaaagcgcaataagaacaccaggagacaacattaaggaataacagataccaaactgatactaaaattgggaaactttcaatgtttttgtcaagctattaaaaacaatgcagttgtacttgtttttcttttctccatctgccaaccttttgttaataggcgaaaatgtgtcaaacatgtatttgagaacaaggttttcaagtcgataagtcgagtcgacaaggtaccaacttggtgactagtcgataagtcagtcgactagtcgtcgacttgccaatatagtggttgttttgtctatataatggcttcatatagacaatataacatttatatataaagaaagagcatgttttatctcatttgaagcctgaaattgaacgaaactgaaataaacagcaagtcttacctcatttgaatcctcaaactgaaccaaatcagccacataagtgataagtcataaactcataagtcataacagccatatagttcaaattggaaaacaaatagcaagaaaatatagttcaaacttgaaaggaaataagctccattagatagctaagctgctgctgcagctagatagatactagatagtagataccctaaatatctcccaattcaagatcatccattgcattttctcccaaatcaagaaaatatgttgtgtaatgggtctttgggctgtttgggttgaactcgggcacaagtcggccgacttgccagaccaaagtcgacgactagtcgactatgaatttccaatcgttgacaagtcgcccgacttgccagaaaagtcgagccggctccccaagtcgagctcccaggaccgactggacgactagtcgacgacttgaaaacagggtttgagaacctgagttagtttttgtgaacagaggaagtagaacatgatccagcataccaaccaagcaggtgtccatggcaatgacatttagagtgtgtttacttcgaggcctcccagatgagagcttcccaccaagcagcaatctttgccccaggcacccgaaatcggacacctgggagcagccatcgcgccaggcagctctgcctgggtgcaaagcaaagagcccaagcatgtttcgattctcttcaggcaagattgcctgcaaacagagctttgaacgcctatggacaagatgattgcctcgcaagactgctgcttgggaggtaccgatccaaacaactctgctcttcaatgcaggttaacagattatggtaaacacacattacacaaacttatattctatctataaaaggaaagaccacatatcattttattcaaagaaactagcatggttaaacatgaatcaacctcattcactcaataagctataaacaaaaactggcattaccaactcaatatcacagattcccctagacagagtcatcatgctattgtgcccccaggaacaagtagcactacagatgtcattatattgcttctcatcatctgtcaaatgacaatgttgtcccccataagttgcaagttcgcaactcagatatctgctgcagtaagatgttgggatagcaaccacatcaaaagcaacactgtctgcattgcagtacttcaaaactaaaatagcttttgcaaagttaaaaacaaattcagaaagggcattcttccaacctgccgccttcataacttttgcatc

SEQ ID NO: 151751 - DNA, 479 bp, Zea Mays
ggagagggagaggggggagagagttagggagagagatgatgatgatgatggaaaaggcgcagcagcagcagcagcaacagcagcagagcatcaaccagatccagagtggccaggcacatccattaacaggaaaagtgcattcagatcatcacacttgatgcaaattaccattaatcatcaggcttgaatatcaaaatgaccccataacaaaacaaaaacactggactactagcttcaagaataaaaccaaataaatcaaaactttttcaaggcactataaatggcagttatgcacaaataatcttcctcaagcaccctatatgtctgtcaaagacttatcctttttattttttatctacgcacatcctagtcggagcccagtcagccagcttggtggaagaaaatcagagtggaatatgcaaggatagatcgatggactgaacttggaataggaggaagtacatgatccaacacagcat

SEQ ID NO: 151752 - DNA, 355 bp, Zea Mays
cgctccccacctcagcaggtcgggaagagcttccctgtccgctctcacgaagcctcctcctccccgtctccctcgcaaagccaccgcctcctcgtctccctctcgaagccgtcgccgcccactgcctcgcactctcttggactggatctgtcgtcgtccggtgattttgctgaacacgagcacttcctgcttcctggcaccgcgcgctcggcaacagatctccctcctcttcgctggagcctgggcccgaggatcctgcaagccggcagctggagaaaggcgagcgacatggcgacctccacaatgcggctggtgaaggacgagaaaggtgagcaccttagccttgtcacagata

SEQ ID NO: 151753 - DNA, 191 bp, Zea Mays
cagaaactgtgttgagtactctattatctcctcatgaatattgtgtgataacaagaacacatgttggtggtttactctattatctcatgattatagacacacatgatcatttgtttgttgaagcttgctgctacttttttatcaaattgatggaactttatgtttataaagatgtggacagtgtattttct

SEQ ID NO: 151754 - DNA, 1061 bp, Zea Mays
aaaccaacagctttgcatttccagtctctgggaacgtcgcgaaaacagttccacgctctccggacaagaacgcgcccatggatcgcagcaacgccggtgcggtgtccgtcgaggtgcgcggcggcggcggcggctcgccgccgggcgcgggaaggaagcgccgcgcggtggcgaggggcgtgcagaagacgctctccaagacgtccatgctggccaacttcctccccacgggcacgctgctaaccttcgagatgctactcccggccgccgcaggcgacggcacctgctcggcggtcagcgccgcgatgctcagggccctgctcgcgctctgcgccgcctcctgcttcctcttccacttcaccgacagcttccgcgccccggacgggaaggtgtactacggcttcgtcacgccgcggggcctgtcgctgttcaggaccgggctcggcgtcgaggtgcccagggaggaaaggtaccggctcgccttcgtcgacgtcgtgcacgctgtcatgtccgtgctggtctttgcggccgtcacgctcgccgactaccgggtctccgggtgcctcgtcgccggccaccgcaaggagatggacgaggtgatggagagcttcccgctcatggtgggcgccgtgtgcagcggcctcttcctcttgttccccaacacccgctacggcatcggttgtttggctccgtaaaaaacagcagactggaacagagagtacggcagtgtaactttcttccgtacctgtgaatctggcttgatcattttatgcttcatgttttcttagcaactgtaaaaacttggatgtgatgtgatcctatctttaatcagtaccgatttgaaatttcttgagaatggattatacaagagaatgaatggtcaccaaaaatagctttacatcagatgcaaaatgcattcctttcaaaagaatggtagactggctcaatctatcctaacgtaagctgccgcccatgtatcctacattctggcaagatactagtattttacaagccacacagtaagcaaagcagcactctcctacctacccaaaaaaaaaaga

SEQ ID NO: 151755 - DNA, 1507 bp, Zea Mays
acgatccatccgtctcgcccgcgcgctccgcagccacaagcgcaaaggcagagcacacagttctgtgtgcttggcagtgcccaccacccgacgacgtccccgtcgtccaccgggccaggacgcggacggctcgcggtctcgcccggccggcccggcccttccgatccctcgcgccacgcccatctataaatacatagctgcgcgctgcggagctgagagcaggcaaacaccgagcgcagctagcatcatcgtcctgagctgcttgcatctcccagcggccaatcgagctgatagcctatccatcatatggctgcctctaccacgtcgaggacgaactcgcgggtgaactactcgaacgagatccacgacctttccaccgtgcagggcggctccgcggccgccgccgccgccgccttgttctacccggacagcaaatccatcgccgacatcttcccgccgcaccttgggaagaaggtgatctcggaggtggtggcgacgttcctgctggtgttcgtgacctgcggggcggcgtccatctacggcgaggacaacgcgcgcatctcgcagctggggcagtcggtggcgggcggcctcatcgtcaccgtcatgatctacgccaccggccacatctccggcgcgcacatgaaccccgccgtcacgctctccttcgcgtgcttccgccatttcccctggatccaggtgcccttctactgggcggcgcagttcacgggggccatgtgcgcggcgttcgtgctgaaggcggtgctccagcccatcgccgtgatcggcaccaccacgccgtcggggccgcactggcacgcgctcgccatcgagatcgtcgtcaccttcaacatgatgttcgtcacctgcgccgtcgccaccgactccagggcggtgggtgagttggccgggttagcagtcggttccgcggtttgcattacgtccatcttcgctgggcccgtgtccggcggatcgatgaacccggcgaggacgctggcgcccgccgtggccagcaacgtcttcacgggcctctggatctacttcctcggccccgtcgtcggcacgctctccggagcctgggtctacacctacatccgcttcgaggaggcccccgcagccgccaagcccgacacccagaggctctcctccttcaagctccgacgcatgcagagccagtccgccctcgccgccgacgagttcgacaccgtctgacgcccgcccgcccgcccgcccgaagagatcgagtactactgtgtgtgctccctcgctctgttcaagatctcaggtgggagagagctatagctagctgcgcgcgcgcgtgtgtgctggtaggtacatagtccgtgtacgcgtacctacctacgtgtttgtgttttttgtgtcccgtcggccgtcgcctacaccacgtagcagcggatcggagcagtgtcacatgtttttatgtatcttcggctttgtgccacgtcagagttgcaaaggttaattgatgcagccgattatgcttgcc

SEQ ID NO: 151756 - DNA, 1506 bp, Zea Mays
atggccggcggccgcgcattccggccgtccgccccgcgccgcgcggcgttcgcggctctgctcacgctcctcctcctcgcgggactctctttcctcctctcttccacgcccacctcgtcggcccgttcctcgtccccgccgtccgcgcgcctcgccgccgtccgccgccacgcggccgaccacgcggccgtccttgccgcgtacgccgcgcacgcacggaagctcaaggaggactccgcagcgcagtcgctctcgttctcgtccctctcctccgacctctccgcgctctccgcccgccttgcctcccacctctcctcctcactccccgaggacgcgctcaggcccctcgaaaaggaggcccgcgagcgcatcaagttcgcgcgcggcctcgccgctgacgccaaggagggcttcgacactcagtccaagatccacaagctctccgacaccgtcttcgccgtcggcgagcagctctctcgcgcgcgccgcgcggggcgcatgtcctcccgcatcgctgcggactccacccccaagtcgctccactgcctcgccatgcgcctcctcgaggcccgcctcgccaaccccaccgcattcgcagacgatcccgacccgtcccccgagttcgatgaccccgcgttgtaccattacgccatcttttccgacaacgtgctcgccatctccgtcgtggtggcctcggctgcacgcgccgcggccgacccctcgcgccacgtcttccatgtggtcaccgcgcccatgtacctgcctgcattccgggtctggttcgcgcggcgcccgccgccgcttggcgtgcacgtccagctccttgctcactccgactttccgttcctcaatgccaccaactcgcccgtggtcaggcagatcgacgccggcaacagggacgtcgagttgctggattacctgaggttctacctcccagatatgttcccgtcgctgcggagggtagtgcttttggaggacgatgtggtggtacagaaggatttggcagcgctttggcaggtcgacttggacgggaaggtgaatggcgccgtggagacgtgcttcggggggtttcggaggtacaggaagtatctcaactttacgcagcccattgtgcgggatcgattcaagcccaatgcctgtgcatgggcatatggcgtaaatgtgttcgaccttgagacatggcggcgggatggttgcacagaattgttccatcagtatatggaaatgaatgaggatggcgagctgtgggatcctacatccattctaacagctgggctgatgtccttttacggcaataccaagccactggataagtcatggcatgtaatgggtcttggctataatccaagcatcagccctgaggcaatccgtagtgctgcagtggtacactttgatgggaacatgaagccctggcttgatgtcgctatgaaccaatacaaggccctgtggacaaagtatgtggacaccgaaatggagttcctaacacgctgtaactttggcctttga

SEQ ID NO: 151757 - DNA, 1572 bp, Zea Mays
ccgctcggctctctagtgcccagccgagctccccatggcgtgccctccctgcatccatggccactgtgcagctccctgctcctccctcctccagccgcgcgcaaccggcttctcctccacgtgcccctgctaccatggctggcgcgctctctctctctctctccagcgccgcgcccctccccctcccctctgctcgctcgcgcccggccggagctccctagctcaccgacgtttctccctgtgcgccgtggcttccctttcaccgagctccctcagccatggcgcgcccctctccctgagttccttccccagccgcgcgctctggagcacccctgcgcgcgcgtcctctcatggcgtccagtcgctcgctccacagctcagatcttgcccatggcggctccccctgctcggcaccgcctcgagctcgctatgccgtgcgccctgctctctgttgctgctcgtcggtgctctgccatggagctcgcccgcgacgctcggcgttctgtctgttcgtgcttgcccctgcgtcaaccccatcatcacgccggtatcctgctcgtgagtttctcctgcgcactatggtgctggccagtcttctcttccagctcgctcccttcgctagccgtcctagctccaatccatggcgctcggcacctacactccatggtcctgggcgacaacacagagtgtgtggtcgccgacccgacagccgccattccctgctcggtcatggcaactggccaccgcgcccctgcttccggctccctgtcctcccatggagcccagcgccgcctcgaacctgccatgtccgttgcaggtcgttgatctcctatttgccctggacagcgcctcgacgccccatcacagcagcccgtcgtggaactctagtgtttgtcgttgatttccggtcatctccgacctttgtctcgccatcgtcgttcggtcgcctcgcctcgatgctagctcctacatgacgtctccgatttgtgttcactccaaaatccgagaagattaggcgtagaaggaaacaaattagtacgcagccggagaattctcgatgtggaagaagaagtgtgattcgatgcgacactcaccatatattcggggaaatgctagagctgaaaggcgtcatcaatttcatggtttcaagtcagaattaattatggtaagctaattcgccacttccaataattggtttaatggatggattgatagatatgtatgtcgcgacgattaccccgcttgtagcataggcacgcgtttattagacgcttgttggaatacgggagctacatgtagcgtgatgattgtgttcacgattgtgaagtcgtcgtgtcgtgtagctaagtttaggttcaaaaacataggttatgagagaagaattaaatcggtgtttcgtatctgatgagtggtcgaattaacgttatggaaagtaggtcttgtgtttgtgtttctagtgtctagtcaaagtatagcatatggcgggtttcgtttaattgtatggagtcagtgccctgttgtgatatccatgatgctttatgcttgttgattgatgaaatatcatagatggat

SEQ ID NO: 151758 - DNA, 879 bp, Zea Mays
atgggttcgatagagtctcagcggtcggtcaccactcacctaatcgttgtcaacttgtcattcactcattcgtcagggcaggactctactccacaccaacccgagaacgagaacattgccgctcctgcccgtctccacagctcactgcgcgtgtgcgccactacaccaacagtttggtccgccgttcggggattccttctgcactactacatagtagcacccgtgtggccgtgtccgagctacccaccacgccccaacgccaagaacgtcgacgaccgtgacggcatggcggcggcggacccggacaccgaagtgcaggcggagttccctcccctcgtccgccagtacaaaagcggccgcgtcgagcggttcttcaacctggccccgctcccggccggcaccgacccggccacgggcgtcgtgtccaaggacgtcgtcgtcgacccggccaccggcctctgggcgcgcctcttcctcccggccggcagccacaggaagaagctccccgtcgtcgtctactaccatggcgacgcctacgtgatcggctcggcggtcgacccgatgacgcacggctacctcaacgcgctcgtcgccaaggccggcgtcctcgcggtcgcgctcgagtatcgcctcgcaccggagcacccgctcccggccgcctacgaggacataggcgagggtacggcgggggctgaccgagattggcggtcgtggccagcgcgggatccgcggcgggggcgagatccggggcgggggcggcgggggacggtgcctgtgcggtcgtgggggaggggcacggcgggggctggcgggctgcttccttgcgcgcgcgtgggagggtgcgggggcaggcgggggcaaccagggtgtggacgctga

SEQ ID NO: 151759 - DNA, 1275 bp, Zea Mays
ggctcgccgtctcagttctcatgtccgggtgaagaaaagaaaaatcctcctgttcctgactatcgctacccctccacatccaggttaagtttaagattgataaagattgccgtcctctccctgagagtagtctcaagcaagccatcaaggaaaattacagtgcaaagagcaaatttgacccagaactcaccacaaaacaggtccaaaggttacttttgctgtttaagcctcttagtgcacctcaatctgttccaaataatcactttgaagaaaggcgtcactatgaagaacaaaggaagccgtattatcattttgaagaaaggcttcctctgttgcctattgaagaagtgcgtcagccacggtttgatgatgaaaggcgccctgcagttagacatgttcctcttgaggatccatatagggcacaagcaccacgctttgctccagttcctgttgagtctcagcttggccattcgttggctagtgctcagggtgatcatggcagatattatcaaccaccagcacttgcgcctgagcctcgacacattcctcttgttctagagcctcgctatgttccgccagcccatgtgcctactgtgccagagcttcaacatgtcccagctgcatattatcgcacttcggctccatctggtgattcatactatcggcctgttgataatctggtgcctgaggggtatgcagacagaattgtggcaaacataaccgctagagatccaatcattagtgatcacacagcactgccagtggaagcctctgctcgaccagaccgcttggatgatctctaccggattcgtggtgctcatgtggaggagctgtaccgtccacgggaaattgctgatcgtgcggggatcactgctagagcagatcgtgtggaggaactctaccgttatgatcgacttgctaaccgtgctgtggacccccctcattcagcctaccttacaactgcttacgagaataaccctgcttatgctgaaacaagcgttaggcctatctcagcaagggttggtggctccggtgcgccagtttcgtcactctattcgttttctggtggtccagtatatcggtgatgagtgatcatggctagctctgttgaaaagccttagccagactaagaagacatgatgttcgtctctataactgcaactgccgttttaccttggcttcgactctgtattttcttaaatatccttcactggatgaatggtactcttcgttatcaagaagacctgctggtctatgctgttgaattatgtattt

SEQ ID NO: 151760 - DNA, 2226 bp, Zea Mays
ggctcgccgtctcagttctcatgtccgggtgaagaaaagaaaaatcctcctgttcctgactatcgctacccctccacatccagtggccatggtgaagaagcccaacgacgttgccaaggccgcggcgacctccgccgacgcggcagccaggccatccaaggcgaatccgtccacccctcagtcggtcaagacctcgaagtttaagaagcggaaggtcaaggccaaccgccagaagccagcggtcgctgctgcagctgttgacgatgtcgccccggtaggcgcaggcactggggatggcgatgcatctgcatccgcggttttaccgcagccatccaatgttgctgaggcatcgcctgtggtgcaaacgccaaagtcgaccacttttgttgaggcgtcacctgtggtacagacgcagaagacagccactgatgctgaagtaccggtgcattcaccaatgccagccactgctgaagcatcagctttgtcgccaaagccaaagccaaaaccagctcatgctaatgctgatgctgcagctgcaatttctgtcagcaagggcaagggcgtgggtgctgataatagcgggggtgatggcagaatgaagagcagaaaagagagggctaggagtggcaaggggaaggaggttttgggggatggaggaagtaagggaaaggggaaggggaaggggaagaaggctgtaggcaagaaggaagaaaggggtgaccataaggttgcagggtttatatttatgtgcaatgcaaagactaagaaggagtgctaccagaatcgcttgtttgggatgcctggtgggaagattggaatggtcaagaagataaggccaggggtgaagctgttcctgtatgattttgacctcaagcttttgtatggtgtgtacaaggcagcatcacatggggggctaaaccttgtccaaggagcatttagtgggaagttccctgcacaggttaagtttaagattgataaagattgccgtcctctccctgagagtagtctcaagcaagccatcaaggaaaattacagtgcaaagagcaaatttgacccagaactcaccacaaaacaggtccaaaggttacttttgctgtttaagcctcttagtgcacctcaatctgttccaaataatcactttgaagaaaggcgtcactatgaagaacaaaggaagccgtattatcattttgaagaaaggcttcctctgttgcctattgaagaagtgcgtcagccacggtttgatgatgaaaggcgccctgcagttagacatgttcctcttgaggatccatatagggcacaagcaccacgctttgctccagttcctgttgagtctcagcttggccattcgttggctagtgctcagggtgatcatggcagatattatcaaccaccagcacttgcgcctgagcctcgacacattcctcttgttctagagcctcgctatgttccgccagcccatgtgcctactgtgccagagcttcaacatgtcccagctgcatattatcgcacttcggctccatctggtgattcatactatcggcctgttgataatctggtgcctgaggggtatgcagacagaattgtggcaaacataaccgctagagatccaatcattagtgatcacacagcactgccagtggaagcctctgctcgaccagaccgcttggatgatctctaccggattcgtggtgctcatgtggaggagctgtaccgtccacgggaaattgctgatcgtgcggggatcactgctagagcagatcgtgtggaggaactctaccgttatgatcgacttgctaaccgtgctgtggacccccctcattcagcctaccttacaactgcttacgagaataaccctgcttatgctgaaacaagcgttaggcctatctcagcaagggttggtggctccggtgcgccagtttcgtcactctattcgttttctggtggtccagtatatcggtgatgagtgatcatggctagctctgttgaaaagccttagccagactaagaagacatgatgttcgtctctataactgcaactgccgttttaccttggcttcgactctgtattttcttaaatatccttcactggatgaatggtactcttcgttatcaagaagacctgctggtctatgctgttgaattatgtatttatgctgctgcatctctcttgctatgcttgaagctcgtttcattttgtgaatggaggtttacatattgccatgcttc

SEQ ID NO: 151761 - DNA, 2417 bp, Zea Mays
ctcggtcgctccgcgttgttagagacgaccatacgttaggttttcccggaatactatttcgaatcggttagaatcgtataatttcccccaaaaagtccctagttaggctattgatcaccctaaatatcttcgttgatccgattaaatcgtataaccctccccggaaatattcgtttattgatccacccgtccgcaataactgtcgattgctgtggatctagttctgcttttgtggtaatacttctcctttacttcccgaatctgcaccgagcagtggccatggtgaagaagcccaacgacgttgccaaggccgcggcgacctccgccgacgcggcagccaggccatccaaggcgaatccgtccacccctcagtcggtcaagacctcgaagtttaagaagcggaaggtcaaggccaaccgccagaagccagcggtcgctgctgcagctgttgacgatgtcgccccggtaggcgcaggcactggggatggcgatgcatctgcatccgcggttttaccgcagccatccaatgttgctgaggcatcgcctgtggtgcaaacgccaaagtcgaccacttttgttgaggcgtcacctgtggtacagacgcagaagacagccactgatgctgaagtaccggtgcattcaccaatgccagccactgctgaagcatcagctttgtcgccaaagccaaagccaaaaccagctcatgctaatgctgatgctgcagctgcaatttctgtcagcaagggcaagggcgtgggtgctgataatagcgggggtgatggcagaatgaagagcagaaaagagagggctaggagtggcaaggggaaggaggttttgggggatggaggaagtaagggaaaggggaaggggaaggggaagaaggctgtaggcaagaaggaagaaaggggtgaccataaggttgcagggtttatatttatgtgcaatgcaaagactaagaaggagtgctaccagaatcgcttgtttgggatgcctggtgggaagattggaatggtcaagaagataaggccaggggtgaagctgttcctgtatgattttgacctcaagcttttgtatggtgtgtacaaggcagcatcacatggggggctaaaccttgtccaaggagcatttagtgggaagttccctgcacaggttaagtttaagattgataaagattgccgtcctctccctgagagtagtctcaagcaagccatcaaggaaaattacagtgcaaagagcaaatttgacccagaactcaccacaaaacaggtccaaaggttacttttgctgtttaagcctcttagtgcacctcaatctgttccaaataatcactttgaagaaaggcgtcactatgaagaacaaaggaagccgtattatcattttgaagaaaggcttcctctgttgcctattgaagaagtgcgtcagccacggtttgatgatgaaaggcgccctgcagttagacatgttcctcttgaggatccatatagggcacaagcaccacgctttgctccagttcctgttgagtctcagcttggccattcgttggctagtgctcagggtgatcatggcagatattatcaaccaccagcacttgcgcctgagcctcgacacattcctcttgttctagagcctcgctatgttccgccagcccatgtgcctactgtgccagagcttcaacatgtcccagctgcatattatcgcacttcggctccatctggtgattcatactatcggcctgttgataatctggtgcctgaggggtatgcagacagaattgtggcaaacataaccgctagagatccaatcattagtgatcacacagcactgccagtggaagcctctgctcgaccagaccgcttggatgatctctaccggattcgtggtgctcatgtggaggagctgtaccgtccacgggaaattgctgatcgtgcggggatcactgctagagcagatcgtgtggaggaactctaccgttatgatcgacttgctaaccgtgctgtggacccccctcattcagcctaccttacaactgcttacgagaataaccctgcttatgctgaaacaagcgttaggcctatctcagcaagggttggtggctccggtgcgccagtttcgtcactctattcgttttctggtggtccagtatatcggtgatgagtgatcatggctagctctgttgaaaagccttagccagactaagaagacatgatgttcgtctctataactgcaactgccgttttaccttggcttcgactctgtattttcttaaatatccttcactggatgaatggtactcttcgttatcaagaagacctgctggtctatgctgttgaattatgtatttatgctgctgcatctctcttgctatgcttgaagctcgtttcattttgtgaatggaggtttacatattgccatgcttc

SEQ ID NO: 151762 - DNA, 1526 bp, Zea Mays
aatgaagtaaacatatagtttttagataatattgaccgccttttaaaagtatgacatcttggtgaaaccagcagccaagcacgagtgcggctccggtccgccgaaaagacgcttccgaaatagtcaaaacaggcaaacagcaacgcgcagaggcgtgcggtgtgcgcgactagccttcagccttctccagttctctcctcctcgtcccccccccccccctcacgcctggacggaactgaagccagccagcctgcccagccaaggtgaccggagacaagtaaaaatctcgccggtcttctcacagaccacaaacattgcgcttgctgcccagctataagtactcgccggactaggcggccaactcatcccatcccatttcatccatctcggagcagaggcaacgcaatccggcaaaaaggcgcttctttcttgccctgttcgggacaggacacagacacagagccaggagaaggaaccgccggaggctaagcttcttcgtcgtctttcctgggcgcgctcaagtggcgatggcatttgcggtctccgacgagctgctgggcaccttcgtgccgattgcggtgtactggctctactcggggctctacgtcgtcctggacgggctcgggatggacgactacaggctccatcccaagggggaggaggaggccaagaacatcgtttccaggtcgacggtcgtcaggggcgtccttgttcagcaggcgtttcaaatcgctgtctcccttcttctcttcacggttcttggtgatgagaatggggctgtgaggaagcaacctccggctctggtattggcgttgcaatttatcgttgcaatgtttgtcatggacacatggcagtatttcatgcacagatacatgcacatcaacaagttcttgtacaagcacgtccactctaagcaccacactcttgtcgtcccctacgcttttggagctctgtacaaccaccccctggagggactcatcctggacaccatcggtggcgcgctctcgttcctcatctctggcatgaccccaaggactggcatattcttcttctcgttcgcgaccatcaagaccgtcgacgaccactgtggtctgtggcttcctgggaacatcctccatgtattcttcagcaacaacagcgcttaccatgacatccaccatcagctctacggcaacaagtacaacttctctcagcccttctttgtcatgtgggacaagatccttggaacatacatgccttacactctggagacccgcaagggaggtggtctcgaggcgcgcccggttaagctcaaccaagcacagcagaccaaggctgattgagcagtgtggtttctcctgtttatctactacttcccctgattttttccccttctgactgcatttgtactgtagaagtatttcctgtccatatagtaaaatcatttaggcaaatgccatgttgtacccaacagatatagcaaataaaacatcttgttaatggagatccattgatgtttgtttcctctgggttgcatctgtgtgtga

SEQ ID NO: 151763 - DNA, 819 bp, Zea Mays
atgagcgcgccgccgcacgtttcttacaccgcgctcccgccaccacctcctgctcccactgccacctccttctcgcagctcccgcctctgcccgacgtcgtcggtggatgccgcgtcaaggctggcgctaaaccacctgggcccggcgcaaatccaccagatccattcgcagctcttattgtccctactcttgtgagagtcgcgaggacgagctttccccctcttgagatccgatgtctaatccatttttcaagttttacaatggatatgaatactagagatcgcattagaaaaaggagggatgatgatgatgacgacctcatgcttttaattctccctactctacatctcttgggctatattattggagatagtgaaaaaaacttgcgacatacatcaatgctaactggagaggaaaaggttagggagctacttgaaggccacatcaagaattgtaggacatcatttaggatggaaccttacatctttaaagccttggtcaattatcttagaagcgaagggttggttaaagacactagaatcaaggtcgaggagaagcttggtttctttttatatatgattagtcacaatgcgtcatttgagtatctccaagtattctttggtcacagcaatgatacattccatcgtgtgatcaaacatttctttgacatagttatccctgccctcagcatgcggttcctaaaacctccctccaatcaagtacatgcaaaagttcgcgaagataaccgattttacccttactttaaggtgatttcttttaactcttatgtctcaatcttacaaggtactcaaccttaa

SEQ ID NO: 151764 - DNA, 568 bp, Zea Mays
gcatatttcttccgcattgacggtggggcccgacgccggccacaccgccacagagagaaacgttaggacagactgactggttgagaattgagaaccaaaagaagagagaggaagacaggaagagagagagagagcgcgcgcttccaggtttttagctgcaggggaggccgatagttctgttctactggaggaggagcagagagcaagatggggtccggatctttcctcaaggtgctggccaagaacttcgatgtccttgccgggccactcatatcacttgcttatcctctatatgcttctgttagagcaatagagacaaaaaatcctgtagatgatcagcagtggctcacttactgggtgttgtactcatttgtcactttgtttgagctaacttttgctccaattatcgagtggtaaattacggttctggtcatgtcccaatgtgttcatttttatggtttttgtggcctttgtgattatttgcaaacattattggtggtgcatggatatagctgtgtttggtgcatcaagttggtgaaaaggaaactagatatgctcactttagatc

SEQ ID NO: 151765 - DNA, 1160 bp, Zea Mays
gcatatttcttccgcattgacggtggggcccgacgccggccacaccgccacagagagaaacgttaggacagactgactggttgagaattgagaaccaaaagaagagagaggaagacaggaagagagagagagagcgcgcgcttccaggtttttagctgcaggggaggccgatagttctgttctactggaggaggagcagagagcaagatggggtccggatctttcctcaaggtgctggccaagaacttcgatgtccttgccgggccactcatatcacttgcttatcctctatatgcttctgttagagcaatagagacaaaaaatcctgtagatgatcagcagtggctcacttactgggtgttgtactcatttgtcactttgtttgagctaacttttgctccaattatcgagtggcttccattttggtcatatgcaaaactgttctttaactgctggttggtcttaccttggttcaatggtgctgcttatgtttacgaccattttgtgcggccaatgtttgtgaaccgccgaatagtgaacatatggtatgttccaagaaatgagaagctaggtaaatctgatgatgtgctgtcagctgcagagagatatattgaacaaaatggacctgaagcatttgagaagctcatcagcaaggggataacatcattgttctcctgaaacacaacctctcgcgctagagattggaagtgctgccagatagactgaaggccgcaaggaaaccaatgcctaaagcataactgaaatcttcatctttggcttttgaaacagagatatcttgctgctcacataaacagaacgaaatatgatatttatgaagcaaggaatcttcattcaaccataagtacctccaaaacaaagtgtttttttaccatttctcaccaaaacttccttaaagataagttggcttcatttttagcagatctgcccaaactggagagtcatcatgcattttagttatcatattcaagttcccacggccacttgactaagaggctgatatcaggcatgagcttctgcctttgaggagctttcatcgaggtctattgctcctagatagggagtgccctgcccctggtagtgtttggtcgggtcagagtgatgttgacttttctatctcccaaggggttgctaacctctca

SEQ ID NO: 151766 - DNA, 1170 bp, Zea Mays
gcatatttcttccgcattgacggtggggcccgacgccggccacaccgccacagagagaaacgttaggacagactgactggttgagaattgagaaccaaaagaagagagaggaagacaggaagagagagagagagcgcgcgcttccaggtttttagctgcaggggaggccgatagttctgttctactggaggaggagcagagagcaagatggggtccggatctttcctcaaggtgctggccaagaacttcgatgtccttgccgggccactcatatcacttgcttatcctctatatgcttctgttagagcaatagagacaaaaaatcctgtagatgatcagcagtggctcacttactgggtgttgtactcatttgtcactttgtttgagctaacttttgctccaattatcgagtggcttccattttggtcatatgcaaaactgttctttaactgctggttggtcttaccttggttcaatggtgctgcttatgtttacgaccattttgtgcggccaatgtttgtgaaccgccgaatagtgaacatatggtatgttccaagaaatgagaagctaggtaaatctgatgatgtgctgtcagctgcagagagatatattgaacaaaatggacctgaagcatttgagaagctcatcagcaagtctaccaagtcttcaaaatcaagaagcacaaagcggtcgatcttggaggaggcagaggctgaaagagaatcatggggtgaaaatcccttctacgacaaaaattacagacactaaacctcttcaaaatccacctagcagcttgaagacaacctttgcccacgagcctcatgcaagctttttagttgcatcagactgaagacgaccttcccaaatttctgactctcagtatactataccttgttacattcactgccagtctgtcgctggacaatgatgagttctagagcaattgtggactgtgtttgtaaatggaggcagatgctagcgttgatcatttttcactgtacgtttcttccttctggttggtggtacgtgctctgctgcaatttcaagcgaacagatttcagcacctcgtgtcattttttttagaaatttgttatttctgtcaacggatttcttccaaggtgtatgtcaagtttcttacctcacgattcaggatattagattcacgctgaa

SEQ ID NO: 151767 - DNA, 767 bp, Zea Mays
aatacggagtagtacttaataatgccctaccaattaataaaccagccttagcctgtcgtcggcgtacgtcgtccttgggtatattcagctgctatatgtggtacacacacacacactcggcaatgcgctgagatctggcgatggcgagaggccggccgtcacgccatggccggacggacggacttgggctagcggaggaggctgcggatgatctcggcgccggggctgttgtggtccatgctggccatgaggtccgacaggcggtcgctcagatcgtccacctcccggtgcaggctcttgatgtagctgcaggtctccttgagcagcttcgtcgtcgacgcctgcatatcacatcgtacgcacaccaccgttgttttgtttacatcatcagacgatccacgacgatctcttggcttggagcgagtgagctaccagctgccaatagcactctttatgcatacttgcaataagcggtacggtggcactggcaccgcagtgtatagcactctttaatttatgcatgtgtgtcgtgtcggtgtgatggtgtcagtgtcactactcaatactgtgagatcagagaagtaaaactacctagctagctagctagatcatgcacatcttggtttgaatgcgcatgcgttgtatcgtatattcatacctggctgccgccacggcggcgcgcgctggggagcagcgtctgcagcctcgagataagctcgttgatctcctcctccgagaccgtcgacgcgcgggacctccgggtcgac

SEQ ID NO: 151768 - DNA, 722 bp, Zea Mays
cggcagtccagtggccccatgcagcgcgtgcttggagcccttgcagcccatgcacgtgcaccgtgggccgcggcggcgggtaaggaagggaagggagcaactcgatcaagaacctgacgctgcctgccgttgaactgcggggtggagtaggaggaggaggagggaacggctagaacccggtcgggaggtcaaactagtggaaatcttgggtgggaagcggtccgcgacgagatcacgagaggcagcagagcccgggtcgggagggagggaacgcatacgcaccaccgccctttcgcggacgactggacgaggccggtgcatttaggcggtgcccaggcggcgtactgaaacgtacgcgcaccgtggcgctgtgcctgtgcgcgtggaattctctatccgcggcactgaaaccatgtgcctcgctctcggtactgcacggcgcggcgcattcccactccccactcccaccctgtgtgccgcagcctcagtagcagccgcagccgtgcagttgctgcgggggcggatggtctcttgtcatcacatcagggggagtaatggcgaaacgaaaggtctggaagaatttcgacgcagaaaggttgcggcatcgacaaggacccgttcccggccgcgcgacgcattccccgttcgtgagctgtgtgcacgggacgggagttgcgccgtcgtagtatcgtatcgtatcgtatcgactccaaccttccttc

SEQ ID NO: 151769 - DNA, 651 bp, Zea Mays
ggcggcgggtaaggaagggaagggagcaactcgatcaagaacctgacgctgcctgccgttgaactgcggggtggagtaggaggaggaggagggaacggctagaacccggtcgggaggtcaaactagtggaaatcttgggtgggaagcggtccgcgacgagatcacgagaggcagcagagcccgggtcgggagggagggaacgcatacgcaccaccgccctttcgcggacgactggacgaggccggtgcatttaggcggtgcccaggcggcgtactgaaacgtacgcgcaccgtggcgctgtgcctgtgcgcgtggaattctctatccgcggcactgaaaccatgtgcctcgctctcggtactgcacggcgcggcgcattcccactccccactcccaccctgtgtgccgcagcctcagtagcagccgcagccgtgcagttgctgcgggggcggatggtctcttgtcatcacatcagggggagtaatggcgaaacgaaaggtctggaagaatttcgacgcagaaaggttgcggcatcgacaaggacccgttcccggccgcgcgacgcattccccgttcgtgagctgtgtgcacgggacgggagttgcgccgtcgtagtatcgtatcgtatcgtatcgactccaaccttccttc

SEQ ID NO: 151770 - DNA, 2320 bp, Zea Mays
ctttttttcgagcccatgaaaaacatcattactttattcaactacccaagtagagggggctcttgtagaggcgcccatcccacagtccgacacactccggtaaagatcgcccacccaatgccatcgccgccgccgtccacggcagcggcggcggcgctgcagctggagcccctcctcccgcacttgtccacgctttcccattacaagcagttccacgcgcgcctccatgccttgggcacgctccattcctacccttccctccgcgcgcgcttcctcgaccgcctagcgctcttgccgcacgccgacgcgcttccgcacgcgctactcctcctccgctccctcccgtcccccgcaaccaacgacttcaacgccgccctgcgcggcctagccgcctccccgcaccctgcgcgctctctcctcctccttgccggccgcctcctccctgctcccgccccgccacggcctcgcctcgatgcgctctccctctccttcgcgctgaaggccacagcccgatgctccgacgcgttcgccacactccagctccacgcgaccctttttcgcctcggtgtggctgctgatgtccgcctgatgaccacgctgctggactcctatgccaagtgcggcgacgtcgcgtccgcacggaaggtgtttgacgaaatgcccgtgcgcgacgtggccacatggaacgcgctgctcgcagggctggcgcaggggacggagccgaatctcgctctattgctattccgcaggctggcagggagctttcgggagttgccgccaagggaggagccaaatgcggtgactgttgtcgctgcactttctgcatgtgcacaacttggaaccttaaaggatggattggctgtgcatgagtttgctcgtacaataggagctgtggacaatgtttgtgtcggcaacgcacttattgacatgtactccaagtgtggctcactgagccgggctcttgaagtgttccattccatcaagctagaagaccgaacacttgtgtcctacaatgctacaattcaggcgctttccatccatgggcatggggaagatgcactgaagctgtttgatgaaatgccagctcgtattgaaccggacgaaatcacttaccttgctgtgatgggtgggtgcaaccatgctgggcttgttgatgatgggcgcagggtttttgattccatgcgggttcctcccaatatgaagcactacgggaccattgtggacctccttggccgtgcaggccgccttgctgaggcatatgacatgattatgtctatgccatttccagcggatattgtcctctggcagacattgctaggtgctgccaagatgcatggtaatgtggatctagcggagttggctgccacaaagcttgctgatcttggctctaacgttgatggtgactatgtgctcctgtccaatgtatatgcatccaagtcccgatgggtggatgttggtcgagtccgtgacaccatgcgaagtaatgatgtgaaaaaagtccctggcttcagctacacagaaatagatggcgtaatgcataagttcataaatggtgacaaagaacacatgaggtggagggaaatatatagagcattagatgaaattgggtcaagaatctgtgctctggggtatgagccagaaacgagcaatgtgctacatgacattggggaggaggagaagcagtatgctttaagctaccacagcgagaagctggctattgcatttgggttaatttctacaccacctggggagactattcgagtgatcaaaaacctccgaacatgtggagactgtcatgtggtggcaaaacttatctctaaagcctataatcgggtgatcattattcgggacagggcaagattccaccgtttcgaagatggacattgttcctgcagagattactggtaaaaatgctggcacactggtcacttgcagccctactaaacacaacatgtgctccttgaggagagttcaagtgatgtgactgcatttctagtcaaaagtacggatgaaagtggatgacatacatactcttgaccaccatgttactgtccagagggctcatcaagttaaaaagttcttagaagatgcaaagttatcttacttgcatgaactcctgggttcgcataacaattcgagaagtgccttggaagcagaaccaaaaaattgtgataactgtgcaagctttgaattgaaatcgctccatgactgttatcattcaatattttcacaatctacaaggtttgtgacaaactgacaatgaaacatattttgatattgttcatgtacaaattctaagaggttactggactatagctgc

SEQ ID NO: 151771 - DNA, 2721 bp, Zea Mays
ctttttttcgagcccatgaaaaacatcattactttattcaactacccaagtagagggggctcttgtagaggcgcccatcccacagtccgacacactccggtaaagatcgcccacccaatgccatcgccgccgccgtccacggcagcggcggcggcgctgcagctggagcccctcctcccgcacttgtccacgctttcccattacaagcagttccacgcgcgcctccatgccttgggcacgctccattcctacccttccctccgcgcgcgcttcctcgaccgcctagcgctcttgccgcacgccgacgcgcttccgcacgcgctactcctcctccgctccctcccgtcccccgcaaccaacgacttcaacgccgccctgcgcggcctagccgcctccccgcaccctgcgcgctctctcctcctccttgccggccgcctcctccctgctcccgccccgccacggcctcgcctcgatgcgctctccctctccttcgcgctgaaggccacagcccgatgctccgacgcgttcgccacactccagctccacgcgaccctttttcgcctcggtgtggctgctgatgtccgcctgatgaccacgctgctggactcctatgccaagtgcggcgacgtcgcgtccgcacggaaggtgtttgacgaaatgcccgtgcgcgacgtggccacatggaacgcgctgctcgcagggctggcgcaggggacggagccgaatctcgctctattgctattccgcaggctggcagggagctttcgggagttgccgccaagggaggagccaaatgcggtgactgttgtcgctgcactttctgcatgtgcacaacttggaaccttaaaggatggattggctgtgcatgagtttgctcgtacaataggagctgtggacaatgtttgtgtcggcaacgcacttattgacatgtactccaagtgtggctcactgagccgggctcttgaagtgttccattccatcaagctagaagaccgaacacttgtgtcctacaatgctacaattcaggcgctttccatccatgggcatggggaagatgcactgaagctgtttgatgaaatgccagctcgtattgaaccggacgaaatcacttaccttgctgtgatgggtgggtgcaaccatgctgggcttgttgatgatgggcgcagggtttttgattccatgcgggttcctcccaatatgaagcactacgggaccattgtggacctccttggccgtgcaggccgccttgctgaggcatatgacatgattatgtctatgccatttccagcggatattgtcctctggcagacattgctaggtgctgccaagatgcatggtaatgtggatctagcggagttggctgccacaaagcttgctgatcttggctctaacgttgatggtgactatgtgctcctgtccaatgtatatgcatccaagtcccgatgggtggatgttggtcgagtccgtgacaccatgcgaagtaatgatgtgaaaaaagtccctggcttcagctacacagaaatagatggcgtaatgcataagttcataaatggtgacaaagaacacatgaggtggagggaaatatatagagcattagatgaaattgggtcaagaatctgtgctctggggtatgagccagaaacgagcaatgtgctacatgacattggggaggaggagaagcagtatgctttaagctaccacagcgagaagctggctattgcatttgggttaatttctacaccacctggggagactattcgagtgatcaaaaacctccgaacatgtggagactgtcatgtggtggcaaaacttatctctaaagcctataatcgggtgatcattattcgggacagggcaagattccaccgtttcgaagatggacattgttcctgcagagattactggtaaaaatgctggcacactggtcacttgcagccctactaaacacaacatgtgctccttgaggagagttcaagtgatgtgactgcatttctagtcaaaagtacggatgaaagtggatgacatacatactcttgaccaccatgttactgtccagagggctcatcaagttaaaaagttcttagaagatgcaaagttatcttacttgcatgaactcctgggttcgcataacaattcgagaagtgccttggaagcagaaccaaaaaattgtgataactgtgcaagctttgaattgaaatcgctccatgactgttatcattcaatattttcacaatctacaagaggttagaaggtgagtacagccatggtcagcgcatcaaggaacgtgaggggcaggccacaggcagatgctttccatactgttacccgagcgctacaaagattacataatacctatcatatggtctagtgaaaaattgcttcattactcaagtacagaacttggaagaatgtcgaggtaaatgaatataattgtctaactgctcagccacacacacccaacacacacacacaaatcaaatgagttaacagagtttttgacatgtagagcgagtttttctacactattgcaccattagggtttttgtcatgaattgattttttagctgtttccattgacttcatttcagattcagttgtttgaaatttgggtcagaaaaaatgtgtcttagtagttgatacttgcttttttctagactacttgatcttgttgtaagcctatgttactaatggaaccaaatcaatttggtactgctttgaata

SEQ ID NO: 151772 - DNA, 2830 bp, Zea Mays
ctttttttcgagcccatgaaaaacatcattactttattcaactacccaagtagagggggctcttgtagaggcgcccatcccacagtccgacacactccggtaaagatcgcccacccaatgccatcgccgccgccgtccacggcagcggcggcggcgctgcagctggagcccctcctcccgcacttgtccacgctttcccattacaagcagttccacgcgcgcctccatgccttgggcacgctccattcctacccttccctccgcgcgcgcttcctcgaccgcctagcgctcttgccgcacgccgacgcgcttccgcacgcgctactcctcctccgctccctcccgtcccccgcaaccaacgacttcaacgccgccctgcgcggcctagccgcctccccgcaccctgcgcgctctctcctcctccttgccggccgcctcctccctgctcccgccccgccacggcctcgcctcgatgcgctctccctctccttcgcgctgaaggccacagcccgatgctccgacgcgttcgccacactccagctccacgcgaccctttttcgcctcggtgtggctgctgatgtccgcctgatgaccacgctgctggactcctatgccaagtgcggcgacgtcgcgtccgcacggaaggtgtttgacgaaatgcccgtgcgcgacgtggccacatggaacgcgctgctcgcagggctggcgcaggggacggagccgaatctcgctctattgctattccgcaggctggcagggagctttcgggagttgccgccaagggaggagccaaatgcggtgactgttgtcgctgcactttctgcatgtgcacaacttggaaccttaaaggatggattggctgtgcatgagtttgctcgtacaataggagctgtggacaatgtttgtgtcggcaacgcacttattgacatgtactccaagtgtggctcactgagccgggctcttgaagtgttccattccatcaagctagaagaccgaacacttgtgtcctacaatgctacaattcaggcgctttccatccatgggcatggggaagatgcactgaagctgtttgatgaaatgccagctcgtattgaaccggacgaaatcacttaccttgctgtgatgggtgggtgcaaccatgctgggcttgttgatgatgggcgcagggtttttgattccatgcgggttcctcccaatatgaagcactacgggaccattgtggacctccttggccgtgcaggccgccttgctgaggcatatgacatgattatgtctatgccatttccagcggatattgtcctctggcagacattgctaggtgctgccaagatgcatggtaatgtggatctagcggagttggctgccacaaagcttgctgatcttggctctaacgttgatggtgactatgtgctcctgtccaatgtatatgcatccaagtcccgatgggtggatgttggtcgagtccgtgacaccatgcgaagtaatgatgtgaaaaaagtccctggcttcagctacacagaaatagatggcgtaatgcataagttcataaatggtgacaaagaacacatgaggtggagggaaatatatagagcattagatgaaattgggtcaagaatctgtgctctggggtatgagccagaaacgagcaatgtgctacatgacattggggaggaggagaagcagtatgctttaagctaccacagcgagaagctggctattgcatttgggttaatttctacaccacctggggagactattcgagtgatcaaaaacctccgaacatgtggagactgtcatgtggtggcaaaacttatctctaaagcctataatcgggtgatcattattcgggacagggcaagattccaccgtttcgaagatggacattgttcctgcagagattactggtaaaaatgctggcacactggtcacttgcagccctactaaacacaacatgtgctccttgaggagagttcaagtgatgtgactgcatttctagtcaaaagtacggatgaaagtggatgacatacatactcttgaccaccatgttactgtccagagggctcatcaagttaaaaagttcttagaagatgcaaagttatcttacttgcatgaactcctgggttcgcataacaattcgagaagtgccttggaagcagaaccaaaaaattgtgataactgtgcaagctttgaattgaaatcgctccatgactgttatcattcaatattttcacaatctacaaggagaggatgggagggatggggctgacacttgacaactttcagcagtaagtatgaaatctatgtttctaaaatggagtcatcatttgtagtttggtgtttttatctttgaatcaccctttctgaaatttcaagattgacgtatttattctccatctactctttgacacttacgtgtaaacattctgttctttatttcttgctcgctcactcactaagcaaatgtatcactggcaccaactttgtcagctttggaaaacccaggagttgaaatccatgtaaatgatctcaaaaaatcatcattaaaattaaacaaatcactgaacctggaagggatcagatcaatggtggaaagtgcgacacaaaagaacacagaactgtgtgtaccctcatgcatattgctgtcgcatctgtacaaagtcacgtgcacattttctctgttccttgagttgaggttctgaaagttgtaatatgtaagcctttcaataaaagggtctagttttctctctttgtaaaattgtatctagactagagtgtgtgggtttgtgtggagttgtatgagattttctttttacctcatcttttccttctt

SEQ ID NO: 151773 - DNA, 784 bp, Zea Mays
cgccgatccttttagggcgcggaaattagcgaaattgcctttggttccgggagattcccgtcgaaaataagcggaaggccgcgtccagcttctcggttctgggaaacagatccaaaccgggccaaatcgtctgaaaacaaaagagagcaacagacgcgcgctgtctttgtatgggcgccgccctcccggctggatctgcggccactccccgtcgcggcgattccatgagaggttgacaactaggcactggagaagtggatactctgatctactctgctgaacgagtttaatatttgagtatggcggcggcattgacatggcggttcaatggaagcaatggcggcacccatggcagcgccgatctggaaaggcacgtggacaaagttcaagactcagagccaccaactcctatgtcagtcatgaaaatgggcaagaaccgagtttaatgtggaggatgaggagacactttcaagcgttgctcaatgtattgagcatctacgacagagttcttcatcctcacaggacaaagagagctctttgaagcagttattagatcttgttcaaactcgtgatactgcattcggagctgttggatcgcattcacaggctgttccaatacttgtatctcttcttagatctgggccatctggagttaagatgctggctgctactgttcttgggtctctttgcaaggaagaggagttaagggtgaaagtcttacttggtggttgcatccctccattgcttgctcttctcagatcgaagtcagctgaaagccaaactg

SEQ ID NO: 151774 - DNA, 2487 bp, Zea Mays
cacgcttaaagttaaagttggtggatgtgctcttctcgtctgtgctgcaaaagagcattgtcagaagcaaatagaggttctgaatgatgcaagtctgtatattcaactaatccattctctaattgatatgatccatatggcaaacacgcctgctgaaaatgtcagcagtgaaagcatatcagatattagaatttccagacactccaaagaaaactacagtgatggtgaaactgtgtgccgtactgctgtaatctcaggcaacatgattccactatggctacttgctgtcttttctcgtcatgacagcaaaacaagagcagaactcctagaagctggagcagttgaaatgctcactgagaagatttcacaaaatgcattccaatatgtcggtgaagaagatagcacctcatgggtgtgttccttgcttcttgctttgctattccaagaaagagagataattcgatcaaactctgcatcacattccattcctgtgctctcaaacttgttaaggtcagacgagccagcatacaggtactttgctgcacaagctttgtcaagtctggtttgtaatggtagcagaggaacacttctggctgtcgctaattctggggcagccattggacttgtatctttgcttggatgcgctgatgtcgatatagccgatcttttggaattatcagaggaattcatgttggtgcctaatcctgatcaaattgcattagagaggctatttagagttgatgacatcaggattggtgcaacttctagaaaatctattcctcttcttgttgatctacttaaacccattcctgaaagacctggtgctcctttcttggctttgggtcttctgacccagttagctgttgattgccccccaaacatgctgctaatggctgaagctggaatactagaagcacttaccaaatacttatctcttagtccacaagatgcaacagaagaagctacaactgaattgctgggcattcttttcagtagtccagaaataaggcatcatgaatcagcacttggtgttgttaaccaacttgttgcagtccttcgtctaggaggaaggaattcacgttacagtgctgcaaaggcattagagagtttgttttttgctgaccatgtgaggaacagtgagtcagctaggcaggctatccaaccccttgtggagattctgagtactggcatggagagggagcagcatgcagctatatcagcccttgttaggcttctttctgacaatccttcaagagcacttgcagttgcagatgttgagatgaatgctgtggatgttttgtgccggattctttcttctgattgttcagtggagttgaaaggagatgctgcagaactatgctgtgttctatttaacaatacaaggatccgttccacaatggcggccgctcgttgtgtggaacccttggttggtttactggttagtgaagctaaccctgcccagctttctgttgttcgtgcattggataggcttctagatgatgagcaactggcagaattagtggcagcacatggtgctgtcattcctcttgttgggtttttgtatggcaaaaactacatgcttcatgaggcagttgctggagctttggtgaaacttggaaaggacagaccagcttgcaaattggaaatggtcaaggctggtgtaattgagagcattcttgatattctccatgacgctccagattttctttgcatcgcattggcagaaatgcttcggattttgacaaacaatgctaccatagcgaaaggtccatctgtagccaaagtagtacaacctcttttctctttgctttctaaggcggacatgggtcctgaagggcagtatagcacattgcaggttcttgtgaatattttggagcatcccgaatgccgtgctgattataacttgacacctcgccaaactattgagccagtgataaccttattgaattcatctccaccagctgtgcagcaattagctgcagaactcctgtcacatcttcttctagaagacaacctccaaaaggacacaataacagagcaggcgattactcctcttattcaagttctttcttcaggtttgccaaatctacagcagagagctataaaagctcttgctaaccttgcaatagcttggccgaatacaattgcaaaggagggtggtgtttttgagttgtccaaagtgttgttgcaatctgacccgcctttgcctcatgttgtgtgggaatctgcagcgtcggtattgtctagcattctacagtacagtactgagtttttccttgaggtacctgttgcagtactagtgcaattgctcaggtctggaactgaaagcacagttgtcggtgctttgaatgcccttcttgtattggagagtgatgactcaacaagtgcagaagcaatggctgaaagtggtgctgtggaagcattgcttgatctcttgaggagtcatcagtgtgaggaaactgctgccagactaatcgaggcattgct

SEQ ID NO: 151775 - DNA, 851 bp, Zea Mays
atggacggcgcagatccgccgattccctcaccttcctctccctccttttttaaccaccccacggctcatctctccctccacaagtcctgagcgaacctccccactcgccactccgccccctccgctcccaaagaagaagacgacgacgacgacagcaaggtgccgccgtcacgagatccgtccgaggtgaccatgtctacgcctacgaggaagcgtcccaggaaaaccaacggctccacgtcgtcgtcgtcgtccgcgatgcgtcggacgacgagcctgtcggacctcgcgccgccgccggatctctccgggaggcccaagacgcgggcggcgagggggcatgcggtggcagggccagggaccgcgtggggcgccgagatgacgatgacgcactcggcggacttcctccccgccatggagacggcagccttcctcaaggcctgcgggatctgcaaccgccgcctcggccccggccgtgacaccttcatctacatgggtgaggtggccttctgcagccaggagtgtaggcagcagcagatgaacctcgacgagctcatggagaagaagtgctccactccggctggcggcggcggcggtggcgtcggtggcggcggcggtggaggctcagatcagcccggcaagagcagcaccgtagcggccgcctagcatcgccagaggggtaataacaacgaagaaaatttttggagccctggtggtgtaggccccaaaaacgcagcagtttccatcagcctatgtatatcctgtatttctggagtcactgtgtgtgtatattggtgggaaggggaaggatgtagggattccaactgggggcatggtttgcaatgcatcat

SEQ ID NO: 151776 - DNA, 1454 bp, Zea Mays
tttgacgaaatgccaatggtaacgcacataatcaaacaaaaacataccacatgtttggttgtcttcgtcaggagaactatactccttccatgcattgactatgataatacacgtgtttagttcgttccacgtatacgcgaaacggaaaatggtcgtatcgggcggactaagctcacctcaggcctcatcctcttcgtctgatactagtaatctatagagagtgattctcagcatcatatcgtcagccatgggccgcgtgaagctgcagatcaagaggatcgagaacaacaccaaccggcaggtgaccttctccaagcgccgcaatggcctcatcaagaaggcctacgagctctccgtcctgtgcgacatcgacatcgcgctcatcatgttctcgccctccaatcgcctcagccacttctccggcaggcgcaggatcgaggacgtgatcactagatacatcaatctcccggagcacgagagaggaggaggaggaggaggagtcgttcggaatagagagtatctgatgaacatgcttacgcaactcaaacgcgagggtgacattgccgaacagctcacaccacccaataaaggtccagcgaactccaacatagaggatcttcagcacgagattagaaattacagacatcaggtcgaagagttggagaagcaaattaggatgttcgagccagatccggcggtgttggtgttgacgaatgaagccgagacgtgcgagaaattcctcatggacacactcacccgtgtcgaggagcgtatgaaatatctgtcgtgcaaccagctgggcccgttcgaaccgtcacccaccgacatacacgacgtattcggtgtgtcgcagcagcagcagcagcagggggacctgagcgcattcggggccggcgacgtagtatcgtatttcgctggcggaatggcggcgtcggacatcttctccggtgttggcccgatgtcgtctttcagcgagcagacgattttcgactcgatgcggccggacccggccgtcatggctggactggacccgggaatagccacgatctgcaccgtcgaccagcagcctcccagtctcaactgggaggacgcgtacgcgtctgcggggctcctctccgcgctcattccgtccacgcccttccccctcgatgaagaccagcaggacgccatggcgccggtgctcacgtctccgatggtgccgccgccgccgcatcacgtgcacgaggaagtggaggcgccggaaagctgctccaacgtgtcgacggacggggaccgcgccgctacaaccgcccccgccgccgtcggtcaagagcacgggctgcccagtgcggtcgtcgactagctagctgcatctgcttgtccgcagactgttttgcagcatcacttctttacccagcatagcagttggaaagcctacagctagccaactagctagacagccaaggatggattat

SEQ ID NO: 151777 - DNA, 483 bp, Zea Mays
atggagtcccagtcgatgtcccaggacgggtacgagttgaggtgcaaggcggcggactcgtcccacggcgcctccgtgaagtccaggctcgccatctcggggagcggcggcgtcacctgctgctgctgctgcgggaacgtggggagggaaggaggcgagccggcggagtgcaccgactcgtcgccctcagtcgtggtcgtggacgccgaggccttgggcgagtccgagggagcggcggcggcggccttggaggtgggctcggcggtgatgccctggcagatggcggtgagcttggcgtcgacggaggcgtcgagcgggcccgcgaggtggttcagcgccagccccgacgcggcgtccaccgacgacgtcgggcacgacgacgacgccggagaggcgtacgacgaggaggactggggcagaggcgggagctgtgagaaggaggtggcggtgggagcaagaggtggtggcgggagcgcggtgtaa

SEQ ID NO: 151778 - DNA, 93 bp, Zea Mays
gtcattgcggcggtgcatgacctttcattagaatttcatttattggacacagcaattcgtctaatgccttcggagagccatgatagaatcaag

SEQ ID NO: 151779 - DNA, 1558 bp, Zea Mays
gcacacggatccatccccaacacggcaacacgccaacacccatcagtccatcacaggcgcagcgaactctgcgcttccacttctctctccaccgtccctttacccaaccaaccaccgcactggtacgctctcgactctcgacaccggcagcagcaggaggtggagctagggcatgtgatcggactccttgcctgcttcctgatctcaacctcttttcaccagcgcgagggcggcgcggtctcaagccgggatggggtatctgccggcgctgggcgggaaggcggcccacctggtgaacgacctcgccactgtcatcctgaaccccgtctccgagcgcgagcgccagccacaccaccccacccacctcccggaggccactgaaggagaagacacactattcgttgacgatgattctgaccaaaattctgatggtcctgacacatcttcattcagagcatttctgatgtcctttgtgccttcctcaactgccagcaagaattcaatggagaccatacctgagcataatctagatgtggaatacccaactttaacacctgttgggaaggcgtgcagtgggaggaaaggcctgtttagtagagggaagcattcccttggtaggattattagcaaagcaggacttggtaatttgagacagaaacagacccacagcattgatggtgaaatcataggccaaaccgaatcagttgcacctagatttgaagtgaagggttcaaaagaatcaactttgcacgataaattgccagctatgtctgaaccttctcttcttctgacagaaatgatgcgagctgttctttatacatctcttcctgtacttgttcaaggaaggaactggatgctggtatatagcacctggaggcatggaatatctttgtctactctgtatcgaagaagcaggctttgtgctggctactcacttttgatagttggggatcgaagaggggcagtttttggtggcttggtcgaggccccactgcaacctatcgtaaaaaggaagtatcagggaactaatgactgctttgtgttcaccaacgtagatggttgtcctgttatatgccatccaacaggtgctaataactattttacattttgctctaccgattatatggcaatgggaggtggtggtcacttcgcactttatctcgatggagaccttatgactggttctagctccacctccgagacttttaacaacccatgcttatcccatacccaggaattcaaaatcaaagatgtcgagctgtggggtttcgtcaatgcttccaagtttgaagagatgctcatgatctgccgcaccgaaaagcaaggaatttggaacctgtgaccgtttggagttcactgagctgttgcttgttggtgtcaaccgatcctctgatgtggcttgtactgttgtacagttttgtagtaaacgtttgtatagcatgtagagagtttccatatggaatcagaagttgagaacatgtagagttttgctttgtagaataccaaatgccatttacagagaaaataccagtcactaacactcaaatgtatatatttc

SEQ ID NO: 151780 - DNA, 1555 bp, Zea Mays
gcacacggatccatccccaacacggcaacacgccaacacccatcagtccatcacaggcgcagcgaactctgcgcttccacttctctctccaccgtccctttacccaaccaaccaccgcactggtacgctctcgactctcgacaccggcagcagcaggaggtggagctagggcatgtgatcggactccttgcctgcttcctgatctcaacctcttttcaccagcgcgagggcggcgcggtctcaagccgggatggggtatctgccggcgctgggcgggaaggcggcccacctggtgaacgacctcgccactgtcatcctgaaccccgtctccgagcgcgagcgccagccacaccaccccacccacctcccggccactgaaggagaagacacactattcgttgacgatgattctgaccaaaattctgatggtcctgacacatcttcattcagagcatttctgatgtcctttgtgccttcctcaactgccagcaagaattcaatggagaccatacctgagcataatctagatgtggaatacccaactttaacacctgttgggaaggcgtgcagtgggaggaaaggcctgtttagtagagggaagcattcccttggtaggattattagcaaagcaggacttggtaatttgagacagaaacagacccacagcattgatggtgaaatcataggccaaaccgaatcagttgcacctagatttgaagtgaagggttcaaaagaatcaactttgcacgataaattgccagctatgtctgaaccttctcttcttctgacagaaatgatgcgagctgttctttatacatctcttcctgtacttgttcaaggaaggaactggatgctggtatatagcacctggaggcatggaatatctttgtctactctgtatcgaagaagcaggctttgtgctggctactcacttttgatagttggggatcgaagaggggcagtttttggtggcttggtcgaggccccactgcaacctatcgtaaaaaggaagtatcagggaactaatgactgctttgtgttcaccaacgtagatggttgtcctgttatatgccatccaacaggtgctaataactattttacattttgctctaccgattatatggcaatgggaggtggtggtcacttcgcactttatctcgatggagaccttatgactggttctagctccacctccgagacttttaacaacccatgcttatcccatacccaggaattcaaaatcaaagatgtcgagctgtggggtttcgtcaatgcttccaagtttgaagagatgctcatgatctgccgcaccgaaaagcaaggaatttggaacctgtgaccgtttggagttcactgagctgttgcttgttggtgtcaaccgatcctctgatgtggcttgtactgttgtacagttttgtagtaaacgtttgtatagcatgtagagagtttccatatggaatcagaagttgagaacatgtagagttttgctttgtagaataccaaatgccatttacagagaaaataccagtcactaacactcaaatgtatatatttc

SEQ ID NO: 151781 - DNA, 1771 bp, Zea Mays
gcacacggatccatccccaacacggcaacacgccaacacccatcagtccatcacaggcgcagcgaactctgcgcttccacttctctctccaccgtccctttacccaaccaaccaccgcactgcgcgagggcggcgcggtctcaagccgggatggggtatctgccggcgctgggcgggaaggcggcccacctggtgaacgacctcgccactgtcatcctgaaccccgtctccgagcgcgagcgccagccacaccaccccacccacctcccggaggccactgaaggagaagacacactattcgttgacgatgattctgaccaaaattctgatggtcctgacacatcttcattcagagcatttctgatgtcctttgtgccttcctcaactgccagcaagaattcaatggagaccatacctgagcataatctagatgtggaatacccaactttaacacctgttgggaaggcgtgcagtgggaggaaaggcctgtttagtagagggaagcattcccttggtaggattattagcaaagcaggacttggtaatttgagacagaaacagacccacagcattgatggtgaaatcataggccaaaccgaatcagttgcacctagatttgaagtgaagggttcaaaagaatcaactttgcacgataaattgccagctatgtctgaaccttctcttcttctgacagaaatgatgcgagctgttctttatacatctcttcctgtacttgttcaaggaaggaactggatgctggtatatagcacctggaggcatggaatatctttgtctactctgtatcgaagaagcaggctttgtgctggctactcacttttgatagttggggatcgaagaggggcagtttttggtggcttggtcgaggccccactgcaacctatcgtaaaaaggaagtatcaggtttgatatgcatgctgttgctgatttcaggatgcctatttcacactacgctgaatgtatttcatctaatgtttcagggaactaatgactgctttgtgttcaccaacgtagatggttgtcctgttatatgccatccaacaggtgctaataactattttacattttgctctaccgattatatggcaatgggaggtggtggtcacttcgcactttatctcgatggagacctgtaatctctgttcttcctttccatcacatgacacaaagttcctagtttctaggttttgtatgtatattgatggaaaattcctagaaaggttgatgtagtatatgccagcacgtcattttgtcttccatcggtcttatattatatcttatgcatctcccgtatttttcttggctgctctgttggcctgtgcagtatgactggttctagctccacctccgagacttttaacaacccatgcttatcccatacccaggaattcaaaatcaaagatgtcgagctgtggggtttcgtcaatgcttccaagtttgaagagatgctcatgatctgccgcaccgaaaagcaaggaatttggaacctgtgaccgtttggagttcactgagctgttgcttgttggtgtcaaccgatcctctgatgtggcttgtactgttgtacagttttgtagtaaacgtttgtatagcatgtagagagtttccatatggaatcagaagttgagaacatgtagagttttgctttgtagaataccaaatgccatttacagagaaaataccagtcactaacactcaaatgtatatatttcatagaaactaagaatgccctgcctacgttgcagatggaagtttt

SEQ ID NO: 151782 - DNA, 1422 bp, Zea Mays
gcacacggatccatccccaacacggcaacacgccaacacccatcagtccatcacaggcgcagcgaactctgcgcttccacttctctctccaccgtccctttacccaaccaaccaccgcactgcgcgagggcggcgcggtctcaagccgggatggggtatctgccggcgctgggcgggaaggcggcccacctggtgaacgacctcgccactgtcatcctgaaccccgtctccgagcgcgagcgccagccacaccaccccacccacctcccggaggccactgaaggagaagacacactattcgttgacgatgattctgaccaaaattctgatggtcctgacacatcttcattcagagcatttctgatgtcctttgtgccttcctcaactgccagcaagaattcaatggagaccatacctgagcataatctagatgtggaatacccaactttaacacctgttgggaaggcgtgcagtgggaggaaaggcctgtttagtagagggaagcattcccttggtaggattattagcaaagcaggacttggtaatttgagacagaaacagacccacagcattgatggtgaaatcataggccaaaccgaatcagttgcacctagatttgaagtgaagggttcaaaagaatcaactttgcacgataaattgccagctatgtctgaaccttctcttcttctgacagaaatgatgcgagctgttctttatacatctcttcctgtacttgttcaaggaaggaactggatgctggtatatagcacctggaggcatggaatatctttgtctactctgtatcgaagaagcaggctttgtgctggctactcacttttgatagttggggatcgaagaggggcagtttttggtggcttggtcgaggccccactgcaacctatcgtaaaaaggaagtatcagggaactaatgactgctttgtgttcaccaacgtagatggttgtcctgttatatgccatccaacagtatgactggttctagctccacctccgagacttttaacaacccatgcttatcccatacccaggaattcaaaatcaaagatgtcgagctgtggggtttcgtcaatgcttccaagtttgaagagatgctcatgatctgccgcaccgaaaagcaaggaatttggaacctgtgaccgtttggagttcactgagctgttgcttgttggtgtcaaccgatcctctgatgtggcttgtactgttgtacagttttgtagtaaacgtttgtatagcatgtagagagtttccatatggaatcagaagttgagaacatgtagagttttgctttgtagaataccaaatgccatttacagagaaaataccagtcactaacactcaaatgtatatatttcatagaaactaagaatgccctgcctacgttgcagatggaagttttaaaactgg

SEQ ID NO: 151783 - DNA, 955 bp, Zea Mays
agtgcacttgttttgatcatacattgtgggcgaggattgaggaatgatactacaatttagttactgctatccacatgataatttgttgtttgctgttgcagatagttggggatcgaagaggggcagtttttggtggcttggtcgaggccccactgcaacctatcgtaaaaaggaagtatcagggaactaatgactgctttgtgttcaccaacgtagatggttgtcctgttatatgccatccaacaggtgctaataactattttacattttgctctaccgattatatggcaatgggaggtggtggtcacttcgcactttatctcgatggagacctgtaatctctgttcttcctttccatcacatgacacaaagttcctagtttctaggttttgtatgtatattgatggaaaattcctagaaaggttgatgtagtatatgccagcacgtcattttgtcttccatcggtcttatattatatcttatgcatctcccgtatttttcttggctgctctgttggcctgtgcagtatgactggttctagctccacctccgagacttttaacaacccatgcttatcccatacccaggaattcaaaatcaaagatgtcgagctgtggggtttcgtcaatgcttccaagtttgaagagatgctcatgatctgccgcaccgaaaagcaaggaatttggaacctgtgaccgtttggagttcactgagctgttgcttgttggtgtcaaccgatcctctgatgtggcttgtactgttgtacagttttgtagtaaacgtttgtatagcatgtagagagtttccatatggaatcagaagttgagaacatgtagagttttgctttgtagaataccaaatgccatttacagagaaaataccagtcactaacactcaaatgtatatatttcatagaaactaagaatgccctgcctacgttgcagatggaagtttt

SEQ ID NO: 151784 - DNA, 798 bp, Zea Mays
gaggaatgatactacaatttagttactgctatccacatgataatttgttgtttgctgttgcagatagttggggatcgaagaggggcagtttttggtggcttggtcgaggccccactgcaacctatcgtaaaaaggaagtatcagggaactaatgactgctttgtgttcaccaacgtagatggttgtcctgttatatgccatccaacaggtgctaataactattttacattttgctctaccgattatatggcaatgggaggtggtggtcacttcgcactttatctcgatggagaccttatgactggttctagctccacctccgagacttttaacaacccatgcttatcccatacccaggaattcaaaatcaaagatgtcgagctgtggggtttcgtcaatgcttccaagtttgaagagatgctcatgatctgccgcaccgaaaagcaaggaatttggaacctgtgaccgtttggagttcactgagctgttgcttgttggtgtcaaccgatcctctgatgtggcttgtactgttgtacagttttgtagtaaacgtttgtatagcatgtagagagtttccatatggaatcagaagttgagaacatgtagagttttgctttgtagaataccaaatgccatttacagagaaaataccagtcactaacactcaaatgtatatatttcatagaaactaagaatgccctgcctacgttgcagatggaagttttaaaactggaaattgctatttgtatgcccggtgggggttgccactcgcaacaaccgctgatcttgcattttgag

SEQ ID NO: 151785 - DNA, 485 bp, Zea Mays
cttctcccctcccgcgcctgtaagttccacctcgcctcggcacgctcgccgtcccacgccgccgcttcggttttcggcgacgacgaggatgagatggcgcgtgcgtgcagggctgctgctgctgctcgtccctgcgccttctcccccgcgacgacgcgctctcgtccccctccacctgcgcgcacggcctcaagccttggtcttggcgtgcccaatcccccacctcgtcctcctaacgcttgtccccgcccgctccccaccctgatctacctgtctctacccttacctcttccatttctacttctccccgttgctgctctgctcctgctgccacaagagtattcgccttcaattgttgctcgcgcctgtgatttcgtgccgcacgccgacttgtttgccgttttcgctgccgtcttctgttggatcggatttgtctggatcgcttccgagatcggatctacgctgttgcgggtcaggtaagatcc

SEQ ID NO: 151786 - DNA, 375 bp, Zea Mays
atggtgaacctcacacacgcctctggggagctgccgctgccgcacctctggaaagccatcgacgtcgtgcaaccggatcagggagccaccgtcgtcgcgccgtcgaggacctacctccggattagggagccactgtcgtcgcgcctccggatcggagagttgccgctgtcgcgccttcggatttgggattggtcgtcggttgcgctgaccggaggccaccaccgcctcgcgctctattgggagacagatgctcgggactgtggtgtggctgaaccggatgacctggcggactgtggctctttttatagatgtccgggatctggtgtggctgaaccggatgacagtattagaccagagctttcttctatttattga

SEQ ID NO: 151787 - DNA, 1522 bp, Zea Mays
tgtatcacaaggtgatttcttttcgcccgcattaattcaagtctgcgcgaagcgcctctacataagcagctctcggcttggctgtgctcctcacactcgaacacttccaaagttctagcccctctcgtgagtcctgtccaaataatggccacgcgcagcagtgtccttctgcttctgacggcgctcgccgcagccacggccgcgccgtcagcggcgaccaggaagctcatgttcctcgtccagccacagccgaacctcctcacgtaccacaacggcgccgtgctgagcggcgacatcccggtctccatcctctggtacggccgcttcacgccggcgcagaaggccgtggtctccgacttcctcctcgccctctccggcgccgcgccgccgcagggctcgccgtccgttgcccagtggtggagcagcgtcaaccagctctacctctccaaggcggcggcggcggcggccgtcagcaagaacggcgcgcacggcggcggcggcgccaagagcgcgcgggtggtgctgtccgggcaagcctccgacgagggctgctccctggggaagagcctgaagctgtcgcagcttccggcgctagcggccaaggcacgccccgcggccgcgaggggcggcgtcgcgctggtgctcacggcgcgggacgtggccgtggagggcttctgcacgagccggtgcgggcaccacgggtcgtacggcggcggcggcggcgggcgcgcggcgtacgcgtgggtgggcgacgccgccgaccagtgcccgggccagtgcgcgtggccgttccaccagccggcgtacggcccgcaggcgccgccgctggtgccgcccagcggggacgcgggcacggacggcgtggtgatcaacgtggccagcatggtcgccggcgcggtcaccaacccgttcggcgacggcttctaccagggcgaccgcggctcgccgctggaggccgccacggcgtgcgcgggcgtgtacggcagcggcgcgtaccccgggtacgccgggcagctgctcgtggaccgggccacgggcgccagctacaacgcgcacggtgcgcgcgggaggaagtacctgctcccggcgctgttcgaccccgacacgtcggcgtgctccacgctggtgtagtgtagctgtagccgatctcacaggctaataaatgttggtatatgtaaatactgaacagtacacagtatgtatcatcgttcgtgacgtgacgtcgatcgtgacgggcagggcagtgctaaataaacgacctgtgcttgaagctgtagtactccatcgtgtaccatgcacagtgcttgcatgcatgttcgtccttggtgtgttccgggagaccgagaacgagcactacaggaaaacgaccagtttccgacggcctacactgtttccgacggttcctagggtaccgtcggaaatagtcttatttccgacggcctacggccagccgtcggaaatacgtctatttccgacggcccaccaccttggccgtcggaaataaagagagtccctaacgtcc

SEQ ID NO: 151788 - DNA, 717 bp, Zea Mays
ctcccatccgacctggacctgacgaggacagtgagaccggtggtgaagatcgctgttggatccccaacccccaccgcccatggctcaccacattcacgcggatgtacggccatcacgcgatgtgtccgttgaatcgagcagagagagagtgcagagtcacagagagggcctcgcggctcgcgcggcgagggagtcctcaatagtggccgcaatggtagagcaaatgcctcgacgtcctggttccccgttctccatactggaggcatcaactcaatgcgtacgagttagcaagtaacctaggagcacttacttgtattttctgacggtagcagagttgatccttggtgcgtgcagactccatgctcggactgctccatcgcgctttccacatggtggcggagaaaaattccgtcgtaggagctccctggccgtggtttgatgggtcaaggaatacgcgggaggcacgattttatactaccacaggtcggtttggggaggattgaacagagctcggatttctcgcaggttgttgagattgtcgcgccatccgcggggaaggtgaacccagccgcccgattcacccggtgaggacgacgcccttgaccggcggccccacggtaagagcgctacagtttggggacggttggttggcgaggtcccacgcgcgatctgttggggatttggatgaggttttgcggtagaaatcgtcacggatga

SEQ ID NO: 151789 - DNA, 1903 bp, Zea Mays
cggcccagattgctggggcttttcggcccaaatcctctcacccaagtcaacaatttcaggcaaattcgcaacgcctctccagcataggcatagctcgccgaaacgccgacctaaacgcccacaattcgcctctccgatccggcacgacaccgccgccgatccccatcgtcacggtagccatgtccaaccccggctcgttgcccgcctccgctcaccacgagcacgagcacacccctctctgccgctcctgcggggcgcccaccacgtcgccgaccccggcaccctggtcagggaccaccgactccccgccgccggcgtaccgccccatccgtctcccagccatcaacgcgcccaccaacacagccgccatagtcctctccccggtcccacagccgctccccgtgcctcccgccgcgccgccccacgccttcctggtccctgccaagcggatcacctcaccggacgatatcgcccgcttccatgcctccgtccacggccttcacttcctcgggttcgtcgccgcgctgtccgcctccgtccacggccgcaagctctcggacccgctaccgtccccgccatcccccgccatagctgcgctgctcgatctcgtctcggctctcgccgctctcgtcgcttccacccctccgcttccacacagctctcggtacggcaaccctgctttccgcctgtggcacgagaagctcaccgactccgccagcgagctgatctcgcggatcacggccaccgcgtcttcccctgcggacctcgcaggcgccgatgtcgagctagcaccgtacctcctcgactccttcggcaacgccacccgcatcgactacgggacggggcacgaaaccaacttcgccgccttcctctactgcctcgcgaggctcggcctcatcaccgagcccgactacccggccgtcgttctgcgcgtcttcacagcttacctcgatctcatgcgcacgctgcaggacacgtaccagctggagcctgcaggctcccatggcgtgtggggacttgatgattaccatttcctgccgttcatatttgggtctgcacagctgattgaccacaagtacatgaagcccaagtcgattcacaacccagatatcttggaaaatttctccaaggagtacatgtatctggcgtgcgttgcatatgtgaagaaggtaaagaaggggccctttatggagcattcaccaatgttggatgatatcagtggagtggccaattggaagaaagttaacagtgggctgctaaagatgtacaaggctgaggtgcttgagaaagtaccgatcatgcagcatttcctctttggctcactaatcaaatgggaggattaataacatctttagggaagctcaccaatgatccgtgagaaactcatgtatgatgtgaagactggcggtatagtggtgctactcaaagtttgtagaaaagggaatacatatagaaggtcattttccatctagggtgaatgagcgttctatatgtttgcatagtgtgccatcacacttatcttctggtgctctaaattctgggaacctgtttgttagttcacgatcagctcaggattcccttggctccttgagggcaatgtaatgttagttgaacaacacctttgcactgaaactttcggcgtagatgacaagagcagtctctttggttttcctgaatggaagcctgtgctgtgcttgctatatttggtttggcagtgactgtgactgttagttaggtcctgtttaggatggttctaactctatagatttctactcaacgtcataactttaggccttgttcgtgtacaccaatccaactctggattagcatggtttagaattaaatccatgtcacaatccatgtcccaaaataatctaagcctattcaatttttttattcggtt

SEQ ID NO: 151790 - DNA, 108 bp, Zea Mays
gttttccgacaatttatttcacggctaaagacatatatatgtgttggtttaaaaaaaaggcatttacatatcgctgctagctatggaatcgtgtgaatctagcacgag

SEQ ID NO: 151791 - DNA, 720 bp, Zea Mays
cacagaaagaaactgggagggggaaaaaagggggcgttctgtgcgtgcgaggcaaaacaacgcttggcgaattgaggcatgggccagtctctgatgaagctcttcttcgacgactcctgccagaaagaagtgaaggttgtgatgcttgggctggacgccgccggcaaaacgacggcactgtaccggctgcacgtcggcgaagctctgtcgacggtgccgacaatcggtttcaacgtggagaaagttgagtacaagaacgtggccttcacggtgtgggacgtcggagggcaggacaagctgcggccgctgtggaggcagtacttgagcaactcggacgccctgatatacgttgttgattcggtggacagggaccggattggggttgccagggaggagttccaggccatcgtcaaggacccgctcatgctcagcagcgttgtcctggtgctcgccaacaagcaggatatgaaaggcgcgatgagcccctccgaagtggggcagcgcctgggcctgtacgacctcaagaacaggacgtcgcgtgccgtgggggcctgcgcgctcaccggcgagggcctgcacgaggggctcggttggctagcggcgaccctcaaggacgcgcgcgcatggggaacctccgtccgcttctagctctaggccattttgttttcccattctatcactattttcctgcgaaataggcaggtcatttttgttaagtaa

SEQ ID NO: 151792 - DNA, 103 bp, Zea Mays
ttcttttgaaaaaaggagaataatatatgttttagctgcatctacatcgccagtctgcacctcatctaatgatttgttcaataactggcagggactgagttag

SEQ ID NO: 151793 - DNA, 165 bp, Zea Mays
tacaacgtgatcctctttgatgaggtagagagggcccatgtcgccatgttcaacaccctgctctaggtcctcaacaacgacaggctgatggatgggcaaggcaggacgatggacttcaggaacaccgtgatcatcatgacaacgaaccttggcgcttggcacctc

SEQ ID NO: 151794 - DNA, 1552 bp, Zea Mays
aaggtagcaacaggccaacaggtggattaggtcggagtgttgcgtcacttgagcggctgagcagctgagcctgtgcgtgttcctgcgtgtgcaacctgtgcgtgtggccagggatgccgcagcggctgccgcccattctgtcgccctgttcttgcgtgcatctgaattacgcgatagtaattgtactatttgcccgccatggcattctcagccatcaaccattgattaattccgtatcgatttgtccatttgctgcacgcatgactcgacatggaattggatgggtcctactaatgctgtggcgctgcagcctatataagaacactacacacatagctcttgacacgtcgcttcatctagtcccagcactactcactcacttccagtctctagagccatcgagatcgtagctgagcgagttagtattcatggcaggaggcacgctgcaggacagatcggaggccgaggacgtgcgcgtgggcgtggaccgtttcccggagcggcagcccatcggcacggcggcggacgacctgggccgcgactacagcgagcccccggcggcgccgctgttcgaggcgtcggagctctcctcgtggtccttctaccgcgccggcatcgccgagttcgtggccacgttcctcttcctctacgtgaccgtgctgacggtgatgggcgtgagcaagtccccctccaagtgcggcaccgtgggcatccagggcatcgcgtgggcgttcggcggcatgatcttcgcgctcgtgtactgcaccgcgggcgtgtcgggcggccacatcaacccggccgtcacgttcggcctcctcctcgcccggaagctgtcgctgacgcgggcggtctactacgtggtgatgcagtgcctgggcgccgtctgcggcgccggcgtcgtgaaggcgttcggcagcgcgctgtacgagtccgcgggcggcggcgccaacgccgtcagccccgggtacaccaagggcgacggcctcggcgccgaggtcgtgggcacgttcgtgctcgtgtacaccgtcttctccgccaccgacgccaagcgcaccgccagggactcccacgtccccgcgctggccccgctgcccatcggcttcgccgtattcctggtgcacctcgccaccatccccatcaccggcaccggcatcaaccccgccaggagcctcggcgccgccatcatctacgacaacccgcacgggtggcacggccactggatcttctgggtgggcccgttcgccggagcggcgcttgcggcggtgtaccaccaggtcgtcctcagggccatccccttcaagtccagcgctcactactagtgttgcttgccttgccgtcatacacggagttctgctgccacatcggccgctcaatggaccatcactccgcgaatgtatgatgtgtgtaactcgaatgtgtggttaattttcgttttcttacgtgtttgcatccacggaatgtgtcatcagtgtacaaatcaactgtatgtggctgtacgtgtcccaattatgataatgctaataaggccataatataccaaggcccatttact

SEQ ID NO: 151795 - DNA, 1040 bp, Zea Mays
aaggcacatctcgctcgcagcgccccgctagaatccaaagccaaaaccccaatcgcacaggagagaccgagagcgaggttttccatccatggctcccggcgtcgcttccgtactggtcccgcaggagcccgtcctcctcaaggacatcatcgcctcaccgtccccctgcgggaacaccgctgtctccgcccgccacctcttcggcaacggagtcgcgccgccacgctcctcggacgacggcatcaaggacgtcgctgccgaccgccacggtgaccgcgacctctccatccccaagatcttcaccggagacgtgctggacctgctcgacgatgctgctaggctggacctgatgctggcgctgacgggggacggcggtgcggcgtccatggccggcttctccgcgcgcgggtggtgggtctcgaaggaggatggcaacgcggtgcaactgaaggtgccgatgccagggctggggaaggagcacgtgaagatgcgggtggagaaggacgccctggtgatcaagggggaggccggcaaggacctcgagggcgacgacgacaagggcccggcgcggtacagctaccgcatcggcctctcctcccaggctttcaagatggaccagatcaaggctgacatgaagaacggcgtgctcagggtcaccgtcccgaagatcaaggacgaggagcgcaaggacgtcttcgagatcaagatcgagtagggtgtgtgcatcggatgggtcctcccaggtctcctagttgcagtccatatcgtagttgcagtccatatccatatcgtagttggcatgagcttgtcgtactagtagtttcaaactttcaattactggagtgcagtagtcgtttctgttgcagagcagtcgtagtactagtagctttctggtggtgctccgtctcgtgcctgatgcgaggcagcgtatacctttctgttggtcttgcaaagttcagttccctggatggcgacgatcactgacgatcttgtgatgaacttcaaatggtaatggaatctgcagttaataatcgacatct

SEQ ID NO: 151796 - DNA, 2235 bp, Zea Mays
ggtctctcctgtcggctgccaccgtcgccgagaacctttcttttttgtggattcctaccactcccccgacgaggcaagcagcaagcgttaattccattccttaattgccaatggcgaccgccttcgccagtacggccttgcggcgggcgccttgggataaactccacggcaaggaaggcatccgaagcctcgggggccttaatagcttcttcctcccgtggctgagactctggtcccgcgggctggtagggcatcggcatgggtggtcttgctgtctccgccttcgtgctgttttcttgggtgcttttcttgtcctgcatcttctcagtggatggactgtctaaagtgaggggtgttaacttgggaggatggttggtcattgaagggtggattaagccatcactttttgacgggattccaaatggggatatgctcgatgggacacaggtgcagatccgctcagtggtattaaacaagtatgttagtgcggccaatggtggtggctcaaatgtgacagtggaccgtgatgtggcctcaacgtgggagacattctggctttggagggtttcagataatgaatttcagcttcggtgccttggaggtcaatttttgacatcaaacagtgaagatggtttgatcttggctacttcaaagcatccattgtccactgaaactttctccattgaaaggaatgctagaagggttcatatcagacttctgaatggaggctatgtgcaagcgacaaacgatcatctgcttatttccacttatcaattccaaccaggatgggataataatttagcgacatttgaattggtgatcgttgccaataacttgcatggggactaccagcttgccaatggttatggccctgacaaggcgaagatggtcttagaagtatgtctttggcactcactttctttggaatttgctggacaaatcctctttactttatgcataacatcccttgactcttttgctttttaaggagcacagaagaagtttcattacagcaaaggactttgatttcctgtctcgccacggaattaatactgtgagaattcctgtcggatggtggataacacaagatccttatccaccttctccatttgttggagggtctttggcagccctggacctagcattttcatgggcacagtatgccgtgcctccaaactcttctttgcagtatttaatatccctgacctttcctgatgctatatttacttctgttggattagatcttatggtttgaaatgtataatcgatcttcatgctgctcctggttctcaaaatggaatggaacatagtgcgagcagggatggttctgtggcctggccctctcctgaatatatctcacaaacattggaagtcattgacttcctggcgacaaggtatggaggccatccttcccttttgggtattgagcttctgaacgaaccttctgcagctacagttactttagatgttcttgtgtcctactatatgaggggataccaaattgtgcgaaaccattcgtcaactgcatatgttattctctgtcaaagaattgggaatgcagacccaattgaactgtttcaagctggtattggtctttcaaatgtcgtagttgatttacactactacaacttgttcaatccatactttgccaccatgaattccagtcagaatattgattttatttacaagatgagagcaccacagttacaagaccttaagggcatgaatgggcctcttgtcttcattggtgaatgggttaatgaatgggacgtgcaaaatgcatctcagtatgagtatcagaagtttggcagtgctcagttggatgtttatgccaacgctacctttgggtggtcgtactggacacttaagaatgacatgatccattgggacttcgagtggaatattaagaataagtacctattattcagtggttcatccatgctgaagacaccaagcttcctgctgctgctagcgttaggatggggaattcacctgatcatcatgccaagataacctggattctaggaactaagctgattggaagtgtggatgtacacatagactactcaaatccgaattatagttgaggcaaaattggtgcatatatctttcttatataaagtcatgtagttgctcctaggtttctccagtttttttatgaaaaaaaaagaaatcctggattactcgaacatctcgtagcacaccttcgtaatgcaatatgttactcagctgacg

SEQ ID NO: 151797 - DNA, 414 bp, Zea Mays
atgcggtcatgcctccacctccgcgctaccccattctcggcagagggcgtaggagcatgtgactcctccctgtattcgtccgacaccagcttcaccaccgactcgcgcagtggttattgcacgtccacgaggacgttttacatcatgcacgcaccatcgttttcgccgtcgtcggacgtctcgttcgtcttcccgaccttcaccctgttcttcctccccaacctgttgcccccgcccacggtcgcagccgtaagccgaccgacgctcgtcgacacgggtacggggcgagtcggtcatgctcctggcctttgtctgtgcgtgccgtcgaggaggacatggtggcgcctgccacgcttaggttatcttggcgatgaggagtccaggcctgagatattggacaaccaaggcccgtag

SEQ ID NO: 151798 - DNA, 568 bp, Zea Mays
ctccgtggcctccatgaaaaatccgggcaccaaaccctagcacgtcgccgcttccacagccccgccacacctcgaccctcatgctgctcgtctccaaccatggcgagccacggctcgtgccgtccgttgaatcctctcgtggggtctacaaatgaagctctcccaacaagagactgcacactgcgcggctcttactgcaatacgagatactgtactactgtggatggtcgagaagcgagcagagcttgacggtcgttcgccgttggaacgttcgtgtgggcgacactgatggcatgatgcatctgtcagcaagatctctagttttttcacgctgttgaatcgacaggtatagcagacaaatacagaaaaagggctggcctggttaaaaaacggttcaggttagcaagcagtctggcccggttcacaatcgaaaaagggcccgtatcgagaagttagcttcacgtttgagagaaggtgtatgctctgcttccaatccagttattagctgcagcttctccttgtgtcgtgtgtggaatgtttgcttcagtacattaactttctttcttct

SEQ ID NO: 151799 - DNA, 732 bp, Zea Mays
ttgtatttaacagtcaagactggacctagttttactgaagctgctatgggacgcctagcacaagggactaaagttttagcagaaggaggctatgaaaaaatatttaagcagaccttcgaggttcttccagacgaggagctgaaaatatgctatgcgtgctatctctcaacatcagcaggtcctgtcatgggagtcttgtatatttctacagcgaagattgctttctgcagtgacaatcctctgtcatacaaagctggaaataaaactgaatggagttactacaaggtggtcattcctcttcaccagctaagagcagctaatccttcagtaagcaaagtaaatcccgctgagaagtacattcaggtcgtttccgttgaagggcatgagttctggttcatgggttttctaatgtacgacaaggctgcagccagtcttcaagaagccttggctagtgctcgtgagttgcaaccgtgaagacaccaagtggtgttctttccggttacatacatcagtttccacatctcgagttcaggctgggtcgctgggattcttctcctgtttcagatcctttttgctgaagcttttgacacagtacacccacaggcctgcatacgtgtcagaaatgtgtgccattcctgtcaatgttgtaatcatgacagatatttatatatatggaaaaacactgccgctgtccatttcgaatggatgacaaacatttaacgcaccatttgg

SEQ ID NO: 151800 - DNA, 1081 bp, Zea Mays
agggttactcccttcttagcatctagttatccctatcaaaatcaatcttcgttttgcacctcagtttatcatatttggactgaattgatttctatagttcatcattgttagttttacatagatttataaatttgacttactacatgaggataggtaaacctttttagggtcactggtaaaaatgtcattggatttgaggatgagaatggtgatgctcttcagtcccattctgttctgaaaaaatgtatattaaattctaaacaaaaaaggtgacaactgcagtctggttagtttggaagccttgcacatttgtgataaattttagtttgaatcataaaagaagtggcactggtaaatacaagttgattttatggtcacgaagtcacaaggcttatgttaccatctctctaatgaggacatggtcatggtgctttccctatacatggacgaaaccaggttgcattctgaagcactgactgtcacttaagaagatgcatgctaatttgtcaacacctaacttggatcttttgttccagttgttgcttgatccgttttgatgttcaattcccagtaggacttcaattaaacagatgtctgttcattaaaaatgttttcttcgctttccaaaaaacaggtggtcattcctcttcaccagctaagagcagctaatccttcagtaagcaaagtaaatcccgctgagaagtacattcaggtcgtttccgttgaagggcatgagttctggttcatgggttttctaatgtacgacaaggctgcagccagtcttcaagaagccttggctagtgctcgtgagttgcaaccgtgaagacaccaagtggtgttctttccggttacatacatcagtttccacatctcgagttcaggctgggtcgctgggattcttctcctgtttcagatcctttttgctgaagcttttgacacagtacacccacaggcctgcatacgtgtcagaaatgtgtgccattcctgtcaatgttgtaatcatgacagatatttatatatatggaaaaacactgccgctgtccatttcgaatggatgacaaacatttaacgcaccatttgg

SEQ ID NO: 151801 - DNA, 669 bp, Zea Mays
ctccgtcccatccctcgcctgccttcgcacgggtgcgccgcccgttcgacggccacgccgcgccgcgccgctcagctgccccggcaccggcccttcctcgccgagctcgggatcgccgagcccggtgacctctcagccaagcgctccagacggttgcagtctccgcagtccgagcccacctgttccccattggctcagtgcgcccccccccatgggtcggttcaggtgtctcaggcatgcgtcgaggttccttgcgcttcagtcaggcgaggtggtcctgcagaggcgcgcatggattcagccgaacacatcttgcagttctactggcatctatattagcaataagttctatgatcgattcatgttgataccatttgtatggagccggagttttcatgctacagatcaccgttgttcgaaacacaaggactactacaaaattcttggtgttcccaaggatgcatcgcaggatgacatcaagaaggcatttcattctcttgcaaaaaagtatcatccagacacaaatagaggcaatactgctgcaaaaaggatgtttcaggaaataagagatgcatatgagacactacgggacccttcaaagagggagcaatatgacatgctattttctagagggtcaagggtggagtttgatgggtcctatcagacaga

SEQ ID NO: 151802 - DNA, 107 bp, Zea Mays
ggttcatttgaggcacttgtgtaaagaagatgaatgcagaaggcgctgctttacaagggtctagatgggtgtggttagctttggataaagtggcaaaaaaaactttc

SEQ ID NO: 151803 - DNA, 2132 bp, Zea Mays
atacaatccagtcaacctcctcatggaataaatttggaaccggtagtagagacggtagaaactgaagctcaacctagtaatgtgcagcaaactattcctagtgttgtacctaatcagaatggagttatagctgattctggcctttgagttccaattgaggatttggatccaaatattagggatgctataaaaagagagcatattttgatgggtccatgtcaaccaaaaggtcatagttatccacaaagaataatatgtgggcgcaatcgacgatttcagacagattggtttaataatcatgcatggttggagtacagtattgccaaggatgcagccttttgtttttattgctacctctttaagcaaccaagagctgaaaattatggtgttgattccttcacaaatgttgggttccgtggatggaaggatggtcgcaaattaattgagggacacgataaaggtgttgctcataataatgctagaagacattatgaagattacaaaaatcagaggcaaagtgtgccatatgctatgacatctggtgtcaataaggtggacaatgaatataaaagtcgtatgattgttatacttgaagttatcagatttcttttgcttcaggctcttgcatttcgcggacatgatgagtcctcttcctcgagcaacaagggaatttttttagagatgatagaatggtataagagcaaggataaaaatgttgcacatttgctccgtactaattaaatgacttcaccgtcaattcaaaaagacttgtgcaaagcttgtgctgatttaaccagcaaagctattattgaagatattggaggtagaaacttttcagttcttgttgatgaggcccgagatgcatctataaaggaacaaatggctgttatattgaggtatgttaatgcacgaggtcaagttattgaaagatttcttggtattgaagaggttgctgacacgacatcgtattctctaaagcaagctttggattctatgcttgcttttcatgggttgtcaatatccagattgcatggacaagggtatgatggggcatcaaatatgaggggagaatttcatggactgcaaagaagaatattagatgagaatccaaccttgtgcgacccggggatactcgatggggttcacatcataagaccttatgtcgtattcttcacatgtgggatgcaattctagaggtgttagagattgtatccgatgatgcctctagtggggaaaagaaatacacagcagctggattgttaaaacaaatggagagttttgagtttgttcttgtactgcatcttatgatcagactattgggcaaaactaatgatttgtcacagtgtttgcaaaagaaggatcaaaatattgttcgtgctatagggttgattgggacaacactgcagaaaatgaatgacatacgggagaatggttgggacgagttatttgtagaggtagaaaacttttgtcttctacatcacatcattgtgccaaagatggatgatacattaactgttcgaggtcgctcaagaggtcgtggtggatagttggtaacatattttcatcacttcaaaaatgaaatatttaatgttttccatgaccaaataattgtggaattaaataatcgttttgttgaaaggtccactcaactattgagatgcattgcttgtttagacccacggaattcttttgcaaactttgatgaagataaattaatagaacttgctcaaatttatgttgttgacttcacccaatatgattgcattgtccttcgcaaccaacttgagatgtttgttaatgatgcaagggcggatgcaagttttacatgttgcaatgaccttggagatcttgctataaagatggtgcagcctgatagacatacaacatttcctttggtctatcgtcttgttgagctggctttgattttgccggttactactgccacagttgaaagagctttctcagcgatgaaaattgtaaagactgatttgaggaataagacggggagtgactggctcaatcataggatggtatgatatattgaacgagacattttttcaagtattccaaatgataagattttataccattttcaagaaatgaagtcccgcatgaaaatgttgcctaaacaa

SEQ ID NO: 151804 - DNA, 104 bp, Zea Mays
tctagttaccgtgggaaaagaaagagacaagagctcttagtccgacaagacaagagaggatatgcctccaaaagcttcttcaatagcagtggattgaattcatc

SEQ ID NO: 151805 - DNA, 952 bp, Zea Mays
ggtactaagagtcctctcactaccaaccagcagacatcatcatctggctgggtcttgccggtatcaacaacgagaaagaagaaccaaatggaaacagcaactaactatggctcttggcccagacaacgtcctaggcgtaggggagatcaaaacaagaagtcacgcctagacgacgacgcccgtcctgggctgcactggcgagcgatcccagtccgcggcagagaacaagacagcaagcgagcgtacctttgttcgcttcttttccaccaagcacagaagtttaaggagaactgtaggtcggtggctacctaaggaaactccgattcgatccgccccccggctgggaggcatctacctcatcccgatcacaaggagaggttcaccatgatgggggggtcaggtacttgaattcttttcgttccggaaagaattcaatgcataggggaccatccttttttttgcggcatgctctctgatttacggattcgcagggggccgagggccaaccttagttgactgacaatgacaaaggcttgcgaaacaaagtagcgcctttgaaatggaatcttaattaagtagtcgtctatcagtggtgcgaagcagctttgccccggggagcgaaaggttatacctttgtaagcgaacaacggttcttctatgtagggtattcctcctttactctcttaattaacgtcgagctaagtgactttgtgtagcgtagtagaatgaaggctacgtacgcaccgacactctcttatccctaagcctcttctctaactcgctcgcctacaaaaaatagtaggcgaggcactcagccgctgactttgactgtactgtagtgtagtgtagtatactttcgtcgccttttcttttagaaccctttctcatgttctttcattcatcaagtaggcgaaccgtcaggtccttagtagcgttgacaaagaagaagagc

SEQ ID NO: 151806 - DNA, 949 bp, Zea Mays
gtcatagctttctttgtaaatgatctctcctctgcatcgctggaaaagttctcaaccggattatcggagaacaaccgcactcaaccaagaacttccccttcccccatttccctgtcttcgctattttgcttttctactgcttgctccccgagctccctatccgagtaagtcctaccttcctggttggcaagtagtaaaccctacttccctttcaaatccttgatttgatcatcttcattccatggtggacggaggaaaactagttacaaatgttctttgctcgtgatactttgaattgaaagaggaacgcttgcaacgatagcccttgtcaagcaaagcatcctagtgtgaaaaagcaagaaaatgcactgactggccctgccttcagccgtactctcctttcatctgggtgggtactagtttgaaagcaggaactcggaaaggaggcacggttttagcaagaagcaaggaattccaattcataggaaagccagcccttcgaagaaaacggaagtgctagcaacgaaagcagcagggccacgaatcggattaacagatagggatcaggttgttgttgaagttcagtaaagagcagggccaagccaagccggattagcagaagaaaaaaagaaagagaagggatacccttgcatcccttctctttccattttcaatattacagattatctaatctttgttgctgcttaggactaggcgaacatcagatgagatgaaagctagtactacctcatacgatacggtgaagaaattctaatctgctctagaaaaccacttttcatgttccagatatagcacgtaggttgtgactccacatggggagctgagggacataacatgataatagaaggtcatcctaggtagagctgtagcacagatccacggagcgggaggtaagaggaaaagaaaagaataccaccataaaagaaaa

SEQ ID NO: 151807 - DNA, 82 bp, Zea Mays
atccatatttggcttaggtctagcatgccaaatggacagccaaaatggcttctttgtttcataccagattatcctatgctta

SEQ ID NO: 151808 - DNA, 2286 bp, Zea Mays
ccgtcccatgccattgcccgccacaaacacaaccgaacgacgaagcgtccgacgatccaatagggccggctagcaagtgcatgcacacgcgtagcagctaataactgcctgtgtgacatatagagaggcagctaccgactaccgtacggtcgagagagagatagcttagatcgatggaggcgaggaggagcagcgcggcgctcgtatccgtggccgccgccgccgccgccgtcgcgctgctgctggtgctcgccgccgagccgtcccgagcggagcggttcgtcgtcggcgacgcggcgcggtggacgtgggggtacaactacacggactgggtcatcaggaaggggcccttcttccagaacgacacccttgtgttcatgtacgacccgccgaacgcgacggtgcacgcgcacagcgtgtacctgatgcgcaccgccgcggactaccagtcgtgcaacctcaaggcggccaagctggtggccagcgtcacgcagggcgccggctccggcttcgagttcgtgctccggaagcgcaagcagcactacttcgtgtgcggcgagcgcggcggcatccactgcaccatgggccagatgaagttcgtcgtcaagcccaagagctctgcctgccgcgacgactgactgacacgccgccggacgccgatgtcggtgcgcgtacgtgtggcctcgatctcgtcctgtctttgttcgatctctgcatgccgccttctcagtcagatcattcctcctgtccaattgttgcgccctgcttgtaagttattattactatcagtcggtgtggatttactcagtgtgttgacgtatgattcgtgctgtctgatacaccagtgtttatggatgaaaaggttggttcaataaattagtgagtctttgtttctgaagtctcaagtgtcgttactcgttaagagctagtaatttcacaactccattttttcaagagatttttattttcctaggagaaaataaattaatttcctctcggaaaatagaaactgtcaaaagaagtcaggcacacttcctacaaatacaagtcgctagagaggactccctgaaaatggttgcgggtttcagccaaacttttttttagcagaaatggttctgctgaaggtcaccggacccagctgattctgaagtctgtttgccaaagcctaggcacgctctccgtcatcctgcactacctctacaatgacaactctcaagcaggtccatcgcttccactatccgtccatgtgacggcatcagctctacaccccttcttcatctccaaaacaagattcatgcccccatccacacttccatgcctgcagaggcagccgatcagcgcagtgtagtgtagctcacagcatctagcaccacaccagcattcctcatctcctgaaacaccgacctcgctgcctcaatgtctgctagtgcccattaaccagcgcgacataattgaaggcactgagctcacattcgttcttcctcaaaattccaaagattgtgcgagacttatccacctgccggagtctacagaacccaccgatgatcacattgtacagcagctgatcagggacaaatgcggtccttggcgataatctcctccaataagctcaaagccttccattatcttaccccccacggcagagcccaccgatcagtgtttaatatgtgaccaggctcggcgggtgtcctcgcgcatttcgtcgagcactttgaagacgggctccaactcgccgtttttggcacagtgcctgatgaggatgttgtagacgcatctcgcctgtgttcttggagcctgtcgagggcaccgtggcagcagccgcggaggagacgaggcggtcggtcgaggcagactgcgccttgtgtgacacgcggctcgtcagtcgtcactcgtacgaatcagcgcggcagcaagcggaggagggcgagcgcgtggtcgggcgggaggcggcggacgagcggaagcaactgcagctccaggaaccggcagggctcggaggcggcggcgcgcgaggcggacgaggagcgccgagaagatggccggcgtctgggagaagccgcgctgggaggaggccgcgttgaagaggtcgagcgcgcgctccggggagggggaggacgcgatgaggtgcgcaagttccgagtggtggaggtaccgcaatgttagcgtagtgggtactgggtagagaggaagaggattggagacgaagaaggcgaacgagatgcagagaagagagatagtatgtgacggaatcagctttctgttctttgttatcttcctcccgtatcg

SEQ ID NO: 151809 - DNA, 760 bp, Zea Mays
tccggatcacaaataggtgcggctccatcacttcgctcagaaggtactccatcccggtcatcttcctgcgaccacaacaccaatcgaataccaataccaaaccaaaaaaatccagacgaattggtgggagatggggagccaagctaagtgttgtacgtcagatgagacatgtcgagggggtggatttggcgcgatcggagggactcgttgttgcaggtgatgtcgtagaagggggagagcgcgaagtagtcgaagacgaggttgcgatcgagcgggtaagtgtcgagccacagctggtcgcggaagcagatcccagtcatgtccgtacccggcggaggcaggagcgccaccgcgccatcggggcccggcgggggcagcggcgtcgccgacatcgccgtgcgggaagcgctgtactacgactccacgagcgagagacctcggcccaccaaatcgaacggaaaagtggggcggacgcggcgctgtcgatacgtcggtgggcagaaagccaagggcggcgtcgcggggagcggagggctgacaacgacagcgcgggaagcgtgcggcgtctcggggagcggagggctgacaacgacagcgcgggaggcgtgcggcggcaggccgagggtagtggcgcagggagctgaggtggttcgtgtggcggcgtgggggggcagggagtgaggacggcggtcggcggcgctgggggtccgatcccgcgagatgcgagtgacggagaagagaaatagaagagagagaaaat

SEQ ID NO: 151810 - DNA, 1714 bp, Zea Mays
tgccgatgctttcacaatcccgtgccactgactaccgccctgctccgagcgataactgcgtgcaccggctgtcgggaggcgcaagccctacactcactcgccttcaagacggggctcgtgcccgacatggtgatcagcaccgccttgctgaccagctacgcgaagcgtggccttgtggctcccgcccagaggctgttcgacgaaatgccgcgcagagacgtggtcgctaccaacgccatgctcgccgcccttggcgccgctggaagggtcacagacgccggggcgctgttcggccggatgtcggacaggacgccggcgtcgtggaacaccatggttacgtgctactgcagggccggcgacctcgccgcggccagggacgtcttcgaggccagcctccgcgccgcgagcagcagcgtcgtgtcgtggaacgcgatgatcgacgggtactgcagggccgggcggatggacgcggcgcgggagctgttcgaccggatgggctcctcgctgccggacgtcgtcacctggaacacgatgatggccgggcacctgcgcagaggggacccggcctccgccatctcgatgttccaccttctgatgcgcaggcagcgggagggggagcagaggctgagacccaccaacggcaccatggccaccgcggtgaccgcgtgcgcgcgggtgggggacctggcactgggccggcagatccatcacctcgtccagcaggcggggatatggatggacgccgtgctgagcaacgcgctcatggacatgtacttcaagaccgggagcgtgggctgcgctctcgacgtcttccgcgccatgccctgcagccccaacctcttctgctggaacacggtgatctcagggctcggaatgaacggccgcggcgaggacgccgtagctgcgttccacgacatggtcgaggggagggggagggtgaagaatgggagcagcgtcaggcccgacggggtgacgttcgtggcgctgctgtcggcgtgcagccactccggcctggtggtcgaggccagggagttcttcttccagatgctgccggtgttcggcctaccgccccagcccgagcactacggctgcatggtggacctcctgtgccgcgtgggccacgtggacgaggccgcgctgctcgtgcaggcgatgcccggccgccccaacgccaaggtgctcggagccctcctgctcgacgcccacgtcctgcagcggtggcaggaggacggtgtgaggctgggcgagtgggcggcgcggcggatatcggagctggacctccacgacggcgcggcgtacagtctgtccaacgtgtacgcgtcgctgcagcgatgggatcgcgtcgaggaacagaggaggcaattgagggccgccgtgagacacgccaagggcccgcgccgcaagcggcctggccgggcttgctccgggcccgcgccaccggcctggcttcgattggcagtcaaggcaggcatgcagactgacgatcgatggagtgtctgtgactcaccagcatctcaaaaaccaaatgtcgtcactggctgtccggatcccctgtcacgcaacgcaaagcgcgcttcttgtttgaattcgtgccgccaatcaactagaacagcaggcgtgcatagcttattgcacgcttgagatactcctgcactgtacaggataacactagttggagaagacaacaggcacccggaggccggattaccacttc

SEQ ID NO: 151811 - DNA, 1143 bp, Zea Mays
acgggcagcgatgtgcaagcccagggccacctccgacgcgttggcgtcgcggcccgtggtcacaccttctccccgccggtcctccgggaagcggcgtcccgccgcgacaggattctcctcgccaagcgcgcaggcggggccgccgcctccaccgctcactggagctgttccctccgcggccgcgacgcagccctcttccagctccagcgtcgccacggcgccgcggccgtgtggatgccgccgtactagccaggatcggcaggtagcaccacaccagcctcgcgcggctgctgggcgcgtgtcccgccggcgcccacctctacctcgcctacgagctcccgccgggcgccgccacgctggcggtatgcctccgcagcacgcgcagccccagcttcacggccctccgcacctgggtctcccgcgtccaggtcgccgccgacgtcgcccaggggctcgagtacgtccaccaccacgcaggcgccgtccacggccgagtctcggcctccgccgtgatcgtgtccaacccgggcctccgcgcgcggctcacccacttcggtgcggctgaactcgcggcccccgccgacgccacgagccgtcgcatgaggcggacgtgtactccttcggggtgctgctgctggagctcctctccggggaggagccggcgaggtaccgcttcgacaggggcaccaaggagttccagcgggtgtcggtcctcgagacggctgctgtggccgcagtggaaagcggcgtgaggaattgggtggacaggagctggggtactcgttcccagtgtcggccgcggagaggctggtggaggtggcgctccggtgcgcagcggcggaggatcggcccgacaatacgtgggtcgcggggaaggtgtccaatgtgtatctggagagtggagtcccgggtctgagagcagaagcttcaagtgcccaccgaattctccgtgtcggtggtgccgcggtgaacccaagctccggcccgcaccgacatcgccggcggtgcgaattacgattttttaggcggtagattggtaggagtggggttgggaaaggtagtcaaaccaaaatttgttgcaacatatcaaaattctcgtgacatttcaaggtttccaacaaaatgtcttcgttttgcactttt

SEQ ID NO: 151812 - DNA, 1660 bp, Zea Mays
cctgttacaacgaacctgcgtgaacgaaaagtggatgacggaaagggtgacgcaacgcgaaggggcacgagaacaatctagacactcactaagactgaaacaccacgcctggacctgctggagcgcccactccgacacgtataaatatacagcgacaccccttccgggagacgcagagcagaagcaaagcgagcaacagagcagaagcaaagcgcagagctagcaagtgaccgaccgagagcaaataggcaaggcaacgcaggcaagatggtgcagcaagccgcgaaggaggtgatcccgctgctgacgccttacaagatggggcagttcgagctctctcaccgggtggtgctggcgccgctgacgaggtgccgctcctacggcaacgtgccgcagccacacgccgccgtgtactactcgcaacgcgccaccaggggtggcctgctcatcgcggaggccacgggggtgtcggccaccgcgcaggggttcccggagtctcctggcatctggacgcaggagcaggtcgaggcgtggaagcccatcgtcgacgccgtccaccgcaagggcgccatcttcgtctgccagatctggcatgtgggcagggtctccaccaacgagctccagcccaacggcgacgcgcctatctcgagcacggacaagcagatctcccccgacgccaagtccggaacggcgtactcgaagccgcgccggctgcggaccgacgaggtccccgggatcgtcgacgacttcaggcgggccgcacggaacgcgatccaggctggtttcgacgccgtcgagatccacggcgcgcacgggtacctcctggagcagttcatgaaggacagctgcaacgaccgcacggaccagtacggcggcagcctggagaaccggtgccgtctcgccgtggaggtcgtggacgccgtcgtccgcgaggtgggcgcgcgccgcgtcggcatcaggctgtcgcccttcgtcgacttcgtggactgcgtggactcggacccggtggcgctcggccactacatggtgcagcagctcaacaggcatagcggcttgctctactgccacatggtggagccccgcattaccgcccacgggcgcaggcagatccctcacgggctcttgccgttccgaaaggcgtttcatggaacgttcatcgccgccggtgggtacgatcgggaggaaggcaacaaggtggtggcagaagggtatgctgacctcgtcgcgtatgggaagctgttcttggctaacccggacctgcctaggaggttcgagctggatgtggcactcaacaaatacgaccgctccaccttctacacgcaagatcctattgttggctacacagattaccctttctttgaagaagaagatggcaagaatgagaggtgaaatctgataatgtggagggttcatcaagtataagttcgtcattatttccaccattcattattggtcattgtggtggagtcattgtgtcatgttgtttcattctgtactagtgtggtgtgaagtgaaataaatctatttggtgaaattgttataaaataaattatagacttgtcggatttacactctattgttaaggggctatttgtatggaggtatatcagtttttagacgcaacctatagactctgttcgtgtgctattgtttattggct

SEQ ID NO: 151813 - DNA, 1588 bp, Zea Mays
cactccgacaactataaatacacagcgacacccttcttccagtagacgcagaacaagcagagcgagaaaccgagcaaagctagtaagagcagagagctgcaagtgacctgcggtgttgcatcacatctgcagcagcagcacgccggcaagatggtgcagcaagccgcgaaggaggtgatcccgctgctgacgccttacaagatggggcagttcgagctctctcaccgggtggtgctggcgccgctgacgaggtgccgctcctacggcaacgtgccgcagccacacgccgccgtgtactactcccagcgcgccaccaggggtggcctgctcatcgcggaggccacgggggtgtcggccaccgcgcaggggtacccggagactcctggcatctggacgcaggagcaggtcgaggcgtggaagcccatcgtcgacgccgtccgccgcaagggcgccatcttcgtctgccagatctggcatgtgggcagggtctccaccaacgagctccagccgaacggcgatgcgcctatctcgagcacggacaagcagatctccccggacgccgagtccggaacggcgtactcgaagccgcgccggctgcggaccgacgaggtctccgggatcgtcgacgacttcaggcgggccgcacggaacgcgatccaggctggcttcgacgccgtcgagatccacggcgcgcacgggtacctcctggagcagttcatgaaggacagctgcaacgaccgcacggaccagtacggcggcagcctggagaaccggtgccgtctcgccgtggaggtcgtggacgccgtcgtccgcgaggtgggcgcgcgccgcgtcggcatcaggctgtcgcccttcgtcgacttcgtggactgcgtggactcggacccggtggcgctcggccactacatggtgcagcagctcaacaggcatagcggcttgctctactgccacatggtggagccccgcatggctaccgtcgacgggcgcaggcagatccctcacgggctcttgccgttccgaaaggcgtttcatggaacgttcatcgccgccggtgggtacgatcgggaggatggcaacaaggtggtggcagaagggtatgctgacctcgtcgcgtatgggaggctgttcttggctaacccagacctacctaggaggttcgagctggatgtggcactcaacaaatacgaccgctccaccttctacacgcaagatcctattgttggctacacagattaccctttctttgaagaagaagatggcaagaatgaggagtcagtctgatcacaactaataatgtggagggttcatcaagtttgagttcatcattatttccaccattcattattggccattgtggcggagtcattgcgtcgtgttgtttcattatgtactagtgtaaagtgaaataaatcatgtactagtgtgaagtgaaataaatctagctatttcgtaaaattattataaaataaattattactttttctagatcatccaatttggagactcgtccattccaaggagattttaggccacttgtatctgttcgtgatttccttcgctccggaagattacaacggtttgaatcctt

SEQ ID NO: 151814 - DNA, 562 bp, Zea Mays
cccccttgtgttctgtctcgcgctgacccatctgggctgggacacgcagcgacaatttactcgtcggtccagggacccccccggggtcaaaatgccgacaagttttttctctatttgctaggtgagagatgagcttgaacaattattggatgatgatgacgacatggctgatctttacttgtctagaaagttggctggggcatcttcccttgtcagtggttctgtcggaccaaactcgttccctgcatccccaactattggctcaaaaatatcaagagcaagcagagccagtgcaactactgtgcctggaaatgagaatgacgttgaagagctagagatgttgctagaggcatatttcatgcaaatcgatggcacactaaacaaattaacaacgataggctatgatctatttctgacacattttttgctaatggcttccaggaaacgacacaagtttggtgaggtgatcgccaaatcttgcctggagaaagggatctccaaagttgtcctagatcgaggcagattcctctaccatggcataaatgacagaactcggtgctag

SEQ ID NO: 151815 - DNA, 785 bp, Zea Mays
aggacgggcaggaggtggagcagcaggcgcagaggatgcacttgtacatgccatcgagcttggcccggtcggccttggtctgcgggatctccttgccctgctgcgggggctgatccttgcacttgagccatggctcgatgctccccaccgtcggggcaccatcagctcctacggactgcggcgacgcggtggacgtggatccgaggacgctacggcagcggacttcatcttggcgtggacctcgaggtcgacgtcgatgcagaagaggatgtcctctccggggaggtgggtcgacggcagcgagtacgccgagtagcgcggtgccgacggcggtgcggggtccgacaccatcgggcggtcatcgggagctcagcaacgaccatgctcgcgacacagctgctcctgatccggtgatggggttcctggttcctggacgactccttcaactgggaatgggggcggctggaagtgagcgaggatggaaggggagcgtggcatgggggcgacgatggaaggcagggctgtgaccttgcatacgacggaatcagggcgccgaagcgagatctgcgggcgtggctggcgggcggaatcagacgggcgcggcgcctggtgtgggagagggaaataggattttaggggctggaaatgccggctgccgctgccgcgcgcggagggggtggagggcgttgatggcggcttcgatcacggcttcagggagcggagctaaggggaggatgtcgggggcagaacgtccaccctgtgcacgcctacgctgcattcttaag

SEQ ID NO: 151816 - DNA, 747 bp, Zea Mays
gcagcaggcgcagaggatgcacttgtacatgccatcgagcttggcccggtcggccttggtctgcgggatctccttgccctgctgcgggggctgatccttgcacttgagccatggctcgatgctccccaccgtcggggcaccatcagctcctacggactgcggcgacgcggtggacgtggatccgaggacgctacggcagcggacttcatcttggcgtggacctcgaggtcgacgtcgatgcagaagaggatgtcctctccggggaggtgggtcgacggcagcgagtacgccgagtagcgcggtgccgacggcggtgcggggtccgacaccatcgggcggtcatcgggagctcagcaacgaccatgctcgcgacacagctgctcctgatccggtgatggggttcctggttcctggacgactccttcaactgggaatgggggcggctggaagtgagcgaggatggaaggggagcgtggcatgggggcgacgatggaaggcagggctgtgaccttgcatacgacggaatcagggcgccgaagcgagatctgcgggcgtggctggcgggcggaatcagacgggcgcggcgcctggtgtgggagagggaaataggattttaggggctggaaatgccggctgccgctgccgcgcgcggagggggtggagggcgttgatggcggcttcgatcacggcttcagggagcggagctaaggggaggatgtcgggggcagaacgtccaccctgtgcacg

SEQ ID NO: 151817 - DNA, 2476 bp, Zea Mays
aacccctccgccgcccccgaaaaaacatataaaacagaaccctcgcatcctgtaaatggcgacacgcctcgcctccatcttctctgccgtgcgcagccccacctcagccccgccccacactctccgccgcgctctcccaagcttcagctaccggcgagcgcatccatctcagccccgcatgtcctcctcttcagccgcctcctccgcgccgccggccgccgagaagcctacagtggcgccgttcgggtcctggaggtcgcccatcactgcggacgtcgtatctggcgcggataggcgcctcggcggtatcgctctcgctggagatggacgccttctctggatcgagggccgccccgaggagaaagggcgtatggttattgtaaaggaggaggataatcctgtggatgtcatacctcaggaatttgcagcacgcacactggctcaagaatatggaggtggtgcatttgcagtcgacaagagtgttgttgtgttctcaaattacaaggatcaacgtctatacaagcaaacaataggaactggtggtccacctgtgcctcttacacccgattatggtgcgccaaatgtcagttatgctgatggtgtatttgatcctcacttcgaccgttatgttactgtgatggaagatcgtcgaaaggatagcttgaatcccaccacaacaattgctgctataaacttgagtggcagtgatgttcatgaaccaaaggtgctgatcagcggcaacgatttctatgcatttcctcgcattgatcaaaataaaaagcggatagcatggattgaatggagccatccaaacatgccctgggataaatcagaactctgggttggttacttcgccgaaagcggagacttgaccaaacgggtctgtattgccggtggcaatcggctgctgattgaatctcctagtgaacctaaatggtcaccgaaaggagaactgttttttgttactgacagagggagtggattttggaatatttataaatgggttgaacaaaccaatgaaattgttccagtgtattcactagatgctgaatttacgagaccattgtgggtttttggcatcagctcgtatgattttcttggaaacagcgaccacattgttttcagttatagacagcaaggaaagtcacatcttggtgtgcttgattgtgattcaggttctatttcattgcttgacatccctttctctgatttatctgatgtggttgctgcagatgattacttctatattgaaggtgcttccgcgagtattccacggtcgattgctaaggtgacattaaatgaaagcaaaaccaaagtagtcaatttctcaatagcctggtcgtcctcaccagacctcgtacaatatagacctttcttcagcacaccagaacttgttgagttccctacatccaagtctggccagaaagcttatgcctatttctacccaccatcaaatcccaattttcaaggtttgcctgatgaaaagcctcctttgcttgtcaaaacacatggaggaccaactgctgaaacacgtgcaattctggacctcagtgtccagtattggacaagtagagggtgggcatatgtcgatgtcaactatggaggaagcactggttatggaagagagtatcgggagagactattgaacaaatggggtattgttgatgttgatgattgctgcggctgtgcgagattcctggtggagagtgggaaagtagatgggcagcgcctttgtattactggtagatcagcaggtggatacactactttagcttcacttgcattcagagacacgttcaaggctggagcttctctctatggtgttggggacttgactctgttgagagcggagacgcacaaatttgagtctcattatatggacaatcttgtaggaaatgaaagagcttactacgagagatcaccaatcaactttgtcaaccagtttacttgtccagtcattttgtttcaagggttggaggataaggttgtgccaccagatcaggcacgcaaaatatacagtgccttgaaagagaaaggtttgcctgttgctttggttgaatatgaaggagagcagcatgggttccgtaaggcggagaacatcaagttcaccttggagcagcagatgttgttctttgcaagattagttgggaagtttgaggtggcagatgatataactccaatcaagattgagaacttcgattgatctcttggagagtggtgtccggttcgaagttttgttcacgtaacccgattatatgttcagtacattagccgttgcagtaccttttaggaatacgacttcatcttatttttgagggttgatggaaatctcttttttgcgctgtaacgatgaagtcaccttgttttctgttcggttctagaatgaaatagaacggaatgacactatcctttatttggttgatgagtgaaaatagataatttcataactataatacattcatacaaccatatatat

SEQ ID NO: 151818 - DNA, 2365 bp, Zea Mays
cccgaaaaaacatataaaacagaaccctcgcatcctgtaaatggcgacacgcctcgcctccatcttctctgccgtgcgcagccccacctcagccccgccccacactctccgccgcgctctcccaagcttcagctaccggcgagcgcatccatctcagccccgcatgtcctcctcttcagccgcctcctccgcgccgccggccgccgagaagcctacagtggcgccgttcgggtcctggaggtcgcccatcactgcggacgtcgtatctggcgcggataggcgcctcggcggtatcgctctcgctggagatggacgccttctctggatcgagggccgccccgaggagaaagggcgtatggttattgtaaaggaggaggataatcctgtggatgtcatacctcaggaatttgcagcacgcacactggctcaagaatatggaggtggtgcatttgcagtcgacaagagtgttgttgtgttctcaaattacaaggatcaacgtctatacaagcaaacaataggaactggtggtccacctgtgcctcttacacccgattatggtgcgccaaatgtcagttatgctgatggtgtatttgatcctcacttcgaccgttatgttactgtgatggaagatcgtcgaaaggatagcttgaatcccaccacaacaattgctgctataaacttgagtggcagtgatgttcatgcttacatatgctctatattgaagaaccaaaggtgctgatcagcggcaacgatttctatgcatttcctcgcattgatcaaaataaaaagcggatagcatggattgaatggagccatccaaacatgccctgggataaatcagaactctgggttggttacttcgccgaaagcggagacttgaccaaacgggtctgtattgccggtggcaatcggctgctgattgaatctcctagtgaacctaaatggtcaccgaaaggagaactgttttttgttactgacagagggagtggattttggaatatttataaatgggttgaacaaaccaatgaaattgttccagtgtattcactagatgctgaatttacgagaccattgtgggtttttggcatcagctcgtatgattttcttggaaacagcgaccacattgttttcagttatagacagcaaggaaagtcacatcttggtgtgcttgattgtgattcaggttctatttcattgcttgacatccctttctctgatttatctgatgtggttgctgcagatgattacttctatattgaaggtgcttccgcgagtattccacggtcgattgctaaggtgacattaaatgaaagcaaaaccaaagtagtcaatttctcaatagcctggtcgtcctcaccagacctcgtacaatatagacctttcttcagcacaccagaacttgttgagttccctacatccaagtctggccagaaagcttatgcctatttctacccaccatcaaatcccaattttcaaggtttgcctgatgaaaagcctcctttgcttgtcaaaacacatggaggaccaactgctgaaacacgtgcaattctggacctcagtgtccagtattggacaagtagagggtgggcatatgtcgatgtcaactatggaggaagcactggttatggaagagagtatcgggagagactattgaacaaatggggtattgttgatgttgatgattgctgcggctgtgcgagattcctggtggagagtgggaaagtagatgggcagcgcctttgtattactggtagatcagcaggtggatacactactttagcttcacttgcattcagagacacgttcaaggctggagcttctctctatggtgttggggacttgactctgttgagagcggagacgcacaaatttgagtctcattatatggacaatcttgtaggaaatgaaagagcttactacgagagatcaccaatcaactttgtcaaccagtttacttgtccagtcattttgtttcaagggttggaggataaggttgtgccaccagatcaggcacgcaaaatatacagtgccttgaaagagaaaggtttgcctgttgctttggttgaatatgaaggagagcagcatgggttccgtaaggcggagaacatcaagttcaccttggagcagcagatgttgttctttgcaagattagttgggaagtttgaggtggcagatgatataactccaatcaagattgagaacttcgattgatctcttggagagtggtgtccggttcgaagttttgttcacgtaacccgattatatgttcagtacattagccgttgcagtaccttttaggaatacgacttcatcttatttttgagggttgatggaaatctcttttttgcgctgtaacgatgaagtc

SEQ ID NO: 151819 - DNA, 2755 bp, Zea Mays
actgcgcgtgtgcgccactacaccaaccgtttggtccgccgttcggggattccttccgcactactacatagtagcacccgtgtggccgtgtccgagctacccacgcccccaacgccaagaacgtcgacgggcacgacggcatggcggcggcggacccggacaccgaagtgcaggcggagttcccacccctcgtccgccagtacaaaagcggccgcgtcgagcggttcttcaacctggccccgctcccggccggcaccgacccggccacgggcgtcgtgtccaaggacgtcgtcgtcgacccggccaccggcctctgggcgcgcctcttcctccccgccggcagccacgggaagaagctccccgtcgtcgtctactaccatggcggcgcctacgtgatcggctcggcggccgacccgatgacgcacggctacctcaacgcgctcgtcgccaaggccggcgtcctcgcggtcgcgctcgagtaccgcctcgcgccggagcacccgctcccggccgcctacgaggactcatgggagggactcaagtgggtggccacccacgcctccgcctccgccgccgcgggaggaggaccggccgccgagccgtggctaaccgagcacggcgacttctcccgcgtgttcctggccggggccagcgcgggggccaccatcgctcacttcgtagcagtccgtgccggtgagcagcacaagagcggcggcctcgggatgcggatcagggggctgctgatagtgcacccctacttcagcggcgcggcggacatcggcgacgaggggacgacggggaaggcgcgcaaggcgcgggccgacgcgttctggcggttcctgtgccctggcacccccgggctcgacgaccctctctccaacccgttctcggaggccgccggcgggagcgcggcgcgcgtcgccgccgagcgcgtgctcgtctgcgtcgccgagaaggacgacctcagggacaggggcgtctggtactacgagagcctcaaggccagcggctaccctggcgaggtggagctgctcgagtccatgggcgagggccacgtcttctactgcatgaacccgcgctgcgacagggcgcgggagatggaggagcgcgtcctcggcttcctgcgcaagtgagcgagcgacggagcgcgcgccttgctacgcgattgagatggaataatttcaccgtttccagatgtggaggcgtttgagcatgaggccatgagggtcttatttgtttgcttaagatcaattgattgaagtttcgaaatctatctcaccgcacttgtcatgtgtctaaatttaaaagaaatgaaaacgaacccataccgtctcccgaattgcaaatttgtaacctgttttacttgtttgttttagatttttgctagcttcttacagcgacagaaataaccaggctatttgttcggctagttttgagaaaataaactaataacgtgttcaggtaatacaaaaaactagccaaaaactaaaagtaggatgccagattaagtttaaaccaaaagaccgaatgctccgaatcaaacgccctacatttacagttcgagcatccgacagaagtacagaacgaatatattatttcgggatcgggaatcgaacaactttcggtgtactattacaattgaagtatccaaatgatatatttaaaatagcataaaaaactcttattcatcatctcggtggtgctcatttgttgatgaaagccacgatccgctcctggagctggacgccctgctccgagtccagcatgtcgaaatggaacgcgtggccgacgcccttagactcgaacagctcgacctcgccagcgtacccgctggccttgatctcccggtggtaccacagcgcgcgctccttgagcaggaagtcgttctcggccacgcacaccagcacgcgctggcacgggatccccgcggaggccctgcgcgccgcgtcgtccacgaacgggttcacgcgcgggtcgtccagccccaccgtgtcggagaccacgaaccgccaggtgcggtccatgaacggccggatctcggggccgaaggctatctcgccgcccacggcctcgctgcccgtgaagtaggggtgcaccacggcgagcccgcggatggtcacgccgtcggggagcgcgccggcggcggaggcccgcacggccgtgttgtgcgcgatgttggcgccggcgctgcagcccgccaggaacacgcgggacaggtcggcgtgctccagcagccacgggtcctcgccgccgccgagcgtcgccgcccaccgtagcgccgcccacgcgtcgtcgtacgccgcgggcagcttgtgctccggcgcgaggcggtagtagacggacacgccgatggcgcccgagcgggcgaccaggtcgttgaggtagttgtgcgtgcccggccgcgccggcgagccgaccacgaacccgccgccgtggaagtagacgaccaccgggatcttgccggctgcgccgggagggaggtagactcgcgcggaggcggggccggcgcggatgtccttggacacgacgccggtggctgggtccgtgccagctgggacggtgggggcgccgccggggcggtggatgcggccgctcttgtactggcagaggtagggcgggaagtcgaagacgacctcggagtcgggatccatggctgcggtcggcgaggaggggttggtggcggtggagtcgcccatttgggttgggggaggaaacgagctggctacctagcagtgcaacacagcgaggcgatcga

SEQ ID NO: 151820 - DNA, 1128 bp, Zea Mays
cgccaagaacgtcgacgggcacgacggcatggcggcggcggacccggacaccgaagtgcaggcggagttcccacccctcgtccgccagtacaaaagcggccggcaccgacccggccacgggcgtcgtgtccaaggacgtcgtcgtcgacccggccaccggcctctgggcgcgcctcttcctccccgccggcagccacgggaagaagctccccgtcgtcgtctactaccatggcggcgcctacgtgatcggctcggcggccgacccgatgacgcacggctacctcaacgcgctcgtcgccaaggccggcgtcctcgcggtcgcgctcgagtaccgcctcgcgccggagcacccgctcccggccgcctacgaggactcatgggagggactcaagtgggtggccacccacgcctccgcctccgccgccgcgggaggaggaccggccgccgagccgtggctaaccgagcacggcgacttctcccgcgtgttcctggccggggccagcgcgggggccaccatcgctcacttcgtagcagtccgtgccggtgagcagcacaagagcggcggcctcgggatgcggatcagggggctgctgatagtgcacccctacttcagcggcgcggcggacatcggcgacgaggggacgacggggaaggcgcgcaaggcgcgggccgacgcgttctggcggttcctgtgccctggcacccccgggctcgacgaccctctctccaacccgttctcggaggccgccggcgggagcgcggcgcgcgtcgccgccgagcgcgtgctcgtctgcgtcgccgagaaggacgacctcagggacaggggcgtctggtactacgagagcctcaaggccagcggctaccctggcgaggtggagctgctcgagtccatgggcgagggccacgtcttctactgcatgaacccgcgctgcgacagggcgcgggagatggaggagcgcgtcctcggcttcctgcgcaagtgagcgagcgacggagcgcgcgccttgctacgcgattgagatggaataatttcaccgtttccagatgtggaggcgtttgagcatgaggccatgagggtcttatttgtttgcttaagatcaattgattgaagtttcgaaatctatctca

SEQ ID NO: 151821 - DNA, 213 bp, Zea Mays
gtgagcgtgttacttaccgcgttttgcacggaggcaagcgaatcgatcgcagcctttgtgaaccagctgatcccaaccttcacccggtgctcatccgtgggcattctgaggcagtacacgagcttccgagctgcagagccaaaggtccttccaaggtcagcccttcaatgaaacttgctgttaccgcggcatcatttctaccgagcgtcatca

SEQ ID NO: 151822 - DNA, 168 bp, Zea Mays
ccgtcttctcgccttttcccaccgcgcctgtgccggccgcgacgcccccggccgctccgccccgccgcctgtgcctgcgccgcccatccggcgccgccctctacggcctcgccgccccgcccttcccaccgcgcccggccggcctcgccgcccatcccaccgcgcccg

SEQ ID NO: 151823 - DNA, 336 bp, Zea Mays
atgccgtacacacttccattcaccttttataacctgaagaacttggagctacgtctgaacttcggtgaaatgaactccattttgttcatgtttaccttgctaaggagctgtcgcaaccttcagggcatagaaatagaggctacgaggagtgcaagtttgaccttctgtgaggagggaggatacgtagatatgcagaacagactgcagataaagacaagtgtttggtcgtgcaaaacgctgctcgcgagcaggagcgaggagtacatgcttctattccggctgcctcccgacaagttacattcgattggtggtcgtggtgccagctccaatctatag

SEQ ID NO: 151824 - DNA, 1401 bp, Zea Mays
gccacagctattaaacacgcagcagccagccaccgccagactctccagtctccaagtccaaaaaggccaaccaaaatggagccgaagaactcccggttagacagcgcggccaccagcccgtacgccacggcgccgtccagcccgcgcggccggcgccttgtcccctccgagggagcggcgggcagcctattcctgacggcgccgccgtcgcccaacccgctcgacctcctgccgccggccaccccgcgcctcaccggcaccggcaccggcgccgccaacccgttcgatctcttccagcacttcaccagcgcgcccgccagcccccgccgcgccgcggccatatacgcgcgcttcgccgaggggaacgagagcggcggtgacgacgacggcgacggcgacggcgacgaggagtttcagccgcgccggacgtacgccgcgggcgggtcgtccgtgccgttcgactgggaggaaaggcctgggacgccgaagaggggacttggcggggccggggccggggccggggccgtggctgcggacgaggcggcgtgggccacagaattcgagttcggcaaggccgcaccggccgagacgcttacgacggccgacgagctcttcgagaagggcaagatcagggcttcgaagccgacgcccaagacggccgacgaacccaaggtccgtccgctgaagccgccgcccgggctgctcgacggcgggagcgtcccgccgtcgcctatgggtcgaggcggcatgcggcggaggagcagagcgagctccggtgtcgacttcgacccgttcaccgccgcgctgctggaggcaaccaaggcgccagcgccgtccccgctcggcgagcccaggaaaccggccacgcgtgcgcgtcccgtgccgaggagcgcgagcgccgggtggagaaggtggcggcggctcagcctcagcgacctcctcctgttccgaagctcatccgacggcggccgcgtcgacgaccaggaccccgacgtgaagccagtgcaacggttcgtcgtgcggcccgtcaaggaggcgggcgcgcaggcgcagccggcggtgacggtcaaggccgtcgcgaaaggcgacgacatgggcaaggactggaagcagcatggcaacaggaacgtggccgcggcggcggagagcgtcgccgggtgcgctcggctgagcccgctgcagcggctggccaaagtgctcggtgcgtactcgttgcaccaccgccgcgatatggcgtcgccggcaaacaaagggtgaaggatcgtagcgttattgttttgccgtgtttctctgcccggttattgttcatacaagagtacaagacgtatcttcgtttgcatagtgtgaaaccatgtccaagtgcaatttgcaacaaatagtgctcttcttattggtttctca

SEQ ID NO: 151825 - DNA, 316 bp, Zea Mays
aaattgctttggtctcccgcgtctccccgcgcgcacacaaccgctgctcgatctctccccgcccgcagcgacggcgcaggtcattagcggtcgcagtgagaagctcggtgacgcacgccgtcacggaaagcggcgcggcaggtacactcggctcacgaaaaccgctgctggatctctccccaacacatggatgtcgttcccgatatgactcagactcaaatactcaatgccaccgcgcatccgtctctgcgcatccgtgtctgtactgtccttctttatctcgaatccaattttcccaatcaaccttcatggcttc

SEQ ID NO: 151826 - DNA, 715 bp, Zea Mays
tctttgtttttttttattttctgtagagaagcattgaggtatagatagcttgatacaaacaagttcattccacgtatgacgcgccgatcgagagtatcattctttcgtagtgtgctacaaccttcgtccttcatgtcgatggcctatatagctatacgactagctagttgtcgtagatgcggcactcctcggagtccgggttgtccttgcagtacttctcgagcgggtcgttggcgttggtctccttgaggctgtcgcgggcgtggctggccgtggcgctgagctcctccacctcgtcccacgccgccgcgcactcggcgtcgcccttctggtcgtccgcgcacgtctcctccgcctgcttgatgctctccgacaccttgtcggagatctccggcggcgtggccggcccgctggaccgcacggcgaccaaccgcccgccgccgcggcgcgccgccgcggggaaccagacgacgcgcttggcgcccgccctcctcgggacgacgatcagcacgtcgccgccgcccgccgccgcgaaggtcgtcgtcgtcaccgggacagagaggctcgccaccgtcgacgccgccattattattcctgtcttggctagcttatagcttcctgcgtcacggtcacgatcgaacgaactcgatcttctgcgtgtgtgatcgtcgtcgggtgggtgtggtgtagtgtagtgtagtgcttcgcggttggc

SEQ ID NO: 151827 - DNA, 969 bp, Zea Mays
atggggaagtacatgaggaagcgcaagcgcaacgtggggaggacgacgccggccgcggagcacggcgtgaggacgcgtgcccaatccgacgccgtcgcgagcacagcttctgcggcggcggcggcggcgcccaagaggccgaggaagcagacgacggcggcagtgactgggaacaccagcggggcagcggcgccagggtcctgctacctgcacctgcggaccaggaggctgcagttcctgcccgggggtgagggcgaggtgcagcgtccggtgccgccgttgcctgcggcggcggcacagcggtcgtcgtctgtagcttccggggagccggtggagggtgccgggagctcgaggtgctccagcacggcgtcgtcttcggtggacgtcgtcgtcctggcggtggcaccggctagcgagaggggcggcggtgaagcggaggaggcacgcaacgacgacgacgactactgcggcgacgtcgagagcgtcgtcagcgactcggccgagtgctgccgccgcgacaggagggagacgacgccgtcgagccaggcacgggtagatcgtccctgcagcgacgaggagtgcagccaggccgcagacggcccaacgcgccaccgtcggcgacggaaggctttggcggccaccgcgacagccgcggtcgcttgcagagcgagggcgacgccaccggcagaagagatcgagcagttcttcgcggccgcggagaaggcccaggccgagcgcttcgcagccaagtacaatttcgacgtcgcacgcgggctgccgctcggcgccggccggtacgaatggaccccggtagccagcggttggtgacgacgcacgtgcgcgtgcgcgccggccggaaagctagcggcggtggcgcagaagaatgagtagctaggaggaaggagacgccactgggaaagtgggacgagcgtacagacgataaaaggactgaaggagagcagagacaga

SEQ ID NO: 151828 - DNA, 1754 bp, Zea Mays
gagtaatcctcgaaaaagaaaacaaaatccgcaacaaaccaaacgcgttcccgtctggccgtcgccgtctcctccacccctcacctccttctctcaaccagaacaaccaagtgaaaccgcgcaaacccttgctccgatccccctctcctcggtctcctcgacggaagtagtagagcaggggccgaggccatgtggcccggctgcggtgggcggttctactgggcgccggaatcggcgccgccggggcaagcgaggggtgtcgcggtcttgttcgcgtgggtgtggagcgacgaggcgcagctgcggccgttcgttgagctgtactcctcgctcgggtggcgctgcctcgtctgccaccccgacctcgtcgcgctatatctctctgagaaagcaacatctctggcaactggtgttattagtgagctggttaaggaactgagagtaaaacctgtgccaactgttcttgcttccttttctggtggctcaaaagggtgcatgtacaaggttattcagttactagctggaatatgtgaaggagatgcaaccatgaaggattatcggttagtgagaaactgtatctgcgggcaaatttatgactctagccctgtagattttgtcagtgatgtgggcacccagtttctccaaaagcctgctgttggaaatttatctcagtcaactatattacgttcatggatggcaaaggttctagcttctggcatggatactctcttcccaagcaggattgaagctcagcgtgcagagtactggcacacactatactcagcagcaggattgggtcctgttcttatattttgctcagaagatgataatcttgctccatgccatattatctgtggctttgcaaggcgattgattgaactaggcacagatgttaaacttatgaaatggagcgactcccaacatgtcggccattacaattcacatgaaattgaatacaggaaagctgtagatgatacgttgaagaaggctcttgttaccttctgccaccgaagccaactatatgactcaaatatggctggtgaccaggagtataagatagcgcactcagtgtgcagtctacacaatgctgcagccaattcaaatgagagcttaagaagggttgctaacagtcctagtgatcacttcttcttgccaagttcgaaggaccatgatgaatctcgggaacccagttctctaattgaggatcagaggcgccacatctcacatccaccctgcatggagcctaaaggagtccttggccaaatcctgtttgatgtttgtgttccaaataatgttgaaggatgggacattaagccgacagtgtccccgaatggacggccaacgtttgcttctgcccggcaacttggtccattcaatcccataaggtacttccggcgctcaagactgtagttttctgcaggagttgaggtttttgtatatatataaccgaggcaaggtggctagtagcaactctgagcaagattttacctatgtaagttccctgtaattgtttctgtttctgcttttgcaccgcttggcgagagaatgcacatatgctttgtatatcatatgagtgtgtgtactagaagggagatcctggacatatagtttctaggcgggttgcaaggtgcacgctaacattgtagccaaggggaatggattattatgttcctgtagtttcctctatatttcatgtttgtgaaatataattattgggaaaaaaaaacttatcttcatttttagcgatcatagtt

SEQ ID NO: 151829 - DNA, 507 bp, Zea Mays
gaccaccagagcagcagtagactcacagctcactcaccgtgtctcacactctcacacgtaccgatcgagcggaagcaaacaaagcacacgtacggggtcgtcgagagaggatcggaatcggatggcgttcatgcggtaccgcgcgctgccgcagggggagctgacggtggaggggttccgggcgtggctggcgcagttcgacgcggaccgcgacggccggatcagcagggaggagctgcagcacgcgctgcgcagcctcaacgtgtggttcgcgtggtggaaggcccggggcgccgtgcgcgccgccgacgccgaccgcgacggcggcgtgcagctcatcggggaggacgaggtggcccgcctcttcgccttcgcgcagacccacctccacgtcaagatcgcccagcttgggtactaactgctcatggatggatatgatctatgatcgatcggccagtaataacttggagcatgcccgtgggccgtgtcaagtctgtaatctgtatg

SEQ ID NO: 151830 - DNA, 1231 bp, Zea Mays
gccgcaatccgcaactctgcacttggggttgggctcaaccgaatcgcccccgcgccaggccgttctcgtcgacgccgccgaccaataaggagcctcgcacgccacgccaccaccgccgccgcaacccacgcgatggcgccaccggactccatctccacgtgctcctcccttcccctcgccgctgcgcccatgtccgaaccgacccccttccccttcgctgcgtcgccgcttccaaacccgctcgtagccaccgcctccttcctacagcaccacctctcccgtttggcttcccacctgaacgtcccgcgccccgccctcgctgccgcggctgcgcgcacgccgggcccccagggcgcctccctatctctctctctcgcgcccgatgaggtcgcgcgcgctcttaccggcactcccgtcttcactgtctgcaactccagcaacgagttcgtgcttgtctccgaccctgccaccggcctccgctccctcggcctcctctgcttccgttcggaggacgccgacgccctcctgtcgcatgtgaggacgcggcaaccggtgctaggcaagggggcaaaagtggtgcctattacacttgatcaggtctatatgttaaaggctgaaggtatcgcatttaggttcttacccgaccctcttcaaataaagaatgcactggagatgaaatcgggcttaactgcttttgatggtgttcctgtttttcagtcagatctgctggttgtgaagaagcagaagaagcgctactgtccagtatattttcaaaaggaagacatagaaagagaacttacaagggcttccaaaggttcaagagggtcagccttatctaagaaaattatggttggaagtttggaggatgtcctgaagaaaatggagataaatgaaagagattctggctgggatgatttgatctttataccccctgggaagagcctcaaccaacatatcaatgaggtatcagcatgattttgttccacggtgatagctcagagtttgaacagactattcactttaaatgctatgatggtcagccaaacgaaatatcaaattgctgcctgagcttttcctttggatagctattttcatggtcagctttgtcagggaaaattaactaaagtgatagaatatggctgtgaaacaattttcttgttgcttcgattcacaaaattaacacaggttacacaagaagatttgatgaagagtaagttgcgacattggtaaa

SEQ ID NO: 151831 - DNA, 97 bp, Zea Mays
cgttcagtttcaggtaacaaagaaaaataatttctcttgcatgatgagacaacaatatagatgcatctcttttgaatacatatttatgttctatcta

SEQ ID NO: 151832 - DNA, 261 bp, Zea Mays
ttctttttctttttttttctatttctattctcttctctagttcaagtttacaatattcaattcaaattcaaatttcctattttgaagttcaggttcccagtatcaaatatgatccaatttatgaatataaacgccactattttcgatgttagtatttttcctcctccagtgtcttcattccaatttcaatcctaagtttgattctgaatttcaagcatatatttgatgcatcaaacagaaatcctagcatgacaatgcaag

SEQ ID NO: 151833 - DNA, 1760 bp, Zea Mays
atgcagctggaggcgatggatggcaacaacaagcgagcgaggtggatggtcggcgccgcgctcaccgctgtcgtcgtcgtcgtcgtgacgaccgtgctcatcctcggcgggcgaaacgttggaggagccccggcgacggctagggtgtgggcagcagtagccagcttccgccaaggttccatcgatctctcctcctcgcctccggcggcagcgcgccacgacgacagactgtacaacggcctactgaccgacagcttcgacgaggaatcctgccacagcaggtaccagtccgccatgtaccgagggaagcccggacggcgaccctccgcgtacctcatctccaagctgcggcgacacgaggctctccagcggcggtgcggcccgggcaccaccgcgtacagcaacgccctagagcagctcagggcaggcagcatgagcaccatcgcgccaccggagtgcgcgtacatcgtctccatctcgtacagcgggctcgggaaccggatcctcgcggcggcctcggcgttcctgtacgccgtgctcacggaccgcgtcctcctcgtcgaccccagcaacgacatggacgaccttttctgcgagccgttccccggcaccacgtggctgctgccgccgggcttcccggtggcgaactacaccggcttcggcgtggacaccgccgagagctacgggaacatggtgaggaacaaggtggtcgtcgagagcggcggcgttgccgatgctgcttcgacggcgggacgacgactgcctctgcctgcgttcgcgtacgtccatctccacaacgacgccaccgtcgaggacaactacttcttctgcgacggcgaccagaggctgctccggcgcgtccagtggctggcggtgaggacggacagctacatcgtgccggggctgttcctcgtgcaggcgttccagggcgagctggaccggatgttcccggagcgcgacgccgtgttccaccacctgggccggtacctgttccacccgagcaaccacgtctggggcctcgtcacgcgctactacgacgcctacctcgccactgcgcagcagcgggtgggcatccaggtgcgcgtcttcggcgcgcagcccaactcgcccgagctgctggagcagatcacctcgtgcacgcagaagcagaagctgctcccggaattgcggctcgccacgggagagccgacgccgccgccgccgccggtgcccgcgtctcgtgccaggtctaaggccgttctcgtcacctcgctcaagtcgtggtactacgagaaactcaagagcatgtactgggagcacgccgcggccaccggcgaggcggtcagcgtgcaccagcccagccacgaggagtaccagcgctccggcgccaggtcgcacgagcacaaggcgtgggccgagatgtacctgctgagcctcactgacgtgctggtgaccaccggcgtgtcgacgttcggttacgtggcacaggggctcgccggcgtgaggccgtgggtgctgtacaagtctaccaacagctctgccgtgcccgatccgccgtgcggctgggacgtgtccatggagccgtgcttccacaaaccaccaagctatgattgccgcctcaagcaatggacggcggacatctcaaaggatgtgccgtacatccagcactgtcacgacttgacctgggggctgaaacttgttggtcggaacaaataggatatgtaccaaaggggactcaacataaggctgatctgagtcgtaagttttatcttgttgtttct

SEQ ID NO: 151834 - DNA, 1665 bp, Zea Mays
ccgctgacggggaagaagaaggacaccaaggcaccccacgccggcgtcaagcgatggagctccgtggccagtgccaccgtggtggtcttgatcatggcgacgccgccgcttctcttcctcctcggcggccgcctcggcgcgccggtggtgtggatcaggtccaccgtggccagcgtaggcgcgtcacaaacggcagaatccaagaaagacgcacttctcggtggcctgctgcttccagggttcgacgagcagacctgcgccagccgctaccagtccgtctactaccgcaagaacctgacccggcagccgtcgccctacctcatcaagcggctgcgggaccaggaggcgctgcagcggcggtgcggcccgggcaccgagccgtacgcgagggcgtcggagcggctccggtccggtcagaccggcgccgtcgacaacgacgacgacggcggcggatgccgctacctcgtgctcatctcctacaggggcctcggcaaccggatgctggccatcacctcggcgttcctctacgccctgctcacccgccgcgtgctcctcgtggaccgcggctacggcaacacgctgccggacctcttctgcgagccgttcccgggcacgacgtgggcgctgccgctcgacttcccgctcgacaaggagttccgggacctggacgagacggcgccggagagctacggcaacgtggcggtcaaccgcagcggctccgtctccgggatgcgcttcgtgtacctgcacctcgaccacgccgcgtcgcaggcgaacaggctcgtgtactgcgacgacgacgagtcgttcctgcgccggatgcagtgggcgatcctccggacggaccagtacatggtgcccgggctcttcttcaacccgacgcaccagggggagctggaccgcctgttcccgcgcaaggactcggtgttctacctcctgtcgcggtacctcctgcaccccaccaacgacgtgtggggcatggtcacccggtactacaacgcgtacctgagcggcgcggacgagcggctgggcatccagatccgggtgctgttcggcggcgacaagccggcgcagcacgtcctggaccagatcctcgcgtgcacgtcgcgggagcgcctgctgccgggggtggtcaccacgcaagggcccgcgcccgcgccgccgctcccggccgccgctggtgcgcgtgcgcggcggcggtccaaggccgtcctcgtcaccgggctcagcgggtggtaccacgacagcatccgggagatgtactgggagtcgccggccgcggacggcgaggtggtgagcctgttccagcccagccacgaggagcaccagctgtggtaccagaacaagcacgacatgaaggcggcggcggagatctacctgctgagcctcaccgacaacatcgtcaccagcgcgtggtccacgttcgggtacgtcggctacgcgctgggcgggctcaggccgtacctcatgttcctgccggagaaccagaccgcgcccgacccgccgtgcaccagggccatgtccatggagccgtgctcccacggggcgccctccttcgagtgcaccagaaaggagatcggcacaatcatcaacaccgggctcctgctgccccatgtccgcgcttgcgaggacatctcatgggggctgaagcttactgacccggat

SEQ ID NO: 151835 - DNA, 108 bp, Zea Mays
tttttcctctatgcacgagatgctccttcaatcagatactacctctgctctttgtttctctacaatacttatacttaaaacctacgccaaccttctcttcgtattgcc

SEQ ID NO: 151836 - DNA, 823 bp, Zea Mays
cccatattcttcgctcgttcagttcagagagtgagcgggcaacgtcgtgtccatcaaagcgcgagcaccgcggacgttgcgagatcgtcgtcggcacaaccactccggcggccggcgccaacatctggtatcagcccaggtgcatgttctacagtggttctatcagtccgccgcgcgagccatcgaaaaagaagcgcgcgattccaccgcgcagaccatcggaggcgaggaagatggcaggaaatgcaggatcttcaagcgtcgtccgcgagagtgcattactctagccgatgcttacccggtcgaactatacggagtgggccatgttgatgagatgtaactatgaagccttggagatttaggaggtcatcgagcccggcggcgccagcgtgaagcgagcgcatgataggcaggcgatgggtgctcgcctgagatcggtgccaaaggagatgtggaggctactcggtgagaaaagtacagtcaaggaggcttgggaggcagtgaagagcatgcgactcggtgcagatcgggtgtaggaagccaacgctcaacgcctgctgatggatttcgagaatatcaccttgaacgatggtgagaccttcgatgatttcacgatgcgaatcaacggtatgtcatcggatctgcgcacgatgggagaataggttgaggaatccaaagttgtcaagaagatgctgcgggttctaccgaagaagtatgctcagatcgtggtttcaatcgagaccttactcgatttgaaatcgttgactctagaggaactcgtcgggcatctaaggatggacaaggaccgcatggagacagagac

SEQ ID NO: 151837 - DNA, 933 bp, Zea Mays
cacccagacgaacgggtgccgcgacgcttccagcccgaggccgagctccacggcctgcctcgggtccgcctgcgcgatgctcccgaagctgacgtacacgacggagccgggctcctggccgtcgagccaccggaggcacgcgtcgacgtcgacgtcggtagccctccctctcgccgccagcgtcccggcgcgctggtggtacagcgacaccggcccgaccgtccagaccttcatccccctggccgccgcgtagccggccacgtactcgggctccatctcctcgaaggtgttcatgacgacgccgtcggcctcggcccgcgcgcgctccacgtagtccgcgaagtcctcccacccgggcacctcgcggaagaagcccgaggcctgcgccctcgtgaccaggacccgtctctccagccccggcacgacgaccggctcgtcgtcgtgggcgacgccccggtacgcgccgaaccgctccacgttgtgctggcacagaaggcagaaggcgcacatgctgaagaagctgaggcgcgggaccccgaggttggccgccagcaccgtggtccacgggtggcagaagtccgccacgaggcacgtcgggtaggggcgcgcgtgcgcgcggaggtgggcctcgatcggcgcgcgcaggagcgcgacggcgtcgaagtagcgccgcgcgtgctccggcgggacgttgtccatgttgtcggcgccttcgggcaggccggccccggcgtagtccagcgggaactcgaggaggcggaccggcaggcccgactgccgggcggactcgatggtcgggcgcacccgcgcggccgaggccggggtcccgaccacggtgcagaccgcgccgtgcgtggagagtagcagcgcggtgtcgaccgctgggatcaggtggccctgggccatcagcgggacgaacacgaagtgcgccgc

SEQ ID NO: 151838 - DNA, 2860 bp, Zea Mays
cgccctcaccgcgtcacgccgtcactcccgcccacaccgccgcgcccccagcgcctgcccgcgccagccaggtgcgccctcgcctcagcccgcgtcggcaaggcgcactcccgcccctgcccgctccggccaggtgcgccctcgcctcagcccgcgccggcaaggcgcacccccgcctcagcccgcgcatggcagaaatgtatttctgactcctttcagtttacttccctgaccaccttgcttctaccgaagagtttccacgtcactgcaaaatcacttgtccctcaaaccctcctatcagaaccacgattcgatgcatcgccttgcccgcccagtctacaccctgctcaactcctccatgaggagtggtccctgcgggctcgccacggacgcacaagggctgttcaacggaatgcctccaccgaaactgccaagccacgcgctgtttggccatgcctgccaggtgctcggccgaacacacgtttcacagttttgtaccgtggctcggcagtccacggatgagcgcgctagtgcagagccactgcgattcacagtcacaccgggtgacgcctttggggatggcccgcctgtgggcatgtcagaggctgctaagatggtgtgtcgtattgtatccacgcagccagaaccaaagatcgcgtcgacacttgatgcgcttggggtggccgtgtccccagagctggtagctgaagtgctcaagaacttgagcaatgctgggatgttagcacttgccttcttccgctgggcagagaggcaggagggcttcagttacacggctgagggcttccacaacctgattgaggcgctgggaaagatcaagcagttcaggctggtgtggagcttggtggagaccatgcggtgccggggcttgctatctaaggacacattcaagctcatagtccgaaggtacgctcgggctagaaaggtcaaagaggctgttgagacattcgagaagatgagcatttttgggcttaaaactgagttatcagattacaactggctgattgacacgctaagcaaatccaaacaagtgaagaaggcgcaagccatctataaggagatgaagaggaagggtaagtttgtacctgatttgaaaacctacactgtcctcatggaaggttggggccatgagaaagatctgttgatggtgaaaacaatgtaccaagaaatgattgatgctggcatcaggcctgatgttgttgcctacgggatgctgattagcgccttctgcaagtctggcaaatgtgatgaggccatcaaggtgttctacgagatggaagcaagtggttgcatgccaagtcctcatgtctactgcatgcttatcaatggccttggctcggaggagaggcttgatgaagctttgaagtactttgagcattacaagaaaagtgggttccccatggaggtgcctacttgcaatgcggtagttggagcttactgcagagcctcgaagtttcagcatgctttcaagatggttgatgagatgaggaagtgtaaagttggcccaaattcccgtacttatgatgtgattcttcattatctgataaaatcacagaaatttgaggaggcttataatatattccagaggatgggaatcgacggctgtgagcctcagctcaatacatatacaatgatggttggcatgttctgtagtaacggacgagttgatatggcattaaaggtgtggaagcaaatgggggagaaaggtgtcctcccatgtatgcatatgttttcggcattgatcaatgggttatgcttcgagaaccggctcgaagaggcttgtgtatattttcaggagatgctggacaaaggaattaggccacctggtcagcttttcagtaatttgaaggaagctcttgttcaaggtgggagaataagtttggcacaagaggtggctttgaagttggacgcgataaggaaaacaccttttcgtggttaaagaagttttgttcataaaaacaatgtagcacctggagcattacagtcacaatgtttgggcataccagtagctccagcaatgggagaaagcaatgtgtatatcagatcacaaaaacaaacattggatatcggctgaagtctttgcatgacaacgtgatgtactcatgtagctcctgctacttctatttactcatgagaaaatgtatggtgcaatcaaaataataaaagcaaaccaaactaaatgttcctcttggcagaagaacaagccttcggtcattgctgtttctggaacagatcatttcttgcagtttacccctaattctccattcactgtcatttcatactgcagcttacattgcccaaattactgtcattttgatactgcagcttagaggttaactggagaacacttgattcttttcaatctgccccttttggcaaacgctttttttttcaaaaaaacaaatctgatgaaactattcctgaaatgaaccctaagctcggcgtacacgctgcaactactgcggcaatagctacaacacttgcaatccgaggatgatcgatggaggtagctaaagatttctatcgcacaagttcagcgtacacgcagcaggtactgcggccatagctacagtcacaatgttttattggctatatacttgtatctgaagttctgaactctgaggttcagtcttgcaacagctgtgaacagttaactgacatgagaagtatcattcggtctgaagaaatgggtgatgccttgtaataatcttgtttctgaatttgatcatcagaatgacatgtttactgatgataggatcttatgtcttgtgcttgtggtttatgtgaatatgtgattgtgtattttcatctttgttgaaactttaaactcggtgagatttac

SEQ ID NO: 151839 - DNA, 1244 bp, Zea Mays
gtccacctccctctcacccgtcgcgcgcagagccaaaccaacgactacaccatcgatgtcggccgccgaaccggaagcccatgcggcctccgacggctttgaccggcggcggcgcgagctgcaagcgttcgacgacaccaaggcgggcgtgaaggggctcgtggacgccggcgtcacggccattacggccatcttccgccaccggcccgccggagtccctggaggcgacgacctcgtgcccgccgccgtcccccaccggcgaggccgccggcatcatcccggtcatcgacctcgcggctgcgccgcgacaagaggtggccgcgcgggtgaggcgcgcggccgagaccgcggggttcttccaggtggtcaaccacggcgtgccgcgggagctcatggccgccgcgctcgccggggtgaggcggttcaacgagcagcaggcggaggcgaagcgccgcttctacaccagggacaccgcgcgcaaggtgaggttcacctccaactacgacctcttccagtcggcggccgccagctggcgcgacaccctcttctgcgagctggcgcccgacccgccgcgcccggaagagctgcccgaggctgtcaggggcgcgatgctggagtacggcgacgcggcgacggagctggcgctgcgggtgttggagctcctgtcggagtccctcggcctgcccagcgaccacctgcgcgagatgggctgcgcgcggagcctcaacgtggcgagccactactacccgccgtgcccggagccgcacctcaccctcggcactagcaggcacgccgacgccaccttcctcaccgtcctcctgcaggacgccatgggcggtttgcaggtgctcctcgaccgcggcggctgggtggacgtccctcccctgcccggcgctctgatcgtcaacatcggcgacattcttcagcttgtgagcaacgaccggttcaggagcgtggagcaccgggtcctcgcgaacaagagcaaggacacgccgagggtatcggtggcgtgcttcttcaacgcggacgtgaagaggtctacgaggctttatgggcccatcatcacggatggcggcggcagcagcagccccccgctctacaagagcgtcacggctagagagttcgtcgggtactcgtacagcaaaggcctcgacggtcgcccgcttgagcacttccggttggagggcacaacagcagcatgcccctaagactatctgtgtagttcagtgcgtgtgctagccacg

SEQ ID NO: 151840 - DNA, 2887 bp, Zea Mays
atgccgtgtcagtcgagtcccaggcttgcaccatgggacccgccatgcatcaccacgaggacgtcagccacgaaccactgcagggataagaacaacaagtggcatggagcgctacttcacgcaaccagaagaagggggtccgggcaacagatgaaagacttcttctctctctctgaagaaggaacaatgactgggtgggctgccgctgccgacgcaacctacgccgcagccctagccagagccgaggccttcatcggtatcttctccggcgacgagcacccacagtgctatgtaaaggtggatgtctcctacaaagagaagaggacttggtcgccgtggtcatggtcgtggaaggggtgccacggcagaaaaggatatggatcatctcgatatctctgtaccttcttcaccaagtactacctctgacagagaagatcagcctctgttgattccaagacaatccccagcttgctatgtaggaccgtcagaagtatccaccatgttactgaaccctaagatcaaccatcgttccgatgcgatttttggtgatcaggctgtggagcagctgaagttacgtcatcacaagcctctgaaatttcatgagagatatcgtccttacctgagagatgcaggtttgcttgggctctcacaaatttgccagaagatgcctcagttggacaaagcattgataactgcccttgttgagcgttggaggccagagacccatagcttccatttggcatctggggagataactgttacacttcaagatgttgcaatgttgtttgctcttcctattgatggtcgtccggtttgttctaccactgatcatgattatgcgcaagtggtccttgattgtttaggcctggatgcaaggggtccagcaatgcctggaaagtctttcctgcattacaaatggcttaagaaacacttttatgaattaccagaggaggtggatgatatgacagttgaaaggcatgttcgggcatatatactgagccttttatgtggggtgctctttccagatgggacaggaaggatgagtctgatatatcttcctctgatcgctgatctttcacgtgttagcacatacagctgggcttctgcagttctggcattcctgtaccgatctctttgctcggttgcctcctcccacaatatcaagaatattggtggttcattgcttctcttgcagctttggagttgggagcgctttcatgttggcagaccattggttcggtcacctttatgcacagagatgggcattgaacatgacttacctccaatcggcttccgttgggtggggtcacgcacacaaagtgagagtgctaatcgctgccttaagcagtacagagatgaactgaacgttcagcgagttgatcaggtgaagtgggaaccctacctgcaggtagagtcctcaaccttacccccactttgtacaagagacgcagacctgtggcttacacaagctccattaataaacttccctatagttgaaatgtatttgcccgagcgagtgatgcggcaatttgggcttcggcagtgcattccaccacctttccggcctacactacagtcgttacatcgtatcagtagacgtggcaaagaacgagagaactgggaagaaacacaccatgagtatatccaggaatgggaagcacgacgacagcgcatatttcgagatacagagcaatatgatccatcttcttatgaggagtatctgcgctggtactcaggagcaacacggcggtaccttgtcccagcaaccagtgacgacggtgaagcgggaccttcagctccaactgacgatttctcagatcttcagtaccaagccaaatctccaataatccgcaaagcagttgataaactggaaagcatggttaagaaagccaagagagccatgacaaccacagctgatacaaccactcaagccttggttgctgagtttctgcttggctttgaggatgtgttacaagatcttggcgagatccagaataatagtggttcaactgttccaccttttcacttggatagtccacattttgatgctgccgcaagtcaacagacacctcaacttttgcttgaagctgaggaaaatttaggtaccaaccaagaagcacaactagaggaagatgaagaacttaacacagtggagcgtgcttcattggcactggagactgtggaagaggaaaacgacttctccaacgacgtgctccctggaaatctttcactgggcgtggaggaagactgtgattcagccacaccagccaatgggatttgtgatgcagccactcccatgaccgatttggttgttcctcggtcagatgagggtctccatcaagatcaacatctagaagaccacaccgaaattgagccggctacattgatggtggagcctaagtgtgaggagggcgatggttccagcttcgtgctcccaccaagccctccagaactgatgctcgaggaacaggacgattcagggttaatagctctaggtactggatcatgtaccgaacagcagagccttggagtaggagaggctgaggatcaggaaaaccctcgcacaggcacagctcagcatggcatcatgatagtggagcgtacgggtgaggaaaacagcagttgcaatggcgtttattcttcctgcccaccgtcatctgtcattgttgaatcgagcagtgattatctgtgttagttatgtagggagtagaagctttttttatatttaaagatctgacatgagattgttagttcctttgttgctggtggcatggggtttgattctgtaacttgtttcgtcgtgattgtcttgataatatgagggtcttgaaaaccgggggccgttatacgccgacccagttggagtgtaatcctcagcgttccgtta

SEQ ID NO: 151841 - DNA, 307 bp, Zea Mays
ttgtttttgcaattcccaagttgtgactgggtggcgaaaatgctggttactgtagcactagatcaagcatgttgtgcgtgtctgaagaaatgccaattgtgacttgctgtttgttcaaacatgctccatttcttcacatatcaacacccgtcgtccctgcgtgtgttacaaatgtagttaacttagccatgatgtgtcctgcgcgcattccatctctgtccagtatgcttaatgcatttctgtactaggtaatccattacctctgtttcattttatttcaatgacgaactagcttattggatttcgt

SEQ ID NO: 151842 - DNA, 192 bp, Zea Mays
atgaaagatgaaccaagtgatgactcaataacggttgatgatgaagaacctcctcaaaagaagcagaaggaagcactttcagctgcaaaaaagaaagcagcagtgaggatgaagatgacagtagtgaggaaagttcgaatgatgagccaacaaaagttgaagaaaagaaggttgatgtccactgcgaaatga

SEQ ID NO: 151843 - DNA, 639 bp, Zea Mays
gccatccccacgctctgttgttcatgaagagcaccctaaaaaccctaaaccctcagctcccacccccgccacggccatgtctcccgccgtgatcccgctcccgccccaccatcttcgccccccgctccgctctccgtcggtggaagggtcgctaccgcccctgccctcgcctccgcaatctatggacgcccccgccccgagacgtgcccacacctgtctcgttctcctcctcgtcccgacgctcctactactcccctccatggcgcgcaggttgtggaggtttctacctccaagactggtaagcatggccatgccaaatgccactttgtcgccatagacattttcaatgggaaaaagcttgaagatattgttccttcatcacacaactatgatgtgagccttcttacttcagatggcaacactaaggatgatcttagactcccaactgatgagactcttgtggcccaggcctacctcctcgccatgctcgctctcgtcattgtcctcttctacttcactatcttcgcctttatcgtcacccacaggggtaccaggaactgggacaggattaggagctgccttcaggactccaaggctaaattatatccttacccccaaaatcaacaaaaattaaactga

SEQ ID NO: 151844 - DNA, 426 bp, Zea Mays
atgcctgcactctgcgccgtgcagatctcacacgggagctcagccacgacacctcaggttgtggaggtttctacctccaagactggtaagcatggccatgccaaatgccactttgtcgccatagacattttcaatgggaaaaagcttgaagatattgttccttcatcacacaactatgatgtgagccttcttacttcagatggcaacactaaggatgatcttagactcccaactgatgagactcttgtggcccaggcctacctcctcgccatgctcgctctcgtcattgtcctcttctacttcactatcttcgcctttatcgtcacccacaggggtaccaggaactgggacaggattaggagctgccttcaggactccaaggctaaattatatccttacccccaaaatcaacaaaaattaaactga

SEQ ID NO: 151845 - DNA, 711 bp, Zea Mays
atgactgagctggttcgtgctggttcaggtggcagccggttcatcggggcgccgagcttgagcgacaccagcatagactgggctggcggcggcggcgtcaccggcagcgcaagtgaagcgccagcgatgggcgccgtgcaggaccaacagcagatcgagctcccgttgtcacccgaggacgtgccgtttgcgcaggtgtacaggttcgtcggcgacatgttcgacgcggacgcgccggtcccggcggaagcccacctgcagaagctgaaggagatggacgacatcacagccaagacagtcctgctggtgctgcggaacctcgagaaccacctgtcggtgccccagttcgagcgtgtgatggaacttacaagattgtccgatacaagcaaggtcatcagcacacaaaaagcgtcgggcgttcgacgaagattgtattatgggcccgttcctatcatgggccgaactaatcttgatgctgggaccgatttggttgccaaaacccaaaagtacccacttagcaatttcaaggatgacatgttacactttaggaaaaaattggttgctacattactattttcagatataaacaagagaaaggggtgtccgttatacaagtatgacaaagaagtcgatgctggaagctcctctgatgttcaaatattagatagtcccacaaatcctaagaagaggaaactactttgtgtatcttaa

SEQ ID NO: 151846 - DNA, 3375 bp, Zea Mays
acacgattcgccgcgaggagtttccccttccgctgcgtgcatcccgcgagagctcgaaaacctagccgcaaaatcgatggctcggcgcggccacgacgacgacgacgacgaggtcgatgaggaggaagaggaggatgcctatgacctggacgacgacgaggatgaggatgaggaggacgactacgaggaggagacgaggcgcgggaaggcctcccgcggcggcggcggcgccaagagcggcggcgggcggaagcggtcgcgggaagacaactttatcgacgactcggccatcgaggacgaggacgatgaggatgacgacggcggtggccgaccgaggaagaagggtggcggcggggtgcgaggattcttcgacgaggaggcccaggtcgacgaggatgaggaagaagaggacgaaggagagggcgaggacgattttattaatgatgctggggcggacctccctgatgaggatgttgttaggggttcaagacgtcattctattcctatgagggatgaagaagaggacattgatgaaatggagagacaagtgcgggagagatacgcaagatctactcatattgaatacggtgaggaagctgcagaagtagaacagcaagctctgctgccctcggtgaaggatcctaaactatggatggtcaaatgtgcgattgggcatgagagagagactgcgatttgtctgatgcaaaagttcattgataggtcagaccttcaaataaagtcagtcgtggcgttggatcatctaaaaaattatatttatgttgaagctgagaaggaggcccatgtcaaagaggcttgcaaaggtctacgaaacatttatgcttcggcaaaaataacattagtgcctataaaagaaatggcagatgtcctctctgttgagagcaaatctgtcgatctgtcaagggattcttgggtccgaatgaaattgggcatatataaaggtgaccttgctaaggttgttgatgttgacaatgtacgtcaaagagtagatgtgaagctgatccctagaatagatctacaagctttggctagtaaactggaagggagagacattgtaaagaagaaagcatttgtcccaccaccacgattcttcaatatcgatgaggcgagggagatgcatattcgtgtggaacggaggcgagataaagaatctggggagtactttgagtgggttgataatttgaagtttaaagatggtttcttgtacaaatcagtctcaactaaatcaatccacaaaagtaatattcaaccgactttcgatgagcttgagaagtttaagaagcctggtgatgacatgaatggcgacatggctagtttgtctactctatttgcaaacaggaaaaaagggcattttatgaagggtgatgctgtcattgttattaaaggcgacttgaaaaatctggagggatgggttgaaaaagtagaggatgaaaccgttcacatcagaccaaaaatatctgatcttccgaaaacattagccttcaatgaaaaggagctttgcaaatatttcaagcctggtgaccatgtcaaggtgatctcaggtgtccaagaaggtgctactggcatggtcgttaaagtggaagggcatgtcttgatcattttgtctgacacaactaaagaacatatccgtgtgtttgctgatcatgtcgtcgaaagctctgaaatcaccacaggaataaccagaattggtgattatgaactgcatgatcttgtccttttagacaacttgtcatttggagtaattataagggtggaagctgaagcatttcaggttctgaaaggagtgccagatagacctgaagttgtgctcgtgaaactaagagaaataaaaagcaaaattgaaaggcgctcatcagctaaagatcgttctaataatattatctctgcaaaggatgttgtaagggttgttgaaggagcatgcaaggggaaacaaggacctgtggaacacatacacaaggggatgctgtttatctatgacaggcatcaccttgaacatgcaggttttatttgtgcaaaagcgcaatcttgccttcttgttggtggatcaactggtggccgtcgaggaaatggtatggacacagctgatgcacggcttgatgctttgcgatcttcagcaagcattctgcaatctccaggaaggctgcccccaagaggacctaatatgaattatggtggaaggtttggaggcggccgtggtggtagaggatatgatgccttggtgggtaaatgtatcaaaattaaatctggcccttataagggataccgtggccgtgttaaagaggtgactggtgcactcgtacgtgtagagcttgattcattgatgaagattgtcacagttaaaagagatgatatcgctgacacacctacagtcgcgacgccattccgtgaacctcgttattcattgggtggtgaaacaccaatgcacccgtctcgaacaccgcatcatgcttatcagactccaatgcgggaccctggagcaacaccaatacatgatggaatgcggactcccatgcgaagtcgagcctgggctcctatgagtcctccaagggacaattgggaagatggaaatcctgctacttggggtagcagtccagcttaccagccaggaaccccacaagctcggccatatgaagcccccacacctggatcggggtgggcaaatactccaggagttagtttcaatgacgctcctactcccagggataactatgcaaatgccccaagtccatacgtgccttccacacctgttggtcaaccaatgacgccaaactcagcctcgtaccttccaggcacacctggtggtcaaccaatgaccccaggcaatgctgggatggatatgctgtccccaataataggtggtgatggtgaagttgcatggctgttgccggatgttttggtcaatgtgttgaggggaggtgatgacggccctggcgtggttagggaagtactcggggatggatcttgccgggttgcacttgggtcgtcgggcaacggtgacgtggtgacggtccttgcgaacgaggtcgaggtcatcaggccgaagaagagcgacaggatcaagatattgaacggcaatttccgtgggtacacaggaaagctcataggtatagatggttctgacggaatagtgaggcttgacgaaacatacgaagttaagatcttagatatggtgattttggccaaactggccacttaagatcttagatgtatatgttgtaacgtgtccgtcatagaacgtattctgtaacaatgccctcgtttgcaataaagctttgcttatttgcaccatcattttcgattttctgcagctctttgttctgcttgagggacttttcgttgaaacgcatgtcacaaatc

SEQ ID NO: 151847 - DNA, 160 bp, Zea Mays
cacagattttacgcaggtgcagacacggattttacgcgtctataatggtggctaattaatataactttgcgtctgcgcgatgcaaaaaaaagttttgcacaaaattacggttcatttagggaattggctttcacaatttgagaaaaaattaaaaaaaaaa

SEQ ID NO: 151848 - DNA, 497 bp, Zea Mays
tagttttcatgagcctataaaggaagccattgacacaatgaagaaagcacttgtggctgagcctggagtagaaggaaaagaatctaagacccctatagaagtagttgctcaagtgttggcttcatcaaaatttcttcaaaatattggtctttacctgccacaaataaaagcggcaatggtggtgatcctacacgtgtggcagagcttgaatcagagaagcaaaactcattagaagttagagctcagttagatgccctcaagaagaaggtagaagaatcagaaaaatcaagggttaaggagttataaaagattaatgatctgcaaaaaggagcagatgagaccaatgctctccatcatcttctctttagcctaaataagtagttggtcgattcaatctaatgtggccctgttatctcatattgctatggccctgattttgttgtcctttcggtactgtacattgcactctacttaatggtagtttgatgaaatatgat

SEQ ID NO: 151849 - DNA, 2388 bp, Zea Mays
ccgccatcatcgcctctcgcgcaccttccttcgacaaccttccataggaatcatccatcgcgtctgtgctccccctcgcgcaatcctaccgcactcgcctcccgaaatcggccgccacggcgcctcacgccatggctcctgcccagcagctgcagctccctccgcctccggtggtctggcacgccgcctcctcgcccagatccgtccgtggtccgcccctccggcctcgcccagctccaaagctccctcctgctcgcgggcacgcgatctcgccctgggggccatgccctaggccgtcgtctcggctcgcgtccacctcgtccagcgtcacaagtggcgccgccgccggtgtcggctacttcgatctcccgcccgccgtcgactcgtccagcagtacctacgctctgaatccgatcccctcgccggtggcgacggcgtcggctgacccatccccaaactcggcgcgggagcccaagcggaagcgaactggcccgtgcgtcccccgcatcaactcgaaccgaagggacgaccaagcggagtctagactcaagagcaaccgcgacctcccggatctctctcccacccacgcctcgtcaccgtcgtcttctgctgcactgcagcgatggcctcccccgacctgctcttcaatctgcggaacctcttctacctgggcgcctaccaggcagccattaacaacatcgacatcctgggcctcgacgccgccgccgccgctgagcgcgacgccatcgtcttccgctcctacatcgccctcggctcctaccaggtgcgaacacatctggcgtcaggcgcctcagccgctacctcgctgcaggccgtgaagctgctcgctctgtacctcactggagacaagcgtaggtatgtcatgaagaagatcaacatctccaagcagaacgacaagttccagcagaccgcttaccaagagggtgaaatagggaacgatgatacactatggcggatttctccaaggtgcgaagaagattcttctactactttctattgttatttgtaactattgttaccacttttgtttgcgattactgctttgcccgagaattgcattcgcaggcaatgtacatgcatgttgtttccgcttttacagaaaacaatatttttatgtacggacggggtgggtgatatggaatttaagcttatacctattttagatctgatcgactagctataactgaatttattaggggaatccccaaactggatcattattttctcaaatagaaatgtcaattcagtttgtgataatggaaaataagtgaagaacatgataatagatgtatatatactagtaaacttgtctagcacaggatctacaccattatcgagggaccttgaaactttttttgaatgttgtagtaatccaggcatccaattaagtcatttgattgtgtgtgtgtaatcatgatttacccaaatagtgtgaatcggatgtcagcgactcaatgcctttaaaaatattgtcatttaaggattttctttaatagtaccatcaatcgacagtgcaaagcttttaacaatgttatgtcgtatgaataatttattaccatatttctctcaccgaaagagtagtaccattcagtaaggaaatcaatggttatatatgttagtatagtatatgatgttactatattgagttctctgctctgcactgtcatggcacttgttatgataggcgttttctaaaccttccgtaggcgttaaggtggcaaagtatcccaggtgcagccatccagagcttgtgatgggtctcagggagcacactgacgctgggggggatcatacttctatttcaagatgaactgatcccaggtctagagtttctgaaagacggtaggtggatggcaatacctccaacacaaggcaacatgatctttgtaaaccttggagatcagattgaagtgataaccaatggaacctacaagagcatatgccaccgggtccttcccaacaagaacgggagccgcctatccattgcaacattctataaccctggtgccgacgccataatctgcctagcttcaaagctcacatatcctagccaatatcgtttccaagactaccttgatttctattctactaccaagtttactgataaggtatttaggttccagactacaaaggcaatattgaagtgaataatcacagcagaagcctggagaaaagaagtgtctgacttgttctacaatactgcatcagtgcatagatgcgcttgtatttactgctagctcctaaggaacaacgaggtgttaaaatatatatttttactttcagttgttttctgtttgaagactaaacaacctgcactacttgtacttaatgtaatatattacatgtgggttccttcagacagtgata

SEQ ID NO: 151850 - DNA, 1523 bp, Zea Mays
ataggaatcatccatcgcgtctgtgctccccctcgcgcaatcctaccgcactcgcctcccgaaatcggccgccacggcgcctcacgccatggctcctgcccagcagctgcagctccctccgcctccggtggtctggcacgccgcctcctcgcccagatccgtccgtggtccgcccctccggcctcgcccagctccaaagctccctcctgctcgcgggcacgcgatctcgccctgggggccatgccctaggccgtcgtctcggctcgcgtccacctcgtccagcgtcacaagtggcgccgccgccggtgtcggctacttcgatctcccgcccgccgtcgactcgtccagcagtacctacgctctgaatccgatcccctcgccggtggcgacggcgtcggctgacccatccccaaactcggcgcgggagcccaagcggaagcgaactggcccgtgcgtcccccgcatcaactcgaaccgaagggacgaccaagcggagtctagactcaagagcaaccgcgacctcccggatctctctcccacccacgcctcgtcaccgtcgtcttctgctgcactgcagcgatggcctcccccgacctgctcttcaatctgcggaacctcttctacctgggcgcctaccaggcagccattaacaacatcgacatcctgggcctcgacgccgccgccgccgctgagcgcgacgccatcgtcttccgctcctacatcgccctcggctcctaccaggtgcgaacacatctggcgtcaggcgcctcagccgctacctcgctgcaggccgtgaagctgctcgctctgtacctcactggagacaagcgtaggtatgtcatgaagaagatcaacatctccaagcagaacgacaagttccagcagaccgcttaccaagagggtgaaatagggaacgatgatacactatggcggatttctccaaggcgttaaggtggcaaagtatcccaggtgcagccatccagagcttgtgatgggtctcagggagcacactgacgctgggggggatcatacttctatttcaagatgaactgatcccaggtctagagtttctgaaagacggtaggtggatggcaatacctccaacacaaggcaacatgatctttgtaaaccttggagatcagattgaagtgataaccaatggaacctacaagagcatatgccaccgggtccttcccaacaagaacgggagccgcctatccattgcaacattctataaccctggtgccgacgccataatctgcctagcttcaaagctcacatatcctagccaatatcgtttccaagactaccttgatttctattctactaccaagtttactgataaggtatttaggttccagactacaaaggcaatattgaagtgaataatcacagcagaagcctggagaaaagaagtgtctgacttgttctacaatactgcatcagtgcatagatgcgcttgtatttactgctagctcctaaggaacaacgaggtgttaaaatatatatttttactttcagtt

SEQ ID NO: 151851 - DNA, 2409 bp, Zea Mays
atggaccagtccacggccaaggcggccgcggcgtccaataacgcggaccacgtcctcgtcatcccgcccggccacccgccgccactgcacccgagaaataaccagcagccggagactcccaaactctctcagaaccccgagaagccgctgccaacctccagcccctcgcgcccgccgctgccccccgcggccctccgccgccgctcctccatcgccaagcccaagtcgcgcttcgtcgagccgcccaccccgacgcacccgcactccgcccacccctccccagtccaccccgccgccgccgcctcgctgaccgccaccccgacccatcgcgccgcgggcggctccacccctgctgcagaggtcgacgacgacgaggacctcttccgcaacaaggacggctcccgcgcgccggcctccgcggcgcgctgccgccgccgggcccgccttggcgtggagctctgcgtgctcgtcctcttcctcggcctgctcctcgtcagtctcgtggtggcgcccctacagggccgcgtcctgtgggggctggaggtctggaagtggtgcgtcatggtcatcaccgtcttctcaggccacctcctcagccagtggctcgtcacgcttatcgtcttcgttatcgagcgcaacttcctgctgcgcaccaaggtgctctacttcgtcttcgggctcaagaagagcttccaggtctgcctctggctcgcgctcgtgctcatcgcctggtcccagctcttcgacagcgaggtcggccgctcccgtaagaccgccaggatcctcaactacgtctccaggttcctcgcctccatgctcatcggctccgtcatctggctcgtcaagaccttcctcatgaaggtggtcgcgtccacgttccaccggaaggccttcttcgatcggatccaagagagcgtgttccatcagtacgtgctgcagacgctgtcaggcccgccgttgatggagctggcggagaatgtggggcgcgagggcagtggccttgggcgggtcagcatcagcagagccaaggaggagaaaggcgtgccagaggtgatcgatgttgttaagctcaggaggatgagtcaggagaaggtctcagcatggacgatgagagggctcatcacaacaatccgaagttctaggctgtcaactatatctaatactatcgagagcagctttgatgatgtagatggcattgaacagaaggataaagagataaatagtaaatgggaggccgaggatgcggcatatgccatattcaaaaatgtcgcaaggcccggctataagcacattgaagaggtggatctgctgaggtttttcaccaaggaggaggtggacctgctgattccaacttttgagggagcaccagaaaccggaaagatcaaaaaatctgctctaaagaattgggtggtgaaagcatacctcgatcgcaagtcactagcacattctctgaatgacacaaaaaccgcagttatgcagcttcacaacctcgtcagcgttattgtcataatcatatccatcattgttacgctactgttgatgggcattgcgacaaccaaggtccttgttgtcgtctcgtcccagcttctggttgtggtattcatatttgggaatgcatgcaagactgtatttgaggccctcatatttgtgttcatcatgcatccattcgatgttggtgaccgatgtgtaatcgacggaacacagatgactgttgaggaaatgaatatattaacaactgttttcttggagaatgacaacgaaaagatatactatccaaattctgtgttgtccacaaaggcaatcagcaacttctaccgaagccctaacatgtttgacacgattgattttgcaattgatatttcaacttcagttgagagcattggagctttgaggtccaaaattaaagggtacttggagagcaaaccaacgcattggcaccctgtccacacagtaaatctgaaggacatcttggatgtgaacaagatcaacatgtccctctgtgtccagcacaccatgaacttccaaaacatccgggagaagaacatcaggaggtctgagctcgttatggagttgaagaaaatattcgaggagatgtccatccggtaccacctgttgccccagaaagtcgaactcacctatatttcatcttcctcgtcacgacaatgcgacccgttcttagtggctggtgagcttggtgaaccagcaatccctggctctttgccggagatgtcgctctttaccctgtctcttttggtgcgccccgatcttctaggagatcgacattcgacaatgtatgacattcgacaagtttttttggtcttaattttgtcacgtggtcttcttagcctccataaatcctcgtcccgtgtccgggactaccaacaattgagtcctatatcatattattag

SEQ ID NO: 151852 - DNA, 1194 bp, Zea Mays
atggcacccgacatcaccccctcgcagcaccttcaacccgacatctccacccccacgaccagcaggccaggcgtggatctcgcccccacgcccggtgatggcgcccatgctccgcccccatacccagcgggcagccacggatctcgctgggcgaggatctcgcggatcacgctggaactgtcgctcccaatctctgcatcgcgtggacgccttccatggagtctctgtacatatgccagcgcccgtccctcacccctgatctgccactcccaatatctccacccccaccgcgacgacgatgcgcaaccctcggccaccacgctgccagcgcccgtccctcaccccgcacgctgtgatcggactgccgcgcttggcccccagtcccatgaggttgctgcccctcccatgcccactagccatgccaccatagatccagctagggcggcgtcattgcgttcaatcctgtgcgagagaatgcaaaatcgtcatcaaactgatattgaccagaggttcctccgcccagttgcatcaggtatcgctgccatttgcagtgattgtgctccagttcggtcgtttgggggaaaagggatcgtatctgctgatcctcgggctcaagggatggttctcgacatggacggctacgtagacccctacgaggaggtcgtagccgaggatgactctgacaaccctgacgaggacgactcaaatgcagagagcaactacaaggataagtcgttcgacctcctcaagttcgacaagcaccgggtgcgcaacccggatgacaccttctgtggccccttctgccccctgcaagaagagcaggggtatgagcttggccgccagcctgctaacaccaaactgtctagcaataagacagtgaggagggtccgtgtccgtggaggcaacacgaagtggagggctcttcgattcgatacatgtaactactcgtggggaagtgaggctcttacccgcaagactcgcatcctggatgtggtctatattgcaacaaacaatgagcttgtgaggactcagactcttgtgaagagcgccattgtacaagttgatgctgctccattcaagcagtggtacctcactcactatggagtggacatcggtaggaagaagaaggtgtctgtcgctaagaaggatgacactaaggtatattcattcaatttaaggtttaatgaggattaa

SEQ ID NO: 151853 - DNA, 760 bp, Zea Mays
atggagcagtgtgtagcccgtttggatgttgccatgtttaatgccatccttcgtgaatcagcaagtgagataccaacagaccctatatctgacccaattgttgacccaaaagtcctaccaattccagctggtgatctaagctttgggtcaggcgcgcagctgaagaactctctccaaccaactatgacaggagcgttagctaggacagcaatcaggctaacaattgtggacaaagttcagtctgaagtcaatgcatctgaagtgcatgaaagggttccactcctgtttggatctgttgcaatggaaaaggttgcttgccacatcgttcattggatatttaggagaaccgttagacatatctttctaactgatgatgatgaagggcagcctccactgctgcagcggatggttgaagatcatgacgatctctactttatttcttggaagataaagccacaccaagtcatcatctccaggaacgatgttagcgaaagtcaatttaatctagtgctgaacattgagttgcaacaaatcatagattcagactgagtcaccgcagctagaaaccactgtctcaaggtgctgaacattgagttgcaacaaatcatcgatggagaccgagtcaccgcagctagaaaccactgtctcaatttgaggagattttctatctatgtttgttagaaggcataatgcctatttatctcttatattcgaacatttggtaattaagaaatagaagattacttcctcaatatccctt

SEQ ID NO: 151854 - DNA, 1421 bp, Zea Mays
ctcttatcctatcctttcctgcctcctgcgtttagcttcttctctctttcccctctggccctcctctctctcatttcctcatacaagttgttgagttcttgtccctgttcttggacggacacatatccaatccacctgagatttgctcaatttactccagacacactagcaacgaccggaccgtcgaacctcgcgtctcaggagacatgtcgatggtggcggcggaggcgcggccacgctacgggttccccggatccgggaagggggcagcggcgacgggcatgggaaggaggcggacatggcggcggtcgggaagaggaggagcgacaacttcttcatagaggaggaggcggaggaagaggtgctgaccgttacctcctcggttgggtcgtcgtcgggctcgtcgtcggaggccgctggtcatctacttccatggcggcggctacgtcctgttccgcgcggcctccgcgccgttccacaacgcgtgtgcggcgctggccaccactgcccccgcggtcgtggcgtccgtggactacccgcttggcgctcgagcaccgcctccccgcgacgttcgaggacgccgccgacgccgtgattaggggaagcgagacgtgcgtgatgcgggcagggggagacgacagctgctgatcggcagcgacgccgcgtgcgacgacggcggttgcccaagagcgtgcgcggcggtggacccccagccggcggccgcaactccatgacctcgacgtgcggtggcggaggttcctcgatccgaagtagtggtggcggttcccaggtcggtggcggcggctccccgatccagagggcgagtgacagcggggcccttgtgcgggcaagcggcagcgtccctgaggtcccgaggaggcggcacttccaaggccggcgagcaagcgacgcccgtcgacgtgcgagtagcgacggcgacgcatgaggcgcgatgttcgagcgagcggcgtcacggaaggcccgagatgcgcgcagcgatgatcgcgcgtgacatcttgcgatccggcgcagttttcttttcgattattgtgttttatgcctaccacatgtagtatttacgccaaaaactgtacgattttatgcttaaacacggagttcgtatatcagtttactgcatgtacattggaaaggtaattccttgatttatgatgttcgtaatttgcgtgcatgcaatggaaactcccacgatttttgccataatttttggatctgtataaaaatagaaaccgcatgcatgcggctgccatattttcggatctgtcataaaaataggatagtaataacaacctactagagctatcaacctctcacattaactcggtatttacgcttataattgagggattttatgctcaaaacttaaggtttttacgttccacccggagatgcgtccaccagtg

SEQ ID NO: 151855 - DNA, 434 bp, Zea Mays
aaaagtggtaatagttacattgaaagtgttgactccaacaatgcatgttatggtgggacagcagttctactgaaatgtctgaattgggtcgaaagtaactcctatgatggccgttacggtcttgtcgtttgcacagacaacacagtttatgccgaagggccagctcgtccaacaggaggaggtgctgctatagcaatgataattggtcgtaattctctaattcccttcgacacatggttcatgtttatgatttctacaaacctgatcttgcaagtgaatatccagttgctgatggtaaactatcccaaacatgttacctaattgctctagattcatgctacaaacagtgctgcaacaagtataagagatttgtgagtaaacaattatcaatttctaatgtagaataatttgtattctattctccatacaacaag

SEQ ID NO: 151856 - DNA, 1955 bp, Zea Mays
acctcccggtcccggctactacacacaaagtcaaaaaggcgacgcttccccaaccttcacccacctcgaagtcgaagccacgcctttccacgcccgcacaaagccgctgcctgctcgccctttatataccctgccaccacgccgtgcctccgtgtcctccgcctcgccacttcgccagcgccagcgaccgacaccttctctaggcccattccaaggctctcctcaccgctgctagctcccaggctgctcagagcgccggccgacgagcgtagcgctccgtggtccgtgcggcgctcgaggacgtacggtacgagatcgacgacgcgggtggttccgactcggtcgtcatggggctgagggagagcttgttcgggtgcttcggggccggcggccaggagcaggggcaggagcccgcggcggcggggccggcgagcaggcgccccggcggcgttgggaagcggacgctgcggcggctgagcacggccaacctgcggtccctgtcgctgcaggacctgtcgcggaagctggagacgacgaagctgcacgccttcacgctggacgagctcaaggccgccacgaagaacttctccaccaccaacttcctcggcgagggcggcttcggccccgtctacaagggcttcgtggacggccgcctccgcccgggcctccagccgcagcacgtcgccgtgaagtacctcgacagcgacggcgtccaggggcaccgcgagtggctggcggaggtggtgtacctcgggatgctgagccatccgcacctggtcaagctggtgggcttctgcaaccaggacgaccaccggatgctggtgtacgagtacatgccggggcaaagcctcgagagccatctcttcaagaatctcctcgcgtcgctgccgtggtcgacgcggctcaagatcgccgtcggcgcggccaaggggctggcgttcctgcacgaggccgagacgcccgtcatctaccgcgacttcaaggcctccaatattctcctcgactcggactacacggcgaagctgtcggatttcgggctggcgaaggaggggccgcagggggacgcgacgcacgtgacgacgcgggtgatgggcacgcacgggtacgcggcgcccgagtacatcctgacgggccacctgacggcgaagagcgacgtgtacagcttcggcgtggtgctgctggagctgctcacgggccgccgctccgtcgacaagagccggcgcgggcgcgagcagaacctcgtggactgggcgcgcccctacctccgccgcgccgaccgcctgcaccgcttcatggacccggggctggagatgcagtactcggcgcgcgccgcggagaaggccgccggggtggcgcaccagtgcctgcagagcgtgcccaaggcgcgccccaccatgcgacacgtcgtcgacgcgctcgagccgctgctggcgctcgacgacgacgtgcccatgggcccgttcgtgttcacggtcggtggagccgccgccgaggccgaggccgcgccggcgcaggccggtgtcgccggcgacgacaatgcggacgcggaggcggccggcaggcagggcaagaggcacgtcatgtcggccgtccacgcggagagcccactgcggagccggtacgccagcgccgtgaagagaccagagagcccgccgaccctgagcagggcatgagtgccattgcaaatttgcaagtgtacatagctcgctgacagattgctcatggattcttttgttttttcctcctgttttcttggtgatgctgtcaattcgttctctcaagaatttcaagggggagagttttgtgtttcagttttttttttgttgtgttatcattgatacattgacgagaatacctcaagttgcgagaggtgtttgtgtaccgaaagctggaggcaacatgtgtactcttgcaaacgatgatcaaagaaacattggcatcgttcctctttgtgt

SEQ ID NO: 151857 - DNA, 767 bp, Zea Mays
gtgatgccatcatacaaaacactgcatattattacaacagttaaataaaatatcctaaatcatggctagtagctccctattattatatcatatacacaattgcaccccaaggacagtgtcctcatttattggatacagaaatttggaatactacaacagtcccctaccaccctgttgcactaagggtaaatgcagggagataaacataaatacatacatgcataaatattccatccgtatgtatacgaacttagatggacctcttgtgtgatcacgacaacagcagcagcacaagtctgattattctcttcgtgttccttaactactgtgatgctgttatcaagtttgatgaccccctttacaagttatcatcatcaaatattgtcgagagcacaagccctttgaaccctttccttctgatctttctccgacaatgatggttcagccctgtagattcaccacaccaatttaatcaagaataaacaccacatagaaatatagtgaacgagggggaaacattaaaccatgttcattattttgttcaactcacaaacaaaagatggctttgttgacaattagcattgcgaaactaaggaattatgcatgaccagataagaaaaatggagatttgttcatttcgtaggtctctgacagaacatgtggatgcaatcatgcatgcagctcataacaatcccttagaagaggatctgctataattttctagaagcgtaacattttttcatttgctagcactacaaaaatctatt

SEQ ID NO: 151858 - DNA, 112 bp, Zea Mays
ctatatgccctggtttgaatgtgctaaggccggtaccatcacacttagggttgatttggtgaccggggatcccgaggggaagaaatattcttgctattcaaaattgaattgc

SEQ ID NO: 151859 - DNA, 2164 bp, Zea Mays
ctttccgggcccccccgacgccatggccccgtctcaccaccgcctcagcctcttccttgccgtcgccgccaccattgccgcagcgctgctagcttccgtcgctgcggaaaacggcatgaacgacgttgaggcgctgatgcagctcaagaagtccttcaccaactcctcgtcgctctcgtcgtggctcattaccgataaggacgggaacaggtccccctgcgcgccggactcgcaccactggcacggcgtggtgtgctcccatggagtggtcaccggcctccgcctgaacggcctcaagctcggcggcaccatcgaagtcaactcgctcgccagcttcccgcgcctcaggtccatctccttcgccagtaacaacttctccggcccactccccgccttccaccagatcaaggcgctcaagtcgatgtacctctccaacaaccagttcaccggcagcatccccgacgacttcttcgtcaatctcagccacctcaagaagctctggctcaatgacaaccagctctccggctccattccagcttccatctcacaggccacgtccctcctcgagctccgcctcgatcgcaacgccttcacgggggagctcccctccgtgcctccgccggcgctcaagtcgcttaacgtatctgataatgaccttgagggcgtcgtcccggaggcgttccgaaagttcgacgccagcaggttcgccggcaacgagtacctctgcttcgtgccgacccgcgtgaagccgtgcaagcgcgagcagcctgtcaccagctcgtccaggcgggctatcatggtgctcgccacgttgcttctctcggccttcgtgatggtcatcgccctgcacttgtgcagcagccagcctagcagcagccgccgtgcccgcaagctcgacatggagggcctcgaggagaagtcgcccgagtacgtggccgtcaagaaggcgtcgtcgacaccgcagaagagctcctcgtggctcgggaggagggcagggtcgtcgcttggtgggcttggacacagacgggccgcttctgccgcgaaggtggacgatctaagcagcagatccgcgggggatctggtcatggtgaacgaaagcaagggcgtctttgggctcacggacctcatgaaggcggcggccgaggtgatcgggagcggtgggctcgggtcggcatacaaggcggtgatggccaacggcgtggccgtcgtggtcaagcgctcccgcgacatgaaccgggcgaccaaggacgcgttcgaatccgagatgaagcggctcggcgcgatgcggcatgccaacctgctgccgccgctggcctaccactaccgcaaggacgagaagctcctggtctacgagtacatccccaagggcagcctgctgtacgtcctccacggcgaccggggcatggactacgcggcgctggactggccgacgcggctcaaggtggccgtcggcgtcgcgcgcggcacggcgttcctccacacggcgctcgccggccacgaggcgccccacggcaacctcaagtcggccaacgtcctcctcgcgccggacttcgagccgctcctcgtcgacttcgggttctccagcctcatcagccacatgcagtccccgaactccctgttcgcgtaccgcgccccggagtgcgccgccggccaccccgtgagcgcaatggccgacgtctactgcctcggcgtcgtcctactcgagctcctcaccggcaagttcccggcgcagtacctccagaacgccaagggcggcacggacctcgtcgtgtgggccacgtcggcgatggccgacggctacgagcgggacctgttcgacccggccatcatggcggcgtggaagttcgccctgccggacatgacgcggctcatgcaggtggcggtggactgcgtcgagacggacctggagaagcggccggagatgaaagaggcgttggtgagggtggaggaggtggtggcgacggctttagccacggtgagggagaggcaacaagatggtagcggcagcgaggggacgatgagcgcgcagtcggcagactcggccagcagaagttcgcacgcctcgtacgtgcgagaggggtcgatacagcggatggccagcgtcggcgagcggtcgttgcggcgaggaagcaacgacccctcgtacgggtacggcatctcgtaa

SEQ ID NO: 151860 - DNA, 110 bp, Zea Mays
tcatttcctttcctaggggtactccaaggtttaaagttggatcgacgctagctctaggttttcttctaggggatatggtatgcgttgattgggtgcattgtcgtatcgtg

SEQ ID NO: 151861 - DNA, 104 bp, Zea Mays
tttttcttattttcttgagttttgctcatggggctcacttagggtttttaaatttgggttgcacattcttatcttttaaaagtctcaattgttttgatcatgac

SEQ ID NO: 151862 - DNA, 399 bp, Zea Mays
acaattgctaccattaaacaatgtcttggagatctaccattctacactgtctctgatgaaggggaggttcagattgacaacaacttctccggcgggatacctcagagcatcagcctggtccacaccatgtaccgtttctccacctccctcaacgagctcaacggcagcttgccaaacaacctctgcatctcacccgcgatgagcatcatcaacacctcccgcaacgcactctctgtcacgatcccactgtacaaccagctctccagccacatgccgccatctctgatcaccgagcttcccgccgtgttcctccagcggaacccagggctgtgtgaccgggggttgccgaaagactgcgacatgccatcgtttctttctcaccggcgtagcgctacatga

SEQ ID NO: 151863 - DNA, 993 bp, Zea Mays
atggcggctttaggtcgcctttcacgtttgcttagttctaccgtccaccgctctggaggccttgtgcgcgtcttctccatgttggtcgaggtcgtcgatgtcttcgatctgtacctgccacgtgacgcccattgctactacatctttggaaagcatgggcctctaaagttatcctctaccaaagtgatcagcattcccgagtattttaaggaagtgtatttgctagacaggtcacataggaaccgtctcattgaagatattgacgatgacttcccgttcttaattcatgatagggtttgcaagctactgagatctggattactctcttcgtatttcagcaaaacctatggcttatcaattcctgacactgatttcattaaagaaaaccttagtgtgctgcctgagttggatttactggtattcagatcactgaacatgagtcactctgagtctgaaatagataattgctacaagtcattcgtgaagctcttcaaggctcttgtaggtatgtatgctgactatcgtgtgatatatggtccagcttttttccccaagcttttgatctctataatgtactgcgaagtgcatcgacttttgagggagcagtgcccagcacgtggacagggtgctgcagccaatgcaatcatggtgacgattgaagagaaaatttttgacttcatgaagtcatgcagtacaaatgctctgctaattagctattctggtgctcatggtgagagggcaaagaagcacattgtggtcagtgaagatggaggagatgagacactgacatctgaagttagtgatgacactaaagatttcaaagcgtcgaatgtctcactgaaagttagaaattttatgggcaacaaggagctcagtgttgaggccaaaagaactaccgcagaaggaaatgttgagattgttccaggagatgagctgacagctactctattggacgttgtgaatactattcagcgcactactggatattattag

SEQ ID NO: 151864 - DNA, 371 bp, Zea Mays
cagctgccgctgcccccaattgagccgccgccgcctcagattcgccgtcgccgcctcagattcgccgtcgccgcctcagattcgccgccgccgccgccgccgatttggacgctgccgccaacgatttggcctccgccgccctggatttggcctctgccgctcccgattcgacgctgccaacccgaaacagcgccgcccctttcccttcccctctgccctatgccctcttgctgcttcttacctaggcgacggggacgccttggatctttcgggcgcctggacgcctaggcgtcgcctaggcgacgcctttaaaacaagggtggagctaacacttttttcctagctgaacaaaagtatgtcttttttctttt

SEQ ID NO: 151865 - DNA, 66 bp, Zea Mays
atggcgtggccgctgtggcgctgtggatggaggcgaggcgggcgggtgggtgagaaattaaaataa

SEQ ID NO: 151866 - DNA, 1537 bp, Zea Mays
cacttataagtacaagtatcatcaccctcattaccgtgcgcttatacattcttttgcttgattccaagaatcactacaccaaaatagtgaacttcctagagcctaaaccctagaaagttggccctaaactctaggaagttagctaaaccctcggaagtaaagccatctcgtcggaagtttggcgctcgaatcttttttgtcaaaagttagcttaacttcctagagccctctagtaaattagctaacttcctacagttagaggagcctctcggaagttagtagcttcacgccgtcaatgctgccgtcagctgactaacttcctatggataacttcgtacggctcactgtagcccctagaaagttagctggctaacttcctatggcccagctggcctctagaaagttaatttgaccagcattagactctctggttcctacttctcactgatttaaaactaaacagacttgagtgctcccagacccattagactccctggttcccactgaatcagcaccgaatcaaaaatcggcaattggaccaacatcacgctgaggccactaaaactgattcctgcgaaattcctgtaccattcctgtgaaacgttcttcaggtaccggtggcaactagtggattatatgtaaattctagagaggttagtgaactcaatgaagaaggcatggcaagcagcaaagaaaagttgtgtgggctaattaattgctcctctttttttttctttctttctagacgcagagaaatctaatccaacgatggctgactgacgcaccacatcgatctgcaatgaaagccaggtaaggaatgaatgaagggtggtcagcaggtgtagatacatgtccatgtcgtctgtttgcctttgcctcctccaatcatccattttttctgtgctttattttctgctagctcttctggaggatggatcatgggatcaaacacaagtcaacattcagaccagacagaatgtgggtgcgttttcaatttatttgggttggcaacaaattgtatgcggacttgtggccgtctacatataatacacgtagtagattactggtgtagttcatgacaattctacggatgtgatggtactcgcttggtcccatctcgcgtgcattaataaacgcaatacaaaaaaatggcattgtgtgtagccagagccgcactgcttgaaactaggcttgcttctatcgtctaccaattcaatgcagtggcactgtgtgtgtgctaaattaaattttcgattttgtgcctcgagaaatcgaccaaggaaatcccaatccaattaaattcattcagtggcacgagcggaagacaactgataaacccctgaattgtgttaccgtaggggagccgtcgtgcagcgctcgacggtggccgtcgtccgtgacggcggcggagggcttgttgcgcggctgggccttgcttccctcctgctgcttctggagtaggtcgtcctcgtcgccgccgccgaggcgggcgggcgtggggcgccgacggggcgggcacggcggcgcctagcggctg

SEQ ID NO: 151867 - DNA, 1724 bp, Zea Mays
ctgttgcagtgttgcccgtctccggcgcctccaaagtcccacgaccccaaaactctgtgggcccgcgaacccattctccatatacacaggggtaacgctccgcctcgcagccagcaggacaccactcatcttccttcccccccgcctcgtttccatcgccgccactctcttgctcccccgtaccatccctcgccaccgccaccgccgtcgctatgcagagcctcctcgtgcccactgctgcatcggccccggtggcggctccgcgggctcggcggaatctccctatgcgcctctccgtccgcgcctccgcgacggcggcagcggcaccgcggcgggagacggatcccaagaagcgggtggtgatcacggggatggggttggtctccgtgttcgggaacgacgtagacgcttactacgaccgcctgctagccggggagagcggcatcgggcccatcgaccgcttcgacgcctctaagttccccacccgcttcgccggccagatccggggcttctcgtccgagggctacatcgacggaaagaacgaccgccgcctcgacgactgcctccgatactgcatcgtcagtggcaagaaggctctcgaggctgccggtattgcccacggctccaagcccatggaaaagattgacaaaacccgggctggtgtgcttgtgggcactggtatgggtggcctcacggtgttttctgatggtgttcagaatctcattgagaagggctacagaaaaataactcctttcttcatcccatatgctataacaaacatgggttctgccctgcttggaatggatattggtttcatgggtccaaactactccatctcaactgcctgtgctacctcgaactactgtttctatgctgcagcaaaccatatccgtagaggcgaagcggatataatgatagctggaggcactgaagctgcaattattccaattggtgttggtggctttgttgcatgtagagcactgtcacagaggaatgatgaccctaaaacagcatccaggccttgggacaaggatcgtgatggttttgtcatgggtgaaggagctggagtcctggtcatggagagcctagagcatgcaattaaacgtgatgcaccaataattgcggagtatttaggaggtgctgtgaactgtgatgcttaccatatgactgacccgagatctgatggtcttggtgtttcatcttgcatcaagcaaagtctcgaagatgctggtgtggctcctgaggaggtcaactatattaatgctcatgcaacatcaacccttgctggtgatctggcagaggtgaatgccatcaagcaagtcttcaaggacccatctgggatcaaaataaatgcaaccaagtccatgataggacattgccttggtgcagcaggtggtttggaagccattgctactgtcaaagcgataactactggatgggtgcatccaagcataaaccaatttaacccagaggaagcggttgaattcgacacagtacctaatgtaaaaaagcagcatgaagtgaacgttggtgggtatcaatttcaaggcaccttaattccccccaaacaagacttctttctcccacttatatttctttgtattgccatgcaggcatctcaaattcttttggatttggaggtcacaattctgtcgtagtatttgcgccatttaagccataaggtgttcctggcctcacaaaccttggtcagaacaacgaggatc

SEQ ID NO: 151868 - DNA, 2254 bp, Zea Mays
gcgaacccattctccatatacacaggggtaacgctccgcctcgcagccagcaggacaccactcatcttccttcccccccgcctcgtttccatcgccgccactctcttgctcccccgtaccatccctcgccaccgccaccgccgtcgctatgcagagcctcctcgtgcccactgctgcatcggccccggtggcggctccgcgggctcggcggaatctccctatgcgcctctccgtccgcgcctccgcgacggcggcagcggcaccgcggcgggagacggatcccaagaagcgggtggtgatcacggggatggggttggtctccgtgttcgggaacgacgtagacgcttactacgaccgcctgctagccggggagagcggcatcgggcccatcgaccgcttcgacgcctctaagttccccacccgcttcgccggccagatccggggcttctcgtccgagggctacatcgacggaaagaacgaccgccgcctcgacgactgcctccgatactgcatcgtcagtggcaagaaggctctcgaggctgccggtattgcccacggctccaagcccatggaaaagattgacaaaacccgggctggtgtgcttgtgggcactggtatgggtggcctcacggtgttttctgatggtgttcagaatctcattgagaagggctacagaaaaataactcctttcttcatcccatatgctataacaaacatgggttctgccctgcttggaatggatattggtttcatgggtccaaactactccatctcaactgcctgtgctacctcgaactactgtttctatgctgcagcaaaccatatccgtagaggcgaagcggatataatgatagctggaggcactgaagctgcaattattccaattggtgttggtggctttgttgcatgtagagcactgtcacagaggaatgatgaccctaaaacagcatccaggccttgggacaaggatcgtgatggttttgtcatgggtgaaggagctggagtcctggtcatggagagcctagagcatgcaattaaacgtgatgcaccaataattgcggagtatttaggaggtgctgtgaactgtgatgcttaccatatgactgacccgagatctgatggtcttggtgtttcatcttgcatcaagcaaagtctcgaagatgctggtgtggctcctgaggaggtcaactatattaatgctcatgcaacatcaacccttgctggtgatctggcagaggtgaatgccatcaagcaagtcttcaaggacccatctgggatcaaaataaatgcaaccaagtccatgataggacattgccttggtgcagcaggtggtttggaagccattgctactgtcaaagcgataactactggatgggtgcatccaagcataaaccaatttaacccagaggaagcggttgaattcgacacagtacctaatgtaaaaaagcagcatgaagtgaacgttggcatctcaaattcttttggatttggaggtcacaattctgtcgtagtatttgcgccatttaagccataaggtgttcctggcctcacaaaccttggtcagaacaacgaggatctttaggagtttctgcgttcaattttcatgtgttctctttaggggaagttatgtcagatctgagccggcaacgttacaaatgaactaaagctgagatacattgctttttagataactccaggttcacttaggttgtgcgcggctgtacaacgttgctttgaatcatttgtaattgattgtactgttttttcatgtaatggaagaggggttctgtagaagaagcacatttggaccttctagagttctagttcaataccacacaaatgaatttggagggtaggaattgtgtccctgctgctggatctggacgctttatggaaacttttttttttgaaatggcaatatatataatttacacgcgcgcttgagagaaacgtgcgctatctcaataacagactagtataatattttggaaagtatgcttgaatacgtttgaagccatgaatgcaaccgaataagctaactgtgaatgagaaaaaaaatgtcttcacaaaaccatttttgtcactggtggtgttgaaccaaggtgttgaagggggaaccaagcatttgttggtgggtggtgttgaaggaggttaacgtgattttggtggttaattaataacatactacatctgttttcgaataattgtcatcctctagttcatttttgaactataaaatgcgacaaataaaaaa

SEQ ID NO: 151869 - DNA, 1137 bp, Zea Mays
ggtggcggcggcttgtgtgtccaaagtccatctacggcacggcgtctcacagcctcaccccaactcgtcgccttcctcgtcattcccttcgtcgcggagaggaggtcacgcggctgattcccgccgcttgcgatcggttctgtctcccagcttccccttgagtacacctcattttgtgacaccgactagctgagccctgctgattgctcgcctagcacgctgttgcgctgattcgttgtcttgtgagctgttctagggttcgtagggagcaggatcagctgacgcgatgttccccaggatttcccggctcggggcgcggctcctgcgcgagtctagagccgagacaagagctggaaacttgctaaacagtcaacgcattttctttcaagatcatgttaaccggcattcgatcccagtggtgactcctgctgtattatcgatgcggaatgcccttttgtcaactgcaacaagtggtgatcaggatgaaagtagtcaggcaaaagataaaatctcggtaacatttgtcaacaaggatggctcagaaaagacaatatgtgttccagttggaatgtccatgttagaagctgctcatgaaaacgacatagagcttgaaggagcatgtgagggctcacttgcgtgttctacttgtcatgtaatagtaatggatgtaaaatattataacaagttagaagatccagcagatgaagaaaacgatatgcttgaccttgcatttgggctcacagaaacatcacgccttggctgccaagtgatcgcgaagcctgagcttgatggcatgcggctggcgctacctgtagccacaagaaacttcgcagtagatggctatgtaccgaaaccacactgaagagacggtcatctaccacactgaagagacggtcatctaccacactgaagagacggtcatatcggggaacacggattcttacagcagtcaattttgtagtttataacctgtaacttaactacagctttgttacttgtagtccggtccgggtggcttcggactaccttgttgagggtttgttcatttgatgaatcccttggttacttgcagagaagagagaacagtgcttcatctgggcgaataaacatccgttctgtgtgcaatgtgtactcaca

SEQ ID NO: 151870 - DNA, 1017 bp, Zea Mays
ggtggcggcggcttgtgtgtccaaagtccatctacggcacggcgtctcacagcctcaccccaactcgtcgccttcctcgtcattcccttcgtcgcggagaggaggtcacgcggctgattcccgccgcttgcgatcgggttcgtagggagcaggatcagctgacgcgatgttccccaggatttcccggctcggggcgcggctcctgcgcgagtctagagccgagacaagagctggaaacttgctaaacagtcaacgcattttctttcaagatcatgttaaccggcattcgatcccagtggtgactcctgctgtattatcgatgcggaatgcccttttgtcaactgcaacaagtggtgatcaggatgaaagtagtcaggcaaaagataaaatctcggtaacatttgtcaacaaggatggctcagaaaagacaatatgtgttccagttggaatgtccatgttagaagctgctcatgaaaacgacatagagcttgaaggagcatgtgagggctcacttgcgtgttctacttgtcatgtaatagtaatggatgtaaaatattataacaagttagaagatccagcagatgaagaaaacgatatgcttgaccttgcatttgggctcacagaaacatcacgccttggctgccaagtgatcgcgaagcctgagcttgatggcatgcggctggcgctacctgtagccacaagaaacttcgcagtagatggctatgtaccgaaaccacactgaagagacggtcatctaccacactgaagagacggtcatctaccacactgaagagacggtcatatcggggaacacggattcttacagcagtcaattttgtagtttataacctgtaacttaactacagctttgttacttgtagtccggtccgggtggcttcggactaccttgttgagggtttgttcatttgatgaatcccttggttacttgcagagaagagagaacagtgcttcatctgggcgaataaacatccgttctgtgtgcaatgtgtactcaca

SEQ ID NO: 151871 - DNA, 1433 bp, Zea Mays
ggtggcggcggcttgtgtgtccaaagtccatctacggcacggcgtctcacagcctcaccccaactcgtcgccttcctcgtcattcccttcgtcgcggagaggaggtcacgcggctgattcccgccgcttgcgatcggttctgtctcccagcttccccttgagtacacctcattttgtgacaccgactagctgagccctgctgattgctcgcctagcacgctgttgcgctgattcgttgtcttgtgagctgttctagggttcgtagggagcaggatcagctgacgcgatgttccccaggatttcccggctcggggcgcggctcctgcgcgagtctagagccgagacaagagctggaaacttgctaaacagtcaacgcattttctttcaagatcatgttaaccggcattcgatcccagtggtgactcctgctgtattatcgatgcggaatgcccttttgtcaactgcaacaagtggtgatcaggatgaaagtagtcaggcaaaagataagtaagtgcatttgtctcttgttttcttatagtcttatatatcacaaaatttgaactccctggttgtctttttagcttggaaccaggtaccaccttacccagatccttctaacatggaattcttttgttattgttgtctctccatttaaggagctgctccttccacatctagaggaatagatggcactaaatgcatcagttttactgaattgttagtgttgagctttcaataattatttagggtagaagcagtcctctgatgattgttgaggttatttttctccatactgtgaacagaatctcggtaacatttgtcaacaaggatggctcagaaaagacaatatgtgttccagttggaatgtccatgttagaagctgctcatgaaaacgacatagagcttgaaggagcatgtgagggctcacttgcgtgttctacttgtcatgtaatagtaatggatgtaaaatattataacaagttagaagatccagcagatgaagaaaacgatatgcttgaccttgcatttgggctcacagaaacatcacgccttggctgccaagtgatcgcgaagcctgagcttgatggcatgcggctggcgctacctgtagccacaagaaacttcgcagtagatggctatgtaccgaaaccacactgaagagacggtcatctaccacactgaagagacggtcatctaccacactgaagagacggtcatatcggggaacacggattcttacagcagtcaattttgtagtttataacctgtaacttaactacagctttgttacttgtagtccggtccgggtggcttcggactaccttgttgagggtttgttcatttgatgaatcccttggttacttgcagagaagagagaacagtgcttcatctgggcgaataaacatccgttctgtgtgcaatgtgtactcaca

SEQ ID NO: 151872 - DNA, 1313 bp, Zea Mays
ggtggcggcggcttgtgtgtccaaagtccatctacggcacggcgtctcacagcctcaccccaactcgtcgccttcctcgtcattcccttcgtcgcggagaggaggtcacgcggctgattcccgccgcttgcgatcgggttcgtagggagcaggatcagctgacgcgatgttccccaggatttcccggctcggggcgcggctcctgcgcgagtctagagccgagacaagagctggaaacttgctaaacagtcaacgcattttctttcaagatcatgttaaccggcattcgatcccagtggtgactcctgctgtattatcgatgcggaatgcccttttgtcaactgcaacaagtggtgatcaggatgaaagtagtcaggcaaaagataagtaagtgcatttgtctcttgttttcttatagtcttatatatcacaaaatttgaactccctggttgtctttttagcttggaaccaggtaccaccttacccagatccttctaacatggaattcttttgttattgttgtctctccatttaaggagctgctccttccacatctagaggaatagatggcactaaatgcatcagttttactgaattgttagtgttgagctttcaataattatttagggtagaagcagtcctctgatgattgttgaggttatttttctccatactgtgaacagaatctcggtaacatttgtcaacaaggatggctcagaaaagacaatatgtgttccagttggaatgtccatgttagaagctgctcatgaaaacgacatagagcttgaaggagcatgtgagggctcacttgcgtgttctacttgtcatgtaatagtaatggatgtaaaatattataacaagttagaagatccagcagatgaagaaaacgatatgcttgaccttgcatttgggctcacagaaacatcacgccttggctgccaagtgatcgcgaagcctgagcttgatggcatgcggctggcgctacctgtagccacaagaaacttcgcagtagatggctatgtaccgaaaccacactgaagagacggtcatctaccacactgaagagacggtcatctaccacactgaagagacggtcatatcggggaacacggattcttacagcagtcaattttgtagtttataacctgtaacttaactacagctttgttacttgtagtccggtccgggtggcttcggactaccttgttgagggtttgttcatttgatgaatcccttggttacttgcagagaagagagaacagtgcttcatctgggcgaataaacatccgttctgtgtgcaatgtgtactcaca

SEQ ID NO: 151873 - DNA, 619 bp, Zea Mays
gtacattaggtattgtaatcattcctttttatgttccatcaactgattttcagctgtagttcatgataaccttccctgctattgtggctactgcaggagcatgtgagggctcacttgcgtgttctacttgtcatgtaatagtaatggatgtaaaatattataacaagttagaagatccagcagatgaagaaaacgatatgcttgaccttgcatttgggctcacagaaacatcacgccttggctgccaagtgatcgcgaagcctgagcttgatggcatgcggctggcgctacctgtagccacaagaaacttcgcagtagatggctatgtaccgaaaccacactgaagagacggtcatctaccacactgaagagacggtcatctaccacactgaagagacggtcatatcggggaacacggattcttacagcagtcaattttgtagtttataacctgtaacttaactacagctttgttacttgtagtccggtccgggtggcttcggactaccttgttgagggtttgttcatttgatgaatcccttggttacttgcagagaagagagaacagtgcttcatctgggcgaataaacatccgttctgtgtgcaatgtgtactcaca

SEQ ID NO: 151874 - DNA, 104 bp, Zea Mays
attatatatgcctatagacatcattattaagctgaaaactgaaaacttccacaagcatagaatcacaaccaccattaggggggcccaggcacaaatcaaattcg

SEQ ID NO: 151875 - DNA, 1216 bp, Zea Mays
ccagcttctggagccttcgcgtttagcgtggaaccgcaagccagccaagcaacttgcgccactcgcctcgcctcgcctcgcctcgcccctgtttgtttgcttctggccggaccccttccccttctccggtgcacgccactctgcaacccccctcctctcgagcagagcagtcgagcagagcggcagcctcggcgcgcgccggcgccagccgacatgactgccggtcagtgcggcaacatccaggaccaggaggcagctcctggcgccgacctctacgccgtgctcgggctcaacagggagtgcaccgacgccgagctcagggtcgcgtaccggaggctcgccatgatatggcatccggacaggtgctcggcgtccggcagctcggcgcgcgtggaggaggccaaggagcggttccaggagatccagggcgcctactccgtgctctccgactccaacaagcggctcctctacgacgtcggcgtctacgacagcgaggacgacgacgctgacctgtcggggatgggcgacttcctcggagagatggccgacatgatgagccaggccacgccaacggagagcttcgaggagctgcagcagctgttcgtggacatgttccaggacgacctggacggcgccgggttcttcggcgggcttccgacgagccgcagtgcccagggtcctagcagcacctcgttgccaccgtcgacgtcgccattgcggccgacgcctcctgcaagaagtaagggtgcgcaaacaccgtcgtcgtttaacggcgctgggaggcggggttcgacggcgaagcggccgaggaccggttgggctggcctggaaccggatctgggcctctctggattctgtttcatggtgagcaagtcgaaggagaggccggcggcatgggcgtgcgacggcggtgacgagaggagcggcagcaagcagaggctgtcaacgagccgcgacgtctccggctccggtggtgggatgtcgcgctcgcgcggcagagccaaagcagtagaaacttgtgggcagtgaacggcctctagtcttgaatcttgattagagcaccgtttattcacttactggctcgcgtcagtcgtagtagctcgaggcacgttgaaaaggagagagaaaagatctgtttcattcttcaatctattccaagctagccataaatagccaatctcttgctgcattgtttcgatgaatttttatttgggag

SEQ ID NO: 151876 - DNA, 1460 bp, Zea Mays
cgcgacgtgaccttttccatacttgcatgcgtgtggctggcgcgcctcctagcaattgcaagtcggggaggcaggccgccttcaaacggtagatctagccgatgtcgtcgtcgatgggacacgagagtagcggtggcggcgccgacgaggaggaccccgccggcctccagcgggtcatttggttgcggcagatgctccaccgctggcagtcctccagctccaggattgccgccgagaggaggtccagcgccagcgacgacggcgacagagccaacccagacgacgccaacgccacgacagaccaaagcagcaacggcgaccccacgcctgccgctgcagacaatgccagcagcagcagcagcagcaggaaccagatgctgccggcggcgccgcatggtgcggcggacgaggaggacgaggacgaggaccggcggctcctgtcgcgggtgctgctggtggaggagcgcaggcgggggtgcccccccgacgcggcggcgtgcgactcgccgatgacgccgatgacccccgacgcgccggcggacgtgccccgcgggtgctgccccgtgtacgtgggcgcggagcggcgccggttcgtggtgccgacggcgtacctgggcatgcccgtgttccggcgcctgcttgagaaggcggaggaagagttcgagttcgactaccacggcggcgccgtcaccatcccctgcgacacggaggcgttcaagtacatcctcgtcgtcatggaccgccaccgccacggcctggtcgacgacgatgggaacgagaagcacgaagagcaagacgcatcatcttcgtaggatcgataacaagctcggagatctccggttgaatgcgaccctccgtactagtcacgcagggcaagggcggtacttttaacgagtaaagaaagggtaatgggtgttgtttgtttgtcactatgcaaatgcacgtttggcgctctgtcatcacgatgccatggccgagacgatgttcggttcgtgtcttatttttagaataccgttctagaatctagttattagctaaatggtttctaaatttttatattagattttgtaccataagcttacgatctctctataaactgttaatagaatttgtattggattttgtgcagtatctaaccttcttcaaatccacgaggaatcaaacgggagagtgtggggaccgttttttatttcgttctttaaaaaaaacgttttggtctgtgtggaaactaatcttagccttgtaaatagagtttctggggaactaatcttatgtttctatctaaagtttggtgtagtagattatggtagcaagttaaaatatcttgacaccatgacttagggctgtaaaacgagcccggctcgtctcggctcgatgtggctcgctaccagatgcctcacattctagaggcaccaacaacacctgtacctcgatggaacttgacatgcattgtccatatg

SEQ ID NO: 151877 - DNA, 711 bp, Zea Mays
atgtcgtcgtcgatgggacacgagagtagcggtggcggcgccgacgaggaggaccccgccggcctccagcgggtcatttggttgcggcagatgctccaccgctggcagtcctccagctccaggattgccgccgagaggaggtccagcgccagcgacgacggcgacagagccaacccagacgacgccaacgccacgacagaccaaagcagcaacggcgaccccacgcctgccgctgcagacaatgccagcagcagcagcagcagcaggaaccagatgctgccggcggcgccgcatggtgcggcggacgaggaggacgaggacgaggaccggcggctcctgtcgcgggtgctgctggtggaggagcgcaggcgggggtgcccccccgacgcggcggcgtgcgactcgccgatgacgccgatgacccccgacgcgccggcggacgtgccccgcgggtgctgccccgtgtacgtgggcgcggagcggcgccggttcgtggtgccgacggcgtacctgggcatgcccgtgttccggcgcctgcttgagaaggcggaggaagagttcgagttcgactaccacggcggcgccgtcaccatcccctgcgacacggaggcgttcaagtacatcctcgtcgtcatggaccgccaccgccacggcctggtcgacgacgatgggaacgagaagcacgaagagcaagacgcatcatcttcgtag

SEQ ID NO: 151878 - DNA, 150 bp, Zea Mays
atggggttcgactgcgtgcaccgctctgcactggatgccatgggattcgactacgtgcaccgctctgctgtaggcattgtcatcgtcgatgtcctcctccgctacatcacccacctggactggtctgccgccttccatggcatattataa

SEQ ID NO: 151879 - DNA, 2393 bp, Zea Mays
agtcatattcttacttcatttaaggacaaatttgcgatatgtgggaaggatattatgctgacgctcattgctagacgctccaggcattatgctggcaccaggtatctaaagaggggtgtgaatgaggagggcagagtagcaaatgatgttgagactgagcaaattgtttatgaaaacatgcttggaccatggcaaataagctctgttgtgcagaacaggggttcaattccactattctggtcccaggagacatcaaagctgaatcttaagcctgatatcatatgtaagcatttaagttcttgttcaatgcgtaaaatattattcaaacatttgtttttccttgcagtgcatgaaaaggacaaaaattatgaggctaccaggcttcattttgaaaatcttaggaagagatatggaaatcctatcatcatcttaaacttgattaagacacttgagaagagaccacgtgaaatcatactccgttgggaatttgacagagcaataaagattattaatagtggtctaccaggtgaagatcatttaagatttttacattgggatcttcataagaactctcaaagcaaaagtacaaatgcccttcaagtgcttttgaaagtggcatttgaagctttgaacatgacagaattcttttattgtcaagtttccccagatcaaagggcaaagggctcccctaatttaagccctacattgaaaattggttttggtcatcatgcgtgtgatgacaaaaattgtggcaatgcagattatgttgatgatcttgatgacatttcccaagaagatacctgtggtagttctgatcctggcaatggaattgcggaagataaatttgaggtcaatggatctgctcaaataaagcgtccaaaatttcaaaagggtgtcttacgtacaaactgtatagattgtttggatcgcacaaatgttgctcaatatgcctatggcctagctgctttaggacaccagttacatgcacttggttctgtagaatctccagaagttcatctagactctcctttgtctcgacatttgatgcatttttatgaacgcatgggtgacacacttgctttacagtatggtggttcggctgctcacaataagatattctctgcgaaaagagggcacttgaagtttgccattcaatctcaagagttctttaggacactgcaacggtactacagtaatgcatatatggatgcttacaaacaagctgcgataaacttatttttaggatacttccagccacaggtgggaaaacctgcactttgggagccagaatctggtgatgagcatgtacttgatgacgagacatgtaaattgatgaagagggcaagatcagatggcagcattcttaataaaagcaaactatcaatatccagtaatggcccaaatggaattttaaagttagcatttactggttcaaaaaatgaagggcagcgtccaaaccggagttctgatacagcctgtgacaatggcatgtcaaagtcaaggtatactccgacactgtctcacattaagcatataagctgtgaactagactattacaatggttctggtgattcaaatttcttggatcttgactggcttacagcttcagacaatgaaaggtcaaaagccataagcactcctgatgtgaatatttcaactgatagtggtgttcgtgatgtaatatctgggacaacggacgatcaagcttctgggatccacgcccaggggttttcaaaggatttcgtgcagtggctcaatcaaggagaggcgttttggtactgacatcgcaaggtgggcttaccatgtaaaaccaagccacacgatggttgcacttgcaacccaaacctggttccaaaagcatcataactctcaaagaccattgcaagcaaggagggcaccatcgacgtgcacgagatttgcttgtcaaccatcagcattctcctcgcggccaaatatgatgacggggcttagagtcgcacacactgttagcagacttgtctagggaagtgtaccattctgttcattgattggagcttgctcaccaggcgggtagatagcgcatcgctgttgttcttctttaaaaaaaaaggaaagaaagaaggtggtaggtagtagtatattcttttgaagatgtaccattgtccagacatcatcgtctccatctccattgtgtaaatatatatgtatgtcccaggtgctcccacctttcgcttcgccgttgtgagagttgaggtgggcaaaaaagcatcattttcccccctcggttgggggtctttcccttctggaatcgtgtacatgtgtcttctgtggcaggcaacaggaggcgagattgttgtgtacttcccatcgtactaaacccctctgttaccgatactgcccccttggaccgttcg

SEQ ID NO: 151880 - DNA, 849 bp, Zea Mays
catttataatcgatatgtagacgaatgtttataacctcattattatttttcgtgctgtgcattatgcttaaacaggtcaaaagccataagcactcctgatgtgaatatttcaactgatagtggtgttcgtgatgtaatatctgggacaacggacgatcaagcttctgggatccacgcccaggggttttcaaaggatttcgtgcagtggctcaatcaaggagaggcgttttggtactgacatcgcaaggtgggcttaccatgtaaaaccaagccacacgatggttgcacttgcaacccaaacctggttccaaaagcatcataactctcaaagaccattgcaagcaaggagggcaccatcgacgtgcacgagatttgcttgtcaaccatcagcattctcctcgcggccaaatatgatgacggggcttagagtcgcacacactgttagcagacttgtctagggaagtgtaccattctgttcattgattggagcttgctcaccaggcgggtagatagcgcatcgctgttgttcttctttaaaaaaaaaggaaagaaagaaggtggtaggtagtagtatattcttttgaagatgtaccattgtccagacatcatcgtctccatctccattgtgtaaatatatatgtatgtcccaggtgctcccacctttcgcttcgccgttgtgagagttgaggtgggcaaaaaagcatcattttcccccctcggttgggggtctttcccttctggaatcgtgtacatgtgtcttctgtggcaggcaacaggaggcgagattgttgtgtacttcccatcgtactaaacccctctgttaccgatactgcccccttggaccgttcg

SEQ ID NO: 151881 - DNA, 457 bp, Zea Mays
cccgtctatttattggtccctctcccgtcccagagaaaccctccctccctcctccattggactgcttgctccctgttgaccattgggtattctgaaccatcgagccatggctgccaagctgactcgcctccacagtcttcgcgaacgccttggtgccaccttctcctcccatcccaatgaactgatagcactcttttccaggtgggcttaccaaaatcatataacttgcatttcattcggtactgaaagttgttaatttgttattctcttcatgcctgtcttaatagcacacccagatgtaaacacgagattatgcaacttcttacttggtttcttttgttggcaccatcatgcatgctaattgctaaggatgttacctattcatccttgactcatattatcatatgtaatgattttatgatctcgagactattgattgtgaagcatagtatagctg

SEQ ID NO: 151882 - DNA, 2972 bp, Zea Mays
cccgtctatttattggtccctctcccgtcccagagaaaccctccctccctcctccattggactgcttgctccctgttgaccattgggtattctgaaccatcgagccatggctgccaagctgactcgcctccacagtcttcgcgaacgccttggtgccaccttctcctcccatcccaatgaactgatagcactcttttccaggtatgttcaccagggcaagggaatgcttcagcgccatcagctgcttgcggagtttgatgccctgtttgatagtgacaaggagaagtatgcaccctttgaagacattcttcgtgctgctcaggaagcaattgtgctccccccatgggttgcacttgctatcaggccaaggcctggtgtctgggattacattcgggtgaatgtaagtgagctggctgtggaggagctgagtgtttctgagtacttggcattcaaggaacagctggtggatggacaatccaacagcaactttgtgcttgagcttgattttgagcccttcaatgcctcctttcctcgtccttccatgtcgaagtccatcggaaatggagtgcaattccttaaccgacacctgtcgtccaagttgttccaggacaaggagagtttgtaccccttgctgaacttcctcaaggctcataactacaagggcacgacgatgatgttgaatgacagaatccaaagccttcgtggtctccaatcatccctgagaaaggcagaggagtatctactgagtgttcctcaagacactccctactcggagttcaaccataggttccaagagcttggcttggagaagggttggggtgacactgcgaagcgtgtactcgacacactccacttgcttctcgaccttctggaggcccctgatcctgccaacttggagaagttccttggaactataccaatgatgttcaacgttgttatcctgtctcctcatggctacttcgcccagtccaatgtgcttggataccctgacactggcggtcaggttgtgtacattctggatcaggtccgtgctttggagaatgagatgcttctgaggattaagcagcaaggccttgatatcactccgaagatcctcattgttaccaggctgttgcctgatgctgctgggactacgtgcggtcagcggctggagaaggtcattggtactgagcacacagacatcattcgcgttcccttcagaaatgagaatggcatcctccgcaagtggatctctcgttttgatgtctggccatacctggagacatacactgaggatgtttccagtgaaataatgaaagaaatgcaggccaagcctgaccttatcattggcaactacagcgatggcaacctagtcgccactctgctcgcgcacaagttgggagtcactcagtgtaccatcgctcatgccttggagaaaaccaaataccccaactcggacatatacttggacaaattcgacagccagtaccacttctcttgccagttcacagctgaccttattgccatgaaccacaccgatttcatcatcaccagcacattccaagaaatcgcgggaagcaaggacaccgtggggcagtacgagtcccacatcgcgttcactcttcctgggctctaccgtgtcgtccatggcatcgatgttttcgatcccaagttcaacattgtctcccctggagcagacatgagtgtttactacccgtatacggaaaccgacaagagactcactgccttccatcctgaaatcgaggagctcatctacagcgacgtcgagaactccgagcacaagttcgtgctgaaggacaagaagaagccgatcatcttctcgatggcgcgtctcgaccgcgtgaagaacatgacaggcctggtcgagatgtacggcaagaacgcgcgcctgagggagctggcgaacctcgtgatcgttgccggtgaccacggcaaggagtccaaggacagggaggagcaggcggagttcaagaagatgtacagcctcatcgacgagtacaagttgaagggccatatccggtggatctcggcgcagatgaaccgcgtccgcaacggggagctgtaccgctacatttgcgatacgaagggcgcattcgtgcagcctgcgttctacgaagcgttcggcctgactgtgatcgagtccatgacgtgcggtctgccaacgatcgcgacctgccatggtggccctgctgagatcatcgtggacggggtatctggcctgcacattgacccttaccacagcgacaaggccgcggatatcctggtcaacttctttgacaaatgcaaggcagatccgagctactgggacaagatctcacagggcggcctgcagagaatctatgagaagtacacctggaagctctactccgagaggctgatgaccctgaccggcgtgtacgggttctggaagtacgtgagcaacctggagaggcgcgagacccgccgctacatcgagatgttctacgccctgaagtaccgtagcctggcaagccaggttccgctgtccttcgattagtacggggaaagaagaagaagaagaagcccaggccggagaaccatcgcctgcatttcgatctgtttcaccgcaattcgcattgttagtcgtgtattggagttatgtgtacttggtttccaagaactttggttccttctcgttttttttccttgtttgagcgtttttgggcagcgctggcctggttcctagtatggtgggaattggctgcaccttttgcttcgaataaaaatgcctgctcgttcacctgtcttccagagtgcaatgcgatgttctgttgcccaggtcgtgtggttctgactgatggcgatgttgtgttcttctgttaatcgcctgtttaacgtggtaggctgatgcttcttgttgagaaagcttgctgtgccagacatggctgcttgaatacaagtgaaggaaaaaaaaagccatgccaagtaaagttgcacaaaatttcaactgctca

SEQ ID NO: 151883 - DNA, 2802 bp, Zea Mays
cccgtctatttattggtccctctcccgtcccagagaaaccctccctccctcctccattggactgcttgctccctgttgaccattgggtattctgaaccatcgagccatggctgccaagctgactcgcctccacagtcttcgcgaacgccttggtgccaccttctcctcccatcccaatgaactgatagcactcttttccaggtatgttcaccagggcaagggaatgcttcagcgccatcagctgcttgcggagtttgatgccctgtttgatagtgacaaggagaagtatgcaccctttgaagacattcttcgtgctgctcaggaagcaattgtgctccccccatgggttgcacttgctatcaggccaaggcctggtgtctgggattacattcgggtgaatgtaagtgagctggctgtggaggagctgagtgtttctgagtacttggcattcaaggaacagctggtggatggacaatccaacagcaactttgtgcttgagcttgattttgagcccttcaatgcctcctttcctcgtccttccatgtcgaagtccatcggaaatggagtgcaattccttaaccgacacctgtcgtccaagttgttccaggacaaggagagtttgtaccccttgctgaacttcctcaaggctcataactacaagggcacgacgatgatgttgaatgacagaatccaaagccttcgtggtctccaatcatccctgagaaaggcagaggagtatctactgagtgttcctcaagacactccctactcggagttcaaccataggttccaagagcttggcttggagaagggttggggtgacactgcgaagcgtgtactcgacacactccacttgcttctcgaccttctggaggcccctgatcctgccaacttggagaagttccttggaactataccaatgatgttcaacgttgttatcctgtctcctcatggctacttcgcccagtccaatgtgcttggataccctgacactggcggtcaggttgtgtacattctggatcaggtccgtgctttggagaatgagatgcttctgaggattaagcagcaaggccttgatatcactccgaagatcctcattgttaccaggctgttgcctgatgctgctgggactacgtgcggtcagcggctggagaaggtcattggtactgagcacacagacatcattcgcgttcccttcagaaatgagaatggcatcctccgcaagtggatctctcgttttgatgtctggccatacctggagacatacactgaggatgtttccagtgaaataatgaaagaaatgcaggccaagcctgaccttatcattggcaactacagcgatggcaacctagtcgccactctgctcgcgcacaagttgggagtcactcagtgtaccatcgctcatgccttggagaaaaccaaataccccaactcggacatatacttggacaaattcgacagccagtaccacttctcttgccagttcacagctgaccttattgccatgaaccacaccgatttcatcatcaccagcacattccaagaaatcgcgggaagcaaggacaccgtggggcagtacgagtcccacatcgcgttcactcttcctgggctctaccgtgtcgtccatggcatcgatgttttcgatcccaagttcaacattgtctcccctggagcagacatgagtgtttactacccgtatacggaaaccgacaagagactcactgccttccatcctgaaatcgaggagctcatctacagcgacgtcgagaactccgagcacaagttcgtgctgaaggacaagaagaagccgatcatcttctcgatggcgcgtctcgaccgcgtgaagaacatgacaggcctggtcgagatgtacggcaagaacgcgcgcctgagggagctggcgaacctcgtgatcgttgccggtgaccacggcaaggagtccaaggacagggaggagcaggcggagttcaagaagatgtacagcctcatcgacgagtacaagttgaagggccatatccggtggatctcggcgcagatgaaccgcgtccgcaacggggagctgtaccgctacatttgcgatacgaagggcgcattcgtgcagcctgcgttctacgaagcgttcggcctgactgtgatcgagtccatgacgtgcggtctgccaacgatcgcgacctgccatggtggccctgctgagatcatcgtggacggggtatctggcctgcacattgacccttaccacagcgacaaggccgcggatatcctggtcaacttctttgacaaatgcaaggcagatccgagctactgggacaagatctcacagggcggcctgcagagaatctatgagaagtacacctggaagctctactccgagaggctgatgaccctgaccggcgtgtacgggttctggaagtacgtgagcaacctggagaggcgcgagacccgccgctacatcgagatgttctacgccctgaagtaccgtagcctggcaagccaggttccgctgtccttcgattagtacggggaaagaagaagaagaagaagcccaggccggagaaccatcgcctgcatttcgatctgtttcaccgcaattcgcattgttagtcgtgtattggagttatgtgtacttggtttccaagaactttggttccttctcgttttttttccttgtttgagcgtttttgggcagcgctggcctggttcctagtatggtgggaattggctgcaccttttgcttcgaataaaaatgcctgctcgttcaccaaaaaaaaatcataaaataaaacaaaaccagaactcagatgg

SEQ ID NO: 151884 - DNA, 3223 bp, Zea Mays
attcttgcagtgcgctgtgctttattgggaagccaaatcctattattttctgcctctagggtctgaatggaatcagtactcttgagacagaaaatcaatccaatcaagttgatttctttctttaaaaatattatcacagaactaagtgcttgtgcggaatcagtactggcttttgtttggtggaggatcaatacttgcttttgtttgggggtggcaactgttttgctataagattccatgtgttcctgttgagatgaatcatatatagtatagctgcatactacaaatctgtttttcaaatttaggttgctttggcatgatctatttttttgtcagacagactttctaagtggtagctcttgatttcttgttcttgtacaactggtgctgctgaatcttgaccgtatagctcgaattgcagtattctgaaccatcgagccatggctgccaagctgactcgcctccacagtcttcgcgaacgccttggtgccaccttctcctcccatcccaatgaactgatagcactcttttccaggtatgttcaccagggcaagggaatgcttcagcgccatcagctgcttgcggagtttgatgccctgtttgatagtgacaaggagaagtatgcaccctttgaagacattcttcgtgctgctcaggaagcaattgtgctccccccatgggttgcacttgctatcaggccaaggcctggtgtctgggattacattcgggtgaatgtaagtgagctggctgtggaggagctgagtgtttctgagtacttggcattcaaggaacagctggtggatggacaatccaacagcaactttgtgcttgagcttgattttgagcccttcaatgcctcctttcctcgtccttccatgtcgaagtccatcggaaatggagtgcaattccttaaccgacacctgtcgtccaagttgttccaggacaaggagagtttgtaccccttgctgaacttcctcaaggctcataactacaagggcacgacgatgatgttgaatgacagaatccaaagccttcgtggtctccaatcatccctgagaaaggcagaggagtatctactgagtgttcctcaagacactccctactcggagttcaaccataggttccaagagcttggcttggagaagggttggggtgacactgcgaagcgtgtactcgacacactccacttgcttctcgaccttctggaggcccctgatcctgccaacttggagaagttccttggaactataccaatgatgttcaacgttgttatcctgtctcctcatggctacttcgcccagtccaatgtgcttggataccctgacactggcggtcaggttgtgtacattctggatcaggtccgtgctttggagaatgagatgcttctgaggattaagcagcaaggccttgatatcactccgaagatcctcattgttaccaggctgttgcctgatgctgctgggactacgtgcggtcagcggctggagaaggtcattggtactgagcacacagacatcattcgcgttcccttcagaaatgagaatggcatcctccgcaagtggatctctcgttttgatgtctggccatacctggagacatacactgaggatgtttccagtgaaataatgaaagaaatgcaggccaagcctgaccttatcattggcaactacagcgatggcaacctagtcgccactctgctcgcgcacaagttgggagtcactcagtgtaccatcgctcatgccttggagaaaaccaaataccccaactcggacatatacttggacaaattcgacagccagtaccacttctcttgccagttcacagctgaccttattgccatgaaccacaccgatttcatcatcaccagcacattccaagaaatcgcgggaagcaaggacaccgtggggcagtacgagtcccacatcgcgttcactcttcctgggctctaccgtgtcgtccatggcatcgatgttttcgatcccaagttcaacattgtctcccctggagcagacatgagtgtttactacccgtatacggaaaccgacaagagactcactgccttccatcctgaaatcgaggagctcatctacagcgacgtcgagaactccgagcacaagttcgtgctgaaggacaagaagaagccgatcatcttctcgatggcgcgtctcgaccgcgtgaagaacatgacaggcctggtcgagatgtacggcaagaacgcgcgcctgagggagctggcgaacctcgtgatcgttgccggtgaccacggcaaggagtccaaggacagggaggagcaggcggagttcaagaagatgtacagcctcatcgacgagtacaagttgaagggccatatccggtggatctcggcgcagatgaaccgcgtccgcaacggggagctgtaccgctacatttgcgatacgaagggcgcattcgtgcagcctgcgttctacgaagcgttcggcctgactgtgatcgagtccatgacgtgcggtctgccaacgatcgcgacctgccatggtggccctgctgagatcatcgtggacggggtatctggcctgcacattgacccttaccacagcgacaaggccgcggatatcctggtcaacttctttgacaaatgcaaggcagatccgagctactgggacaagatctcacagggcggcctgcagagaatctatgagaagtacacctggaagctctactccgagaggctgatgaccctgaccggcgtgtacgggttctggaagtacgtgagcaacctggagaggcgcgagacccgccgctacatcgagatgttctacgccctgaagtaccgtagcctggtaagccgtttgatgcctgcctctgcctctgcctctgcctgccagagaggatcacgtgttcgttcccattccagcagtcttaaacgagtgaatgaactactgacgcatctctttctggaatccaggcaagccaggttccgctgtccttcgattagtacggggaaagaagaagaagaagaagcccaggccggagaaccatcgcctgcatttcgatctgtttcaccgcaattcgcattgttagtcgtgtattggagttatgtgtacttggtttccaagaactttggttccttctcgttttttttccttgtttgagcgtttttgggcagcgctggcctggttcctagtatggtgggaattggctgcaccttttgcttcgaataaaaatgcctgctcgttcacctgtc

SEQ ID NO: 151885 - DNA, 2061 bp, Zea Mays
ctcgacctctcctctgctcatagtctcacccgagtcacctccacacacacacacacacacacacacaccgatacacggacacatacacgcgctctccctcctcctcctcctcctccagtcccggcaacggaaggtccactgcggcgccggcctcactggcatcaccatattgccaaccgcgcatattttcagtttgtagaagccatcttttaaagaacattttgggcagagattgccagtactattacttgtggttaacatggacttctcagctggttcctacttcacatcatggcctgtcaattctgcttctgagagctacagtttggctgatggttcagttgaatcctatggaggagaaggaatcatgccaccttcaagctacttcatgacagccagatcagatcacaatttaaaattcagtgtgcatgaacaggattccactatgcttccaaacgaccaattgacctatgctggcgctaggcagactgatctattacctggcgagactccatctagggataagctttgtgagaatcttctggagcttcaacgactgcagaataacagcagcctaccgagtaatttagtgcccccaggggtacttcagcacaattcaacacctggggcctttcatccgcagttgaatactcctggactttcagaactgcctcatgccttatctagttcaattgatagtaatggaagtgaagtttctgcttttctcgctgatctaaatgctgtttcttcagcctcagctttgtgttccacattccaaaatgcttcttcattcatggaaccagtaaatctagaagctttcagttttcaaggggcacaaagtgattctgttttgaacaaaacaacacatccaaatgggaatatctcagtatttgacagtgctgccttggcatcactacatgatagcaaagagtttatcagtggtaggctcccctcatttgctagtgtccaggaaacaaacgtagctgctagtggtttcaagactcagaagcaggagcaaaatgcagtgtgcaacgttcctatccctacgttcactgcacgtaatcaaattgcagttgctgcaatgcccggatcactgatccctcaaaagattccttcatggatcaatgaaaacaaaagtgagggtcctgttagccatccttctgatgtacaaatccaaccaaattctgttggaaatggtgttggtgtgaagccacgagtaagggctcgtcgtggacaggcaactgatcctcatagcattgctgaacgacttcgcagagaaaaaatttcagataggatgaaaaatctacaagatcttgtcccgaattctaataaggcagacaaggcatccatgctggatgaaatcattgatcatgtgaaatttcttcagcttcaggtcaaggtgttaagcatgagtaggctaggagctccaggagcagttcttccccttctcgcagaatctcagactgagggttaccgcggtcaacttctgtcagctccaaccaacgcacaaggattactggacacggaagaatcggaagacaccttcgccttcgaggaagaggttgtgaagctaatggaaaccagcatcacaagcgcaatgcagtaccttcagaacaagggactctgcctgatgccagttgcccttgcttccgccatatccacccagaagggcgtctccgccgcgtcaatccctcccgaacagtgaaataaagacatgctgctgctcccatgagtacgaggaaacaactgcagaagacagaaaactcaagatggctgaagaatgcagcaaagcccgtatagagtacagggtaggaagttagtctgaccagtgttcatgacctcatctactaatttgcttttcagaatcagctttttggtatctattgcgcataagttggtttttccttttcccttgctctctctctctctctctccctggggccgtatccgggtgctccgtggatagttgcgtttcagaaacttgaactgtatctggatgatctatctggtttctcttttgtgcatagaaaaaactgtaaaatcttctggttctgttctgct

SEQ ID NO: 151886 - DNA, 1360 bp, Zea Mays
tccccacccattagaccaccagccgttgcccgttggcttggcttttctcccctcgcaccggagaacgcggccgccgatcccctcccctcccctttcccgccgactgatcccaccaattctgcacccgcgcagttcctgattcgattggcaagcgcaattggccgctcctgaccagacgccggatagggctggatttgattggattggatccccaattgtgtttgccacgtccgtgcgttcgggcgggcgggggagttactttagggtttcggcgggtgcggtcgccgtgtaggcggtagggttttgccatggcggagaagggctgcctcaagcggctccagaaggagtaccacgccctctgcaaggagccgcctccgcagatcgtggctcgcccgctgcccaacgacatactggagtggcactatgtactggaaggaagtaaaggcacaccctttgaaggtggatattattatgggaagctcaaatttccaccggattatccttttaaacctccaagcatcagcatgacaacccctagcggcaggtttgcgccacataaaagaatatgcttgtcaatgagtgactttcatcctgaatcttggaatccaatgtggtctgttgcaagcattctcactgggcttctgtctttcatgatggacgatgcactgacaactggaagcatcaagacgtcagatgcagaaaagagacgtttagcaaaagcttcccttgcttacaattgtgagagcaaaaactgtccgcacttcaggaaacttttcccagagtatgttgagaagtacaatcaacagcaacaattggagaatactgccgcagagccggtgccacaggagaatcctgcacctgttccatcccttgctgtccagcaagctccagtcgtcgccaatagggcgcaaccactggctgaggtacgccgtgacaagaaccagaagaaggcggtgcccttctggatggtgctggtcatgttttcagtttttggtgccgtgatggcgttgcccctaatgcaactttgacaacaataaagaccatgaggacgtgtgataccggggcagtaattttgtatagttttccattggttcgtgagtgtaacaaagttgccccctagacttacctaccaccttggagtcatattgatgaacttgtgatggtaacatgtgtagaaccgttatctatcttgactagtagcgtcagaagctcgttcgtattttgctttcgtttccaaaatcgtatagttattacttttcttgcccttgttcatctttgctgtgtgtgctggctttaaggttcagttcacaatttcatattccctttccaagcggcaagcgcatgtgttcttttgaatttt

SEQ ID NO: 151887 - DNA, 216 bp, Zea Mays
atgttacgtttgcagatatggacctcagtggttttctccacattaggaaagctggaagagccttttgaactcagtttttgctaacagtggtgttatggtgaaatcgagtttgtgtgtatgtaccaacagctaaaatgtaaacacgacattatcatagctgagtacaggaataattatcttttatatcttattgtaaaatctgaaacagttctcatg

SEQ ID NO: 151888 - DNA, 1325 bp, Zea Mays
agatgcaaaattttcaagtctgttaaatgttggttattccatcaattgtttctagactaaggaccacgaaatcaaccactaataatacaaaaacagtgcattcgactacagacactacaaatgcacagctgagtagctgacaatttcaaacaaacaactctatgatgtaatcaattcacataccttcatctacatcaacagcaaccaccatcttagccgctgcctgctccggaaaccctagccgcttccctcgccgacaggcaccattcacgttcatgctcttgcctgtggcggcctcctcgagcggcagcacctccggatcgcgcatcagctgccgctgcgtggtgagcacctgcgccttcatccccgccgcctctccgtccaccctcctcctgaactcgccgtcgccgccaccatcccgccaacccaagcaacccctcaagctaagcgcgccgctcggcgtgaacctcctcccggctcccagatcaagaaataccgccttgcccggcagggtcctgcccctctcgacgcgcgcggtcgagtaggcgaacctgcagaggcaggagcggttggcggcggcggatggcatagcaccgctcggattccaactcaaacgcagaggcggaggccggagacgatacaacagcaaccgcacggctccgcggcttagcatgtcgacagaagcattcctatcccggggcagcccgacaaacctggacgcctcgcattcggcaaatcagattcgtcacaccccgcaatcgagaagaaacaaaagcgcagatcacaataaccgacggaatcgcttgcctgaacacgcgagtgagggcgaggattgcgacgaatcgaatgcctcggtgaggtcggaggtcggcgtctcagtcctcacaccggtcccgtgatctgggccatctctttcaagcgagatcgaaggtcgcgcggcgagggaaaagctcggaaatttcgtttggaaattctcagggcatatacgaaacggagatggcaaggcggatttcttggtcgattccagtgaacctttttcgtttcttcttccgctcttgctgtttggtttgtaggatttgtgcgactaaaaaaaacgtggtctaggaattttgtgtgcgattttttttgtgaacgtcagtgaccgtggtggtgggctcgcttctttttcgggaaaggagccgtgctcatcatatcataggttttttttttctcgaacggcgctatctatctatctatctatagacatgtaagacttttaagttgtctaaacaaatatttgtaaaataattgtgaagcaatttatatatgaaaagatgtgtctgaca

SEQ ID NO: 151889 - DNA, 1521 bp, Zea Mays
gagtagtgacccattttttactgcggctcctaaagaaaccgaacgtgttcaagtggaacacatgcacctcatagcaaggaaacatccttgaccagagaaggcacacgaagtctaaatttcaagaaaagagactcctgattaacatatgaacaaattcaccattcatccccaccaccaacggcaaccaatcaacaccaatattttcctctgtttacataggaattttcgaaccaaaaaactcctttttcgaatcatgaaaggtaaaagaaaaaaaagggggaagaagaaagaatgaacgcatgcgctgcgcgcgctccggcgatcggcgagtcgggccaaatgcgtcccggagcagagctcgggatgggggggatctggatggatcagtgcgcgtgcgccgacggaggcgtcttcggagtctttggcgggcgggcggtggcggcggcggcggcctcgccccccgcgagcccctgttcgatgtcgcgcgggctgtaggaggaggaggtgccgaccatggcctgctttcctctgctcagcagccggcgcagcgaccgcagcctggcggacaccggggaccgcatctcgtcggcgctcccgggcatccggctggccggcagcggggagttggcgggcggcggcgtggtcgtggtcgtggccacggcccgcgtcgggatgtcgatgaccaggttctccttcctgcgcccggaggccgaggagctggccgacggggcggcgcgcggcggcgcgacgagcccggcgttggtgacctcgtcgtgggtgccccagaacaggacgttggtggggaacacgggcaactccagcggcgcgccggagggctcctcccgcggcagcgcgtcgaggtcgcccacgggggcgcggcagagggggcacgtgtcgtgggaatggaaccacatgtcgatgcactccacgtggaacccgtgggagcacttgggcagcgtccgcaccttctcgccgtcgcccacctcggacaggcacaccgcgcactccagcgcgtccttgtccttgccgccgggggagccgtagacggtgacggggagggattgcaggacggaggcgggcaggccgcgctgcgggagcggggacgcggcaacgaagaggaaccgcgaggacggcgacgacggcgccagcagcgggttcgcgcccaggtagcgcttggcgtagaggtagaggaggaagacgaagacgacgaccatgaagaggaagatgacggcggcgaggagcaccccgttgctgatggccagctgctgctgccccgagctacccggggccgggaacatgccgtcgctgctgctggcgctttgccacgccggcggcgagggcgccgccgccgccgagaccgaggacgtcctagggatcatggctgcctgccttcaacgaacggacttatcgcggcgcttttgtttcttgccgctggctgacgacgccgcaggcgcagctgatgagcgaagcggagaggagacgactacgggacacgggaagggagggactgagaggagcgac

SEQ ID NO: 151890 - DNA, 1059 bp, Zea Mays
tggaagaagagaacgagacctcgctcgaagacaggggcatcatcaatgtcgacgtacctcaagaagccgcccccctgcagcgtctccctcatcgtcctcctccctctcaccctgatcttattatgcttcacctttctccttccgctgtccgcctacatcagcaacccgcttgcctccacggcagtggccacgagagcctgcgtcggcgccaccgctggtgtcgtccgcgctgcgccagcaacgacgaccgtgggcgacgtcgacggtgtcgtcggtagccagcgcccggcggagcttatgagcgtcctcgtcggcgtgcacaccatgcccggcaagcactcccggcgccacctcatccgcatggcgtacgcgttgcagcagcagacgcccgcgctgcgcgccgccgcgcgcgtcgacgtccgcttcgtgctctgcgcgcgcccgatgccgcccgagcaccgcgtgttcgttgcgctcgaggcgcgcgcctacggcgacgtgctggtcctcgactgcgccgagaacgcggaggaggggaagacgtacacgtacttcgcgagcctgcccaccatgctcggctccggctccggcggcggcggcggccggccgtacgactacgtgatgaaggtggacgacgacacgttcctccagctggacgcgctggtggacaccctgcgctctgcgccgagggaggacatgtactgcggcgtggggctcccgttccacgaccggcagttcccgccgttcatgctcggcatgggctacctcctgtcctgggacctcgtggaatggatcgccacctccgacatggtcaggagggaggccatgggtgtagaagatctgaccacaggcaaatggctgaacatgggccacaaggccaagaaccgggtgaacatcttccccaggatgtatgactacaagagtgccaaaggtgaagacttcttggagaacaccatcggggtgcaccagctgaagcaggacctgaggtgggcacacacactggagcacttcaatgtcaccaggctggagccctccagcatgctactacacaacttctag

SEQ ID NO: 151891 - DNA, 1149 bp, Zea Mays
gggtgtcgaattcacgcccctagaccagggtcgcagcgacgccgcttccgcagaggcggcggactgaggagcggcgccgcggcaaggctgcgccggcgtcgagctgggccccgccggagaactgtgtgcgcgcgacctatcatgaaacgaggcgtcctattcgcagttgggctgattatgttgccagataggcccggcccagcatggccctgatagaaaagatagaaaaagcgacgacaatcattaaccaaatggcccatttaagctggcgaccgtccgctggaggctggactctgcgagacgatcgaggccgttcgttcttctctccgcctgcggccgtctcgttgtcttcccccaatgtgcacgagctctctctctctccgtatccggcggcggaagcggaagcggaagcggaaggaagtaggcggccaccatggtgaagggacgcacggggcagcgcgtcaggctctacgtccggggcaccatcctcggatacaagaggtccaagtcgaaccagtacgagaccacgtcgcttgtgcagatcgagggggtgaacaccaaggaggacgtcgcgtggtacgctggcaagcgcatggcgtacatctacaaggccaagaccaagagcagtgagacccgctacaggtgcatctggggtaaggtcacccgcccgcacggcaactccggcgttgtccgcgccaagttcaagtcgaacctcccgcctgagtctatggggcgcaaggtcagagtgttcatgtaccctagcagcatttaaggttttgttggagtaaagatggactaaaaatgtcatgcgtatttcttacttttttctgagcttaaaatgctatttgttggcaacttagattgttcatgcagtcatgcacttgaccggtggaagttctgtctaaatttgttgtcgaacggatgaactatatattgtcggtgttatgcgagcagcagagcttattttgtcccgtgccaccgatgtccgatgctatctcttcaacagatcccctatcatatccgctatttcaaactacactttataaatattgtcatcaacggttccgcgcccccgattttatactagcttgagacggtctgattctcgtattttcgaattcatatgcttatattttaacttgtttgcct

SEQ ID NO: 151892 - DNA, 2506 bp, Zea Mays
atggtgaagggacgcacggggcagcgcgtcaggctctacgtccggggcaccatcctcggatacaagaggcgagctcattgcctccgcttcttcccccgtccgtgttacttggatctggccattcctcggtccaagtcgaaccagtacgagaccacgtcgcttgtgcagatcgagggggtgaacaccaaggaggacgtcgcgtggtacgctggcaagcgcatggcgtacatctacaaggccaagaccaagagcagtgagacccgctacaggtgcatctggggtaaggtcacccgcccgcacggcaactccggcgttgtccgcgccaagttcaagtcgaacctcccgcctgagtctatgatttcagtttttttccccaacgaatctgttcagaagagtgaggcacacccttcgtctcatcagtgttttggacttcgcatagatcatcttttcaactcaactcaaatttacgatcctgatgccatgcatagtttcggcttgctggtgccattgcggttgcggcgccagatggtagcagcagccagcaccacccaagcacactggcaaatgacaggcagcagctacgcctgcacgtgcacggccttccgctccatcagcacgaagctagcagcacggtccagcgctggccgccgcagccgtggccgccgttctgccgttgacccctctgctggagggccgccgctgccgccgccaccagttgtcatcgccggcgccgtggcgtcgcccggcaagcgaatgccgccgtcaccaattggttgcaccagcagggccgccaccgctagtagtagtaggcaggcgaaagaggacgatggcgcgagcagaaacgtctcaggctttgagccatccatctggggcgatttcttcctcacctactccagccctctggccacgtcgtcccttcacaaggcatggatggtacatcgagcagagcagctgaaggaagaagtggcagcaaaactggtagcagcttccagcgcctgtagcctgcaccgtaggattcatctcatccacgtcttggagcgtctctgtctggatcatctcttcgaggacgagatcagcgacatgctagctcgaatgaacgacgtcgatgtcagtggctgcgaccttcaaacggtggccatgtggttctatcttctccgaaagcacggatacagtgtctcgtcagatgtctttgccgagttcagagacgaacaggggggtggttttacagcaaacagtgcaagggatctgctgagccttcactgcgctgcttgtctcgcgacgcgtggagagacgatacttgacgaggccatttccttcacagccaagagtttaaaatcaacagcgccgtatacgggagcagcgtcgttagcatgtgaaataaagcgtgcgctcgagatccccctcccaagacgtgtgagaatttacgaggctaaatctcgtatagctgaatatggaagagaggctgaggctgatgaactggtaatggagctagcaaagctcaactataatctcgtgcaactccagtatcaacaagagctgaagatcataacaaggtggtggaatggtctagagcttcagtcaaggctatcgttcgctcgagacagagttgtggagtgctacttctggatcgtgggagtatattttgagccaagctactctcgagctcgaataatactaacaaaagtcatcgccatcgtgtccctattggacgacacttatgatgtctatggaactccacaggagtgcgagttatttaccgagtgtatagaaagctgggaccctgcagttgctggaggtcttccagagaacatgaagttcatttttggaaaaattttggatacttaccaaagcattgaggaagagttagcgccggaagagaaataccgcatgccctacataaaaaattttattatagatctagtaagagcatacaacaaggaggtaagatggcgcgaacaagggtatgtgcctgcaaccgttgaggagcacctgcaggtttcagcaagaagtggcgcttgtcacctcttgtcgtgcgcatcatttgttggaatgggagatgttgcaggtgaagaagctttcgaatgggtgtgcagtgtgcctaaactagtgcaggcgctctgcatcattctcagactttccgatgatctcaagtcatatgagcgagagaaaatggccccgcatgttgcctcgacaatagaaagctgcatgagagagcacgaggtcccgctcgaagtggctcgcgtgaagatacaggaaatgatagatgaaacatggaaagatttcaacgaggagtggctgaacatgaacaagcaccagccggcggagctgctcgagaggatcttcaacctgacaagaacaatggtgtatatgtacaagaatgatgacgcgtacacaaattgccatgtcatcaaagacaccataaactcgttgtttgtggagcctgtttccatagcctaagacgttcgttaaatagttgtgatgccccatgcatggttgtgtgtaacac

SEQ ID NO: 151893 - DNA, 2005 bp, Zea Mays
atggtggtccataaagacagaaagatggtagcagcagccagcaccacccaagcacactggcaaatgacaggcagcagctacgcctgcacgtgcacggccttccgctccatcagcacgaagctagcagcacggtccagcgctggccgccgcagccgtggccgccgttctgccgttgacccctctgctggagggccgccgctgccgccgccaccagttgtcatcgccggcgccgtggcgtcgcccggcaagcgaatgccgccgtcaccaattggttgcaccagcagggccgccaccgctagtagtagtaggcaggcgaaagaggacgatggcgcgagcagaaacgtctcaggctttgagccatccatctggggcgatttcttcctcacctactccagccctctggccacgtcgtcccttcacaaggcatggatggtacatcgagcagagcagctgaaggaagaagtggcagcaaaactggtagcagcttccagcgcctgtagcctgcaccgtaggattcatctcatccacgtcttggagcgtctctgtctggatcatctcttcgaggacgagatcagcgacatgctagctcgaatgaacgacgtcgatgtcagtggctgcgaccttcaaacggtggccatgtggttctatcttctccgaaagcacggatacagtgtctcgtcagatgtctttgccgagttcagagacgaacaggggggtggttttacagcaaacagtgcaagggatctgctgagccttcactgcgctgcttgtctcgcgacgcgtggagagacgatacttgacgaggccatttccttcacagccaagagtttaaaatcaacagcgccgtatacgggagcagcgtcgttagcatgtgaaataaagcgtgcgctcgagatccccctcccaagacgtgtgagaatttacgaggctaaatctcgtatagctgaatatggaagagaggctgaggctgatgaactggtaatggagctagcaaagctcaactataatctcgtgcaactccagtatcaacaagagctgaagatcataacaaggtggtggaatggtctagagcttcagtcaaggctatcgttcgctcgagacagagttgtggagtgctacttctggatcgtgggagtatattttgagccaagctactctcgagctcgaataatactaacaaaagtcatcgccatcgtgtccctattggacgacacttatgatgtctatggaactccacaggagtgcgagttatttaccgagtgtatagaaagctgggaccctgcagttgctggaggtcttccagagaacatgaagttcatttttggaaaaattttggatacttaccaaagcattgaggaagagttagcgccggaagagaaataccgcatgccctacataaaaaattttattatagatctagtaagagcatacaacaaggaggtaagatggcgcgaacaagggtatgtgcctgcaaccgttgaggagcacctgcaggtttcagcaagaagtggcgcttgtcacctcttgtcgtgcgcatcatttgttggaatgggagatgttgcaggtgaagaagctttcgaatgggtgtgcagtgtgcctaaactagtgcaggcgctctgcatcattctcagactttccgatgatctcaagtcatatgagcgagagaaaatggccccgcatgttgcctcgacaatagaaagctgcatgagagagcacgaggtcccgctcgaagtggctcgcgtgaagatacaggaaatgatagatgaaacatggaaagatttcaacgaggagtggctgaacatgaacaagcaccagccggcggagctgctcgagaggatcttcaacctgacaagaacaatggtgtatatgtacaagaatgatgacgcgtacacaaattgccatgtcatcaaagacaccataaactcgttgtttgtggagcctgtttccatagcctaagacgttcgttaaatagttgtgatgccccatgcatggttgtgtgtaacac

SEQ ID NO: 151894 - DNA, 2841 bp, Zea Mays
aagaccgacgacgtgccctcccggcgtgcccccgtcgtcctcccgtccgttgatcgatctggccatggcacaacactgagatcctcgtcgtcgtgagccgaacgttaatccggcggacgcgggggcggggccattgcggcggcggcggctaggaggacaatcacgtacgccgccgttgacaactgacggatggggcggtcataccttgaaggcgggcgggacgcgggggcggaccttgggtacccgctggtggccgtgtgcatcgacaaggacaagaacagccagaacgcgctcaagtgggccatcgactcgctggtacagaaggggcagaccatcgtccttgtccacgtcaacaccaagggcacctccggcggcgtggaggacgcggccgggttcaagcagccgacggacccgcacatgaaggacctcttcgtcccgttccgatgcttctgcacccgcaaagacatcaattgcaaggacgtggtgctggacgagcacgacgtggccaagtccatcatcgagttctcggcgcaggcggccgtggagaagctcgtcctcggcgccacgacgaggggcggcttcgtccggttcaaggcggacatcccgaccaccatctccaagggcgccccagacttctgctcggtgtacatcgtcaacaaggggaaggtctcgtcgcagcgcaactccacccgcgccgcgccgcgggtgtcgccgctccggtcgcagatccagtcgtcgcagattgccgcaacgctcaagcccgagccgccgcagtcgcaccggtggtcctcgtcgtcgagaggccacgagcacggcgagacgccgcgggtggacaacttccgctcgccgttcgcgcgcgggggccccgcgaacacgcgcaagtcgtacgccgacctcagccacatgtccatgccggactcggccgacatctcgtttgtcagcagcaccggccgccggagcgtcgaccaccacccggcgatcccgccgcggatgtccaacggctccgtggacagctacgaccacagcttcgagatgtcacgcacgcccagcaagtggggcggcgactccttcggcggcatggaccacaccaccttctcgcagagcagcagctcttccttctgctccctcggcatgcaggacgacgtggaggcggagatgaagaggcttcgcctggagctcaagcagacaatggacatgtacagcacggcctgcaaggaggcgctgacggcgaaacagaaggccatggagctgcagcggtggaagatggaggaggagcagaagacgcaagactcgcggataacggaggactccgcgatggcgatgatcgagcgggagaaggctcgggcgaaggcggccatggaggcggcggaggcgtcgcagcggatcgcggagatggaggtccagaagcggatcagcgcggagaagaagctgctcaaggaggccgaggagcgcaagaaccgcggcggcagcggcatgtcccacgaggcccggtaccggcgctacagcatcgaggagatcgagcaggcgacggacaacttcaacgacgcgcgcaaggtgggcgagggcgggtacggccccgtgtacaagggcttcctcgaccacacgcaggtggccatcaaggtgctccggcccgacgcggcgcagggccggtcgcagttccagcaggaggtggaggtgctgagctgcatccggcaccccaacatggtgctcctcctcggcgcgtgcccggagtacggctgcctcgtgtacgagtacatggccagcggcagcctggacgactgcctgttccggcgctccggcggcgccggcgggcccgtcatcccgtggcagcaccggttccgcatctgcgccgagatcgcgacggggctgctgttcctgcaccagaccaagcccgagccgctggtgcaccgggacctcaagccggggaacatcctgctggaccgcaactacgtgagcaagatcagcgacgtcgggctggcgcggctcgtgccgccgtccgtcgccgacaccgtgacgcagtaccggatgacgtccaccgcggggaccttctgctacatcgacccggagtaccagcagacgggcatgctcggcgtcaagtccgacgtctactccttcggcgtcatgctgctgcagatcatcacggcgaagccgcccatggggctgtcgcaccacgtcggacgcgccctggagcgcggcgagctgcaggacatgctggaccccgccgtgcccgactggcccctggaggaggcgcagtgcctcgccgagatggcgctccggtgctgcgagctgcgccgcaaggaccggccggacctcggcgccgtcgtgctcccggagctcaaccggctgcgcgcgctcggcgaggacaacatgcagtactgcggcgccatcatcaggggtggcggcggcggcggcggcatgcacagctcgtcgccgttccacagcaacatctcacggtcacacgccgagatgatgatcgattcccagtacccaagatcagtgttcagctcaagagcgggcgattcgcccatgccgccgagaaggtcgaacgcttgacgggcatgaaatggacttttatttccagcatcggtgacggggtggtggtgatgtcttgtgcaggtgcataagctgcctagcacgagggggagctagagcaggtgttgtttctagcatgagtttggtgcagaattttattacacgaggtacgagctatgtattactagtaaatacagaatcgtacggctctgccattgccgtgtacctgttcttgtaacctgtggagcttcctctgttgtgtaatggatttttttcagttttgtgaaacagaactgttggattaggggc

SEQ ID NO: 151895 - DNA, 1547 bp, Zea Mays
cgggcggtggcgatggaggtgggtgacctgcacaaggtgtgggaggtccgtgcgctcaagatcaagcccgacgcgaccgccgcgcgggcaaccctcgaccgcgttgccaggcaggtccagcccatcatgcgccgccacaaatggcgcgtcaaggtcctctccgagttttcgccgcggaacccgaggctgctggggctcaatgtcggcgcgggcgtcgaagtcaagctgcggctacggcgcgccggccgcgaccatgacttcatcccgtacgaggaggtgctcgataccatgctacacgagctctgccacaacgagcgcgggccccacgatgcgcagttttacaagctctgggacgagctccgcaaggaatgcgaagaacttgtttcaaagggtatcactggaacaggacaagggtttgatggcacgggaaggcgagttggtggatttactgtacatccaccaccaccatctctgcggcaagctacgttagctgctgcacagaagcgggcaaggaatggagctctattgccttctggaccaagaaagttgggtggaaacagtgaaattatgagtgcacttagtccagtacaagctgctgcaatggcggctgaaagaagaatgtatgatgatttgtggtgtggatcacatgatcaatctgctattgatgattcggatgatgttattattcttcaagagtcgccaaatttgacaagggatgaaaaagacaagggtagctgctccaacacttctgcacagcccagcacttcttctagaattcacatagcagcacgagatgataggacaacaagtgatgcacttgatagttcaaagtgggaatgtggtgcttgcacacttctgaaccagcctctggcaccaatctgtgaagtttgtggtacaacaaaacctaaaattgcaaaggcgaagtacacaacttggtcttgtaaattttgtactctagagaacagcactaaacttgacaaatgctcagcatgtgatcaatggagatactcatatgggccacctgtagccacatatggcccaagctatgattgagataacagtgaaggccacaatagcacagacgacacttctgagcaggcatctgctgcattgtcgatataagttgtgttatctgcaacagttcttgctctattactactcatgtcatatcaggtttcataggtctggaaaaatctgatacctgttaaactggtagtactatttaagcgaccctcttttgtggacgttgcttggagcaatccacggattggtaaaatgaaacaatcgtagtccatgtctgttaacgttagccccaagcccagggcatgcagcattgcagcctctgaactcgtgtttcgtgtctcgccgtctcggtgacaggtaacaactcgcacctagggcacaccggcgaattggtctttatctgttccgacgtcgtcgactcatgttgccgtggggtgaggaaatttattacgtcaattaatgtaaggtttattacaagtatctgcaatgctctttttaaaagaatttgcctgcttgttagacca

SEQ ID NO: 151896 - DNA, 1739 bp, Zea Mays
atgagcgatcaggcactgttctccaataaacgggcaccgcacgacaaaccccgagcggcagtggggaggagaagaatccagacggagtcacgcagacgccatcactactaccacacccggcctaacgaactcctccccaccccaagccccgcccagagcgacccacgcaccacgccatgcgcccgggcggcctcccgacccagcagcccggcacgccgggccgcgcgcgccgccgcccggatctcaccctccccatgccccagcgcgaggtcgccacctccctcgccgtcccgctccctctcccgccagccgccgcctccgccggggggcccaccccgccgggcgtcaccgcgcccgcccccgcggcgcagcagcagcagcagccgcccccgctcgcggagctggagcgcgtgcgccgcgtcggcagcggcgcgggcgggacggtgtggatggtgcggcaccgcggcacggggcgcccctacgcgctcaaggtgctgtacgggaaccacgacgacgcggtgcggcggcagatcgcgcgcgagatcgccatcctccgcaccgccgagcacccggccgtggtgcggtgccacggcatgtacgagcgcggcggggagctccagatcctgctggagtacatggacggcgggtcgctcgacggccgccgcatcgccgccgagccgttcctcgccgacgtcgcgcgccaggtcctgtccgggatcgcgtacctccaccgccgccacatcgtgcaccgcgacatcaagccctccaacctcctcatcgactcggcgcgccgcgtcaagatcgccgacttcggcgtcggccgcatcctcaaccagaccatggacccctgcaactcctccgtcggcaccatcgcctacatgagccccgagcggatcaacaccgacctcaacgacggcagctacgacggctacgccggcgacatctggagcttcggcctcagcatcctcgagttctacttgggcaggttccccttcggggagaacctcggcaggcagggcgactgggccgcgctcatgtgcgccatctgctacaacgacccgcccgagccaccgcccaccgcctcgcgcgagttcagggggttcatcgcctgctgcctgcagaagaacccggccaagcgcctcacggccgcgcagctgctgcagcaccccttcgtcgccggcccgcacccgcagcccctcgctgctcctcccccgtcatgaccacaccaccatttcggcgggttgggagttgggaccaaagtacggatctcgtctcagtttggcctccctcccttggctgcaggcagtgtgggactccaatcaatccggcgttcccttggatacaatacacggatctgatccctgatgtatcaagggaatttgctggccaatttcgggttctatcctccatcatcgacgtccgcatccatccatggttgcttctgctgcagttaaggtctcctaccaattttgagtgctgtgtccatctccaattctccatcatcaattcatcaccacggtcgtcctcaacccgctcctcgctgctgcgatttaaggtttctttctccttcctgttgtttgatgctcttttcttttttacttccagcgatgatagcataacgagaaagagaaaaaaaaaaggtgtgtacaaatgattttgtaaaagatcatatcatatgtcaagtacagagagaggtccacttgctaccgattttcattgttcgaaaaaggtttgcttag

SEQ ID NO: 151897 - DNA, 1056 bp, Zea Mays
tgagagggttccatggaaaccctaatcctcgcggtatataaccttccgcgcggccgccactcttccctgacttgtgcgccatcacacacaagacacaaccccactcacccggcagggaggccctcttcgtcggcggaggccatggtttccctcaagccgcagaagaggctcgccgcgggagtcctaaaatgtggcaaggggaaggtgtggcttgaccccaacgaggtctacgagatctcgatggctaactcgcgtcagaacattcgtaagctggtgaaggatggattcataattaagaagccacagaaaatccactcaaggtcccgggcaaggagggcccatgaggccaagcagaaggggaggcactctggttacggtaagcgcaggggtaccagggaggctaggctccccaccaagatcctttggatgcgcaggatgcgtgtcctcaggcgtctgctgcgcaagtatcgtgaagcaaagaaaatcgacaaacacatgtaccacgatatgtatatgaaagtaaaaggaaacatgtttaaaaataagagggtactcatggagagcatccacaagtcaaaggccgagaaggccagagagaagactctctcggatcagtttgaggccaagcgagccaagagcaaggcttcccgtgagagaaagattgcaaggagggaggagagattggctcagggcccaagggaacctgcggcagcaccagtatcagctactgctccgtttgcagcgtaagtgacccggaactaactacactttacctagttttcttgaattagctcatgtgtatgttgacattttttttcaattttgacactctaatgtcacagtgcaccaaagaaggcgaagaagtgaaaaaggtggtcttctagttctaggacctaattttggagcgccccaactcttttgctgttacatatccaagctgtcagatatctgtaataacatcttatctcgtttttcatgttggacaatgtagtagagttgtttgtcccaagtgtatttggaacgaattttcacagaatctgcttaatgcttcggtgg

SEQ ID NO: 151898 - DNA, 2350 bp, Zea Mays
tgagagggttccatggaaaccctaatcctcgcggtatataaccttccgcgcggccgccactcttccctgacttgtgcgccatcacacacaagacacaaccccactcacccggcagggaggccctcttcgtcggcggaggccatggtttccctcaagccgcagaagaggctcgccgcgggagtcctaaaatgtggcaaggggaaggtgtggcttgaccccaacgaggtctacgagatctcgatggctaactcgcgtaagaccaccaccgcttgctctccgcctcctccccccgcccatttcgtgtttgctgggcgtcgaatccgttcgtcgatgagcaacggcgtccgagtggtccgaccacggacgcccttttcaccccttgatcgttcagttcggttgacgtcgtaggagtatgtctgtgtttctgcgcgtatctattggttttgttaccttcttgtttatttttgcattctgttgctgcaggtgtccataatagctcactcactgcttgccacctcatatagctgtgttgcttatcttagcgcacatgattttaaactgttaattgtatctatgttatttttgctattatactttatttccttctaatgtgcagtctaggttatctgtatatctagttttgtgacaatgtttgctatgtgatgcaattgtgcatagagtttattgtgtcttttgattatttcgtgcactgctgatgattcgcaaagaattgtttatttagcaatacatattctgttcatggcgtacttgcaaactgtaccttctgtcctacttggtttattactttgtttttgctatgactgctattactttcatggtctgctgatgatttagaagtatgattttatcttagtctgaggtgttgtgctcaggcttttatttttcatgcatttgtttttctgtttggtttagcactgatatcgccatgcatgtctctgcagttttatgtgattagatggaggtgagatagttattatattactcagtgttgtcgcgggtacttgttttctctattctttgtgctcgttcaattttgatcagtgttatgtttgaacttttgttggagcattgaaatcttgtttcactgctttgaaacgcaaggaacataagtatgacatttctatacaacttactttacaggtcagaacattcgtaagctggtgaaggatggattcataattaagaagccacagaaaatccactcaaggtcccgggcaaggagggcccatgaggccaagcagaaggggaggcactctggttacggtaagcgcaggggtaccagggaggctaggctccccaccaagatcctttggatgcgcaggatgcgtgtcctcaggcgtctgctgcgcaagtatcgtgaagcaaagaaaatcgacaaacacatgtaccacgatatgtatatgaaagtaaaaggaaacatgtttaaaaataagagggtactcatggagagcatccacaagtcaaaggccgagaaggccagagagaagactctctcggatcagtttgaggccaagcgagccaagagcaaggcttcccgtgagagaaagattgcaaggagggaggagagattggctcaggtaagacaatgtctcaatgccatgaaactgtatatttttattgtcattgaacctgctgtgttatgatatggattgatggtaattaaatttactaacttccattagtttgttgatctgttcaatattgaaactacgcttgattttttttcatctcgctacattgttgcatatgattgtcctttggccatgtgttttaatttagtgtactatcattgtttttcaaagtgtcatgttatggcttgtagtttgttttaaactgttagattttgtgtatattttttgctgacagattgtggcattttgatgtacctgtttcttccatcttttgtgttctatgttgaaatgcttgtttcatctttgtgtagggcccaagggaacctgcggcagcaccagtatcagctactgctccgtttgcagcgtaagtgacccggaactaactacactttacctagttttcttgaattagctcatgtgtatgttgacattttttttcaattttgacactctaatgtcacagtgcaccaaagaaggcgaagaagtgaaaaaggtggtcttctagttctaggacctaattttggagcgccccaactcttttgctgttacatatccaagctgtcagatatctgtaataacatcttatctcgtttttcatgttggacaatgtagtagagttgtttgtcccaagtgtatttggaacgaattttcacagaatctgcttaatgcttcggtggaacccagttctggttttgcta

SEQ ID NO: 151899 - DNA, 659 bp, Zea Mays
tgagagggttccatggaaaccctaatcctcgcggtatataaccttccgcgcggccgccactcttccctgacttgtgcgccatcacacacaagacacaaccccactcacccggcagggaggccctcttcgtcggcggaggccatggtttccctcaagccgcagaagaggctcgccgcgggagtcctaaaatgtggcaaggggaaggtgtggcttgaccccaacgaggtctacgagatctcgatggctaactcgcggcccaagggaacctgcggcagcaccagtatcagctactgctccgtttgcagctgcaccaaagaaggcgaagaagtgaaaaaggtggtcttctagttctaggacctaattttggagcgccccaactcttttgctgttacatatccaagctgtcagatatctgtaataacatcttatctcgtttttcatgttggacaatgtagtagagttgtttgtcccaagtgtatttggaacgaattttcacagaatctgcttaatgcttcggtggaacccagttctggttttgctattttaccttgtagatctggccgctgtggctagcctccgtgcttttttgcttcgatgttccataaccttgtctggtgttgacccgcgatgacgcaggttttgtagtgttctttggtgaa

SEQ ID NO: 151900 - DNA, 1122 bp, Zea Mays
tgagagggttccatggaaaccctaatcctcgcggtatataaccttccgcgcggccgccactcttccctgacttgtgcgccatcacacacaagacacaaccccactcacccggcagggaggccctcttcgtcggcggaggccatggtttccctcaagccgcagaagaggctcgccgcgggagtcctaaaatgtggcaaggggaaggtgtggcttgaccccaacgaggtctacgagatctcgatggctaactcgcgtcagaacattcgtaagctggtgaaggatggattcataattaagaagccacagaaaatccactcaaggtcccgggcaaggagggcccatgaggccaagcagaaggggaggcactctggttacggtaagcgcaggggtaccagggaggctaggctccccaccaagatcctttggatgcgcaggatgcgtgtcctcaggcgtctgctgcgcaagtatcgtgaagcaaagaaaatcgacaaacacatgtaccacgatatgtatatgaaagtaaaaggaaacatgtttaaaaataagagggtactcatggagagcatccacaagtcaaaggccgagaaggccagagagaagactctctcggatcagtttgaggccaagcgagccaagagcaaggcttcccgtgagagaaagattgcaaggagggaggagagattggctcagggcccaagggaacctgcggcagcaccagtatcagctactgctccgtttgcagctgcaccaaagaaggcgaagaagtgaaaaaggtggtcttctagttctaggacctaattttggagcgccccaactcttttgctgttacatatccaagctgtcagatatctgtaataacatcttatctcgtttttcatgttggacaatgtagtagagttgtttgtcccaagtgtatttggaacgaattttcacagaatctgcttaatgcttcggtggaacccagttctggttttgctattttaccttgtagatctggccgctgtggctagcctccgtgcttttttgcttcgatgttccataaccttgtctggtgttgacccgcgatgacgcaggttttgtagtgttctttggtgaattatgagctctgatgtgatattgata

SEQ ID NO: 151901 - DNA, 1101 bp, Zea Mays
atggaggaccgtgagtggatgtacacgggccgcgttcgacgtaatgatgtcaccccagaatggattaggaagaccgatgctttcgtggaacgggcatatggcgaagctgctaaaggagctagcctagtcccttgtccgtgcagcaaatgtgacaaccggaaaagaaaaccaaagaaggccatggtagaacatatttggaagaatggatttacgccggactatactcggtggatcttccatggtgaagcgcatcgcacgagagaggaggtggtgagacaacgcgtcgaggattacgatgctgatgccggggtagcggacatgttgaacgactatcacgaggcacagttcgccgaaggatgtacggaggacgagccagaggcgaccgcaaaggcattctacgacatgtttgacgcggcacagaaaccccttctcgacaagacaaaggtttctcaactggatgccattgggcgtataatggcgttcaagtcgcagtatagcatgagtcgagacgccttcgatggtttgttgacagttattggcagccctgcttccggaggatcacgttctcccaaagagcatgtacgaggcacagaaggtctctcaggtgcgagcaaggagcacgagcgcgagcccagccatacgacctcggcaggacacctcacagcatcgtatccagcaactctagactcagctagatgatgagaggaggcaacgtgaggagctagagaagaggatggcggagatgttcgcgtacatgcagagccttggcgccgcacagggtcatgctccaccacctccgttgttccctgcagctgaccctacagagttcactactcctggtcaatcggcggcgtcgaacaaccctcatgcttcgtccagcccttcgtcgaaccagtccagatgcccacctcgttgatgatttgttttgtgatgatccagacttacctttatgagtgttggtgatgttagttacactttatcttgtgagatacttggtgatgttagtgatgatgcagacttgtatctgttttgtgatgatcctgactttagtgagacttgtgatctgttttgtgagactttgtgatatatatggtgttgatg

SEQ ID NO: 151902 - DNA, 1898 bp, Zea Mays
caaccagcggctccggaatccggatctccccacacggccacacggacacggccacacgcttcggcaggcacggccggtccatgtagcgcgcgcccggacacggagcaggggtcacgcgcaacggcagcccggcttgtcgggagcgcgaggggcgacatgggggcggaggccggcgagcccagctccatcctcagcttagcttccgccttttcctatggagtcgcatctatggcaatggttttcgtgaacaaagcggttcttatgcagtatgttcactccatgaccctcctcactttacagcaaatagcaacagcacttctgatacattttggtcaagttctaggaatgtctaaacgaaaagactttagctggataaccgcgaagaaacttcttccagtgtcaattttctacaatgcaaatgtgggatttgctctagcaagcttgaaaggggttaacatcccaatgtatattgcaatcaaaaggatcactccccttgctgtgttggtggctgggtgcatgcggggaaaggggaagccaccgacacaggtcattctttcagttatctgcaccgccactggtgtcctcattgcagcacttggagatttttcctttgacctatatggatactgcatggctctaacatcagtcttcttccaggttgtgttatttccttgtgctttgttcttacaaatttattctataacttttgagaggtttttaggcaaggttctttatctttgtaattgacaactgaatgtgtatgcactatgcagactatgtatttgattctggtggagaaatcaggcgctgaggatggtctttcctcagtggacttgatgttttacaacagcatattgtcacttccatttctgtttttcctcattatagcaacaggagaattcccccattctcttacagtattatctgcaaaggtcagtgatacaaatgcagtataatcaaaaatttaccagcacatttaagctagcaatctctgcgtgttcccttgtatcacccctttaactcaagaatgacaattaaaggtagttctccagagtttctgaagcaaatggtttcacacttcgctgctattcattaacacaatagtactcttaaagttcgtgtcattgtctgttgtatgtctctatcctaacttgcattgtctggtgacacttgaactgcaggcagcctctctgacgttcggtgtcattctcgttatctcactggtgatgggaatcgttctcaatttcactatgttttggtgcacaattgtgaactctgctctgactacaacaatagtaggagttctcaagggtgtcggatcaacggtaaatttgccgacttatgaaagatcagtttgtcctttaatcagaaccctttgatacaattgagctctgaagttaactaataagtaaatcatatatcatgtttttcgccatcagaccctcggtttcgttctgttgggaggtgtcgaagtacatgctctgaatgttactggactggtgatcaacacatttggcggcgtatggtactcttatgcgaagtataagcagaaaaggaaaacaccacggaagatccaacatgatgtagagtcgcatgcccacaagtagcgtcagattaactgtagttatacttcgttctttgatcagataataactggatgcatgtttaaatccattttttctgaactctattccatcaccagcagttaggttggtgcaattaagggaagcaacaagcttttcctatttcacatcttatagtttttacgatcagtgatatagggtgtaaagtcagttatttttcgcagctccagtgtgcgatgcatcacttttgctccaaagagagaaatccatgggtctggatgaggtgattgccggttctttaaggaatttttaaac

SEQ ID NO: 151903 - DNA, 1809 bp, Zea Mays
caaccagcggctccggaatccggatctccccacacggccacacggacacggccacacgcttcggcaggcacggccggtccatgtagcgcgcgcccggacacggagcaggggtcacgcgcaacggcagcccggcttgtcgggagcgcgaggggcgacatgggggcggaggccggcgagcccagctccatcctcagcttagcttccgccttttcctatggagtcgcatctatggcaatggttttcgtgaacaaagcggttcttatgcagtatgttcactccatgaccctcctcactttacagcaaatagcaacagcacttctgatacattttggtcaagttctaggaatgtctaaacgaaaagactttagctggataaccgcgaagaaacttcttccagtgtcaattttctacaatgcaaatgtgggatttgctctagcaagcttgaaaggggttaacatcccaatgtatattgcaatcaaaaggatcactccccttgctgtgttggtggctgggtgcatgcggggaaaggggaagccaccgacacaggtcattctttcagttatctgcaccgccactggtgtcctcattgcagcacttggagatttttcctttgacctatatggatactgcatggctctaacatcagtcttcttccaggttgtgttatttccttgtgctttgttcttacaaatttattctataacttttgagaggtttttaggcaaggttctttatctttgtaattgacaactgaatgtgtatgcactatgcagactatgtatttgattctggtggagaaatcaggcgctgaggatggtctttcctcagtggacttgatgttttacaacagcatattgtcacttccatttctgtttttcctcattatagcaacaggagaattcccccattctcttacagtattatctgcaaaggtcagtgatacaaatgcagtataatcaaaaatttaccagcacatttaagctagcaatctctgcgtgttcccttgtatcacccctttaactcaagaatgacaattaaaggtagttctccagagtttctgaagcaaatggtttcacacttcgctgctattcattaacacaatagtactcttaaagttcgtgtcattgtctgttgtatgtctctatcctaacttgcattgtctggtgacacttgaactgcaggcagcctctctgacgttcggtgtcattctcgttatctcactggtgatgggaatcgttctcaatttcactatgttttggtgcacaattgtgaactctgctctgactacaacaatagtaggagttctcaagggtgtcggatcaacgaccctcggtttcgttctgttgggaggtgtcgaagtacatgctctgaatgttactggactggtgatcaacacatttggcggcgtatggtactcttatgcgaagtataagcagaaaaggaaaacaccacggaagatccaacatgatgtagagtcgcatgcccacaagtagcgtcagattaactgtagttatacttcgttctttgatcagataataactggatgcatgtttaaatccattttttctgaactctattccatcaccagcagttaggttggtgcaattaagggaagcaacaagcttttcctatttcacatcttatagtttttacgatcagtgatatagggtgtaaagtcagttatttttcgcagctccagtgtgcgatgcatcacttttgctccaaagagagaaatccatgggtctggatgaggtgattgccggttctttaaggaatttttaaacatatgctcctagttcagctgttcag

SEQ ID NO: 151904 - DNA, 1394 bp, Zea Mays
ctccggaatccggatctccccacacggccacacggacacggccacacgcttcggcaggcacggccggtccatgtagcgcgcgcccggacacggagcaggggtcacgcgcaacggcagcccggcttgtcgggagcgcgaggggcgacatgggggcggaggccggcgagcccagctccatcctcagcttagcttccgccttttcctatggagtcgcatctatggcaatggttttcgtgaacaaagcggttcttatgcagtatgttcactccatgaccctcctcactttacagcaaatagcaacagcacttctgatacattttggtcaagttctaggaatgtctaaacgaaaagactttagctggataaccgcgaagaaacttcttccagtgtcaattttctacaatgcaaatgtgggatttgctctagcaagcttgaaaggggttaacatcccaatgtatattgcaatcaaaaggatcactccccttgctgtgttggtggctgggtgcatgcggggaaaggggaagccaccgacacaggtcattctttcagttatctgcaccgccactggtgtcctcattgcagcacttggagatttttcctttgacctatatggatactgcatggctctaacatcagtcttcttccagactatgtatttgattctggtggagaaatcaggcgctgaggatggtctttcctcagtggacttgatgttttacaacagcatattgtcacttccatttctgtttttcctcattatagcaacaggagaattcccccattctcttacagtattatctgcaaaggcagcctctctgacgttcggtgtcattctcgttatctcactggtgatgggaatcgttctcaatttcactatgttttggtgcacaattgtgaactctgctctgactacaacaatagtaggagttctcaagggtgtcggatcaacgaccctcggtttcgttctgttgggaggtgtcgaagtacatgctctgaatgttactggactggtgatcaacacatttggcggcgtatggtactcttatgcgaagtataagcagaaaaggaaaacaccacggaagatccaacatgatgtagagtcgcatgcccacaagtagcgtcagattaactgtagttatacttcgttctttgatcagataataactggatgcatgtttaaatccattttttctgaactctattccatcaccagcagttaggttggtgcaattaagggaagcaacaagcttttcctatttcacatcttatagtttttacgatcagtgatatagggtgtaaagtcagttatttttcgcagctccagtgtgcgatgcatcacttttgctccaaagagagaaatccatgggtctggatgaggtgattgccggttcttt

SEQ ID NO: 151905 - DNA, 1525 bp, Zea Mays
ctccggaatccggatctccccacacggccacacggacacggccacacgcttcggcaggcacggccggtccatgtagcgcgcgcccggacacggagcaggggtcacgcgcaacggcagcccggcttgtcgggagcgcgaggggcgacatgggggcggaggccggcgagcccagctccatcctcagcttagcttccgccttttcctatggagtcgcatctatggcaatggttttcgtgaacaaagcggttcttatgcagtatgttcactccatgaccctcctcactttacagcaaatagcaacagcacttctgatacattttggtcaagttctaggaatgtctaaacgaaaagactttagctggataaccgcgaagaaacttcttccagtgtcaattttctacaatgcaaatgtgggatttgctctagcaagcttgaaaggggttaacatcccaatgtatattgcaatcaaaaggatcactccccttgctgtgttggtggctgggtgcatgcggggaaaggggaagccaccgacacaggtcattctttcagttatctgcaccgccactggtgtcctcattgcagcacttggagatttttcctttgacctatatggatactgcatggctctaacatcagtcttcttccaggttgtgttatttccttgtgctttgttcttacaaatttattctataacttttgagaggtttttaggcaaggttctttatctttgtaattgacaactgaatgtgtatgcactatgcagactatgtatttgattctggtggagaaatcaggcgctgaggatggtctttcctcagtggacttgatgttttacaacagcatattgtcacttccatttctgtttttcctcattatagcaacaggagaattcccccattctcttacagtattatctgcaaaggcagcctctctgacgttcggtgtcattctcgttatctcactggtgatgggaatcgttctcaatttcactatgttttggtgcacaattgtgaactctgctctgactacaacaatagtaggagttctcaagggtgtcggatcaacgaccctcggtttcgttctgttgggaggtgtcgaagtacatgctctgaatgttactggactggtgatcaacacatttggcggcgtatggtactcttatgcgaagtataagcagaaaaggaaaacaccacggaagatccaacatgatgtagagtcgcatgcccacaagtagcgtcagattaactgtagttatacttcgttctttgatcagataataactggatgcatgtttaaatccattttttctgaactctattccatcaccagcagttaggttggtgcaattaagggaagcaacaagcttttcctatttcacatcttatagtttttacgatcagtgatatagggtgtaaagtcagttatttttcgcagctccagtgtgcgatgcatcacttttgctccaaagagagaaatccatgggtctggatgaggtgattgccggttctttaaggaatttttaaac

SEQ ID NO: 151906 - DNA, 1510 bp, Zea Mays
atctccccacacggccacacggacacggccacacgcttcggcaggcacggccggtccatgtagcgcgcgcccggacacggagcaggggtcacgcgcaacggcagcccggcttgtcgggagcgcgaggggcgacatgggggcggaggccggcgagcccagctccatcctcagcttagcttccgccttttcctatggagtcgcatctatggcaatggttttcgtgaacaaagcggttcttatgcagtatgttcactccatgaccctcctcactttacagcaaatagcaacagcacttctgatacattttggtcaagttctaggaatgtctaaacgaaaagactttagctggataaccgcgaagaaacttcttccagtgtcaattttctacaatgcaaatgtgggatttgctctagcaagcttgaaaggggttaacatcccaatgtatattgcaatcaaaaggatcactccccttgctgtgttggtggctgggtgcatgcggggaaaggggaagccaccgacacaggtcattctttcagttatctgcaccgccactggtgtcctcattgcagcacttggagatttttcctttgacctatatggatactgcatggctctaacatcagtcttcttccagactatgtatttgattctggtggagaaatcaggcgctgaggatggtctttcctcagtggacttgatgttttacaacagcatattgtcacttccatttctgtttttcctcattatagcaacaggagaattcccccattctcttacagtattatctgcaaaggcagcctctctgacgttcggtgtcattctcgttatctcactggtgatgggaatcgttctcaatttcactatgttttggtgcacaattgtgaactctgctctgactacaacaatagtaggagttctcaagggtgtcggatcaacggtaaatttgccgacttatgaaagatcagtttgtcctttaatcagaaccctttgatacaattgagctctgaagttaactaataagtaaatcatatatcatgtttttcgccatcagaccctcggtttcgttctgttgggaggtgtcgaagtacatgctctgaatgttactggactggtgatcaacacatttggcggcgtatggtactcttatgcgaagtataagcagaaaaggaaaacaccacggaagatccaacatgatgtagagtcgcatgcccacaagtagcgtcagattaactgtagttatacttcgttctttgatcagataataactggatgcatgtttaaatccattttttctgaactctattccatcaccagcagttaggttggtgcaattaagggaagcaacaagcttttcctatttcacatcttatagtttttacgatcagtgatatagggtgtaaagtcagttatttttcgcagctccagtgtgcgatgcatcacttttgctccaaagagagaaatccatgggtctggatgaggtgattgccggttctttaaggaatttttaaac

SEQ ID NO: 151907 - DNA, 112 bp, Zea Mays
gtggattcgttagcacgccaacccctccaggagatacgtacaactaacaggcatatacaagcaatcaacaaaacatactgctacatccattctcgaaaatttatttttaaac

SEQ ID NO: 151908 - DNA, 1825 bp, Zea Mays
tccctcggcacgcgccggccgcctccgcccatcgccgtgctgccatgccatcactgccgagaagacgatcttgcaaggacgccatcgcataaaaggagatcagcaggaggtggagccaaccgacgacggatcggtccctgcgacggaatagaccgagacctagcattggccgcgcgccggagtgggctgcactgcagtgcaggtgggtctcgcatcgcacgcgaggaggatgtaggctgtcgacgcccgggagaaaaggtgaaggtggagcgggtgggcaatgagccggcacctgcaccgctgcttcgcgtccacggggaccatgttcctgtgggcgctcttcctggtggccatgacggccacgtacctgagcgtgcactccttcgtcgacagcacctccccgcgctacttcgcggcgtcctggggcgggctgcactgggagcgccagatccgggcgtcggcgtcgccgcggcggcggtcggcgcctggggcgcccgcggggctgtccgtgctcgtcacgggcgccgcgggcttcgtgggcgcgcactgctcgctggcgctccgcaagcgcggcgacggcgtcgtcggcatcgacagcttcaactcctactacgacccctcgctcaagaaggcgcggcgcgcgctgctgggcagccacggcgtgttcgtcgtggagggcgacatcaacgacggccgcctcctggccaagctcttcgacgtcgtgcccttcacccacgtgctccacctcgcggcgcaggccggcgtgcgctacgccatggagaacccggcgtcgtacgtccactccaacgtcgccggcctcgtctccctcctcgaggcctgcaaggacgccgacccgcagccggccgtcgtctgggcctcctcctcctccgtctacggcctcaacgaccgcgtccccttctcggaggcgcaccgcaccgaccacccggcgtcgctgtacgccgccaccaagaaggccggcgaggagatcgcccacacctacaaccacatctacggcctctccgtcaccggcctccgcttcttcaccgtgtacgggccgtggggccgccccgacatggcctacttctccttcacccgcaacatcctccaggggaagcccatcacggtgtacaggggcagggaccacgtcgacctcgcccgggacttcacctacatcgacgacatcgtgctcggctgcctcgcgtcgctggacacggcgggccggagcaccggtaccggcggcaagaagcgcggcccggcgccctaccggatcttcaacctggggaacacgtcgcccgtcacggtgcccaccatggtgtccatcctggagaggtacctgcgggtgaaggccaagaagagtgtggtggagatgcccggcaatggcgacgtgccatacacgcacgccaacatcagcttggcccgggagcagctcggctacaagccgacgacgagcctggaggtggggttgaagaagttcgtcaggtggtacctcaactactacggatacaagtatacaaccggctgaggaactcgtgatgatcagtataaaatgggcccgagacatgagactgagtttccatgatgatcagtatgtgattagtataccgctctgtcgtgccttccacacacactctctcagataaaaaaaaagtcgcatttttttagtccagacaagttagggaaatgcaagaacagaattctgttgtagctaggtgggaagatgagaggggacggagacagagccatgaaatggagggggtgatccccttcattctgtattttcttctgtaaattgtatcaatcattatagggttatcctttctttctc

SEQ ID NO: 151909 - DNA, 107 bp, Zea Mays
tgtaacggaggtggaggcggaggttgttgccaagaagcttgagattgactcgccgaagcaacagaaactgcagggtggttgcccacatactctgggatgtagggcga

SEQ ID NO: 151910 - DNA, 799 bp, Zea Mays
gaaccggtatgaagcagctaccaccagatcaggaatcaacggccgcaaatcgaccacgctaccagatactgcctgccatcagatcgataacatacagcactgatttaatctcgcgaatggatacgctctcttctaatcgcacccgtccgaattggatcggacggtaaccataccttctcctttcactagccagcccgaggcggcgccaggagctctccacggcggagactcaccggcgcaccgccaaattcgcctgttctggcgacatcgttctcaccgtggtgcgaaaaaaaacgaaattgaagcaagttcaattacaaagggggtgcctcaccggagggttaagcgatggccgagcgggttcacgacggagggtaacttggcgtagtttcacacctccggcgaacaatctccactactcccacggcgccccgcgtgcgcgagtcccttcaccagcacccatctcggccaccctcccagtcaccaaggtcccgctcgatgtggccggccacgccttcgcggcggcgctttccccctactctctgtttagcggtggcgagtccatggacacggagctctcggggactggttcaaaggaaggtaggggcacggtcacaagcgattagaggcttatagcggaggaaggacgggcttgcggggttggccgcaacggccacaacgagctccaaggcggcaactgcggcatgcaaccggatgcccgaggatacggttgacccccaacaaccgcaacgacgggaccgcagggaaatcgtggctcatgcggacgccaaagtgcggc

SEQ ID NO: 151911 - DNA, 2128 bp, Zea Mays
ccgaaaggccaagccggctccccgtcccatcgctcgcttccccctcccgcgaatcattcgattcggcccgcctcgtctcgcccgcccgattcgatttggccgtcagggtgatcggagccggcgctagggttagggttccggcgatccccatacctatggtgcagctgccgagctcggggaagcggcacgcggagccggccatggctccggcgcggcgcgcggcgacggtcaagctagaggtggaggagctcggggccgacgagcgctgcccgctcagcaagcgcgccaaggcagctctgccgatgcccccgacgcctccgcagccgcagcaggatatgtaccacaatgtactcgatgaacctagcccattgggtctgcggctgaaaaaaagtccatcactcttggatttgattcagatgagactttctcaagcatccaatgctggcgagtcatccatggacaacagcggttctgagccttccaagaagaaagacaataaatctggtgcttctgcagcaggcgaacgactaaaagcttcgaattttcctgcaagtatattgaagattggttcatgggagtatgtgtcacggtacgaaggtgatttggtggcaaagtgttactttgcaaagcataaacttgtgtgggaagttctggaaggtggccttaagagtaagatagagattcaatggtcagatattactgctttgaaggcaacttgccccgaaaatggccaaggaaccttggacgtggcgttggccagaccacctcttttctttaaagagacagatccgcagccaagaaaacacacactgtggcaggctacctcagatttcactggtggtcaagcgagtgtgcacaggcggcattttctgcagtgcccttcaaccttgttgagcaagaattttgagaagcttattcagtgtgatcagcggctatatcaattgagtcaacaaccggaaatcacattagactctgcgttgtttgaacctaggagctcaatatttgaggatccggttgaatcaaaatgtgctgggtttactaatttgaaagatgaacatgaggctctacctggctattcaggcccggtgtcaccatgtgctggttcctccatatctgctaagaatgaaaacaatgattccattggaatgacagctgaatatctttctcagacagtaggaacaggagttggtgctgtaggtgtacaagctgttggcagaaatgtgaatggtgcagcaccagaattcactattccccactggtggagtcaattgaaggtgcctgggcttagaccatcgatgtctgtggatgattttgtgaaccacctaggcaactgcatctcagagcagatcacttcaggcaatccggcgttggccaacaacgaggtgccgaccaaagaaacacttgaggggattgctcagtaccttcttggtgacacacaaggcccaccggtttctgcttcagacgagagatcactgatggccagggtggactccctctgctgtttgattcagaaagacacagtgccggttaccaaaccaaaacctgagccaaatgacagcgacagcatcggtgttgaagcctcggatggttccgacgaagaattcagctctgcaccaactgggaaacctacagatgccaccaatctaccagccatgtcaagaaaggattcgtttggggagctgctgactaacctcccccgcattgcctcgctaccacagttcctcttcaagataccagagggtacagagaactgaagctggaagtcaagacctcgcgcccttatgctgtaaagattgtacccaagcaataagaaatccggtaggttgtattctggtgcaccagttccccgccctgtaaatgtgacactcggtaggttgccccagctgtgtgtttcgcgactgaaatgggtagtggaaaaattgagatgttcgttggttcttttaactcaatcgtgtcccacgcaaaacttctgagcttaattttcaggcggcacctccactggtaccctgtatgttcctgattgacgtgtatataaaggttgtttcgatctgtcatgaacgtaaggttttcagattgacatgttccagattgacgtgaatgtaatgttttcatctgtcataactcataa

SEQ ID NO: 151912 - DNA, 2032 bp, Zea Mays
ctcacgggcggcggctcgcgtgtcccgccagctagccgcacactttcctctctttcagtttcgcttcgcagacttcgcttgcgcttcacccaaccttaaccgcaacggttcccgtgcggagtttttattatgaatgaatgaatacgaattcagagcacgagcgccgttgattggccgctactagtactaccagctaggccactgctcctctgctacccgctaacctcgcgccggagtcgtcgcccacgatggcctaccgatccgcagtgctcttgcccgccctcctactggccgtcgccgtcgtcgtggcctccgccgccgccggggacgggaggtggcgggaggagcaggcgcgggaccgggtgccgcgggtgccggggcaggccttcaacaccagcttcgcgcagtacgccgggtacgtgaccgtcagcgagcagcgcggcgctgcgctcttctactggttctttgaggccgagaaggacccggggtccaagcccctcgtgctctggctcaacggagggcctggatgctcgtccattgcttttggacttggagaagaagtaggacctttccatgttaacgcagatgggaagggggtccatgtcaatccttattcttggaacaaagttgcaaatttactgttccttgattcacctgttggtgttggttactcatattcaaacacctctgatgatgctttaaaaaatggggatgcaagaactgccacggattcattggcattcttactgaagtggcttgaacgctttcctcaatacaaggaacgcgaattttatttgacaggggagagttatgctggtcactatgttcctcaactggctcaagccataaaaaggcaccatgaggctactggtgacaaatcaattaatctaaagggctatatggtagggaatgctctcactgatgatttccatgaccactatggaatatttcaattcatgtggactactggcctgatctctgatcaaacatacaagctgctgaatgttttctgtgactacgagtccttcgtgcattcgtctccacagtgtgataagattatggatattgctagcactgaagctggaaacattgattcatatagcatcttcacacctacatgtcatgcatcttttgcctcttcaaagaacaaagtgatgaaaaggctacattctgctggaaaaatgggagaacagtatgatccatgcactgagaagcattcaactgtatacttcaatctagctgaggttcagaaggcacttcatgttaatacagtcattggaaaatcaaaatgggagacttgcagtgaagctgttaatactcattggggggattgcgaaagatctgtgctgcatatctatcatgaacttatacagtatggcctccgtatatgggtgttcagtggagatacagatgcagtgattccagtgacttcaactagatacagcatcgatgctctcaagcttccaacaataactccatggcatgcttggtacgacgatgacggtgaggtcggtggatggacccaagggtacaggggactcaattttgtgaccgtgaggggagcaggtcacgaagtccctcttcatcgacccaaacaggccctcacgctaatcaaatcgttcttgactgggagcccaatgcctgtgcaatccagcacacacagcaacatgtaatccgtgttgttgcaactgattcacgagatgaatgaacatcccgaagcacccaagtcagccagttgtccaacccggcttgttctgcaacttgctgtagttgtttatgtatcagagctaccggtgccggttaccgcagcagccgtgcttttgtcggccctgttggtgcttgttgcagtaccagttatcccctaaggcaggggacagaaactgcggaatagtttttgtttgcattgacgtgacagcactgtaatcttaaacatcgtaccatagtcctttctatgacaaaggtgtggtttctgatgtctgcaataaatgatctggacttggggggtaaaaatgaaatactgctgtgttgcatt

SEQ ID NO: 151913 - DNA, 2961 bp, Zea Mays
gccaccatggccaaactgctcatcccaatcatcatcatcatcaccacctttcacgtcgtcggtctcgtgccgatcgctgtcgccgcacgaccgcacgcattggccgacgccgacgaccgggcggcgctcctcgcgttcctctccgacgtgtcggcggacccaggcggcgtgctcgcggactggggccgctcaccggggttctgcaactggacgggcgtcacgtgcggcggcggtggccggagccggcgcgtcacgcagctggtgctgagcgggaagcagctcggcggagcggtgtcgccggcgctgggccggctgtcttccgtcgcggtgctcgatctttccagcaactcgttcgccggcgcgatcccgccggaggtcggcgcgctgtcggcgctgacgcagctcagcctagcgaacaacctgctcgagggcgcggtccccgccgggctcggtctactcgacaagctctacttcctcgacctcagcgggaaccgtctctccggcggcatcccgggcgcgctcttctgcaactgctccgcgctgcagtacctggacctcgccaacaactccctcgccggcggcattccctacgccgccggctgccgcctccccagcctccggtacctcctgctctggtccaacgagctgtccggcgcgatcccgcaggcgctggccaactcctccatgctcgagtggatcgacttggagtccaactacctggccggggagctgccgtcgcaggtgttcggcaggctgccgcggctccagtacctctacctctcgtacaacaacctctccagccacggtggcaacaccgacctcgaccccttcttccgctccctgagcaactgcactcgcctgcaggagctcgagctcgccgggaacggcctcggcgggcggctgccgccgttcgacggtgggctcccgcatggactccggcagctccacctcgaggacaacgctatctcgggctccatcccgcgcaacatctccggcctcgtcaacctcacgtacctcaacctctctaacaacctcctcaacggctccatcccgccggagatgtcgcagatgcgcctgctcgagcggctgtacctgtcgaacaatctcctctccggcgagatcccgagatccatcggcgagataccgcacctcggcctcgtcgatttctccggcaaccgcctcgctggagcgatcccggacacgctctccaacctgacgcagctcaggcggctaatgctgcaccacaaccagctctccggcgccatcccccccagcctcggagattgcctgaacctggagatcctagacctctcctacaatggcttgcaaggcccgatcccggcgtacgtcgctgccctgagcagcctcaagctctacctgaacctgtcgaacaaccgcctcgaggggcctctccctctcgagctcagcaagatggacatgatcctggcgctcgatctgtccgcgaacaggctcgccggcacgatcccgtcgcagctcggcagctgcgtcgcgctcgagtacctcaacctctcgggcaacacgctgcgcggcgcgctcccgccgtccgtggcggcgctgccgttcctgcaggtgctcgacgtttcgcgcaacgccctgtccggacccctgcccgcgtcgctgctggtgtccacgtcgctccgggacgccaacttctcgtacaacaacttctccggagtggtgccacgcgccggcgtgcttgcgaacctctcggcggaggcgttccgaggcaaccccggcctttgcggttacgttcccggcatcgccacgtgcgagccgctgcggcgtgcgcgtcgccggcgtccgatggtacccgccgtcgctggcatcgtcgccgccgtgtccttcatgctttgcgcggtcgggtgccggtccatggtggccgcgagggcgaagcgatcggggcgccgcctcgtcgacgtcgaggaccaggcggagagggaacacccaaggatatcacaccgggagctctgtgaggcgaccggtggcttcgtccaggagggcctgatcggcgccggccgcttcgggcgcgtctacgaggggacgctccgcgacggcgcgcgcgtggccgtgaaggtgctggacccgaagggtggcggcgaggtctcaggcagcttcaagagggagtgcgaggtgctgaagcggacacgccataagaacctcgtcagggtgatcaccacctgcagcacggccagcttcaacgcgctcgtgctgccgctgatgccgagaggcagcctcgacggcctcctctacccgcggccgcagggggacaatgccggcctggactttggccagatcatgggcatcgtgaacgacgtcgccgaggggatggcgtacctgcaccactacgcgccggtccgggtcgtgcactgcgacctcaagccaagcaacgtcctcctcgacgaggagatgcgcgccgtgatatcggacttcggcatcgcgcggctcgtcgccgtcggcgaagaagccatcagcaccagcgacgagtccgccccgtgcaactccatcaccggactgttgcagggctctgttgggtacatcgcacctgagtatggattaggaaggcatccttcgacgcagggcgacgtgtacagcttcggcgtgatgcttctggagctcatcacagggaagaggccaacggacgtgatcttccacgaggggctgacgctgcacgactgggtgaggcggcactacccgcacgacgtcgccgccgtcctcgcgcacgcgccgtggcgggagcgggcgctcgaggcggcggcggccgaagtggccgtggtcgagctgatcgagctcgggctcgtgtgcacgcagcactcgccggcgctgcggcccaccatggcggacgtctgccacgagatcacactgctcagggaggacctcgcccggcgcggcggcggccgccgttcgctctcgaccaaagactcgtcgctgttctctaactga

SEQ ID NO: 151914 - DNA, 157 bp, Zea Mays
attgatcccgttttggtgcttgatgccaaagggggagaaaataaaggccaaagcaataaatggatcagctaccacttgagagacttttgaaaacagtaggataaagcttttggtttgtcaaaactcttgcattgtctcttgtgtcaaaagttggcct

SEQ ID NO: 151915 - DNA, 3162 bp, Zea Mays
gtcttcagctacagcctagaggtgtagagctctccactcccacctcccgatccagcacctcatggttccatggagcttgcgccgatgtccgccaccatcttcttcgcattccttctcctcttcctcccgtacggcccgatgaacccaggtgtagtttcggcagctgccggcggcgggttagacgatgaccgctatgcgctcctatccttcaggtccggtgtgtccagtgatccgaatggagccctcgctggctggggcgcacctgacgtgtgcaactggaccggtgtcgcctgcgacacggcgacgcggcgtgtcgtgaacctgacgctaagcaagcagaagctctccggcgaggtctcccctgcgctcgccaacctctcccacctctgcgtgctcaacctctccggaaacctcctcaccggccgcgtcccgccggagctggggcgcctctcccgcctcaccgtgctagccatgtcgatgaactcgttcaccgggagactccctcccgagctcggcaacctctccagcctcaactccttggacttctccgggaacaacctggaggggccggtcccggtggagctcacgcgcattcgcgagatggtctacttcaacctcggcgagaacaacttctccgggcgcatcccggaggccatcttctgcaacttctccaccgccctgcagtacctcgacctctcgtccaactcgctcgacggcgagattcccatccgagggggctgctcgctcccggacctgacgttcctggtcctctggtccaactacctcagcggcggcatcccgcccgcgatatccaactcgaccaagctcaggtggctgctgctggagaacaacttcctcgccggcgagctgccgtccgacatgttcggcggaatgccgcacttagagctcgtgtacttcacgtacaactccctggagagcccgcagaacaacaccaacctggagcctttcttcgcgtcgctgaccaactgcaccggcctcaaggagctcggcgtcgcctggaacgagatcgccggcacgatcccgccggtcgtcggccgcctctcccccggcctccaacagctccacctggagtacaacaacatcttcggcccgatcccggcaaaccttagcgacctcgccaacctcaccacgctgaacctgtcccacaacctcctcaacggatcgattccacggggcatcgccgccatgcagcggctcgagcggctgtacctctccaacaacctgctctccggcgagatcccgccgtccctcggcacggtccctcggctagggctcgtcgacctctcgcgcaaccggctcaccggcgccgtgccggacacgctctccaacctcacccagctccgcgagctcgtgctgagtcacaaccgcctctccggcgccataccgccgagccttgcgcgatgcgtggacctgcagaattttgatctctcgcacaacgctctgcagggcgagatcccggcggacttgtccgcgctcagtggcttgctctacatgaacctctccggcaaccaactggaagggacgatccctgctgccattagcaagatggtgatgctgcaggtgctcaacctgtcgtcgaacaggttgtcgggcgccataccaccccagctcggcagctgcgtcgcgctggagtacttgaatgtctccggcaacacgctggagggcggcctcccggataccataggcgccctgccgttcttggaggttcttgacgtgtcctacaatcgtctgacgggtgcgctgccgttgacgctggagaaggcagcatcgttgcgacatgtcaacttctccttcaatggcttctccggcgaggtgcctggaacgggggccttcgagagcttcccggcgaacgcgttcctcggcgatgccggcctttgcgggtccgtggtcggtctggcccggtgcggcggcggcggtggcgcgaagcaccgacctgcgcttcgtgatcggcgcgtggtgttgcccgtcgtgatcacggtcatcgcgttcacggctgccatcgtcggtgtcgtcgcgtgccgcttggcagctcgagcaggcgtgcggcgagactcgcgccgctcgatgctgctgaccgacgccgacgagccggcggagggagaccacccgagggtgtcgcaccgggagctgtccgaggcgacgcgcgggttcgagcaggcgagcctcatcggcgcgggccggttcgggcgcgtgtacgaggggacgctccgtgacggcacgcgcgtcgccgtcaaggtgctggacccgaagagcggcggcgaggtgagcaggagcttcaagcgggagtgccaggtgctgcgacggacgcgccaccggaacctggtgcgcgtggtgaccgcgtgcagccagccggatttccacgcgctcgtgctcccgctgatgcccaacggcagcctggagagccgcctgtacccgcccgacggcgcgccgggccgcggcctcgacctcgcgcagctggtctccattgccagcgacgtcgcggaggggatcgcctacctgcaccactacgcgccggtccgcgtcgtgcactgcgacttgaagccgagcaacgtcctcctcgacgacgacatgacggccgtggtagcggacttcggcatcgcccgcctggtcaaggacgtcggcgacagtgacctcgccgacagcgccggctccggctcggctgacccgtgcaactccataaccggattgttacaaggttcagtcggctacatcgcaccagagtacggaatgggagggcacccgtcgacgcagggcgacgtgtacagcttcggcgtgatgcttctggagctcatcacggggaagaggccgacggacgtgatcttccaggaggggctcacgctgcacgactgggtgaagcggcactacccgcacgacgtcgggagggtcgtggcggagtcgtggctgacggacgcggcgtccgccgtggctgacgagcgcatctggaacgacgtcatggccgagctgatcgacctcggggtcgtgtgcacgcagcacgcgccgtcgggccggcccaccatggcggaggtatgccatgagatcgccctcctcaaggaagacctcgccaggcacctgggcgcgccggccgccacgacgatgacggctagcgagcgctcctactctaccacggattcgtctttctga

SEQ ID NO: 151916 - DNA, 2364 bp, Zea Mays
atgtctccttcccgcctcgtcctccctccgcccgccggcgacccaggcggcggactgcggcgctcttacctccgccttgtcgccctatcatccacgccccgccaccttgaccagctcctcgcagtctcgctcgcctccggccactacgcgctcgacccggccccggccaccgcgctgctgctccgctacgcctccctccgtgcgccgcccagccaccttctccgcctcttccgcgccttcccctgccccgaccggttcctccgaaatgcgctgctacgctccctcccgtccctccgcccgcacctcctcttcccgtcgccggactcgttctccttcgccttcgccgccacctcgctctcctcttcctgttcctcccgtggcaacgacgctgctgccgcacgcacgcttcacgggctctccgtggccgcggggtacgcggcggacacgttcgtagcgtcagctctggccaagctctacttcaagctgtcaagaggggacgacgcacgcaaggtgttcgacacggtgccgtcgcccgacactatcttgtggaacacgctgctcgctggtttgcctggatcggaggccctggaggcgttcgtgcggatggtggatgctgggagagtgcgacctgactcaaccacccttgcatccagcctacgggcagcggcagaagcatcacatatggcaatggggaggtgcgtccatggatatggcgtgaagtgcgggttggcagagcatgagcatgttgtgactgggctcatgtcgctctattcaaagtgcggggacatggactctgcacagtttctctttgataggatggacaatccagatttggttgcctacaatgctttgatctcaggctactcagtcaatggcatggttgaatcatcggtggagttgttcaaagagttgacggcctcaggctggaggccaaactcaagcacgttggttgcggtgataccggtgtacagtccatttgggcatgagctgcttgctcggtgcttacatgcgtttgttgtcaaggccaggttagatgcagatgctctggtgtcaacagcactgaccactttgtactgtagattaaacgatatggagtctgcaaggagcatatttgatgcaatgctagagaagaccatggaatcatggaatgcaatgatatccgggtatgcccagaacggcttgacggagatggcagttgcacttttccagctaatgcaggagctcaatgtgcagccgaaccccatcactatttcaagcactctttcagcctgtgcacatcttggagctttgtctctggggaagtgggttcacaggatcatctccaaggagaaacttgagctcaatgtctacgtcatgacagcgctcattgacatgtatgcgaaatgtggaagcattgctgaagctcggagcatctttgacagaatggataacaagaatgtagtctcctggaatgcgatgatatctggatacggtctccatggccaaggtgctgaagctttgaagctctacaaggatatgttggatgcacgcattcttccaacaagctccaccttcctgtcggtgatctacgcatgcagccatggaggattggttgacgaagggcagaaagttttccgcgtaatgactaatgagtacaggatcaccccaggtatcgagcattgcacatgtatggtagaccttcttggtcgggcaggcaaactgaatgaagctttggagctcatatctgaattccctcaaagtgccattggacctggcgtgtggggagcgctgctaggtgcttgcatggtccataaaaatagtgacctagcaaaattggcatcccagaagttgttcgaactagactcagagaatgcgggctactacgtgctcctatctaatctgtacacatccaagaagcattactctgaagcagctgtggtgagacaagaggccaagaccaggaagctggtgaaaacaccagggtgtactctcatcgagataggcgacaggcctcatgtattcatggctggtgaccatcttcacccacaatcagaggctatctactcatacttagagaggttaaccgcaaagatgattgaagctgggtaccagcctgtgacagaggctgcattgtacgatgttgaggaggaagagaaggagcacatggtaaaggtgcacagcgagaagttggccatcgcctttgggctccttagtacagagccggggacagagatcaggatcatcaagaaccttagggtttgcctggactgccataacgctaccaagttcatatccaaagtgacacagaggttgattgtagttagggatgcatcgagatttcaccatttcagagacggggtttgctcctgtggtgattactggtga

SEQ ID NO: 151917 - DNA, 681 bp, Zea Mays
tgtccatacatcctcaccgttgaattccatggacttggattaactgtactgtggcaacaacaacaatgaagaccatggcgtttgtcaattattttttggaacaatcagccaagtaacaacttttaattcaaactctacacaagaccaaactatcgcagattccacccatcgttgctacgttgaatttaacgctgctctaacagccaaaatacgctcagggtcaccaatcaaacataaataacaccaccagataaaggaaccaacattgaagttggtgacacgagcgaggcaaatcagcacaataggatcaccacctccatgcaatgcaatcgctcttggcatgagatcaatttcttcccagcggaagcgagcggcacgagtatgtctccttgaaatccgacttcctggacgatgtgaatatggacgcatacacttccttattggcatgggctggcgcatggtccgcagccttgaagcgctttgctgaagcagcctcgcccttcttcccattctcagctccggccgccgccaccaccggcgccacgacagtagcagcatgcttattcccactgagaaccttcttgtccttcctctccttcgccttccccctctcctcctccatcctcttcctgagctcggccacctcctcctcagtcccgttgatgggcatcttgtcggcct

SEQ ID NO: 151918 - DNA, 2543 bp, Zea Mays
ggaacacaaaaaagtaacattcattgtatgtggctaatcagatagccagaaaatacacgttgatgtagaactggggatcttgaaatgtattaactacgattaataccaagctgcaaaaacttgcagctctaaatttggatcaaccattagagttccatgcatgatatggccatagggaattgcatcttagttggctgaacaagatccaggctgaaaaaatggtgagattgggcagtggagtaaaaacggataacattggcccgttggagtcttggcaatgaaggattagaggtactcttgtctttggtgtcacaccaataaatgacagtagtacatgaaataggtttggcttaacttccagctacgtataatattcagttcagttactgctgcctctgaaatccacaagctcatatgtaacattgtcatctgacaaaattgtcagggaccttgctgtccagacaaagactaccaaggaagcgcgggaagccgatgaggagacggacattgctacggcagccggggccagacgcagcaagcgagcatcgaagcccagcaaggcatatgcgggctctgagtggggaaattaggcccatggcctgatgtggcaaatagacacatttatataccgtgtatgcctgaacagagaggtcaggctggttgtatgaacctggcggcggccggcggcgatcaggtgtgatcgttcctcagttcggcaaactaacaatactaccctcacggttgtgtgtgtgcgttatctgtgttcttgccagtcgagattgagtgaggtgctaacatttggtaatcggagcaaggtagatccaaatccccatcgccaatcccacaactggcaccatgttgaccgaggaacagcaagcgatgctctgggctgctgtctagaagatggagaacaatcgaaggacgcacacagcactttgcgagttcctgtccaccacggagcggatggcgaacgccatatcggcgctagtcgtcaccactgaggaggacggctccgacaagctggcagcaaccttaccagcaatgcccatgccttccccgaccttagatccatgccacgacaccagcttcaccacctcccttgtcaccacgaagctacccctcatctccaccaccacgagcatgcgtatcaaagtcaagttcgatattgatgctaacggtatcctttctgtcaccgctgtgaacaagggtactgggaagaagcaggatatcaaaattactggtgctagcaatctgccaaaggacgaggtggataggatggttggcgaagctgggaagttcacagaagaggacaagcagaagtgagacgccattaacactaagaaccaagccgagtcagtcacctaccagaccgagaagcaactgaaggaactaggggaccatgtcccaggtgatgtcaaggggaaagtagagtcgaagagctcaaggatccggttacaagtaacagaaatattgtggagcagcaggatgagactgatgagaaaataatgctatgaaatagacagggcacgcaacatagaagctactgaagaaaatgctattgctgctgagagtaacacaggaaccatcacaaatgttgttgaagaaaaaatccctaatgaagaaattattttaggcactatctcttttaacatggcaaacaacagtgttaaggaggaaaagatgtataacgaagaagtgaacaagggcctaggttctcattaggatattatggtacatggtcctgataaagtcaaagagaagatgtgtgaagcgaccatgtcaggtcccaccttagacaagctcagtttgcttaaatctactgacagtcagaggtaaggatgaaagcacgggtgcagaccctgtttcacacgagaccaatctggcacaaaccagcgatggtgctgatgaagagatgatcacagagcctgctgttgacactgggcaagaggagcatctaagggaaaatcacgatgaaagtggaatattggcattcatatttgcagcctgttgaatttgttatcaaaaccgatcagccaagttcggcatatattgatgatcaatggactgctactccctggcaacagaaagatatcaccaatcttatggatctgcaatttcgtattctctacggacaagcgatcctgtcttggttgatccatatgggcaagatccatcaacaaggaaattactgggttgtctgaccacaggaggtaaagttgagtattatacattaactcaaggagtcatcaggtacaaagggcacatttggctgggcaccaacaaaatatgcagcagtctgtcatctctgtgttgcatgacaacgcaagcggtggtcgctccggttttcccatcacatatcgccgtatgaagacgctctttacatggccaatgttcggtgcccgatcttcaacagtttctgcagaatcatcagaggatgctctatcagccctgctgttagtccactgtgactgaaaggtgcctgaagtcattctgaagaacaagctggtttgccaagcgggcaagtttcaggtggcaccagcttg

SEQ ID NO: 151919 - DNA, 2357 bp, Zea Mays
atggaaccattcgtcgccgcgcaggggctcgtgatcgtgctacagcggtcgcacgcacgcgcctacgacgacccgttaaacaaaccaaacgtccaaaccaccaaaaacctccgagaaaacaaatccaccggcgcggagttgccctccttgctgccaccagcaccacctccatccgtccctcctccccgatatatcgccaccaccggctctactgctcgtaacgtctcctccctgcccgactcctcctcccccacaaggttcggctacccggcggggcggcgcgttctctgtccggttcctgcgtcggcggccgggcggatgtccctgttccggcggctgttttaccggcggccgcccgatgggctcgtcgagatctccggcaacatcctcgtatttgaccactgttactccacggatttgttggaagaagacgagctaatgccatacattggaggaattttaaaacagctacttggccgccactctatcgactcattcatggtattcaactttgagggaagcaagaaggacaatcaaattgccagcattttctcatactatgacatgtctgtgatgggttacccacgtaactatgaagggtgccccttgctcaccatggagatgattcaccattttctgagatcgagtgaaagctggctctcattaagccaggacaactttctgctaatacatgcagaacatggtggatggccaattcttgcttttgcattggcagccttattggtttacctcaaaaggtataatgatgagaggaaagctctggaggcagtctgcaaacaggcacctgatgggttagctgagtttttttcaccactggacccagtgccttctcagctgagatatttgaagtatgtgtcaaaacggcacaaatcactagaatcatggcctcctgttgacagaatgctgaatctgaactgtataataatcaggaaggtgccaaattttgatgggcaagggggatgtagaccaatattccgcatttatggcctagatccccttgcacctaatgacaggggtactaaacttctctttttgaccccaaagacaagtgattttgtccagctctatacacaggaagactgtgagataatcaaggttaatgttcattgtcctgttcaaggagacattgtgattgagtgtgttagtctggatgaggactttgaacatgaagttatgatgttcagagccatgtttagcacagcttttattgaagacaacttgttggtacttgataggaacgagattgatattctgtgggacacaaaacaccggtttcctgtggacttcagagttgaggttatattttctgatatggaaataggcacagcagttcacaaatcagggttatctagcgaggagaaagaaagcctttccaaggttggtgatgccttcagccatctggaatggtcaagcaaaagcgttcacatcacaaacgaagattcaaaacagaagggattacagacagaacacgatggcttcgaaaaaatacctctagaggaaacaggaaccagcagcgcatcagctggaaacagcagcagaactgtccagattcatcacatagaacctgctgaaaaccattcttctcttgccagtgtgcattcttctccagaacctgaggcttctggttctggaccgaactttcaaggaggtcaactctccaatgatacatctgcacaggaggaacacgaagtggatgacaccaaagtcgaacccaatccagaaatcccccgagatgcagaagctggtgatgctgatgccgccgccaccgccgcagaatggtctgacaacaactcggatgtgttcctatcagacacgcacacgccctcgagcagcacgccgtctagtcccccaaagttcgacgaagacatcctggaggctggtatggttggaactcgatcacagctcactgaactgaagatataatgggtctcctttcttcgactgtaaattggggctcacctgatccatggatgatggagctgcccacacacccaaaacatgtactttcacagatacgtttacgcaacaacatgggcaaatgatggtagttcagccccccccccccccaaatactcatatatgtacagctgatattctcaaacatgtataaaaaagatttgtgcagatttttgttgcttaccggagtatttctattgcactcattaatagtagcaccgatgaattcttgatagatttgtcccgtgaaaacgagctgacgtgcttggcgtctgaccacaccgcgctggtgtcctttttaatcggtcgagtcgtcgagctcgtggcggctgcgctggcaggatttcctcatcatgagcacgggcccacaaaggcccaac

SEQ ID NO: 151920 - DNA, 261 bp, Zea Mays
tattgcggcggcggcggaggaggccggggcggcgtggtggtcagccgtcctcaggggcggcgccgggccggtacgggagtcgcggcggcggcggtggatggggcaggggcggcggcggatggggctggggcgggggctgctggggccgcgcggggtcggggcgacggcggtgggaggcgcggtggggcttggggaggcgcggcggcgggtcttgggcgcggcggcggcggagctctaggcgatggcggcggcgggtcttgg

SEQ ID NO: 151921 - DNA, 485 bp, Zea Mays
ggtacgcgctcgacgagtccgacgacgacctcccgctgcgcgttggggccggaaaggggaaggatcaacagaacgacgcgcccgccgagcggatcgagcgcgaggacgcgaaagaagaagcttgccagcgctgtggaaaaagtgataatctagtctcttgttcaacatgtacatacaaatttcacagaaaatgcttggttccttgcttaaacatcacatctgataaatggagctgcccagaatgtgtaagtccattaacagagatggagaggattctagatattgaagtgctggaagcacctcgtgaagattctagttccacagagcctcgatcaaagaagatggagcgatatcttatcaagtggaaaggattatcatacattcactgctcttgggtttcagaaaaagaatattcagaagccgcgaatatacaccctcgtctgaggactaggttgaataacttcagaaggcaaaaggaagccatg

SEQ ID NO: 151922 - DNA, 2098 bp, Zea Mays
ttgaggagcgaatgatgcagcttacaaaaaagaagattttattggagcacttagttgttggtcgactcaccaaagctaataatgtcaatcaggaggagttggatgatattatacgctatggatcaaaggagctttttgaagacgagaatgatgaatctcgccaaattcattatgacgaagctgcaattgagaggttgttagaccgtgatcaagttgacggtgatgaatctgtggaagatgaagaagaagatggattcttaaaaggattcaaggttgcaaactttgaatatatcgatgaggcaaaggctcaggcagaaaaagaggaggcacggagaaaggctgcagctgaggctgaaaattctgaaagaaactactgggatgaactattgaaggatagatatgatgtacagaaagttgaagaacatactgctatgggaaaagggaaaagaagccgcaaacagatggctgccgctgatgaagatgacattcatgatttaagttccgaagatgaggattactcattggaggatgacatttcagataatgacacaagtttgcaaggaaatatttctgggaagaggggccaatattctaagagaaaatcacgtaatgttgattctattccattgatggagggcgaaggacgtaccttgagagttcttggattcaaccatgctcaacgagcaatgttcctacagacactcaatagattcggttttcagaattatgactggaaagagtatcttcctcgtcttaaaggaaaaagtgtcgaggaaatccagagatatgctgaacttgtcatggcacatcttgttgaagaaattaatgattctgactatttttcagatggcgttccaaaggaaatgatgcgtgttgatgatgtactagtcaggatagcaaacatatcccttattgaggagaagatggctgccacaggaccaggaaaaattacaaacatttttcctaattacttgctctatgagttccaaggcttatctggtggaagaatatggaaagcggagcatgatctactgttactgagaggcatactgaagcatggatatgcaaggtggcagtatatatcagatgacagagagaatgggctttttgaggctgcacgacgagagcttcatctcccttcggttaatgaaataattggtgctcagttgaacgaggcaaatgggaatttggaaggtgcacaggaaggccaagcgaacacaacaagcatgtcgcattacaaggagatccagagaaagatagttgagttcttgagaaagagatatcatcttatggagagagccttgaatatggaatatgctgtgataaagaaaaaaattcctgttcctgatgatattactgaacaaggtgttccagcaggacatgctccttttattccagatatcagtgaactgttgcgggaattgcccaatcttgagccaatttctaccaatgaattggtttctgagggcacagctggtcagttacaagttccccatctctacaataagatgtgtggagtgcttgaagagagtggtgcttatgcgctcagttccttctttggagacaagtccgcatcttctagtttggccaatagccttcgacagtttgaaactgtgtgcgagaatgtcgtcgaggccttgcgaccacaccaaaatggtactggcagtgccatcaaagaggaattggtagatgcagccaccaaagcagcagcagcagcagctcctcaacaagattcaggccatgatgcaccgcatgggcagtcttcgacagccaaggcggacatggaaatcgatggttgatttgtaggttccagagtggtaagaaagggaatccccctctaatcattatgtatactgtggtcagaatgtgcgctatatattgtaacatcaaagaaagcacctccaggcctgagggtgttactgctaatgcgtttggtttacttgttgtccttgtaatatgcatacacatttagaactcatgcagccattttgtgtgctcgaaccggtggatcgctgccctgttgtcttgtactgtgtttagggcctgtttggatacgaatggttaattataagacggggctaaagataagtacggataa

SEQ ID NO: 151923 - DNA, 1169 bp, Zea Mays
acccgtacgtgcggtcagagagctatctggggtggcattggagttggagccggcctgacagcaccagagagagggttgccgacatgggagaagcggcagaccgcgagcggccgccgtggcgctgcacggtagccgtgcaggccgcgctctgcctcgcgctctacgcggccttcagcctcggcgagccgcagctcatcccgcggggcggggtggacgcactcgggcggggcgcgcgcggcggcggcgtcgccttcctcagcgtcgctggcggcgcgcgcggacccatcgaccaggagaggctcctgaggcagatggagaccacagcaaagctttatgaagtcaagttcgtgctggatgttactcaactgggagcggatgatccactctggcaaaatggttccatgtacttccaggctctgaacatcccgtggtactccacttcatcacatgggcggacggttggtaactttttgaagaaagtgaagatgccctacgatcaggttctagatattattggtctgggcacatggcctctgcaggaacctctacatggtggcaggataagcacttcttacaagggacaaattaaatggttggatcgattactagcactcactgaaagcaattggaaaatagttgttggatataatccattacttgtttgcaatgggaaagaaacaacaaagctcgatgtgccatttcaacatatttttgcaaaatatgaagtgaatgcatacataagcatgggcgggtcttgtggctacttccatcgagacaactcgatactgtacattggacaccccaggagccctggtggtgcccaaacaagtgtagatggttttttcttgcacagagttagacccctcgagatggagtcaatgttgataaatgtagaaggcaagctagttcagagatctgatgttcagcagcatggaacgggagccatgtgaacctcacaactttcagtttctgttccattatgtcgtagcgccgaacaaaggcgtgacataatgttgtgttgtattgtattcattcagtttaaaaaaagctgcattagatttttgtcattttgcctgtttcaacatgtttgagtttgtaggtagtctttatcattatttacaaacatacaagagttcactatcacatgcagagtgctgcccaagcaggga

SEQ ID NO: 151924 - DNA, 597 bp, Zea Mays
atggagggctccgtgcggctgggggacttgaagccctccccatcgcacatcaagccctcgccatcgccggacactggtgaaccttttctcgcgtcccagcctcctccatctctaggcttgcgcgacctggctaggatagacgtgtgcagcccagcagtgtctagtcggacgctacctccatgccccgtagcagatgtgtctaggccagcgccgccaggccagatgacgcctccatgccccgcgtccgtcctgcctactctagcagcaccacatcgaggccccaaaccaaacaccgaaagttgtttccgctatgatgttcctcgaccaatgaagtggattccaaccgggatggatccaaattcagcctgtagagttattgttaaggttcctgcatatgtagaattgccatatcaggagtaccatgtaactgaaaatctgaagttcgtggtggataaagatactacaaattggatggattttttggcagacctaaagttaaagattaagcatggcaaggagcaagtgttgcatgtatcttttatggataaaaatagtcaagtgcattatgatgtcaagtatcatgagtcatctcaatga

SEQ ID NO: 151925 - DNA, 270 bp, Zea Mays
agacatatagttgatctagctgcatggacttgcacatgtagaagatggcaagtaactggattgccttgttttcatgctattgctttcatcacttcacttccaaacaacaaaattgctgattttgtacacccatactacactgttgaaaagttcaagttgtcctatgctggagtcattccaccacttactgaccaagctcattggcccaaagtgaatcttggatttaggctacacccacccatcctaaggagaactgcagggaggccaaaa

SEQ ID NO: 151926 - DNA, 1305 bp, Zea Mays
atggcgtgtggaaaatttctctcttctacgaaaaagaaggaagcatacgggacgtacaaaaatcacacaaaaaaaggggagtggaagaccgcgtcacattctacacgcggccgtctggagtcgccggtctcgccgctacgtacgcactggtgcagcaactactccccctctctccgagccgccaacaaaactagtcagtccatcgccgtacttgccgcgtccagcgcgcggcccagtaactaccgcatgccgctctcctgcttcgccggcggcgacccatccgcggcgccgccgtcctcctcggcgacgtcggtctactggacccacctcggcggcgtcacgctgacgtggtcccgcgctccgatcggcctcctcctggccgcggagctcagcctgcgccccgccggggacgtccacggcggcgaggacgccacgcccgcgcggttcgcgttccggccgtggctcccgtggcggcggcgcgggtccaagcggttcgcggcgccgggcggccgcgccgtcaagttctcgtgggacctgtcgcgcgcgcgcttcgccgccaccgggcgccggccggagcccgtgtcccggtactccctgcgcgtctgggtggacggcgagctggcgctggccgtcggggaccacgcgcccgcggcggggctgctcctctcccgccgggagagcgccgccgtcgtcgccgacgggcgaggcgaggcctactcgaccgccgtcgacgtcgcgggcgagcggcacgacgtgtccctcgccgtggagggctccaccatgtgggtcgccatcgacggcgagaaggccctccaggtgcgccggctccggtggaagttccgcggcagcgagaggctggacctcccgaccggccgccgcgtccgggtcacgtgggacctccacggctggctcttctgcccggacgcggccgccgccgtcttcgtcctccggttcgaaacctccgacgcggccgaagcggacgacgagggcgacgcggacgagagcgaggccggcccgcacgtgctgaggcagccctcgttcagtttcaggaaccaccaggcgcacggcagcggcggcgacagctggttcagcagcgacagcgataggagggggtggatgcgcgggccgttcaggtcgggcggctccgacacgtcgccgtcggtgtcggtggcgtcgacgtccgcggcgtcgtcggctgccagcgtggccacggtgtcggagtgggcggctgcggaggaggcggcgacgctgaaggatggcggcgggttctccctcgtcgtccagctctggaagaagagatagcgg

SEQ ID NO: 151927 - DNA, 117 bp, Zea Mays
gtactcatatacattatatatacagtgacaacttccgattggttggagtactaaactatgtaaagagactagctacatgcatgaatctcaaaagaaactagctacatgcatgaatct

SEQ ID NO: 151928 - DNA, 118 bp, Zea Mays
agtttaaaaataatctatgtcattttctgtttatattcccaacccttttggttatgttaaataccatggggtagccaaaacatattgtaacgccacgtgcattgacacgacacgatcc

SEQ ID NO: 151929 - DNA, 625 bp, Zea Mays
ttgtttaattaagcccaaaccatcccgagcccattccacccgtgcctcccggataaaaaccctagcggcctccgtcccattcgagtttcgatctctcccatccgagtgtctcctcctccgccgccgccgccgccgcttccgtcgtctccgcccgccgaggccatggtacgtatctccggcctttgcgcgtaagctcgcggattcatgggttagtcgtgtcgtacctcgtcgatcttacgcctttttgtcccgtcgttgcgctgcgtccccgcgcagccgtcccacaagaccttccggatcaagaagaagctggccaagaagatgcgccagaaccgccccatcccctactggatccgcatgcgcaccgacaacaccatcaggtacaacgccaagcgcaggcactggcgtcgcaccaaactcggattctgagcggtggaagaaatgctggctaatgacgcttggggggtatagggctctgcaggctaggaagctcttgtttaaatttttttgcttgtgttatttgtcattgtagtaccatgttttgtctgatggttaaagaaccgcctttatgctatggtgaatttatttaaccttgcagcgccttaatcagttgatctctagccaa

SEQ ID NO: 151930 - DNA, 615 bp, Zea Mays
aaaccatcccgagcccattccacccgtgcctcccggataaaaaccctagcggcctccgtcccattcgagtttcgatctctcccatccgagtgtctcctcctccgccgccgccgccgccgcttccgtcgtctccgcccgccgaggccatgccgtcccacaagaccttccggatcaagaagaagctggccaagaagatgcgccagaaccgccccatcccctactggatccgcatgcgcaccgacaacaccatcaggtacaacgccaagcgcaggcactggcgtcgcaccaaactcggattctgagcggtggaagaaatgctggctaatgacgcttggggggtatagggctctgcaggctaggaagctcttgtttaaatttttttgcttgtgttatttgtcattgtagtaccatgttttgtctgatggttaaagaaccgcctttatgctatggtgaatttatttaaccttgcagcgccttaatcagttgatctctagccaattatttttccagtttgctatgcttctctgattgtacatggttgtctattcctcggttaactgtctggttttaacacttatctctggtttagtgttatatatgtgtatgtatgcatgg

SEQ ID NO: 151931 - DNA, 3465 bp, Zea Mays
cgtcttcgttcttccacggagagagaggcagaggcaggcggccggtgcatgcatgccccgccctccctccgtgcgcccccgaagacctcctccgcccccggcgcggtgagctcgtgaccgcccggacggcacccgcctctgcggtttgaggctcgctgcacgcactccaataaaacaaaagaagcaaccatggcgtccatttccccggaggacattggcggggacgtcaatctgtccaagatcccggtggaggaggtgttcaagacgctgaaatgcgaccgcaaggggctgtccagcacggagggcgagaaccggctcaggacgttcgggcccaacaagctggaggagaagaaggagaacaacctcctcaagttcctgggcttcatgtggaacccgctctcgtgggtcatggagatggcggccatcatggccatcgcgctcgccaacggcggcggcagggcgcccgactggcaggacttcgtcggcatcgtctcgctgctcttcatcaactccaccatcagctacatcgaggaggccaacgccgggaacgccgcggcggcgctcatggccgggctggcgcccaagaccaagctgctgagggacggcaggtgggaggagcaggacgcgtcgatcctggtgcccggtgacatcatcagcatcaagctcggcgacatcatccccgccgacgcgaggctgctcgagggggacccgctcaagatcgaccagtcggcgctcaccggtgagtcgctccccgtgaacaagcaccctgggcaggaggtcttctcgggctccaccgtcaagcagggggagatcgaggccgtcgtcatcgccaccggcgtgcgcaccttcttcggcaaggcggcgcacctcgtcgacagcaccaacaacgtcggccacttccagcaggtgctcacggccatcggcaacttctgcatcatctccatcgctgccggcatgctggtcgaggtcattgtcatgtacccgatccagcaccgcgcgtaccgcgacggcatcgacaacctcctcgtcctgctcatcggcggcatccccatcgccatgcccaccgtgctctcggtcaccatggccatcggttcccaccgcctgtcgcagcagggggccatcacgaagcgcatgacggccatcgaggagatggccggcatggacatgctctgtagcgacaagaccggcaccctcaccctcaacaagctcaccgtcgacaagtccctcatcgaggtgtactccaagggcgtcgacagggacatggtgctcctctacgccgcgagggcctcccgcgtcgagaaccaggacgccattgacacctgcatcgtcaacatgctcgccgaccccaaggaggcccgcgctggcatccaggaggtccacttcctccccttcaacccggtcgagaagcgcacggccatcacctacatcgacggcaacggcgactggcacagggtcagcaagggcgctcccgagcagatcatcgagctctgcaacatgggcgccgaggccgagaagaaggtccatgccttgatcgacgggtacgccgaccgcggcctccggtcgctcggcgtgtcgtaccagcaggtgccggagaagagcaaggagagcgccggcgacccgtggcagttcattggcctcctgcccctgttcgacccgccgaggcacgacagcgcggagaccatccgccgcgcgctccacctgggcgtcaacgtgaagatgatcaccggcgaccagctcgccatcggcaaggagaccggccgccggctcggcatgggcaccaacatgtacccctccaccacgctcctgggcgacaagaacaccacggtgaacggcatgcacatcgacgagctgatcgagaaggcggacggcttcgctggggtcttccccgagcacaagtacgagatagtgaagcgactccaggaccggaaccacatctgcggcatgaccggggacggcgtgaacgacgcgccggcgctgaagaaggcggacatcggcatcgccgtggacgacgcgacggacgcggcccggagcgcgtcggacatcgtgctgactgagcccgggctgagcgtgatcgtgagcgccgtgctgacgagccgctccatcttccagcgcatgaagaactacaccatctacgccgtgtccatcaccatccgcatcgtgctgggcttcctcctcatcgcgctcatctggaagttcgacttcgcgcccttcatggtgctcatcatcgccatcctcaacgacggcactatcatgaccatctccaaggaccgcgtcaagccgtcgcccacccccgactcgtggaagctcaacgagatcttcgccaccggcatcgtgctcggcacctacatggccatcatcaccgccgtcttcttctacctcgcccacgacaccgacttcttcacggacgtgttcggcgtgaattcgatcaaggagaacgacagggagctgatggcggcgctgtacctccaagtaagcatcatcagccaggcgctcatcttcgtgacgcggtcccggagctggtcgttcgtggagcggccgggcttcctcctgctcttcgccttcttcgccgcccagctggtggcgacgtgcatcgcggtgtacgccgactgggacttctgccgcatccaggggatcggctgggcgtggggcggcgccatctggatgttcagcatcgtcacctacatcccgctcgacgtgctcaagttcatgatccgcgccgcgctcagagacaaggccacgggcaacaacgtccacaacaagtgatacgtttatctgggtgcttgtcgcggacggcgtttaggaacaaggactgcggcaagggccggcgatcgcgaggcacagtgggcggtagagcagagacactccacgggcctcaaccagctcgccaccacctcctcctccgaccttctaggcagcaaggactagcatgcagtccgagctcaccgaggaggcccgcaaaggtcgcaagatatacgtagctacagtcttctccggcgactagcccaccatctctagcgccgctgatgcggctgatctcgctggtctccagagaccgacggcgtccagcggtggccggaggagtcctgtgttcttcgtttccttaggtgtacttatgtgggttttggggtggcaagagagttttttttttgtgaactctggtgtatcggatcaagtgaatatgtacctacatgttgtgttcttaattctgcattgtacagctatacactatacaagggtacgggaatgctgaggtgtaacttccatgcaatatacttagttgtattcatctaatcatcaaactgccagcaactttttatttacttcacttatttggagttatgtgtaatggagtcatagtaggcctgtttgtttcgccataggttgctgcggactttcaaaacctattttcagtcggcttttataagaagcactttgataaaaaccgtccaaaatcacgtgaacata

SEQ ID NO: 151932 - DNA, 440 bp, Zea Mays
atgaaattgctatactagatttgcaggcagttgacccgaacggaaacaaccagaaaataacccacacaatgagcttaacgcttctccagggctacttcgctgaggacgacgacgatcccgccgccggcgccgccgctggcaccgagctgagcgagtctggtgattcgtcagccgaggaagccggatcggacgaagtcgaggagtccgctcctccaaagccgccccccaagctccgccgccgaccaaaccctaagggggggagatgtcggcggcagcgacgggggctccttgctgccctccgcgctggaggccttcgctgatgtctcgggaccaccagattttctgaggcacagggttgccgagccagaggaagggacggaggccctcggtgtactcgatcgtcgtgggaaagaggggagcaaacagccgcctccaggtaa

SEQ ID NO: 151933 - DNA, 173 bp, Zea Mays
gctctgctgttggagatatttgattatataattgcattgctaattttctgtggcatcagttttgtgttcatctgttttcaattgcatggcataaaatcaggtggtacacttctagagttggttttagtttgaaaatataaatgtgtagtctatagtctatagttgtgctggcg

SEQ ID NO: 151934 - DNA, 179 bp, Zea Mays
aaatcggctcctagatgcgtccacgacagcgttttttattttgaacgcaagctcctcatccaacggcgcagcatgcagtatgcccctgtttgtttcggcttttcgcagcttctggccaccaaaagctgctgcggactatcaaacactcagcttttcagccagcttctataaaattcgtt

SEQ ID NO: 151935 - DNA, 563 bp, Zea Mays
ccaacatccacatatatttcaagcataatatgtcaatcacataaaagaacatggttcataatcctttaacctaacaaatattaagagaacacatataatagccagaagttgtagttctatacaacaagcataaggataaaaagaggtgcaaagttctgtgagatggatcttcaggatggttgacaccaacaccttggcaagcatacttaaggagtcatctgactacgactgatacttaatctttgtcgaagaatactggtattttctgctaaggacttcttcaaatctgcaatttcagtagattgattagcaatggttgcctcggatgcttgtgacttggcctttaaggttttcatttcttctcaaagtccatcttttcttgtctctcagtgtccaattgagactaaatctcttgcatcattgttgaaactgtccttatgttgcttctcttggaggacacaagaccagcattgcgaagaaatttacttgaaaccaacaccacattggaaacaacttctgtagaatactttacagggagctaaacttttcaacataattcctaa

SEQ ID NO: 151936 - DNA, 297 bp, Zea Mays
aagggttggagacccatatttatagccctagaggctgcactaccacaccttctcacacacactacacaacaagattgtcctctagattctaaagagactacagaggacagtcaaaagcgactgttgtcctctagatgctaaagagactacagaggatagtcaaaaagcgactgttgtcctctagatgctaaagagactacagaggacagtcaagctgtcctctagatgctaaaggactacagaggacagtcaaaagcgactgctgtcctctagatgctcaagacttattccatcaat

SEQ ID NO: 151937 - DNA, 527 bp, Zea Mays
agagccactgccaccactgctgcccacggccacccacaccacaccacaccaatacaccataccagaaggagcaaaaataagacgagatggcggacgagcgcttgcctcaaacggccggcgcccgcacggctctcgccagagctactggatcctcggcacggaaacgcgcccgcgatagttaggtgcgcctgtgggcccggccggctcgtcacttacataggcgcacgcacccccgcctggtgcgtcgtcgatcgctgctttgctggcgcgcggcggccctgtgtggcacagtagaggtctgctgaggacgacgaccggaggcgtgctgcgtggatggtcctcatggccgggatgctccccggcgtggagtgcgcgcggcggcggcgggtccggcagggcggggcggggatgggagcggaggcggccggaggaggcacggggcggcggtcctccttctgcctgtttgcggccggccacggcggcgccggcaattctggcaaggtaggagaacgaatcaaggctgattc

SEQ ID NO: 151938 - DNA, 862 bp, Zea Mays
ggcgcgggacgagcgcggcgagagttccgaaacaaataaaaagaccggcgtgcagcgcgaggtgtactcgaagaaggtcgtgatgcggcggctgatcccggtgtagccggccgcggtggaccgcggcggagcaggcggagtgcgcggtgtgcctggacgagttccgcgcgggcgacgtgctggcgcacctgcgctgcggccaccgcttccactgggcctgcgcgctgccctggctcgagggcacctcacggtgccccttctgccgcgccgccgtggacgccggcgccgccgccgccgccgacggcgcctagaagcggccgaggctctggtcttgctggggcttgccctgggctgggacggcgcggggcgccttgtcgctgtcggcccacgccagctacgctacccccatggcgttgccacgctaggcagtggctagtgggggtggtcatggtgagtggtgaccggcctgcttgtgcatgtggcgcggagcggaggaggacagcgagacgcgcacgacgaacccgtgagtgccttggcagtttttgcacgctttgcgcgcgcaaaggcacggttggtgcacatttgttggttggaccgtttggcccccccctttgccgtgtcctcctcccatcatcgcgagcaaagtgatgaacggttttgtttttcgtgtttggggagcgctttgtttatggactctggtattagcggatagcggttccatcatgtaattcatgtcaaaaaaaaaaagatcgtctgatcgatcttggagaaagaactgtaatttagatcaacatcaatcacatctgtgtacagtctcagtgttgttgctctgaacttgtataattttctgtttgctcagttg

SEQ ID NO: 151939 - DNA, 971 bp, Zea Mays
ggcgcgggacgagcgcggcgagagttccgaaacaaataaaaagaccggcgtgcagcgcgaggtgtactcgaagaaggtcgtgatgcggcggctgatcccggtgtagccggccgcggtggaccgcggcggagcaggcggagtgcgcggtgtgcctggacgagttccgcgcgggcgacgtgctggcgcacctgcgctgcggccaccgcttccactgggcctgcgcgctgccctggctcgagggcacctcacggtgccccttctgccgcgccgccgtggacgccggcgccgccgccgccgccgacggcgcctagaagcggccgaggctctggtcttgctggggcttgccctgggctgggacggcgcggggcgccttgtcgctgtcggcccacgccagctacgctacccccatggcgttgccacgctaggcagtggctagtgggggtggtcatggtgagtggtgaccggcctgcttgtgcatgtggcgcggagcggaggaggacagcgagacgcgcacgacgaacccgtgagtgccttggcagtttttgcacgctttgcgcgcgcaaaggcacggttggtgcacatttgttggttggaccgtttggcccccccctttgccgtgtcctcctcccatcatcgcgagcaaagtgatgaacggttttgtttttcgtgtttggggagcgctttgtttatggactctggtattagcggatagcggttccatcatgtaattcatgtcaaaaaaaaaaagatcgtctgatcgatcttggagaaagaactgtaatttagatcaacatcaatcacatctgtgtacagtctcagtgttgttgctctgaacttgtataattttctgtttgctcagttgaaggtaaatgcagttggaggtgaggtctctttagaacgtgatgctaatgtaggatcttgttcccccatgaccacgcaggatattttttttgttctgttaaaattcccgc

SEQ ID NO: 151940 - DNA, 402 bp, Zea Mays
atgatgaatcgcagaatcctagcttgtctgctcatggtcgtcgtcgtcttcatgggttcgtctttcgcccgccgcggggcagctcccgtgcaagaggacgggaggagtgtctgggccgcccgccggcggcgtcgtgacggcggcggccggcaaccacggcagggcggccgcctacggctaccgcggcggaaaggtggtctggaacaacaggcgctccttgggggcgaggatcgtgcgtccgccagcgccggtgtcgaacaggatgaaggccgcggcgatgcctgggccaccgtcgccgacgacgagagtgtgatgcctggcctggttggctggctagcagctagctgcttctctcctgatgtgtgtctccagtgtccaccttgggcatgcgcgtaccggtga

SEQ ID NO: 151941 - DNA, 416 bp, Zea Mays
ttggacgctcgcggtcgccgtcgccgtcctcctgtggtcttattgcgccgccagagcagtctgctcctcctcctcgcgtcctctcgctgctgcggacgatgggggcggcgcgagggacgacgagccagagccatgcgccgcgggcggtgccgcctcccgtggccagagggagatctggaacagcaggcggtctttgggtggcaggtcgtggtggtccccgccgtcgccgctgtggaactcgcccaggacgatgcccgtgcccccgccgccgcaggtgtgatgtcgagctgccgagctggccggctggactctgctgctgcgacctgcgactgcgaggagtttcccgtcgagtgtgttgttgtgcctgaatgcctggcctcttctttctggagaggtatgccgtatgcatgcttcag

SEQ ID NO: 151942 - DNA, 1562 bp, Zea Mays
aaaactgccaaacactgcacactcgggactgggccgtttcagtgtcacttccgccgccttctccctcaatcaagagcgcccgtcccttcgcccgcgcgccccgccatggccgcgccgtgcggccgcggcggcggcacgctgacgctggtcctcgtggctctctccgcggcgttcctcacctacaacgtgctcatctccttccactcctccctccagcccctcccttcctccttccccaccgcctcccgccgcttcggcgccgcggggtccgccaggcggagggcgttccacaccgcggtgaccgcgtcagggtccgcgtacaacacgtggcagtgccgcgtcatgtaccactggttcaaggaggcgcgccgggcgccgggcggcgacgagatgggcgggttcaccaggatcctgcactccgggaaacccgacgagttcgtcgatgagatccccacattcgtcgccgacccactccccgatggggatcagggatacatcgttctcaataggccatgggcatttgttcagtggctccagaaagcagacataaaggaagactatattttgatggcagagccagatcacataattgtcaagcctatcccaaacttgtcgagagatggtcaggcagcagctttccctttcttttacattgagcctaaaaaatatgagaatgtgttgcgtaagttcttccctgaagacaaggggccaatcactaagattgatcctataggaaactctcctgtcattattgagaaggaatctcttggaaggattgcaccgacttggatgaatgtttcattagcaatgaaaaaagatcctgacgcagataaatcttttggctgggttcttgaaatgtatgcctatgccgtggcatctgctctccatggagtgggcaacatcttacgcaaggactttatgattcagccaccttgggacttggaagttggtgattcttttattattcattatacttatggctgtgattatgacatgacgggtaagctgacttatggcaaaattggagaatggagatttgacaagagatcatacacggacaaacctccacctagaaatttgccgttaccaccacatggtgtagctcaaagtgtggtgacacttgtgaaaatggtcaatgaagcaacagccaacataccaaactgggactcctatgccgctgctttttaacctgttacaaatttggctcacaattttgtttgccagatatttccattccagctgactttgatacatgataattgcctaacatggaagatgagtggatgatacagtggaatgcataccaggttttacacaaggctgccggttccttacctttctgattgaatcctgataatatatggtgcaatgccatcccttttttctcctaattttgttaaacacatgcacatcagcacatgacacaatatgtcaaaacacactcacctttggtgaaagctgcaatgtagatgactgagagatgtgatgttcttatctggatctgaatgtgcttattagaagaagaaaaaaaagagtcaggcgctgctctgacaaacgcaaaa

SEQ ID NO: 151943 - DNA, 1968 bp, Zea Mays
ctcttggagtcatgtcggatctgacgcctgttcaccacgtgcctttcttcctccttggttcttcacagctctcctgccggatcagagtttactgctcaccgcacctccgttcctctctcctgagtctcctctcctcgtcaagtcaacagtcgccactgtccactgtccccacccgactgcctccataaaaaaaaaccgaggtccaacaaacaaccactgcaatctccatgcccttccttccttccttccccacacaccatctctctttcacatgaggatttctttcccttctttctttcccacaaatattcccaaagaatcttctgtgttgcttctctcctcggattcctcttcccctcctcgcctcccactccaattattcctctccttactgacttgcttcgcttctctgttatctctgtcctctcctcgtgtttgttcttcctaccagcggagcgcgagctacgcgctgtgcctcgtgcctagacgaacggcataggcaccggacggtggcgtcatgtgcgtggaggagccgaaggacgccgaacggtttggttttggagacccaggggtcgaggagcccgctaagtttcccttggctcagatggagagagtttgtgaaaatacaacttctgctgatttcaggcagaagttaagcaattttgtcccagtaatccgatcgggggattggtctgatattggaggtcgccaatacatggaagacacccacgtgtgcattccagaccttgctaagaactttggtttcccatcattagataatgaagttgtttcattctatggggtctttgatggtcacggtggaaaagatgctgcccatttcgtttgtgataatttaccaaggatgattgtggaagattcagatttccctcttcagcttgaaaaagttgtgagaaggtcctttatgcagattgattgccagtttgctgagacatgctctctccatagagcatcgtcctccggtacaactgcacttacagcaatggtttttggaaggtctcttctggtcgctaatgccggtgactgtagggcggttctttcccggtgtggcaccgcagtcgaaatgtccatggaccacaggccttgcagtctcagcgaaaaactgcgcgtagaatcgcttggtggctacgtggacgatggctatctgaacggtctgctaggagtcaccagagcacttggtgactggcatctcgagggcatgaaaggagctggtgagacaggtggtcccctgagtgctgacccagagctcaagatgaccacgctgacgaaggatgacgagttcttgataattggcagcgacgggatctgggacgtcttctcgaaccagaactcggtggacttcgcccggaagcgcctccaggagcacaacgatgtgaagttgtgctgcagggaaatcgtcgaggaggcgatcaggcggggggctactgataacttgactgcagtgctggtctcgttccacctggaggccccgcctcggatcagagtggaccgtcctggtagggtggagaggagcatatctgctgaagggctcaatagcctcaggatactcctgggaaggcagtagctgcgttcttgtcgcgattttaggtgctgtgccgcattgccgagctgtaattgtttgtagtcatctcggctcctcattgtcgttagctgttacccgttgctgcgactgcgacacgtgttacgattcttgttggtgattgaaccaacaaacctgatattattcttgttggtgattgaaccaacaaacctgatactattcttgttggtgactgaaccaacagatttgagctctgtcctgtgagagattttaagcagatgaaagtatatctggcaaagaagctgtgagttcccagctcactgtgtaatgtttgccttccgttatgtaacaaaacaaaacaattcattgactgaaatgtgtcaggactgggtcaaatttcctgttctcgc

SEQ ID NO: 151944 - DNA, 288 bp, Zea Mays
atgaagaagagttcctcgccgttggtggcggtggcggtcgtcattgttctgttcctggtgatggcaagggtgcagggtattcggctggatgcagagagccatgaggcattcagcaaccagatggttcgtaaacccggggagatgggagcgacgtacgctgacagtgagtcgcctggtgaaaaaatggagggaagcatctctgaagagaaagatagagctggccacggtttgccggagattcatgtggattactacggtccaaggggtcataaatctagacaccactga

SEQ ID NO: 151945 - DNA, 776 bp, Zea Mays
gaattagatcctcggtcctatatgacgtatctgaagtctagaccaccatcatggtaattcttgcccttatcatacatatgccagtttatttctagttttttctttctttcaatcaaaggtgttttggtcagttttacagactacaattctctttgcttgtaggatgctaaacgcagtggtgcaagtctgtctatagaaacatgccctcattacatggcattttcgtccgaagaagtcccagatggagacactcgctttaaatgttctcctcccatacgtgatgacacaaacagagaaaatctttggaaagctctgcttgtatgacatgttaacttgctaagttcagaccactcaccatccactcctgacctcaaactaatggaggaaggcgacttcttaagggcatggggaggcatatcatcattgtagtttgtcctcccgacgacatggtcatatgggcgaaagtatggcattactctgaatcagctagcctcatggtggagcgaaaggccagccaagcttgcaggccaaaagaataagggagctattctaccaggataccatgctgacattgtagtatggaaacccaaaacagagtttcaacttgacaataaccatgctatatatcataaacatcagaatatttcagcgtatttaggaaagcaactttctggtaaggtcctgtcgacttttgtgagaggaaatcttgtgtttgctgaagacaagcatgcaaatgctgcttgtggtgttcctatcctcgctaagtaacatacagg

SEQ ID NO: 151946 - DNA, 2113 bp, Zea Mays
aataagctaagctagcttctctcgtaagtgagctttattgtcgtcagtcagtgatcgactgatcgtgataggcccgcagcgcctatacgtacgcacggcgagtacgtgaaggagcagggcgaagcactggcaatggcgtcctccgatctgcacgacaccggccgtcacggggcgacgccgctggtgttcgacgaggtccggtgggtggtccagatccggcagtcgctggaggagggcggccccgggagcgacgacgacaacgacgacggcatccaggtgtccgtgttcaacgtgcccaagccgctgcaggtgcacaagccggaggcctacacgccccagttcatcgcgctggggccctaccaccactggcgccccgagctgtacgagatggagcgctacaagctcgcggcggcacggcgcgcccagaagcggctccggggcggggccaggctcgacggcctcgtcgaccagttcaagcggctcgagcgcagggtccgcgcttactaccatcggtacctcgacttcggcggcgagacgctcgcgtggatgatgctcgtcgacggcgcgttcctgctcgagttcctgcaggtctacgcggtcgccgcggccaacgagggcgacgtcgccaccaccggcagcggcgacggcaaggccctgcggcggggggtgtcgtcgaggatgcagcacctcgtcgactacgccgggaggaagtcggcgcacagcctcatcctccgcgacatgctcatgctggagaaccaggtcccgctcttcctcctccgcaggatcctcgagccgcagtgcgcgtcgcccggcgaggccggcgagctgctcccgcggatggtcaccgggctcatgaaggagctctgcccgctcaagatgctggacaagttccccgcgatcgacgtcagcaagaacgcgcacctgctcgaggtgctctactatctgctcgtgccgaagccaaccgacgacggcggcgcggcggaggccggcgacgcggcccacggcagtcgccgcgaagacggctacgacatcgaggagcagctggtggacggcggcggcggcgacgaagagcagaaaccagccgccggctgcgagtacgtgaagcagctgctcctcaccgtgtccagcatggcgtccgggctcagcaccggccggatgcgctacgtgacgcggccgatcgcgttcgccgtcaaggcgccgtggaagatgctcaccgtcgtgccggggttctcggcgatgaagcagcccgtcgaggcgtacttcatgtccggcgccgccgacgggagcacgcatgcccacgacccgaacggcgcggggtacctcacccggccgcctctgatcgaggagatcatgatcccctcggtgtccgagcttgccaacatcggcgtccagttctgccccaccgcaggcgacctgtccaccatcgcgttcgacgccaggacggtgaccttccacctgcccgccgtgaccctggacagcaacacggaggtggtgctccggaacctggtcgcctacgaggcggcggcggcgtcgggcccgctggtgctggcgcggtacacggagctgatgaacggcatcatcgacaccgacgaggacgtggcgctgctgcggcggcgcggggtggtgctgaaccggatgaagagcgacggcgaggtcgccaagctgtggaacgggatgtcgcgctccgtgcggctcaccaaggtggcgttcgtggacagggccgtcgaggaggtgaaccgctactacaactcgcggtggcgcgtcaagacgaagcggttcatgcgcaagtacgtgttcagctcgtggcagctgctcacgttcctcgccgccatcgtgatgctgctgctcaccacgctgcaggccttctgctccgtttacacgtgctcccgctggttcggcacggtgacggtcgcgacggcagagtgattattgctgatcagattcttgcgcgatcgcgacatgatgtgggtgggttcggtctggctggataatgtgatcggggatgttcttttgtgttggttgctaaatgttctgatgtgtaaagtgtgattccttgcttgcgaattgtgactggtgagattaataaaacttgcgcattcgcgccatttgtttg

SEQ ID NO: 151947 - DNA, 1459 bp, Zea Mays
actacttgcacctcgcactttactctttctcatctctcgcagctagcttcgagctcgctgaacaagtgaagccatagcgggagcagctacaacgaagtgatcctccatgggcaacaccttcggcttccgtggtggcctccgcgccgacgtcgccgatctgatgcaggatgctggcgaacacctgaggagcagtggggtgttcgtcaagagagcggtggcttctcagtaccaaagcaaccgcaccgggaacgacgaaatcgacgagtcgtccgccgaggagctgcgcgacgcggcgagctacgtgcagcacaacgcgatgctgatccaggtgccggtggtagggacagcgaggacgttctggcggctatcggacgaagccacgaggatgatcaggaagctcgcgttgatcctgaggaaccaccactccgtctgcaagtgcctcgccgctcctctgcaggcgtccaacgtctgggtcgggagcgctgggaacgccaagctaaggggggcgaggttcaccgacaaaggcttcagcgtcgagcgcgtgagggaggactacaggaacctgtccagggtgctccagcagctgatcagtatctctggtggggataccagcaaactgcctccggattacatagattttctctcgctcttgacggaggacaaccttacaaacaaggatgagttcttggttgtaaaccatgctgctctgctgcctctgaaaaaccgcaccgaggccttcctgatgctatacgacaggatcgtcaagtacctcggcaaaagaaaccgagcgaagatgaacaggatactctcctgcctcccctaccaggacgactggctggacaccgcgacggcgaatgccaagatcaaccagtggattgtgaatgtccagaatacaaaggagtacaggaagactacactcgatctcctgcggctcaacagaaacgtgagaagccacttgcacgagtacggccacgacgacgacgtcgaggagatcctgtactgtgagtggcccatgctgctcgtcgtcatggagaagatgttgcaccgggaaggcgagctccaagacacggacatcgagaacaagttcggctagccgctagccggtctacactgcaaaacagatgagatggaaggtgtgttctgcgtttcctggggttggaaatggtgagctactgttcttcgatcttctgtgagaatgttcatggtgatggagtgacacgctaccggtacctggtttgctttatgtaataggctacctgctttctcttgtcccttcaacttggaaaaggcaacgccagtcagcttcataaactgtggtctaaaacatcgccttaaaactttaaaatctttatgctgtaaagtcgtcttgtcattgagtttgcattcatcctttaatctaaaattcttgtaaaaaaactctattgcaccagttgggaacctccttcaaaaagtttttcta

SEQ ID NO: 151948 - DNA, 1203 bp, Zea Mays
gaaggtggccgagagagtatggacgccggcaaggtggccgagctgcgcagggtcgacctccgcggcctccgacccggcgggcctggctgggtgcaagcctgcgcggcggtggctgcgtcgatggaggagctcggctgcgtcgtggtcgcccacggcgcgctggacggcgagctccggcgggacctgttcggccgcgcgatgccggagctcttcgcgctccctctgccggcgaagcaggggacgctgtctggccatatcggcggctacatcgggcccgacccggagaaggcccctggcctcgagagcctgcgcatctccgaagccacggacgccggcaaagtccacgccttcgctgatctcgtttggcccgacgatgggaacgccgctttctgtcagacgataggagcgtttgccaagggcatgctggagctggaccacgcggtgcagaagatggtgctggagagcctgggcgtccggaaggagcgcgtcgactcgcacctcgcgtcgctcgtctacgacgtccggctgtcccgctacggggccctggcgcctgtgaccgccggcgacgacgacgaagcgacgacgtacatggtcgcgcacagggactgcagcatggtgaccaccatcacgcagcacgaggtggagggtctgcaggtgcgtggcagggacggcgcctggatcaccgtggcccctgagcccggcacgttcgctgttgtcgccggcgagatgttcacggtggtgacgaacgggagggtgcctgcctgcgtccaccgcgtgaggacgccgagcaaccgcgagaggctgtcggtgctgttcgggtcgtcgctgaagcacggcgccgtggtgggcgcgctggaggagctcgtggaccacggccgccaccccttgcgtttcaggccctgcgacttcgacgaatacgtcaagttccgcttcgggcagcagaggcccggattgaacagtgcgctccaggagttctgcggaattggcaccggcaccaagtgaattacgctcagctatctgcctatctgtactactactcctatatgtgttgtcgtcattcgtgcacgtactctgtacatcatgcatgtagtgacccagtcaggcagtccgtaggctcggtcgttctgcttgggtcttgttgggacacctgtccgtgtgacgctcgactattggtttgaacacgttttttctctattattaaag

SEQ ID NO: 151949 - DNA, 2348 bp, Zea Mays
ttccccgcaccttttcccaccgccagtcctccacccacgcgtccgcgcgcacacggaccccaacccaaaccggcaaaccccagctccaagcgaagcacagctcccaaagttccaagtcggacactgtaggcgcggcgcccgcggacacccatactgcgctcaccgagacaccgacccgcgatcccgacggcagctcccctccccctctccaggtctccactgtacgtctgaactgcatatcgcgcacgccgctccggtgctcccctcggcgagcgagatgcgggggccggcgtcggtgaaggcggggagccggccgccttggctggggctgggggcggccgcgtgggtgcaggtcgcgggcggcgccagctccacgttcgcgctctactcgcacgcgctcaaggtcgccctaggcgccgaccagagccgcctggcgctgctcggggtcgcctgcgacgtcggcgagaacctcggcctgctcccgggggtgctctgcaaccggctccaccccgcgctgctactcctcatcggcgccggcgcgtgccttctcgggtacggcaccgcgtggctcctcgtctccggcgtcgcgcccgcgctgccttactggctgatttggtttgcgttatgtcttgctacaaatggtggtgcatggttggcgactgccgttctagtgaccaacatgaggaacttcccgctcagcagaggtgccgttgctggcattctgaaagggtactcgggtttaagtgccgctgtttacactgaaatatacaccggagtgctccgtgattcacccatcaaccttttgctctctctcgctctgggaattcctgccgtgtgcctcctgggaatgtactttgttcagccctgcgaaccctctctggtggagacgaacgcagagcaagtccattttatgtttgcgcaagtggcaagcgttcttcttggggtttatctggttggggctacaatattggatcacgtcgtggctgtcaatgacattatgaactattctctgcttgtcgttatggttcttctcattttcgctccactggcaataccattgaagatgacgctattcccgaagaaaaaaaacccattggattcacactctccaacagttgataatgatcacacacagccgcttttgccttcttcctccgaatcaaacctcggtaatcttgaagaagatgattccacagacatcgatgtcctcttagccgagggtgaaggggccataaagccgaagagaagaagaccaagaaggggagaggatttcaggtttcgcgaagcgatactgaaggccgatttctggcttctgtttgcaatatgctttgttgggattggatctggaatcaccgttcttaataatctggcacagataggaatcgccgcaggtgctgtcgacacaaccatctcactctctgtcttcagtttctgcaacttctttggccggctgggaggtggtgctgtttccgagtatcttgtcaggtcaaggacactcccacgaagcgtcctggtcatatgcacccaggtagtgatgataatcacgtacctgctcttcgcgttgggccggctcgccacgctctacgtctccgtcgccttactcggcttatgctacggggtcctgctctccgtggtgatctcgacctcgtcggagctcttcgggctgaagcacttcggaaagatatacaacttcatcacgctggcgaacccggtcggcgcgtacctgttcaacaccctcgcggggtacgtctacgacctcgaggtggagaggcagcacgccgccgcggcggcggcagggtcggacgtcgtcgcgtgccacggccctagctgcttcaggctcacgttctgcgtcctcgccggcgcggcctgcctgggcacgctgctgagcacggtcctcaccgtgagggtccggcccgtgtaccagatgctctacgcaggggggtccttcagccagcccaggaactctgcgcattgaccggcggtgatacaaagccttgttgttttctgctgctagaataaaaatccggtatggcctctctgaatagcttcgttaatggcctgctgtagttcatgagcatgcacgctagtcttgtgctctgtggctgtattttttgggtccttcttggcctaataggaggagggagcgatggcctcgtgcagcagcagatgcttgctcccggtttagccgccgacgccgaggcccgagttttagggggtgtataattgaaatccctacttattatgtagaacaatgttgcttgtatacgacacgggtttaccggacattttggcagatcgcatatggtacggagacgaatttgcattttttttctcgtaaaatgcgaaac

SEQ ID NO: 151950 - DNA, 912 bp, Zea Mays
cgggcagccggcggcaccagcggtggccgccgtcgacgggcggcgcgccgtcgcggcgaccggggaggacttcgtgtgcgcgacgttggactggtggccgccggacaagtgcgactacggcacctgcgcctggggccgcgccggcctgctcaacctggatctctccaacaaggtcctgctcaatgccgtcagagccttctcgccgccgctgctgctccgcctgggagggtcgctgcaggacaaggtgatgtacgggtacggcgccgggcggccgtgcgcgccgttcgtcaggaacgcgtcggagatgcacggcttctcgcagggctgcctgcccctgcgcaggtgggacgacctcaacgccttcttccggagatccggtgccaaggtcgtgttcgggctcaacgcgctcaacggccgcgtcccgttgccggacgggtccatgggagggccgtgggactacaccaacgcggcgtcgctgatccggtacaccgcgaacaagggctaccgaatccatggatgggagcttgggaacgaactgagcggcactggagtgggagctcgggttggcgcggaccagtacgccgcagacgtgatcgccctgaaagcgctagtcgacgacgtgtaccggagcgagccatcgaagccgctggtggttgctcccggaggattcttcgaccaagcctggtttactgagcttgtcgtcaagaccgggccggatctactgagcgtggtcacgcaccacgtctacaatctaggaccaggaagggacacgcacctgatcgacaagatcctcgacccgtcaaccctcgacgggatggtcagcacgttcagcgacctccagcggctgctcaagtccacggggacgtcggctgtggcgtgggtcggggaagccggaggcgcctacaacagcgg

SEQ ID NO: 151951 - DNA, 465 bp, Zea Mays
gggccagtactcgacgcgggtggcccagagcgtggcactggtcgtgtactggtgcctcagcggcagccccaagaaccggccggacatgtccaccatcatccaggcgctggagcccctactcgaccttgacgacgacatgcctgtggcacccctaggccacgccggccccgtcatgctattcgtagcggccaccgcagaggagaagaaggagcgagccccgaggaaggacgtcctcggccaccggcgtaggcccttgtcaccgaaggcgagccctaggaagcaccccagcgccggcaccaaggaggagttctgggtgtggcatctgccggccgaccagaagacacgtccaagcttgggcggcgttgtgcaagcgtgtgcgtgaggcaagctggcgaggtgctattggggctgagattgtgccttggaccaagttgttgtttttcagtctactgttacagtgagatg

SEQ ID NO: 151952 - DNA, 1356 bp, Zea Mays
ctctgccacaacgagggccgcctcgtctcgagtcgctgaagccatggcgaccacgccgaccactgcaatcctccgcctcactccagccccttctccccgcaccgcgcgccatcctcgctctgctaccttcctccagcccgcgctctccgtttccctctcctactccctccccgactgccgcaaccaccgccttgcggccgcttccaaggacactgctagcagcaaggggcaggaacaagaccaagagcccgcaccgtcggcgccgcaggaaggaggaccagagaaggtaacggaggtgggggcagcatcgcccggggagaagagcccggaggcggtggcggcggagctgaaggaggtgctgagggcgcggaaggaggcggaggccgccgagggccgcggcgggtggtgggcaggcgtggcgcaggagatgaccgagatcgagtggccggcgcctgggaaggtgttgggcaccaccggcgtggtgcttggggtcatcgcgggctccactgtcgcgctgctgtccgtcaacgccctcctcgccgagctctccgacaccgtcttcgccggacgcggacttcaggacttcttctccggctgacgaagcggcgtgcttcgtgtactctgtaactatttttttttttcttgcacttggggctagggtcatagatcaaatgttcgaggttggaattatgtccaattttcagttgccaagaaaaagatgatgagtcacttgcgaatttggtaatgttactaatatgtgagtgacattttgttggtaaatggtcactcgggaacctaacttgagttccttctgtttagtggtgagataataataggcttccagattacactattcaactcagttaaaataagggctcaattcacttatgttcaagcaattgtctgaagaatttctgcagattaaaaacgcttatgattaacactatgctcttctgattcactagcacagtagtagtttggactaactgaatgatactcactgtctgttctcctagtggcttcatttcaccccgatgactgatagataggcgtattgatactcatatatacattcaaaagggacgggcatttcctgctatctaggttatatggagtccctcttaataaattgtacaatctgaagtatagtgtttccaagaggattctacctcaaccttgatcgaactggggagttacggatgggattatcatcttaatggcattgtcctatgttttgttttgttgggtttgacaaatgttagatgtttctgtatcaattctctccccaccgtttaagtagcctactctattagtcttgcatttgtttttccttggatgattgtatagtcacaaacg

SEQ ID NO: 151953 - DNA, 1710 bp, Zea Mays
atgacgttgctcgtggtcaagccattctcatggtcactgcctctccaggataatgccacccatacctggtcctcgtcacccaatgttgcagagccaccggtggagtctgtccataacgtttgcttccttaaacgttctggaagaattgatcgtgcggaggagggccttcgtcgcgcgctgattctctcggttgttggagaggagggtcttggctgcgccgtggagatcagagatgcgctggccttgaagtttcagcttcaggcagatacgctccatctccgtcgtgctgcgccaaactccttcctctgtttcttcccatcggtggaagtggctgagcagattattcaaaatgggcagtcgattttcgcgccacctttccgcctgcatgttagaagatggtctcgccatgctttcgcttctggtggaggtgccttgccagtgctcgtcgacattgaactgcaagggattcctgcgcacctttgggatttagagacagcagaatttttgcttggggctcacggattggttcaaggactatccacggattcatcagaaggagtggatattgcagatatgactgctttcagtgtgagattttggtgcttctcgccggagtctttgccggatgttttgtatctccatgtcgttgagccacgggttaatgtggaggtcgggtcctggtttccgcgtactattgtgttcaagattgcagtgaaggttattcgttctggggacgtgcttggtgctaaccagccccctcctttgctgccggattttggtggggatgatagtgatcgggatcatcgcaggcagaggtcacatatgcacccatcttcttccgttagggtctctgcgctctctcggctcggtccacgcgtttcctcgacggtggcgggtggtggtccagtcgatgccatctctcccccgatggtcggggtggagaggatggcgcctgtgtcccccctgccctcaggctcggtggattctttcccagttgatgcccattctctcccggttttagcggttgatgaggtggtagctcctggatctcctgactccactgctcaggacgtggactgggatccagttgacgcccattctctcccgttggtctcggttgatgggatggaggctcatgggttcttgttggcactgttacttgtgactgaggtccttccggtcagagtgaaggtgtctgctcagtttggggtttctgtgctaggaaatatttggactgtagaacctctgaacagaatgtcttcgatttttctcagcaagatgattcatggttgtaaggatgattctccctgcctcaaggtttattccaggagaaagaagcttgttctagagccagttcaggatgaggagagtgttctttcatcacagctgcaagagttcaagaatgatgtaactaagccgattaatagtttgctgccacctcctcgaatcaccaataggaggaggaggtctgtgcctgctaatttcattcccaggcgtagcaggagagtggccaagtttcctccagagttgggttctagttctgctgcccaggtctgtagacaattgggtttttgtgatgcattggagaacatctctcttgaggatgccaacggttatgcaaggctattcgagaatgggctctctagtagccatattgctgcagttgctgcgctttttggatggcaggtgcctcttgtggggcaatgttag

SEQ ID NO: 151954 - DNA, 162 bp, Zea Mays
ttttttttgaaagggaaggatttttattcattcaagaacagtacatcgagatgatacaattccttgaaagtcacttccggcctctgcccataggagcacacagcccaacaaaatctaaaaacacacactagtggctatcaatccgaagactagaccgccaac

SEQ ID NO: 151955 - DNA, 756 bp, Zea Mays
atggacgccctggatccacctcctcctcctcctcctcctctccccatcactgcgccgcctgcccctgccgcacacctacaccacaccccttcccttgccgtggatctcgcccatacgccagcggatctcgcactccttccttcgatggcgcagtggcgaggacgtcagcgacggcggcgtcgagtcgaggtcgggcacgaaggcgtggaggccgtgggagtggccgtggcctacgcacgcacgacgccgctcccccagttcaaacccaccaccccttccccctttgtcttccattcccaactgtgcacgcgctttccgatcgcttcatctacctcgctttcgcccagccccagtcaccagtccaccgtgcccgcgcctctgatccagcgatatggctggctccatagctccaaacgctgtggtcctcgatctcctcctgctcgtggggctcgcggcggcgcagagggggatgacaccagcggtggcgaccccgcgcccgaccccggctgcagcagcatccagctgacctacaacttcatggaccgcaccaaaatctggcccttcgtcagtgacaagaacaagcagccctacgccttccgtgccaatgtcaccgtgctcaactccggcacccgcccgctcaagtcctgggcggcgctcgtcacattcggctacgacgagatcctcatcggcgtcgatggcgaaacccgcacccgccgcctcatagaaccctagcatatgacttcactccaaatccgc

SEQ ID NO: 151956 - DNA, 608 bp, Zea Mays
tctactgcaccaaatcatgtcagcttgcccccacccccattacctgctaaccagcagagtgttgctcaactttctgccccgtttccatctggcttgtctaatgtgggatcgaccatggaccctcctactattttagcaaatctaccacaatcaacacaagcaaaaggataccttatccatcagatgccttcatcagctcctcagccatctcaacatccaaatatggccctacctcatgctcctccacagtattccaatgttccatcacatatacctatagttcatagttagtcacaacaacctttgcaaagtcctgcaataaataatcaacagttgcaaccacctttgccccaattgtcaaggccaccatctatgccgcctttacctcatcagatgcattcacaagtaccaaattcatttgggttgactcatgcaaatgctccgcagcacatgttacaacaaccaatgtttcatgtaagatatatcccaaatccatatggtcctgataactagatatcatgctctgcatactgatagatgatgtttggaattttgcagccggttgcgaatcctcaaactaatttcctccttgggcaaccaccattgcc

SEQ ID NO: 151957 - DNA, 100 bp, Zea Mays
tgagttttggtggtgtggccttcagcacgtgtttgccaattttgctctcatcttgatctgttcaaacgctcggcacgttccggaaactcactatgccaag

SEQ ID NO: 151958 - DNA, 1674 bp, Zea Mays
atggctgttggcggaactcaaccggtcctcaggaagtacctaggtgccctcaaggacacaacgactgtgagcctggcaaaagtgaacagtgattataaggaattggatattgcaattgtcaaggccacaaaccatgttgagcgtccatcaaaggagaagtacataagagaaattttccattccatttctgctgctaggccacgggcagatgtagcttattgcattcatgcccttgctagacgtctttcgaagacgcgcaattgggcggttgcgctaaagacattgatcgtcattcatcgtgcccttcgggaagttgatcccacttttcgtgaagagcttcttaattatggcagatctaggtcacatatgttgaacatggcctactttaaggatgactctagtgcagaagcttgggactattctgcatgggtgcgcatttatgctttatatttagaggagagactcgaatgtttccgagtgttgaagtatgatgtagaaacagatcctccgaggactaaggatcttgatactgttgatttgcttgatcatctgccacaattgcagcaactcctttttcgtcttcttgcttgccagccacaaggagcgtcatcttacaatgttataatccagcatgcactctcaatggttgctttagagagtgttaagatctacactgcaattagcgatggaacaatcaatctagttgacaagttcttcgagatgcaaaggaatgatgctgttagggcacttgatgtatacaaaagagcaactaaccaggctgaacgactttcagaatttcatgaagtgtgtaaaactatacacattgggcgtggtgagaaattcctgaaaatcgagcagcctccagcatcattcctgcagactatggaggactatgttagagatgctccaacaggtcaaaaacaaaagactatactagcgatagaatacaaaaaagagccagaggaggaagaaaaaccggcctcccctcctcctgctccagaacaggaaccggaacaagagcctgagccagaacccgaaccagtgaaagaggaagcaccagaagccgagccggacttgctgggtctgaacgaaccgagccctgctgcgaccgcgatagaagagcagaatgctttggcgctagcaattgtcccgatagatgatgttccgggagctgctcctacttttgagaacggagtcacaggctgggaactggccctggtgacagcaccgagttcgaccgagaccgccgttgccccaagcaagaaactggccggtggtctggacttgctgacccttgatagcctgtacgacgaggcgaaccggagagcgagccagccggcgagctacaacccctgggatgcaaccgcgtctgccccgatgatgaccaccatggcgccggcgatgcacgatccgttctacgcctcgaacgggtacgcggcgccgcacggcgtgcagatggcggcgatggctcaccaccagcagcagcagcaggttttcatgctgcagcagcagatgatggcgccggcgccggcggtccaccacccgatgcagatgcagcagaaccccgcgaaccctttcggcaaccccttcgcggccgccggcgcgcatccctacggcgccgccggcatgccgctccacgccgggcccggcaacgtctacacggggctgatctga

SEQ ID NO: 151959 - DNA, 1600 bp, Zea Mays
cctcttcctgctgccgcaagtcccaatcattgcctcccccaccaagcccacgtcacttcaccccacccacaccacgccaagtcgccaaggcaaggccccccagcgaaagcaaagggggaagcaaccccccgcaccgcgaggccgcaaaagcaatcgcgaaagcgagcgcgaggcgagtcggccggcgaagggggcggatggcgcgcgggctgcgcggcgtccgcgacgacctatccgagctggggcgccacctgctcgacatcgcctgcttcctgcacccgctcctcaacccggcccacaccgactccccgccacccacccccacgggccgccgccgcccgcgccgctccccgtccccgcaccccgccgcgccgccgtcaccgtcgctcctcgcgggcatcctctccgacctcgccgagatcggcggctccttccgcggcggcttctcccgctcctcgccggcgcccgaccaccccgcccccgacgcgctcgagtcacagcaggccgcctcgtccccgtccccgcgtccgcctcctcctgctgctgccgaccagatcgcagatgatgtcgtgggagcagcgcgtgccctcgccgcgcggcccgaggcgtggatcgacttccccgtgctcgccctagatgagggttctgtaatttctggtatccaaagagatcatatggaatccattgaaaaacttgtcccagatttagcatctctacggggtaggctctgtccttcttacatggatgaagacatattctggaagatttactttaggttgcttgagtcaaacataaatgagcatagttctgaggaagatatccggagcgtgccaaattctgtacatcacaacaatgagatagagtctgattctccacctcacgtctgtgagatagaaagtgtgaaaagcaaccaagaagggtaccaatcttcggatggtcgtgctttccccaagacaagatctgagcgaagcattgaccaatgggtatttgcaaagtcaaaatctgaagaaagcatggatcagtggtctgaaataccttcagatgtggaatccttcagagaaggtaaaaggtacctcagtagcgaggagctgagtgacgttgatagtgccaacgttgttgtcatggacaaatacatggattcactcctctctgaccggaggaaccttccctacgctagctcctcggtgcgccgggattcagtcagacgaaaacctgcttcgtccgccgattacagccgccgacctccgcagccaactccacctgcatcgctgtcaaagaaggaatcgtgggatgtcattgaagattcggagttcgatatacttgacagttagtaattgagatctttgcgatctcaaggctgtttatccttctattttcttccatgtttccccacacttcacctcgtttgtaaatgtggacgtgcaggtggcgtcagtgatagtgggaaaggactaatgttctttttaccaatatattataacagtgtgtgcatataaatcttctgagctcgcaagctgtgagcctcccaggttaaaagtgtttatatgttggcatcattgtttgtttcagatattttattgcagaacagaaaattgccacc

SEQ ID NO: 151960 - DNA, 463 bp, Zea Mays
ctatccgagctggggcgccacctgctcgacatcgcctgcttcctgcacccgctcctcaacccggcccacaccgactccccgtccccgcaccccgccgcgccgccgtcaccgtcgctcctcgcgggcatcctctccgacctccgcagccaactccacctgcatcgctgtcaaagaaggaatcgtgggatgtcattgaagattcggagttcgatatacttgacagttagtaattgagatctttgcgatctcaaggctgtttatccttctattttcttccatgtttccccacacttcacctcgtttgtaaatgtggacgtgcaggtggcgtcagtgatagtgggaaaggactaatgttctttttaccaatatattataacagtgtgtgcatataaatcttctgagctcgcaagctgtgagcctcccaggttaaaagtgtttatatgttggcatcattgtttgtttc

SEQ ID NO: 151961 - DNA, 1925 bp, Zea Mays
cattgttgttctgcaccagcacagcacctcaacgaacgatgcgcgatgccttctgcttcttcgtcctcgtcttcctccctctacatcattggcgactcctcgcgtctccgtgacgaccccatcatcgaggtcggtgacatggacgaggacggcagcagcggcggcgcgctctcggggttagtggcagagcgcttcgcatcgtccttcgaaacccaagggtccattgacgccctctgcaggaagtatggagtaccggagcagtactcggcggtcctccccgccggccaccagcgcgcgtgttcgccccccgggtccgccgtctccgtgtacgcgcacgcgctggaggccggcatgcgcgtcccgctgcacggcttcttctgcgaggtgctcgcccacttcggcgtcgcgccgagccagatcgcgcccaacgggtggcgcgccatggccggcttcgtcgtcctctcccactccgccggcgtggccccgtctctccccgtgttccggcacttcttctcactgtgcgcgttcaagctcaaggggtggtactacttccgtggcaaggacgccgccggcttgctcttcaaggggatgccgctttccattgctgggtggaaggaggccttcttcttcctcaagtcgccgacgccgtggccgtgccccgtgaagtggggcgggctgtccatgggctccactgttgagccggcgctcaccagagaggagcagagcgtggccaagaagctgctccgtgttcacggtgcggcagtcgatatcatgacgtatctttccgagagcaatcttgctgctgcaacgattgctggttcatcagcgaagccgccgccgccgccgattggtactacaagcagtgctagtgccaaaggaatggacccttgcgtctacgacatgatgaagaatctgcgggcggcaaaggccgcgcaggcgtcgggagtgacggtgaagactgagcccagcagcgatacgccgtcgtcctgcaaaaagaggaaggtggtggaggatgccacgaaacaggatccgccgcgccccgagccaccgcattattcccctccgggcttcttctccgcgcacaagtcaccgaaggttacccgtgagcctgacggcggcgccacctccgactgggagcgggcgcggcggatgctacagagcatcgtcacgccggcgctggagcagacgttctcggtggcgaagccctccgacgtcatcgcctcgagctacacgacagcgctacaggccgcgaactacgcgtcgttctcgctgggctacgcgctggagctcgaggataagctcgcggcaagggagcgcgaggcggacgcgctgcggcgggagctgtcgcaggccaaggccgagctcgccggcgcgaagaaggcggctgcggagggggtgaggggcgccagggaggctgccgtgcgcgacttccggggctccacggagcaggtggtccggttcgcggagcacgcgttggccgggtacgagaagggaatggatgatatgaagcgagccgtgctgcgcaggtacccgcacctcgacccggagcagctcgtcgtgccggcggacggcggcggagctcagtaattagctcgtggcagataagattttttggcgtgccggtcccctaactaacctcaggatcaggcagcgtttggttaaatggacctttgatgtatccagagccaagtagatagccatcagacgttaaacttgcatatatatttctgtacgtgcatgaccttggttttcagtggtctacttggctggatgcaaaatatgatcaacagacattatcagtggtctacttattggactatggaaaacagacattggcctattgttttacttcgaactcctttcttttcacttgtcaaacatgggcgctttgaagcatccggtctttgtcgtgcaaaacaaagaaa

SEQ ID NO: 151962 - DNA, 1596 bp, Zea Mays
cgcgtctccgtgacgaccccatcatcgaggtcggtgacatggacgaggacggcagcagcggcggcgcgctctcggggaagtatggagtaccggagcagtactcggcggtcctccccgccggccaccagcgcgcgtgttcgccccccgggtccgccgtctccgtgtacgcgcacgcgctggaggccggcatgcgcgtcccgctgcacggcttcttctgcgaggtgctcgcccacttcggcgtcgcgccgagccagatcgcgcccaacgggtggcgcgccatggccggcttcgtcgtcctctcccactccgccggcgtggccccgtctctccccgtgttccggcacttcttctcactgtgcgcgttcaagctcaaggggtggtactacttccgtggcaaggacgccgccggcttgctcttcaaggggatgccgctttccattgctgggtggaaggaggccttcttcttcctcaagtcgccgacgccgtggccgtgccccgtgaagtggggcgggctgtccatgggctccactgttgagccggcgctcaccagagaggagcagagcgtggccaagaagctgctccgtgttcacggtgcggcagtcgatatcatgacgtatctttccgagagcaatcttgctgctgcaacgattgctggttcatcagcgaagccgccgccgccgccgattggtactacaagcagtgctagtgccaaaggaatggacccttgcgtctacgacatgatgaagaatctgcgggcggcaaaggccgcgcaggcgtcgggagtgacggtgaagactgagcccagcagcgatacgccgtcgtcctgcaaaaagaggaaggtggtggaggatgccacgaaacaggatccgccgcgccccgagccaccgcattattcccctccgggcttcttctccgcgcacaagtcaccgaaggttacccgtgagcctgacggcggcgccacctccgactgggagcgggcgcggcggatgctacagagcatcgtcacgccggcgctggagcagacgttctcggtggcgaagccctccgacgtcatcgcctcgagctacacgacagcgctacaggttcgcttccgctctagacagtgacgtgacgcctcgttcgtgcgtgtctcgttctaaccaactagctctcatgccctggtcgtgggcgacgcaccgcgcaggccgcgaactacgcgtcgttctcgctgggctacgcgctggagctcgaggataagctcgcggcaagggagcgcgaggcggacgcgctgcggcgggagctgtcgcaggccaaggccgagctcgccggcgcgaagaaggcggctgcggagggggtgaggggcgccagggaggctgccgtgcgcgacttccggggctccacggagcaggtggtccggttcgcggagcacgcgttggccgggtacgagaagggaatggatgatatgaagcgagccgtgctgcgcaggtacccgcacctcgacccggagcagctcgtcgtgccggcggacggcggcggagctcagtaattagctcgtggcagataagattttttggcgtgccggtcccctaactaacctcaggatcaggcagcgtttgg

SEQ ID NO: 151963 - DNA, 913 bp, Zea Mays
aacccccatggatcctaattatggagagtggaatttctctgagatcaagatagcgaaagctctcattgctagccacaatgccaagagtagctattctagtgacatgaacaataagcaaactgacattatagacatgctccaagcaaggtttcccacaaaagagaagcataaggtaaccaaactgtatgttgatctcatgttggagaagatgcagatgatattgagtggcaaccaacatgcaacaatgggtaagaagcttgtgaatgacaagtttgggatgtcgatagaggatccagccatagatttcatgggtggtgatttagtggagaaaaggacggccaaaaggaaggcaagggaggatatgaatacccacctagattctcagaaggagaggcggtaccgaaggttttggaccatagacgaacacaggaatttcctctatggtttgcgtgcatatggtcgaagcgactggaagaacatctcaaagcactttgttaccactaggacgccaatgcaaatctctagccatgcccaaaagtatttccataggatggagaacattgctaggaggcagcggagcagcatcaatgacattgtcctccacgatgatgaacccagggtgcaaagtaatgattctagcctacagaggttcaccttcaccagtggaacctacaacccaaatcattatggctctagcagccaatttgtcgccatgagtaacattgccaagcatatgtggtttccatctgtatgttgtattgaccaagagagcaccagcaacaaccaaatcactaccttagatagaggtgggtctggtggttcttgtgtggctctagaggtgcagggggttgggagcaaggcaaaactaattagtgattaggagggagattttcttgttggtcaatggatgatg

SEQ ID NO: 151964 - DNA, 574 bp, Zea Mays
acatcaccgtctccacgggcgacgagaacaggtacgatgcgttcgagaacctcctgcgggacgtcgcggcggccgcccgggaggtgcgggagctggtgccgcggagccagggcggcactacggcggcggcaagctgcggctgcggagtgaccaccacgtaccgctcgcggctcgcgggaaggagctactcatcgacgtcacctgggtcaccatcgacggcctcagggtcgtgcagctccgccggctccgttggaactttcgcggctgccacaccatcttcctcgacggcggcgcccccgtcgacatgacgtgggacctgcacggttggctcttccacgcccacgcgcccgccgtcgagttgccgcactcgtcttcctcctgcgtcgtgttcacgttccaggcgcgcggcgcgtcagaggcaaagttgtggacagtcgacggttgcttacgcgacggagatgagccggacaagctgccggtgacgccgaccggtcggcggcagaaggcggcagccggtggggcgtcggggcaggggttctgcctgctgatccaaggcttcaggggcttttccaag

SEQ ID NO: 151965 - DNA, 1797 bp, Zea Mays
gggcagccaccgttcccgtcttcagcgccgttactgctcgggtcgcagttccaccgctaccgccctgccccgccgacgccgacaccgagcaccccttccagccggacgaagaagaggacgcagtcaaacaacaccttctcgattctccgctcgaggccgccttcctgcacctcaccctcctccgtctcgacgccaacctttgcgacgaagtggtccgccgcggctcccacctcctcttcttccacgggggcggcgcgaacggtaccgccactccccctgtgcagacgctgctgctagcgacagcgggccgcagcaggagaacctgagcgtgccggattcgtccgtgccaaatgcgaagagagcgaggcggaggatgaccaaattggccgtcgcggtcgctgccgggtctgtcctcgccgcgcttcttgtctacgccatgattgcgatgaagaggctggacgccgccgagattggcccagcagcacgggaagcagaggcgttcgagcagaacatggatgttgttggccgactgcgccatccgaaccttgtaccactccgagcattcttccaggcaaaggaggagcggctgcttgtgtatgatggtcgccgaatgagcttctgctgcagctacgacagctgctcgcgcggcgtcgtacgagtcagctactcgcgcggcgctggagctccgggcgcgggctctcctcgcgcaaccgtgacgtcgccgacatgctctgcgactacatccccagctactgcgccaagtcgtgctcggccgacgacgccaccaccgcctcgtcctcctcatcctgctcgtctggctccgttcagctcacgcggcattgggcggccttctttcattacatccaccaccgattcaacgcggtgtccagatcgaatctagactccactaattttatgggcacggaagagccacgtggagtagagtcccgtcagaacttctcgaacaggcacaagaggtgttctgttccggaaattatcgaccgatggctcacgcactagcagcagcagctcggaaccgaaatctaaataaaagtcctgcccacgctcttcgccgacttcgacgctgcgccgcacttctcctgcgtcgtcacggagttctgccccggcggggacctccactcgctccgccaccacatgcccaaccgccgcttcttgcccccgtcgaacctgctggcgcccgccaatacaagggcggagtccgtgtcgcagctgctgccgcacgtgaagctcctccgccgccgccgcggtggcggcgctggacgccggcctccccggcgaggccgtgcgccatttcaacaaggtgctcgacacgcgccgcagcgtgctgtcgcaccccttcgccacggcctgcctcgacgagctgtccatcatgatgccattggagaggaagaagagagaaggagagagctcaccggagataggagtggcggctacagcactgacggccatgcagacggaaaccgtgcccctgcagactgattcggacggaggaggcttaatagttgtcctcagcgtctataagagattacgactagcgagcggctgctctgtctgtaaaccctgagtgtaccagtgtatttccggcgccaccaccgaagatccacttcctgagcccggggagcgggatgagaaccgattttcacctcgggttcccggtggaagtagcaatatatcctgggctcgtactgtcagactgatacagccgtcggacccaggccagccagaaccagaggccacgaccgacgttggaaacgaacggctctcgcctacttcttc

SEQ ID NO: 151966 - DNA, 674 bp, Zea Mays
cgagcccgcgcctgttcgcttcgctccgagccccctccaggcccaagcccgcccatctcccgaccacacacgcgcctattccttcccgccccgccgcgcgccgccacctctacggctccccggcggccatgctgaccgggcgggagagcctggtccgcctcatcggccggcgccgccgctcccctctccccgcttcgctcgtcgccgccctatccttaccctccccttccccctccacctccctcgcccaggcagacgatgggggtggctcgggagaagcggccgggggtgaggctggttcgacgtcgggaggaagccgcgtcgttggcatgggcgcggagtgggtggtctgccccgtctgcggcgattcgatccgagggtcggactactgcgtcaacactcacctcggtccgtccacgagcgcctcgcttgtcctgaataacctgcgatgctgaatgctccaatgcatttactgtatggaggctgtagagtgcgtactacttgtgccggccgtgtttgtcccgaaatgcttgtagcacccggtccgctctgactgaaaagtgtgctatgcctcaaataaccgggggcagatccaggacaaaatatgactacatattttatatttgtaagaacgagcagcaaaatatcagagaggggcatctaaattggactga

SEQ ID NO: 151967 - DNA, 1542 bp, Zea Mays
cgagcccgcgcctgttcgcttcgctccgagccccctccaggcccaagcccgcccatctcccgaccacacacgcgcctattccttcccgccccgccgcgcgccgccacctctacggctccccggcggccatgctgaccgggcgggagagcctggtccgcctcatcggccggcgccgccgctcccctctccccgcttcgctcgtcgccgccctatccttaccctccccttccccctccacctccctcgcccaggcagacgatgggggtggctcgggagaagcggccgggggtgaggctggttcgacgtcgggaggaagccgcgtcgttggcatgggcgcggagtgggtggtctgccccgtctgcggcgattcgatccgagggtcggactactgcgtcaacactcacctcgatatgtgccttacaaggggaaccaaaaggaagttaacacagagcacccttcttaatttccaattcagtaaaaaggtttctgccgagcctacaataaacaatttgaacaatgagtccgagacagaaaatatgaaacagattgatgaaggtttgtcgagtgatcaagcattcttcgcattcgatagtgagattgggagttcaaaggctggcactactatttcatcgcctacctgtatgaatgactcacttggcacttctgagactattacttcctatgcaccttcaaatactgtcttatcagatgcaaaggatgctgtaaatgatggcgcaggggaacttccaacggtggcaacctcttgcagttttgatgaatgcgcagtcatggattctagcaccgttgtagtagttgacactgttatagttggccggaggttccatgagaacattgaattaagagaagatgcagacattacctttatgagagatcctcagaatgctaaggaccctgatgctataaagggtctgaatgtgaggagatgcttggatacttgcctcgagatcttgctaaagttttggctcctctagtggacaagcatcatgttgaatgcgagggatctgtggttggtctgcatgaacagcagtttggcaatgttcccatccagattactatccagaaatgtaaatctgacaatcaaagaaacaatgatccaaattgttgccaatccttatgggaaaatttcgttagcattgtcaaaagagaaaatttccggcgacctcacagtgcaagatatcagacaaattttaatttgatgatagctgatgttatggttaaccatgcacatgtttttagtgatatagaaaaatcatttttagcttcttttaagtcgttatcagatgatgggcaacggcttttcattaggatctacactcgaaaagggccatggttccggaagggcagcatctcatatcaagagatttcagatctggagcatgcagtcatggagttggagttggcaggttatattgacatgctttcttgcaccattgatccttttgaatatgatatgaaggagattcttgatgtgttaagtgttcctgaaatgaaggaaattctcaaggagcttcctaaggtttt

SEQ ID NO: 151968 - DNA, 105 bp, Zea Mays
ggagttactggtattatatttattcctatccctagtgttttattgcttgtaatcacgttctttacttatttatcatagcagaattcatagcagaccaaaagtaaa

SEQ ID NO: 151969 - DNA, 1142 bp, Zea Mays
aatgatctacttgagtacgaagacgtatgaagatgcagtcaggattctaaagacactacttagcacagttgcttgtgatagacggcgaggatattgggcattgaggctatccattgatttggagcatatgggtcgtccaaatgagagcctatccacagctgaaggaggggcaactgatccatgggtccgtgctggttcaaagttcgctctgcaaaggagagttctgcgtttaagcaaacctccacgacgctggaaagttcccagttacgctgattatgttaagagaaatataagagaggtaagcattgaaggaaggccattgaattgcgagacaggagcaaagaatgtattttacggttacgatggggaactttgtggggtagaacagttggctttacaatattatgctgatgaaggtggtggttggcaaggtacccattcggaaggtagcatttggatgactatctttggccttctaatgtgggatgtgatgttttcagacatacaagatgttttccagtctaaattccagacagccccccttgatctgggaacagacgatttttacaaatctagagagaacattgcagaatctcagttgaagaggatacgggacggaatggccgaagagatgctaatcagctcatgggagctacatcaggggacatcctgccagggtgttaactgggcccgttattcgttaactgatctacgggctgttgttgcatgcgttggtggccaccgtttggcatcgctcctccgccatctagccgttgattacaggagctggtcgagtggaatgcccgatctgctgctatggcgtttccttgatgaaagaggtggaggtgaggctaaacttgtggaggtcaaaggacccagggaccagctgtcagagcaacagcgtgcatggattcttgttctcatggattttggatttgacgtggaagtttgcaaagtaagcccggtcaccaagcggagatagttcgcttgctaaatttattctgattattacgatgcaaaatgtatttggttgattagatagaagggcaaatctgtaacgcataagcaatggcattgttgtcgtgttgcactgaagtaacagtcaagctctacttgacatgctatctataactttgagaggg

SEQ ID NO: 151970 - DNA, 1339 bp, Zea Mays
attcgagttgctcaggtgatggatgaatcccttgataataataaaatggacttggtgacaagatgcatcgatttatctgagaatcgattatgcattatgccaaaacgagaaaacacaattacacctgaacgtctccgatcattcttttctcgcttttcagcgtcctgggtctattcgaaaatactcacattaggtgtctctgtttatgaaagagaccgcaggtatgaagatgcagtcaggattctaaagacactacttagcacagttgcttgtgatagacggcgaggatattgggcattgaggctatccattgatttggagcatatgggtcgtccaaatgagagcctatccacagctgaaggaggggcaactgatccatgggtccgtgctggttcaaagttcgctctgcaaaggagagttctgcgtttaagcaaacctccacgacgctggaaagttcccagttacgctgattatgttaagagaaatataagagaggtaagcattgaaggaaggccattgaattgcgagacaggagcaaagaatgtattttacggttacgatggggaactttgtggggtagaacagttggctttacaatattatgctgatgaaggtggtggttggcaaggtacccattcggaaggtagcatttggatgactatctttggccttctaatgtgggatgtgatgttttcagacatacaagatgttttccagtctaaattccagacagccccccttgatctgggaacagacgatttttacaaatctagagagaacattgcagaatctcagttgaagaggatacgggacggaatggccgaagagatgctaatcagctcatgggagctacatcaggggacatcctgccagggtgttaactgggcccgttattcgttaactgatctacgggctgttgttgcatgcgttggtggccaccgtttggcatcgctcctccgccatctagccgttgattacaggagctggtcgagtggaatgcccgatctgctgctatggcgtttccttgatgaaagaggtggaggtgaggctaaacttgtggaggtcaaaggacccagggaccagctgtcagagcaacagcgtgcatggattcttgttctcatggattttggatttgacgtggaagtttgcaaagtaagcccggtcaccaagcggagatagttcgcttgctaaatttattctgattattacgatgcaaaatgtatttggttgattagatagaagggcaaatctgtaacgcataagcaatggcattgttgtcgtgttgcactgaagtaacagtcaagctctacttgacatgctatctataactttgagaggg

SEQ ID NO: 151971 - DNA, 842 bp, Zea Mays
ggtttacttgtcacttgcatgcacgtgacgaacgccatggcgcttgcggttcgtctcatcggccgccgccggttcctcccgccgccgctcgccgccgccgttgctcacctctctgccgcttcccagagcccgtgccaccaccaccacccacttccgacccccgcgctcccgttgccccctcgtgagctccatcctttcgctctccactggcgaagcttctcctggtactcccgctccggctccgggtctgatagcagtcccggcaccgctgccgcggacgctcgcggagaggacgtgtacatcgagaaggaaagcgtgcacttggatggcgtgacaatcgttgatgacgggggaggggtcgtcagtgaggcgggtgctgcggcggatgccgtgggagatgccgccggcgccacggccgacggcgtcgggggagtgccggaattggctgttagcacagttttggacctcatggacgggatccatagcctcaccggactgccgtggtggatgacaatctcctttttctactgtggccatgagattgtggatacttcccgtcctcatagtgcagttacagaagactgctgaaattggtgaagtgttccgaaaagtgtccacttcattaccccctcctcagcctggaagcaatttccgtgaacagtacactctgttccagaagaaaaagaaggagcttggttgcccctcatttatctggaattttgcctattttttggtacagttcccttgctttattctttggatgacgagtataaggagcatgtgcttgaataatcaccctggatttgataatggtgggattctgtggttccataacttgactg

SEQ ID NO: 151972 - DNA, 691 bp, Zea Mays
atatcacaataatgacaggcagatgccacttaggtgccgtttggttcacgaaatgtaacgtaaatggcaatggtaatgattcccactcgaataacagcggtaataagtttgaaaaagacgatatcactttctagtgtggtatctgattacgttggacttaaacaaatactccctctatcccaaaatataattcgttttagactaaataaacattcattaattaatctacaaatgtagtttgcatgtatgtctatattcattatcattcagatgaatgtggacgcaaaaaaagagggctagaaagagctatattttggaacggtggagtatgatttacccttatcagttaccattacattacaaatatgtgataatgtgaaccaaacaacaccttattcctgtgtgtgctctcataagcaaaatagacagcgttggatgaataaggcattacatctggagggggaaagcgggttgtgcagaactgtgggctgtggcaaaacctgatttctttttgtaggatttgaaactaaaagtacgatactcatacattgtttggtaatgtgaactaatttgcactaaattgtttaggcaatggtctttttgcaattttgctacgccaacatgcttgttatagccaaactggtttcagaagtgtcgcacttgtatgcaacttttgtttcatccaaatatc

SEQ ID NO: 151973 - DNA, 1838 bp, Zea Mays
ggcgaggtattcggtcaacgatcggtcgggactccggactcgggagtcggcactcgggtctcgacgtctcgtctcgtctcgtctcgcctgcccgcagccccttggcttcgttccatccggcttctcggcggcggcggagaggagggggatggcgcaccggctgctgcgggacgcgcaggcggacgggtgggagcggtcggacttccccatcatctgcgagtcatgcctcggcgacaacccctacgtccggatgttaagagctgaatatgacaaagaatgcaaaatttgtgcacgtccttttactgtattccggtggcgtcctgggcgagatgcaaggtacaagaagactgagatctgccagacatgttgcaagctaaagaatgtctgccaggtctgcctgctggatcttgaatatggtctgcctgttcaggtccgagatacagcactctctatcaattccaatgatgcaattccaaggagtgatgtcaatcgcgaatattttgcagaagagcatgataggagggccagagctggcatagactatgattcatcctatgggaaggctcgcccaaatgataccattctgaagcttcaaaggacagcaccatattacaagaggaacagagctcatgtttgcagtttctttgtgcgaggtgaatgtacaagaggagctgagtgcccttatcgtcatgagatgcctgaaactggggagttatctcagcagaacattaaagatcgctactatggagttaatgatccagttgcactgaaacttttgagcaaggcaggtgagatgccatccctgacaccaccagatgatgagactataaggaccctctacattggcggactcgatagcagaataaccgagcaggatttgagggatcagttttatgcccatggtgagatcgagtccataaggatggtacttcaacgtgcaatcgcatttgtgacgtatactacaagagaaggcgcagagaaggctgcagaagagcttgctaataagctagtcatcaagggcgtgcgcctgaagctgatgtggggcaagcctcaggccccaaagcctgaggaggatgagtctgggaggctggggcaggtttcccacggagggctgctccctagggctgtcatatctcagcagcagagcggtgaccagcctcagccccccgggatggagggccaacagcaacaggctgcaccagcatcgtactacttcaacattccagcaccaccagcaacggagcggactgtgtatccatccatggatccacagaggatgggtgctatagtaaaaccacatgacagtgaaggcaaaccagggccgcagcaagccgggcaagctcaggcatcaagcaacccagcacaagggggcggctatcctgcaccaccgccatactaccatggtcagtatccaccatactatccacccccaccaccatacggtggctacatgcctccaccgcgcatgccctacccaccgcaatatccgccttaccagccgatgctagctcaaccagcacaggtacaggctagttcatctcggcaaccaccgcatgcaggtggagggcagcagcagccgcctgatggccctccagctcagcagcagccacagcagccaattcagaactgaagtcctgtcaagatgttgggtattggtactgctctaactgctcggcaggagaatgcaacccccgtgggtcaccagctttcgtaatttcttaatttgtggttaacagtaaaaactttgttgtattgcttatcaacgtttgaagaaaaaccgtgagatataccggatgtatccagcttctggattttgtggtacctgctgagtttcatca

SEQ ID NO: 151974 - DNA, 2694 bp, Zea Mays
gggaggctaatgagtaatagtatgtgctgatcaaacaagcacaattttttttttttttgcattgtgaccaccatagcacacacgatgtactgctaccatggcaagaactccacggccggtacagtaccgatgctcctgctgctgctgctgctcctcttcagcctcacggcgacgctgcagttccaaggcaagacgacggcgctggctctgccaggacccggctgcctcaggtactgcggcgacgttgagatccagtacccgttcggggtcggccatggctgcgctatggaagggttcgagctccgctgcaacaggagtgctgtcgacggccacagcttcttgacgatcttcggcataatcccggtgcggaacatatcgctggtcgacggccaggttcggatcatgaaacacatctcatccatgttctctaatcagtcgaccaagaagatcgactgcgatatctggggcaaggatctctccggcacgccgtttaggtattcagggaagtccaacatgttcacggttatcggcatcaacgctctcgcatacatggcggacaatactcatgtgattgggtgtgtgtcgcagagcaaaccctacggcgacctcgaggcacaagatggcaagtgtgacggcgacagtgccggctgctgccaggctgcactcgccgacgacatgaactttgacgacataggtttcagtccggatcacaatacgacggattactacgaacacagaaacgccacagacaggcgggcagattaccgaggctacgctgtggttatggagaccgacaaattccagttcaagacaacatatctgaacacaacagcatttcttgatgagaatgctggcggccgtgtcccggccatcctgatctgggaagtgggcaacgagacctgcgatgttgcgacgaagaaagaggattcctatgcttgcctcagcgctaacagcgtgtgcgtcaattccagcagtggaggctacctctgcaactgcagccaagggttcgagggcaatccttaccttcctgatggatgcaaagatattgatgagtgtgttgctaaaccacctccatgcgctagatgcaagaacaaacctggaggttacgattgtccgacacccttgaacattacggcgctactatcagtgggttcaagcatcggtgtggctgttgtggcctcggccgtcgtctgtacgtacttgacccatgagaggaagaagctgaccaaaatcaagcggaagtatttccaacagcacggcgggatgcttctgctgcacgagataagcctaaagcaaggaactgccttcaccgtcttcacagaagcagagctcatcgaggcgaccggcaacttcgctgacaagaacatccttggccgcggtggcttcggcaccgtctacaggggcctgctcaaggacggcggtgtcgtcgcggttaaacggtgcgtctcgtcgatggccagcgagcagcagcagaaggagttcggcaaggagatgctcatcctctcccagatcaaccacaagaacatcgtcaagctcctgggctgctgcctcgaagtggaggtcccgatgctagtctacgagttcatccccaatggcacgctgttccagttcatccatggtgacggtggctctcgcagcgcccccttctcggttcggatacgcatcgccctcgagtccgcgctggcgctgtcctacctccactcgtgggcgtcgccaccgatcctccacggcgacgtcaagtcgtccaacatactcctggaccagaactacgaggcgaaggtgtcggacttcggggcctcgatcctggcgccggcggacaagagccagttcatgaccctggtgcaggggacctgcgggtacctggaccccgagtacatgcagacctgccagctgacggacaagagcgacgtgtacagcttcggcgtcgtcctcctggagctgctcaccggcagcacggcgttcaacctggaaggccccgagagcgagcggagcctctcgctgcgcttcctgaacgccatgaaggagcgcaggctcggggatatcatcgacggccgcatcaaggccgacagcgacgccgcgctgctcgaggaggtcgcggagctcgcgctgcagtgcctggacatggtcggcgagaggcggccgaccatgagagatgtcgccgagaggctggacgtgctggccaaggccatgcagcagcagcacccgtgggtgccagcgcagcatagaccggaggagatggagagccttcttggggagtcgccggtggccagcgcggagatgaccagcaccggaaacttcagcatggaggagaggatcgtgcatgggctgctggattctgggcgttagaataggccatgctacaatagtaccacgtattttcggagatggtccgattctcatgtgtttctttgtaatggaatgccaaaattcgttagaacttgtcatacacacgccgaagaacacctccagtgcaaagccacgcatatttagacgagagtataatatggatactgggttagctgtgtctgataaggtaagaatatatatcgacattttatatagtcgtctgctctctcctgcggtggcgcacggcagcccgcagcctagagatgtaaaatgtacatggtatcgatccaattcatatctgagtccgagtatttagtattcgattcgtatctgatctttatttgtata

SEQ ID NO: 151975 - DNA, 2397 bp, Zea Mays
gcattgtgaccaccatagcacacacgatgtactgctaccatggcaagaactccacggccggtacagtaccgatgctcctgctgctgctgctgctcctcttcagcctcacggcgacgctgcagttccaaggcaagacgacggcgctggctctgccaggacccggctgcctcaggtactgcggcgacgttgagatccagtacccgttcggggtcggccatggctgcgctatggaagggttcgagctccgctgcaacaggagtgctgtcgacggccacagcttcttgacgatcttcggcataatcccgtcgaccaagaagatcgactgcgatatctggggcaaggatctctccggcacgccgtttaggtattcagggaagtccaacatgttcacggttatcggcatcaacgctctcgcatacatggcggacaatactcatgtgattgggtgtgtgtcgcagagcaaaccctacggcgacctcgaggcacaagatggcaagtgtgacggcgacagtgccggctgctgccaggctgcactcgccgacgacatgaactttgacgacataggtttcagtccggatcacaatacgacggattactacgaacacagaaacgccacagacaggcgggcagattaccgaggctacgctgtggttatggagaccgacaaattccagttcaagacaacatatctgaacacaacagcatttcttgatgagaatgctggcggccgtgtcccggccatcctgatctgggaagtgggcaacgagacctgcgatgttgcgacgaagaaagaggattcctatgcttgcctcagcgctaacagcgtgtgcgtcaattccagcagtggaggctacctctgcaactgcagccaagggttcgagggcaatccttaccttcctgatggatgcaaagatattgatgagtgtgttgctaaaccacctccatgcgctagatgcaagaacaaacctggaggttacgattgtccgacacccttgaacattacggcgctactatcagtgggttcaagcatcggtgtggctgttgtggcctcggccgtcgtctgtacgtacttgacccatgagaggaagaagctgaccaaaatcaagcggaagtatttccaacagcacggcgggatgcttctgctgcacgagataagcctaaagcaaggaactgccttcaccgtcttcacagaagcagagctcatcgaggcgaccggcaacttcgctgacaagaacatccttggccgcggtggcttcggcaccgtctacaggggcctgctcaaggacggcggtgtcgtcgcggttaaacggtgcgtctcgtcgatggccagcgagcagcagcagaaggagttcggcaaggagatgctcatcctctcccagatcaaccacaagaacatcgtcaagctcctgggctgctgcctcgaagtggaggtcccgatgctagtctacgagttcatccccaatggcacgctgttccagttcatccatggtgacggtggctctcgcagcgcccccttctcggttcggatacgcatcgccctcgagtccgcgctggcgctgtcctacctccactcgtgggcgtcgccaccgatcctccacggcgacgtcaagtcgtccaacatactcctggaccagaactacgaggcgaaggtgtcggacttcggggcctcgatcctggcgccggcggacaagagccagttcatgaccctggtgcaggggacctgcgggtacctggaccccgagtacatgcagacctgccagctgacggacaagagcgacgtgtacagcttcggcgtcgtcctcctggagctgctcaccggcagcacggcgttcaacctggaaggccccgagagcgagcggagcctctcgctgcgcttcctgaacgccatgaaggagcgcaggctcggggatatcatcgacggccgcatcaaggccgacagcgacgccgcgctgctcgaggaggtcgcggagctcgcgctgcagtgcctggacatggtcggcgagaggcggccgaccatgagagatgtcgccgagaggctggacgtgctggccaaggccatgcagcagcagcacccgtgggtgccagcgcagcatagaccggaggagatggagagccttcttggggagtcgccggtggccagcgcggagatgaccagcaccggaaacttcagcatggaggagaggatcgtgcatgggctgctggattctgggcgttagaataggccatgctacaatagtaccacgtattttcggagatggtccgattctcatgtgtttctttgtaatggaatgccaaaattcgttagaacttgtcatacacacgccgaagaacacctccagtgcaaagccacgcatatttagacgagagtataatatggatactgggttagctgtgtct

SEQ ID NO: 151976 - DNA, 490 bp, Zea Mays
cacttatctgcttccttgggcgatttggactggacggggtcgagtggggcgagaaaagggaagcaagctgggagagaagaatcacaccgggccgtgccgatgggtgtttacgagtagcagttgtatctcgttgacctcaccgcctgcagggcaccaaggaggagatgacttccccgaagcgggcagcagggcgggaagggtgcggatgcttggccgccgtcgcgcggggcctccgcggggcgtgcttccggccggcggtgacggcggacggtgacggcggcggctcggccaagggcagccacgttcacgacgcagcagagacaagatatctgaatgctagcaatcgggagcttggtgatcattttcagacaaaacgcgatggtgaaaatggtgttgatgcatcaattgaaaagagaacacccaagctacttcagtttacctttcaagagttgaaatctgccacgcttaacttcaggccagacagtattct

SEQ ID NO: 151977 - DNA, 493 bp, Zea Mays
cacttatctgcttccttgggcgatttggactggacggggtcgagtggggcgagaaaagggaagcaagctgggagagaagaatcacaccgggccgtgccgatgggtgtttacgagtagcagttgtatctcgttgacctcaccgcctgcagggcaccaaggaggagatgacttccccgaagcgggcagcagggcgggaagggtgcggatgcttggccgccgtcgcgcggggcctccgcggggcgtgcttccggccggcggtgacggcggacggtgacggcggcggctcggccaagggcagccacgttcacgacgcagcagcagagacaagatatctgaatgctagcaatcgggagcttggtgatcattttcagacaaaacgcgatggtgaaaatggtgttgatgcatcaattgaaaagagaacacccaagctacttcagtttacctttcaagagttgaaatctgccacgcttaacttcaggccagacagtattct

SEQ ID NO: 151978 - DNA, 1082 bp, Zea Mays
cttgtcaaccataatctttctatctgcttgttcttccttatctgtcatcttactttgtttaatcttgaaggggctcttcccctaccttggtccaacaggatgaagattgctctaggtgccgcgaaaggactagccttcctccatggaggtcccaaacctgttatttacagggattttaagacatcgaatgttcttcttgatgtggagtacaacgcaaaactatctgatttcggtttagcaaaagctggtcctcagggtgataaaactcatgtatctactcgggttgttggcacctatggttatgctgcaccagagtatgtaatgacagggcacttgacatctaagagtgatgtttatagcttcggagttgtgctactcgagatgttgactgggagaagatcaatggacaagaagcggcctacgggggagcagaacctggttgcatgggcaaggccttacctaaatgatcggcgaaggctctatcagcttgtagatcctcgcttggggctgaactactctgtcaaaggggtgcaaaaggtcgctcagatctgccactactgccttacccgtgacagtaagtctcgcccatcgatggatgaagttgtcaagcaactcacaccattacaagatctaaacgacatggcatctgcttcgccaaggcctcgctcaactcagcgcggaaaggtgcatcgatgacaacccggttctgttgtaagaagagcagtgtggtcctggttgcttgatgcttgtttggtttaattgtatagcaaaattaggtgttgcctgccgatacctggagatgtgacaccgcctgatgtgtcgctcaggtcagtcacactgctctgctgtttggctggttgccaaagcaagataacgatgtatctggttgcatcatgtaataattattataattaccatttaacttctggcgggggtacatcatgtaatggttggtgtacacccaggttagtaatcttaatagtgtttggctgacaggctgagggtcagtagacggtgtgcagttcgcttttttcaggggaaaggtacaggtgttaaattgtgattgtacatttgctcttgtt

SEQ ID NO: 151979 - DNA, 3366 bp, Zea Mays
gctcctcctcgattcccgcctgccgcgcacgcgccgccgtcgcactgacatcaaggacccacgtgccggctcgcagcgcagacggcagaattcttgtgcattctatggccgactgacatctgggccagcgcgtcggtttcttgggctccggcgccgcgggagtgccgcccaccaaccccacccgcgctccacgacgccaaatccgcgcgggaaacgcctccgcgcccgcgcgccaaacccaatccaaacccaaacattttcttctccagcgagcacccaaaaaaaataaatagatcctccagctccagctccgcttcattactcctcgcctcttccgcgcccaaacactaccgcctccctcccacccctagtccccctacccccccatccaatcctctgctcgccttgtctcgacccggcagcggcggcggcttgggcgcgcacacacaccaggtgttcgattggagtcctcgccgaagcggaagatgtacgtggtcaagagggacggccgccaggagacggtgcacttcgacaagatcacggcgcgcctcaagaagctcagctacggcctcagccaggaccactgcgacccggtgctcgtcgcgcagaaggtctgtgcgggggtctacaagggcgtcaccaccagccagctcgacgagctcgccgccgagaccgccgcggccatgaccgcgtcccaccccgactacgcctcgctggcggcgaggattgctgtgtcgaacctgcacaagaacacaaagaagtccttctcggagacgattaaggacatgtacatgcacttcaacaagagatccgggctgatggcccctcttgtcgctgaagatgtttatgaaatcatcatgaagaatgctgctcgcttggacagtgagataatttatgatagggatttcgactacgactactttggcttcaaaactctggagaggtcttacctgttgaagcttgatggtaaggtcgttgaaaggccgcagcacatgttaatgagggtttcactggggatacacaaggaagacatcgagtctgccatcaggacgtaccatctgatgtcccagcgctggtttactcatgcttcaccgacgcttttcaatgctggcacgccgaggccccaattaagcagctgttttcttatatgcatgaaagatgacagcattgagggaatctatgaaaccctgaaagagtgtgctgtaataagcaaatctgctggaggaattggtgtctcagttcataatatccgtgctactgggagttatattcgaggaacaaatggatcatcaaatggaattgttcctatgttacgtgtctttaatgatactgctcgctatgttgatcagggtggtggcaaaagaaagggtgcatttgctgtatacttggagccttggcatgctgatatttttgagttccttgatctgagaaagaaccatgggaaggaggaaaatcgtgcaagggatcttttctatgcgctatgggttcctgatttattcatgcaaagagtccagaataatggagaatggtcattattttgccctaatgaagctccagggttggctgattcctggggtgaggagtttgataatttgtacaagaaatatgagagccaaggcaaggcaaagaaagttgttccggcacagaccctttggtttgacattttgaaggcacagatagagactggtacaccatatatgctttataaggatacttgcaataggaaaagtaaccagcagaatctgggcacaattaaatcgtcaaacctgtgcactgaaataattgagtttacaagccctactgagaccgctgtctgcaacctagcatctattgctttacctcgttttgttcgggaaaaggatgttccgttggagtcccatccatctaagcttgtgggtagcagtgattcaaaaaatagatattttgattttgagaagctagctgaggttacctcaactgttacttacaatcttaacaaaattatcgatattaattactatcctgttgagacagcaaagaggtcaaacatgcgtcacaggccaattggcataggtgttcaaggcctggcagatactttcatattactgggcatgccgtttgattcaccagaggctcaacagttgaataaggatatattcgaaactatctactatcatgctctgaaagcttctgctgaacttgctgctaaagaaggtccctatgaaacatatgaagggagccctgtcagcaagggcattctccaacctgacatgtgggatgtagtgccatctaacagatggaactggccatctctaagggagaccatttcaaaagttgggataagaaattctcttcttgttgctccaatgcccactgcttccactagtcagattcttggcaacaatgagtgttttgaaccctacacgtctaatatatacagtcgacgtgttctaagtggggaatttgttgtggtcaacaagcatcttcttcatgatctgactgaaatgggcatttggactcctactttgaaaaaccagataatatacgacgacggttctgtccagaagatagcagaaatcccggacgatcttaaagcaatctacaaaactgtttgggagatcaagcagaaaactttagttgacatggcggtcgaccgcggatgctacatcgaccaaagccagagcctcaatgtccacatggagcaagcaaactttgggaagctgacgtctcttcacttccatgcttggtccaagggcctgaaaactggaatgtactatctacgcacacgagctgctgctgatgcgatcaagttcacagtggataccacgcttctgaaggagaatgggaacggggttagcgatggaaagcccgcggaggaagacgtagacgctaaaatggcacagatggtctgttctttgaacaaccgggaagagtgcctggcgtgtggaagctagattggagattccatctggacactgcacttcgtgatctgtgaacacaacattacatacagccggctgatgattggagctcagtaaccagaacgaagtctgtgatgtaggtcgagttggaagttcccataatgggaatagcttgtacctgaatactgctacggcgctacctctggtctgtattgctctaaggtgtttgtgctgctgccaatgtactgtaaatatctaccagcgtcaatgttgtcgatgtgctctaagatacagtatgttttaaccgtgctacactctttgcattggatcgaacatgatgtaatgcatcgtcttccataatgatacgagtgctggaaaacagaacaatgtaaactaattagtctgtatcctcgatcgcgatatgcacttggtcctttcggcagtgtctgtctgcacagtatttcct

SEQ ID NO: 151980 - DNA, 158 bp, Zea Mays
cgccagcccgacatcgcatacgccgtccagcaggccgccaagcgtcagcccgtcgtctctcgctccagcgctgaggccgagtaccgtgtcgtggccaacggcgtggcagaggcctcctggctgcgccagctcctccacgagctccacagtcccctcca

SEQ ID NO: 151981 - DNA, 1269 bp, Zea Mays
cagcgagtccgtcccctttcttctctcacaagtagatctcgcggtgttaatcctcccgagtcgcctccccctcaatttccacaaacgcaagccccaatctcgccgtcaccacccccaatccagcaaacgcaaaccccatctcgccgccgccgccgccgcgatgtctcgccgctatgacagccgcacgacgatcttctcgccggaggggcgtctctaccaggtggagtacgcgatggaggcgatcggcaacgccgggtcagccctcgggatcctagcggccgacggcgtggtcctcgtcggcgagaagaaggtgacctccaagctcctccagacctcgcgctccgccgagaagatgtacaagatcgactcccacctggcgtgcgccgtggccgggatcatgtccgacgccaacatcctcatcaacaccgcccgcctccacgcccaacgctacgcgctctcctaccaggaacccatccccgtcgagcagctcgtccagtccctctgcgacaccaagcagggatacacccagttcggaggcctccgccccttcggggtctccttcctattcgccgggtgggacaagcaccacggcttccagctctacatgagcgacccatccgggaactacggcgggtggaaggccgccgctgttggggccaacagccaggccgcgcagtccatgctcaagcaggactacaaggacggcttgacccgcgaggaggccgtcgccctcgcgcttaaggtcctcagcaagaccatggactccaccagcctgactgccgagaagctggagctggccgaggtgtttctgcagccgggctccggggaggtacagtaccaggtgtgctctcctgaagcgctggggaagctgcttgcaaagtccggcctgacacagccaacacccgaggcataatgctctgttttgctgtggcttgtgatgcctactactgctcttagagatggtttaagcatttgtgcttcagttgtgtgaacttgaatattcgacgattatgtggtctaattttatgttgagcatcctagatacgttaatgtttcatctgtaactgtggattgccttgaactggttgcaaattgttgatttctatctgctctgcttgattattgtcgtgattagggagcatgtgggataatggaacaggcaaaattaggtttggatctaacgcatctggatgataccgactgtatttagtgaccatggcaaaattttgaactgcttatgtgttctagtaactattatagtttaggcct

SEQ ID NO: 151982 - DNA, 7504 bp, Zea Mays
tccatttccccttcccttttcactccgaagtccgacctctctcgaacacacaccacaccaccccgcttgacgacgcttaaaccctagcggcagttgcgggaggccgccgcgccgcgccgcgccgccccgtcgccgatgtggaacggcgcgccgcctccgccgccgccgcagatggcggcggccccgcctccccctggcacgacggtgcccggggcaggccaacctccgcccccgccgccgccggccggggcgccgttgggcggcaagccgctgacgccggccgagctcgaggctcagctggtggagaaggcccgcaagtggcaccagctcaactccaaacgctacggcgacaagcgcaagttcgggttcgtcgaggcacagaaggaggacatgcctcctgagcacgtccgcaaaatcatcagagaccacggagacatgtcttccaagaagtacaggcatgacaagcgtgtttatcttggtgcactcaaatttgtgccccacgctgtgtacaaacttctagagaacatgccgatgccttgggagcaggttcgccatgtgaaaatcttgtatcacatcactggggctatcacttttataaatgaaatcccatgggttgttgaaccaatatacctcgcacagtggggtacaatgtggattatgatgcggcgagagaaaagggataggcggcattttaaacgaatgcgctttcctccatttgatgatgaggagcccccactggactatgctgataatttgttggatgttgaaccacttgaagctatacagttggagttggatgaggaggaagatgcagctgtctatgaatggttctatgatcacaaacctctaatgaagacaaaacttataaatggtcccagttacaggaaatggcatctatctcttcccataatggcaacactatatcgccttgctggccagctgctgtcagatctgatcgataggaattatttctacttatttgatatggagtccttctttacagccaaggcccttaatatgtgcattccagggggtccaaagtttgagccattgtaccgtgatatggagaagggtgatgaggactggaatgagtttaatgacataaataagctcatcatacgtcagccacttcgaactgagtacaggattgctttccctcacctgtacaacaacaggccaaggaaagtgaaacttggtatctatcatacccccatgataatgtacatcaagactgaagatccagacttgccagcgttctactatgatcctctgataaatcctatcacttcaaccaacaaggttgatcgtcgggagaggaaagcagctgaagaggaagatgatgaagatttttgtctcccagaagatgtagagcctctcttgaaacagactgaactctacactgatacaacagctgctggtatatcgttactttttgctccaaagccttttaacatgagatctggtcggacacgtcgtgcagaggatattcctcttgtatctgagtggttcaaggaacattgccctccagcttatcctgtgaaagttcgtgtgagttatcagaagctattgaagtgttatgtgctcaatgagctacatcataggcctcccaaggcccagaagaagaagcatctgttccgttcactccaagcaactaagttcttccaaactactgagcttgactgggcagaagcaggcttgcaagtttgcaagcaggggtacaacatgctaaatttgttgattcacaggaaaaatcttaactatcttcatttagattacaatttcaatttgaagcctgtaaagactcttacaacaaaggaaaggaagaaatctcgttttggaaatgcattccatttgtgtcgtgagattttacgacttacaaagttggttgttgatgctaacatccagttccgtctgggaaatgttgatgccttccagttggcagatggtctgcaatacatattttctcatgttgggcagttaactggtatgtataggtacaagtaccgattgatgagacagattaggatgtgcaaagatctgaagcacttgatatattatcgtttcaacactggccctgttggtaaagggcctggttgtgggttttgggctccaatgtggagagtgtggctcttcttccttcgaggtattgtcccactattggagcgctggttgggcaatcttctggcacgtcagtttgagggccgtcattccaagggtgtggccaaaactgtaacaaagcaacgtgttgagtctcactttgatttagaacttcgtgctgcagttatgcacgacgtcctagatgctatgccagaaggcatcaaacaaaacaaggctcgaactatattacaacatcttagcgaggcatggcgatgctggaaggcaaatatcccatggaaagtccctggtctacctgtgcctattgaaaacatgattcttcgttatgtgaaatccaaggcagattggtggacaaatgttgctcactacaatcgtgagcgtatcaggcgtggtgctacagttgacaaaactgtttgtcggaaaaatctaggaaggttaactcgtctgtggctgaaggcagagcaagagaggcaacacaattacctgaaagatgggccatatgttactcctgaagaagctgttgctatttatacaacaactgttcattggctggaatcaagaaagttctccccaattcctttcccgccattgtcatacaagcatgacactaaacttcttatacttgctctagaaaggctgaaggagtcatacagcgtagcagttagattgaaccaattgcaacgagaggagcttgggttgattgaacaagcttatgataatccacatgaagcactgtcaaggataaaaaggcatctccttactcagcgtgcttttaaagaagttggtatagaattcatggacttgtacagctacttgattccggtatatgaaattgaacctcttgaaaagatcactgatgcataccttgaccagtacctgtggtacgagggggacaaacggcacctcttcccaaattgggttaagcctgctgattcagaaccaccacctcttcttgtttataaatggtgccagggtataaataatttactggatatatgggacacaagtgatggacagtgtgttgtgatgctccagacaaaatttgagaagttctttgagaaaattgatctgactctgttgaacaggcttctgcgcttggtcttggatcataacatagctgactatgtcactgcaaagaacaatgtagtgttgtcttacaaggacatgagtcacacaaattcttatggtctcattcgagggcttcaatttgcatcttttgttgttcagtattatggccttgtgctggatctcctgattcttggtctaactcgtgcaagtgagattgctgggccacctcaaatgccaaatgagttccttacatatgctgacacaaaagttgagacaaggcatcccataagattatattctcggtatattgacaaggtgcatatattgttccggttcacccatgaggaagcacgagatctaattcagcgttacttgacagaacatcctgatcctaacaatgagaacatggttggttacaataacaagaaatgttggcccagagatgcaagaatgaggcttatgaaacatgacgtgaatcttggaagaagtgtgttctgggatatgaagaaccgccttccaaggagcattacaactttagaatgggagaatagctttgtctctgtttacagcaaggacaatccaaacctgctttttagcatgtctggctttgaagtccggatactgccaaagatacggatgacccaggaggcattcagcaacacaaaagatggagtatggaatttgcagaatgaacagacaaaagaaagaacggcaattgccttcctgagggttgacgatgaacatatgaaagtgttcgagaaccgtgtccggcagattctaatgtcatcagggtcaacaacattcaccaagatagtcaataagtggaatacagctctcattggccttatgacatatttccgcgaagcaactgtccatacccaggagcttttggatttactggtcaaatgtgaaaacaagatccagactcgtataaagattggcctgaattcaaagatgcctagtaggtttcctccagttatcttctatactcccaaggagattggaggtcttggaatgttatcaatgggccatattcttataccgcagagtgatcttaggtatagcaaacagacagatgttggtgtaacacattttagaagtggtatgagccatgaagaggatcagcttattccaaacttgtatcgctacatccagccatgggagagcgagtttattgattcacagcgtgtttgggctgagtatgctttgaagaggcaggaagcacaatcacagaacagacgattaactcttgaggatcttgaagattcatgggatagaggtatacctcgtatcaacactcttttccaaaaagaccgtcatacactagcctatgacaaaggatggagagtgagaacagattttaagcaatatcaagtgctgaaacagaacccattctggtggacacatcagcggcatgatgggaagctttggaatctaaataactacagaacagatgtcatccaagcacttggtggtgtagaaggcatcttggagcatactttatttaaagggacttacttccccacttgggagggtctgttttgggagaaggcatcaggtttcgaagagtcaatgaaatacaagaaactgacaaatgcacagcggtctggtctcaatcaaatccccaatcgaagatttaccctgtggtggtcaccaaccatcaatcgtgcaaatgtctatgttggtttccaggtccagctagatcttacgggcatattcatgcatggtaaaatcccgacattgaagatttctctgatccagatcttccgtgcacatctgtggcagaagatccatgaaagtgttgttatggatctttgccaagttttagaccaggagttggatgcacttgagattgagactgtgcagaaggagacaatacatcccaggaagagttacaagatgaacagttcctgtgctgatatccttctctttgctgctcatagatggcagatgtccaaaccaagcttagtttctgagtcgaaggatgtatttgatcagaaagcaagtaacaagtattggattgatgtgcaactgcgttggggagactatgattcacatgacatagaacgttatacaagagccaagttcatggattacacaacagacaatatgtccatatacccatcgccaactggtgtgatgattggaatcgatctagcgtataatttgcactctgcttttggcaactggtttcctggatcaaagccactacttcagcaggcaatgaacaagatcatgaagtcaaatcctgctctgtatgtcctgagggagagaataaggaagggtctgcagttgtactcttctgaacccactgaaccatacctgtcttcacagaactatggagagatattcagcaatcaaatcatatggttcgtggatgatacaaatgtgtatcgagtcactattcacaaaacatttgagggtaacttgaccaccaaaccaattaatggtgctattttcattttcaatccaagaacgggtcaactttttcttaaggttatccacacaagtgtatgggcggggcagaagcgtcttgggcagctggccaagtggaaaaccgctgaggaggttgctgcattggttcgatctcttcctgtagaagagcagccaaagcaaattattgtgacaaggaagggcatgttggatcccttggaggtccatctacttgacttccctaacattgttattaagggcagcgagctgcagcttcctttccaggcttgcttgaagattgagaagtttggtgatcttatactgaaggcaactgaaccacagatggttctttataatatatatgatgattggttgaaaagtatatcatcatacacagcattctcccgcattgtgcttattctacgtgcacttcatgtgaataatgagaaggcaaagatgttgctcaaacctgacaaaacaattgttactgaaccacatcatatatggccatctctgaatgatgaacagtggttgaaggttgagtgtgcactaagggacctcatcctttctgattatgcaaagaaaaacaatgttaatacttctgcactgacacaatctgaaatgcgagatatcattcttggagctgaaattgctccaccatcacagcagaggcaacagattgctgaaattgagaaacagtcaagagagactactcagttaactgctgtaaccacaaggacgacgaatgtgcacggagatgaactcattatcacaaccacaagtccatatgagcaacaagcattcgcatcgaagactgattggcgtgtcagagccatctctgccacaaacttgtatctacgtgtaaatcacatttatgtcaattctgatgatataaaggaaactggctacacttacattatgccaaagaacatattgaagaaattcatatgcgtagcagatctgcgtacacaaatcgctggattcttatatgggctgagtccacaggacaatcctcaagtcaaagagattaggtgtatagccatccctccgcagcatggaacacaccagatggtgactctgccatcaaatcttcctgaacatgagttccttaatgatcttgaacccttgggatggatgcatacacagccaaatgaagctccacagctatcaccacaggacctgacatcacatgccaagattctggagaacaacaaacaatgggatggtgagaagtgcatcattctgacatgcagcttcaccccaggatcttgctcgttgactgcttacaagctgacaccaagtggttatgagtggggacgcagcaacaaggacaacggaagcaacccacatggatacctcccaactcattacgagaaggtccagatgcttctgagcgaccgcttccttggtttctacatgattccggataacaccccttggaacttcaacttcatgggagtgaagcacgacccacagatgaagtacaacatgaagctgggcatgccccgggacttctatcacgaggaccacaggccgacacacttccttgagttcagcaacatcgaggagggagaggtcgctgaaggtgatagggaggacacattcacgtagggcgctgggcgcctgttttagaaactcagtatctcaaacgcactttagctctgttttgaatggcaatgtgtgaaaggctgaaagctgtaacctgactcgacgggtgtcatctgtttttttggcttaatcctgtatcataccttgttgtaagacagccctggagaggggtaaaaattgtacaagtgcacgccatggcaacagtaaagattttacttagtagctatgctattctaagatggctcctcccaagctttaattttctcataatccctgctgg

SEQ ID NO: 151983 - DNA, 1536 bp, Zea Mays
ctcacgctagctggatcgctttgtcagtgtcagctgcgcggtgaccacgcggcatatgatatgagcgcggcgcgcgcggagctagcgctgccgctgaagctgaccaagtaaggagaagtgaccggatggagctggagctcgggctcgcgctgccgacccggcaccgccagccgctcgccgccggtctcctcggcggcgaggcgggtgcgcgcgggacgaagagggtgttcggcgaggcgttcgggtccgccaacaaggccacgcttccgctcttcctgcgcgacgacgacgacggcgacagaggcggcggcggtgaccgcgacggcgtcggccagcatgacccaaacaccaagaagacgaagaggctgctggtggggtggccgccggtgaagtgcgcgcgcaggagcggcggcggcggcgggtacgtgaaggtgaagatggaaggggtggccatcgggcggaaggtggacgtgtccctccacggctcgtaccaggacctgctccgcacgctccgccgcatgttcccttcggctacccaacgaggtgcgggtgcgggtgcagatcacgaggaggaggaggaggaggtggtggtggaagaggtggcctcgcacgagcgccgccgtctgcatcgtccttacgtggtgacctacgaggacggggaaggggactggttgctcgtcggagacgatgtgccgtgggaggtctttgtgaagtcagtgaagcggctcaagatacttgcgcggacagcagcaggcgacggcttagctcactgctagtagcagtacagtgctgctcctgggcggtcatcaccacttcaccagtaacgcactaacgcacgtattatagcactcctaagctttgcggccggccagtttcaacttcaagctaattaagatcatggcgagaacactgcttatattagctgatgtgtcaccacgtttaattctggtgttggaggtgacacacagtggcgccacctaaagtatacaacatcctactttgtgtgaggttcggacaaatccggaagctgcacggtataaaataccgcctccccgtgccatggtatccatccaaaatacaccgacagggactaaacaaagctgagggagctacagctaccttcggagtgggcggcaccaagcactgcatagaaaacaaaaacaatactccaccgtcgaaccccccgtggtgtctcggaaacgtcagaggccggtggtcaactgaagccggcgtcctggccggcggggacggctcccggcggatcagtggaccagatcggcaaggaatgtatcgtgtttcagcggcactgggtagtgggtagtgttcttctgcgacagtacactagaaagctagtttcagaatgcataaaatgtgtcgtgattccttttttttttttgagttgtgcgtgtcgccaaggactgacgtgggcgcggtccaatcaatgaactgctggcttgcatatagagtggcaacaaagaattctcccataactagcctattcgttttgctttgctttaatctgcaccaacttttatt

SEQ ID NO: 151984 - DNA, 619 bp, Zea Mays
tccctacaggtttcgagggcttattctctgcagcacctcaatatcggtggaacgttcatcacagatgaatccctctacgcagtcgcaaacagctgcgcaaatcttaagagcatcatcctgtggagctgccgccacgtgacggagggcgggctggtggcgctggtgaacaagtgccggcggctggagtgcatcaacgtgggcgggatgcgggtcccgccggagagcttggtgggcctgctctccatcagccccgccctggagatcaggtccaccgcacgcatcctcaacctcaacctcaacgccggggtgcaggtctcctgatctgtcacaaggcccagaagacagtgccactggagatcgacgaccaggctgcagccaaagcgcagagaagcaaacgcaccaagaagcccaatgccaagtacgttggaggcccatgggtgaactaggtctattactgtagcacataaatacttgtctgtaataagtgaacggcagactggaacatacctgttggcggcggctggcttgttgcctgtccggatcctcatacgcctgtgttgaaccctgatcggagtaaaatcctaccaccaccaattgatccaaaaacagattccagtct

SEQ ID NO: 151985 - DNA, 2760 bp, Zea Mays
cagggcactcttgatcaacacatgcgctataagtgacccacccatctttcctctgtgcatctttgccaagcagccatggccatgagagacctctgcattctcaccacacttgtctctttccttgtatcgttatcctctgtttctgctgcatacgaccacagctaccttgctagaggctcctccatctccacccaggatgtaaccacccccatcctagtgtcgcccaatggtgccttcacctgcggcttctacaaggtggccaccaacgccttcaccttttctatctggttctcgtgggcatctggcaagactgtctcctggacggctaaccgtgatgcgccactcaatggcaggggctccaggctcatcttccacaagaagggggccttgatccttgtggactataatggcatggtcatatggagcaccaacacaaccgcgtccggcagtgatcgtgcgatgcttctcgatagcggcaaccttgttgtcatggatacagatgggcgtcacctctggagaagcttcgactcaccaactgatacacttctaccatggcagccgatgactagagatactaggttggtatctgcttctgctaggggtttgctctattcaggtttctatgccttctacttcgccactaacaatatcctaactcttatttacaacggtcctgagactagtagcatatattggccagatccattccacatgccatgggataatggtaggactacctataatagtaccaggtatggggttcttgaccagacaggacggtttgtggcaagtgaccagcttaagtttgaagcttctgatcttggtgatgagacgatgaggagattgaccctagactatgacggtaaccttaggttgtatagcctaaacatgaccagtggcaattggtcagtctcttggatggcattccctcaactgtgcaaaatacatggactgtgtggagcaaacagcctgtgcagatacagaccagagctagagtcatgttcttgccttgaaggatttgagatggttgaaccaagtgactggagcaaagggtgcaggcgcaagactaataccacacccttttcatttaggaagcttaccggaacagacttatggggctatgacttaaactattccaaactggtgccatggttgatgtgcaggaacatgtgcttgaacgatacggactgccaagcttttggttaccggaagggaacaggcgaatgttatccaaaggcctttcttttcaatggcagggacttcccagatccttacaatgatatctatctgaaaactcaagaggcagtatggtcttcaccagaattggctcctggattaagacatgcttgcaaagttactgaaaaggaagcataccccttatcacaaatgttcgtgggtgccaattccagtttcaagtttggatactttctatcttctgcattgacattgctcgttattgaagtgatcttaatcatagttggtagttggattgtttacaaatgggagagaagaccagaaattatggacgaaggttacatgatcatttccagtcagttccgaaggttcagctacaaggagttacagagggcaaccaagagtttccaagaagagctcggaagtggcacatcaggagcagtttacaagggagtccttgatgatggaagggaggtcgcagtgaagaagctaagtgatatgatgcaaggagaacaagagttcagatctgagctcagcatcattggaagaatatatcatatgaatctggtaagaatttgggggttttgtgctgagcaaactcacaagctattggtttccgagtttgttgaaaatggttcattagacagatatctggttgattatcaggacttaacttatgtgctccaatggagccaaaggtacaatatcgcacttggagtggcaaaaggactggcatatctccatcatgaatggattgtgcactgtgatgtcgaaccagagaacatactgttagataaagaatttgaaccaaaaattgcagattttggattggttaaattactaagtcgaggaacaggagcacagatgctgtcaagggtgcatgggactagagggtacattgcaccagagtgggctctaaatcttccaataacagggaaggctgatgtttacagctatggtgtagtgctcctcgagttagtgaaaggggttcgggtttccagttgggtaattgaaggcgagggggtggaggaaatgtctattcgatgctctgctgagattcttaaagagaaattggcagccaaagatccatcatggctcatggaatttgttgactgcagactgaatggagaattcaactacttacaagcagccacgatgttagagatagcagtgtcatgcgtggaagaggagaggaccaaaagacctagcatggaccatatcctcaaaactttgctttcactagtggaataatgttgcttagattttccttttaccaatctgatgtgcatactgtgagactggacaagtgaaaaaaacaatagttttgtgttgtagcacagaatagtgaaatggagtcatgtcatgcgcgcaactttaataaagtgcatccaaaatccttaagagagcctaataagagcctgtttggcaggcagggctccaactctgaaagcgcagctttaaggcaggtgcttgctggcgtttttgggtgcactggtactcctattctaaccctaacagaccaaattgcaagtccaactgcccacatgtaggcccggttaaacaggc

SEQ ID NO: 151986 - DNA, 821 bp, Zea Mays
tatgtgtcaagtgacagtctaatttctttcttactttattcattgagcaatcaactaactgaagggtgatgaatccaattgaatcaaaatgttcaccactatacaatctacatatgattaaaaagaatcgacaatgacagaaattgtgaaagaatcaccatggctagtcaggcgctcgcaggtccctcgttgttgctgccaatgcgctccgcaacgccaatgcacggccatcgatctcgagtcctgctccggcaccagcgtcatctctttggctgtgcagtccccccaaatcactgtctgcctcctcaacatccggcgccaatgcagagtaatcctccctggacaacagcacattgtgaagcatcgcacatgtcccaatgcacgccacagctgctcgagagctttcctcctcgtggagcctagcgatggctccccaccccatcaagctccggataacacgccgcacggggcggcacattgccctgtgcgcagcattgaactccgcctccggggagccaggcaccagtggccctgggaaaggcaccatgagccagggcagcagcgggtacccacccccatccccaaccaagtactgctgggagtcgagcaacttgccgtgctcggcctcctggtacaacgaggacagcctgagcacctcgaggtctgtgcggtcgccgcggaatcccgcggtgagggagagcacgcgggaggaggcgcccgccacgagctgggtggcgagcgggccggtagggccggcgaagcgcgcgcagcagagcgcgccgcggcaggaggggagcggggcggaataggcgccggttggg

SEQ ID NO: 151987 - DNA, 112 bp, Zea Mays
ggaggaacgggaaataactccatgaagcgcttaagacttatcctagacgtccatgagtgcaaggacgacttatcctacacgtccaccattattaggagggctactaacgcac

SEQ ID NO: 151988 - DNA, 121 bp, Zea Mays
atggccgacgtccgcgcgtcccagccctcgccgttcctcacagtgcctgcgatgctcagcagggggcgaccatggcgagccgcggccagcccggcatcccgcaagcgactcgaagggaccg

SEQ ID NO: 151989 - DNA, 563 bp, Zea Mays
tacttgttcgactatatggccgccgccacagccaccgaacgaccgacggcggcgagcagcaataacaataacgacctgctgcggcgactggtcctgtcgctgtcgctgtcgacggcgagcaaggtgatcgcgaagcagcatgcccagcacaagcagcaccagcaggcagctgccggcgcgttccggtgccggacgtgcgggcgcgcgttcccgacgttccaggcgctcggcgggcaccggacgagccacaagcggtcgctggtgcgcgcgcgcggcctcgacctcctcctcggcgcgcgccccgggaagggcgcggccgcggccagagacgtgcaccggtgcaccacctgcggcgccgcgttccccacagggcaggcgctcggcggccacatgcgccggcacagagcggccgcgcacgacgacgagggcgaggcggcggcggcggcgagggccgttattgtcaataatgccttgtcgtctggagagcagcagggcgagagggaggtcgacgatggcgcgcggtcgtccattaggtttttccagttcatatgaccggtagctag

SEQ ID NO: 151990 - DNA, 1583 bp, Zea Mays
ccataaaccaccgacttccaggagtacttccagcgacccagcaccccaccacaaaggcacaaatccacaatcccctcttcggtacctttctccgagtcgtcttcccgttgatcggcaaagagactttagggttttagcggcttctatttctgagcgagggtttatccgccaggggcggcgcgacgcggcggcagttgagctgggatttccttcccatcccgttcccttccaggcgaggcgatggacgaggcggcggtcgacgacctcatccggcggctcctcgaggcccgcggcgggcgcacccccgcgcaacgcgcaggtgaccgacgctgagatccggcgcctctgcgccgccgccaaggatgtgttcctctcccagcccaacctcctggagctcgaggcccccatcaagatatgcggggatgtccatggtcagtattcagaccttcttcgattatttgagtatggtggctatccaccagatgcaaattatctgttcctcggtgactatgttgatagggggaaacagagcatagaaacaatatgccttctcttggcatacaagataaagtacccagaaaacttctttcttctcaggggaaaccatgaatgcgcctcaatcaaccgaatatatgggttttttgatgagtgtaagaggagattcaatgttcgtatctggaagatattcaccgagtgttttaactgcctcccagtggctgcgcttattgatgacaagatcttttgcatgcatggagggttgtctcctgagctaaagagcatggaccaaatacgtaacatttctcgtcctgtggatgttcctgatgttggtctcctatgtgatctgttatggtcggaccctgataaggagattgataggtggggtgagaatgacaggggtgtttcctacacctttggagctgacgtagttgccgagtttcttcagaaacatgatctagatttgatctgcagggcccaccaggtcgtagaggatggttatgaatttttcgcaaaacgccagcttgtaacaatattctcagcaccgaactactgtggagagttcgacaatgctggtgcactgatgagcattgacaactccctagtatgctcgttccagatactcaagccttctgagaagaaaggaaaagcaggaaatgggaacatgccaaagcccggtacacctcccaggaagataaaaataagtgttacccatatttagccaggttctcgctatcaatctgcatttgcgaagttgtgattaagtgctcccccaaacttgtggtaagtttttttttggtgagcttaacacgattttaaactgtggaccatcgtgcctcatgtctttctgatctgaagtctgatgcaaatgtatcctgacattttgccaaccaagagagatcatgctgacagaaacttcaggatttttttttattgtggacttatgttcttactccccgacaaatgcaacatgtttatgaatgggtaggggaaatgctaacaagcaactaatgctctttacttattttgatgcacgactgaaatcactggaagtatcccattttctaagaacaaaggacattctcttt

SEQ ID NO: 151991 - DNA, 1361 bp, Zea Mays
ccataaaccaccgacttccaggagtacttccagcgacccagcaccccaccacaaaggcacaaatccacaatcccctcttcggtacctttctccgagtcgtcttcccgttgatcggcaaagagactttagggttttagcggcttctatttctgagcgagggtttatccgccaggggcggcgcgacgcggcggcagttgagctgggatttccttcccatcccgttcccttccaggcgaggcgatggacgaggcggcggtcgacgacctcatccggcggctcctcgaggcccgcggcgggcgcacccccgcgcaacgcgcaggtgaccgacgctgagatccggcgcctctgcgccgccgccaaggatgtgttcctctcccagcccaacctcctggagctcgaggcccccatcaagatatgcggggatgtccatggtcagtattcagaccttcttcgattatttgagtatggtggctatccaccagatgcaaattatctgttcctcggtgactatgttgatagggggaaacagagcatagaaacaatatgccttctcttggcatacaagataaagtacccagaaaacttctttcttctcaggggaaaccatgaatgcgcctcaatcaaccgaatatatgggttttttgatgagtgtaagaggagattcaatgttcgtatctggaagatattcaccgagtgttttaactgcctcccagtggctgcgcttattgatgacaagatcttttgcatgcatggagggttgtctcctgagctaaagagcatggaccaaatacgtaacatttctcgtcctgtggatgttcctgatgttggtctcctatgtgatctgttatggtcggaccctgataaggagattgataggtggggtgagaatgacaggggtgtttcctacacctttggagctgacgtagttgccgagtttcttcagaaacatgatctagatttgatctgcagggcccaccaggtcgtagaggatggttatgaatttttcgcaaaacgccagcttgtaacaatattctcagcaccgaactactgtggagagttcgacaatgctggtgcactgatgagcattgacaactccctagtatgctcgttccagatactcaagccttctgagaagaaaggaaaagcaggaaatgggaacatgccaaagcccggtacacctcccaggaagataaaaataagtgttacccatatttagccaggttctcgctatcaatctgcatttgcgaagttgtgattaagtgctcccccaaacttgtgggagcgcgggcctcgacgtctccgggcgcacgagcctcgacggctcacgggcgggcgcgcgaccccgaccatgccggctgcgg

SEQ ID NO: 151992 - DNA, 1343 bp, Zea Mays
atggacgaggcggcggtcgacgacctcatccggcggctcctcgaggcccgcggcgggcgcacccccgcgcaacgcgcaggtgaccgacgctgagatccggcgcctctgcgccgccgccaaggatgtgttcctctcccagcccaacctcctggagctcgaggcccccatcaagatatgcggggatgtccatggtcagtattcagaccttcttcgattatttgagtatggtggctatccaccagatgcaaattatctgttcctcggtgactatgttgatagggggaaacagagcatagaaacaatatgccttctcttggcatacaagataaagtacccagaaaacttctttcttctcaggggaaaccatgaatgcgcctcaatcaaccgaatatatgggttttttgatgagtgtaagaggagattcaatgttcgtatctggaagatattcaccgagtgttttaactgcctcccagtggctgcgcttattgatgacaagatcttttgcatgcatggagggttgtctcctgagctaaagagcatggaccaaatacgtaacatttctcgtcctgtggatgttcctgatgttggtctcctatgtgatctgttatggtcggaccctgataaggagattgataggtggggtgagaatgacaggggtgtttcctacacctttggagctgacgtagttgccgagtttcttcagaaacatgatctagatttgatctgcagggcccaccaggtcgtagaggatggttatgaatttttcgcaaaacgccagcttgtaacaatattctcagcaccgaactactgtggagagttcgacaatgctggtgcactgatgagcattgacaactccctagtatgctcgttccagatactcaagccttctgagaagaaaggaaaagcaggaaatgggaacatgccaaagcccggtacacctcccaggaagataaaaataagtgttacccatatttagccaggttctcgctatcaatctgcatttgcgaagttgtgattaagtgctcccccaaacttgtggtaagtttttttttggtgagcttaacacgattttaaactgtggaccatcgtgcctcatgtctttctgatctgaagtctgatgcaaatgtatcctgacattttgccaaccaagagagatcatgctgacagaaacttcaggatttttttttattgtggacttatgttcttactccccgacaaatgcaacatgtttatgaatgggtaggggaaatgctaacaagcaactaatgctctttacttattttgatgcacgactgaaatcactggaagtatcccattttctaagaacaaaggacattctcttt

SEQ ID NO: 151993 - DNA, 104 bp, Zea Mays
ttttgctttatatactgcatatgttttcattttttacagatgctatgctacatgaatcggttgtccagctacttggcatggtttaaaatgtatatttagaatta

SEQ ID NO: 151994 - DNA, 2950 bp, Zea Mays
gttcgttttggtaacagtcgctagcgaaaaagcatccgcccacctcccctcgtctctctcgcgctccgccgccgcgcaaaactgtctggtgatgacgaacgccgccggtacggcccctcacccgactccgccgacgccgctccaacaacaacagcatcagccacccaaggaccagcagcagaaggcgctggccttgaacgcattccgcctgaaggggatcggcgaccgcatcaggttccacctgaagggcatgagcgtgcccccagtcgccgagttggcccacctcatctacgcgttcgccagagggattgacttcgcggtctcagctggtgatattcctctgacagccggtgacatacccgagattctgagaaaggtatatgagctgaggaaagaaacaattatacaatcttcgcttatgatactagcgatctcttgcaagaatgcttgctccaataaatggtttcaacctgcagattccagagacattcttagaatggtcaatgagctctctggcaacttctgcacgtccacaggccaggcagctagtgacagcactgtgcttgaaattatatcacaaataatgccaaggtattaccctcggttgaagtttgagcgcctaatcacttctattgaagcaaaggttggctatgatatattaatggctgacttctttattgagaggagcctatctcgagatgaaaagattagactaattgtcgtacaaaaggaaaatttagatgcctcatcatgtgtctcaagtccaccacatgtgagctttttggtcaatgggaagggtgtggacaagaggactaatgtttcaatggaacaaggaccccagttacctactgatatcaccaaaatgctcaaatatggggctaacattatccaaggtgttggatattttaatgctaattatatcatagctgtagcagttgtgaacgatttgacatccttcagtgctccaaaactggatgactatgcacaacctatcactgtttatcctgcagattctgatgtacttgagggaccatcaagagtttccctaaattgtcctataagttttaggcgcataaaaactcctatcaaaggccgtctttgcaaacactatcagtgttttgattatgataattacatggagatgaactcaagaaaaccaaactggcgctgtccatattgtaacacctcctcaagcttcactgacctacgtattgaccaaaagatgatgaagatactagaagagactggagatgatgtcactgatgtccttgtatttgctgatggatcttggaaagttgttccagctcaggatgaaaaatctgatagacatagaggtgacacaattcagcaggctggagatgctgtagaaactggttcaccttctcgagatgtcatagatctgataaatggcaatgatgatggtgatatgcaaatggattgggcatcggctccagaagattcaaagcctgtgttgaatagtcaagatttgtctgtatcagactatcttacagatttccctatgacagctcagacagaagatctgaatcgaggggatggaaataatgggggaagcaacatggcttccacttcacgtcaaaatttgttactacctcctactagtgggctgggctcaagttcattagggaccttggaatctattctacctcaaaatgttctgcaccctgttatcacagatgcagtctctccttctcttgaaacctcttcagcatctggcatgcaacatgtttcacaggaaacacattgtggaactgtacagctgcagccacaaataggtccagtacatgggtccgaagtgagaaggcttcctatacctagaaatcccaggagagagccaataggagtacaggggttgacggttccaccacagaatcctgggtcatcaacaaggttgcagccaaatattctcaattgtccacctcctatcccgctatctagtccatcctcttcaacttaccaagcacatcaagtgaagaatccagacagtgtcattgcttcaaggaacagtggtagtgggccattaccaaggactcctagcgtcgctgctgcatcattgcacctacagtcgacagcacgggatattcgcaacacatcgagccatctacccagtcgagttgttggtctgcctgcgccacacctcatgggtgcacgaccaccaccaggaatttcagtgcaggctggaggagcgaacgcctacagaactatgcaacagactccaactatggatccactgaggcacacacggatgagcatgaaccaaacagcactggctgctgccggccaaaccaccgctgccgcgtatgtccgaccaacccaagcagacatccaaaaccatctctttcctgtgcagcaaagccaggcaccacgatcgcaacaagtgccacgaacaacaaccccgcctctacagcgggcgccaccgcacctgcaacctcccagtgtaccaccgactgttccaagcacacctcaggctggaccttcgcatggtcttccaccggagctccctgtggatgatagctggcgccccacgggacagatgagagggagtctgacaggcaatgcttacagttctgcaattaggcactatcggggccattctgagcagcagcagggcgagcctcggcctcccaacacttcaggtgcgcgaaggcctcagtaactgccagacattgcggcgttgccctgattatcaagcagggcttgggcagctaatttaccaagagattttaatttattatcatagctaatttggcgctatgatgatctatgttagtgtaggtaggggagcctagtgagtagtgatagtgctctgcttgtctacaacgcactctgatgttaaattagtagtatcaggtgaaccatttgtgtacccaatatggaacgtggattttttatgctaatgttttgcctgtgtaattggaccgattttcatgtg

SEQ ID NO: 151995 - DNA, 2020 bp, Zea Mays
gcatccgcctaatcccatccgctatatatcggatcgacggtctccccgcatggacgcagcgagactccgttgcgccgccgccatcgccaccgccacagctgtccccgccgcccgggcgctcccgattcgccgccacccggcctttttccgcgtccccgccgccgttggcctccggttctcgtcgtgccggatcccggtgccgaggagagcggccgcggccatgtcgtcgtcagcggcggcgcaggggacggagcacgaggctgacgcgtggtacgcggtaccgggcctcagcctccgcgaccaccggttcgccgtcccgcttgaccactccagtcccgagcgcggggacaccatcaccgtcttcgcgcgcgaggtcgtcgccgctgggaaagaatacatatctctgccttatttattgtacctacaaggagggcctggatttgagagtccccgtcccacggaagcaggtgggtggttaaagaaagcttgtgaagaccaccgcgttgtcctgctagatcagcggggaacaggattatccacaccgttgactccatcatctctttcgcaaattaaatctcctgcaaatcaggtggagtacctgaagcatttcagggcagataatatagttaaggatgcagaatttattcgtgtacgtcttgtaccagatgctaagccttggacagtcctaggacagagttatggtggattttgtgccgttacatatttgagttttgctccagaaggcctgaaatctgttcttttgactggagggctcccaccactaggagaaccttgcactgcagatacggtgtacagagcttgctttaaacaggtccagcagcaaaacgagaagtactataagaggtacccccaagatatacaggtcgttcatgaggttataagatacttaagtgaatctgaagggggaggggttcttcttccatctggtggccggttaacccctaagatgctgcagtgtcttggattatcaggtctaggttttggtggtggatttgaaaggctgcattatctgcttgagagggtgtgggatcctgtacttgtcgctggagctaaaaagaggataagctattacttcttaaaagagttcgaaatgtggctagattttgatcaaaatcctctttatgccctcttgcacgagtctatctactgtgagggctcttcatcaaaatggtctgctgaaaagattcatggcgaatatgggagtttgtttgaccctattaaagctacagaagaaggccgagctgtgtactttactggagagatggtgttcccttgcatgttcgatgacatccctgctctacgagacctaaaggaggctgcctgtttgttagctgagaaggaagactggcctccgctctatgatgtcagcgtgttgaacaacaataagtggcatcctgcaggttccggtagcggctgcggtgtactacgaggacatgttcgttaacttcaacatcgccaaggagaccgcctcccagattgctgggatccggctctgggtgaccaacgagtacatgcactcgggcatccgcgacggcggctcgcacgtctttgagtatctcatggctcttctgaacggcaagaagcctttgttttagctgtttcagaagccctgctatctaggttcgagtgtcagttgagctgaacctactatgattgaaacgagcaaataatgaggtccgtttggtttcatgaacaaacgaataatgtttaccttgtagaaatttcacggataatgtataacgttttgaaatttggtccgcagctacatcatagaaatggaattggtctgctcgcaagacacgttccgagcagtactatgaaacaaatgtttgtgttcttcgtcgacatttgtgtccaaagtccaaacagatccagaagccagaggtgccattgtttcaaacaggcctggttcttttttttaaattaacaatacaaaatttactttacaaagttcccaataagcctaagcctcctttgtacctgccaagctcatgccgag

SEQ ID NO: 151996 - DNA, 2007 bp, Zea Mays
gcatccgcctaatcccatccgctatatatcggatcgacggtctccccgcatggacgcagcgagactccgttgcgccgccgccatcgccaccgccacagctgtccccgccgcccgggcgctcccgattcgccgccacccggcctttttccgcgtccccgccgccgttggcctccggttctcgtcgtgccggatcccggtgccgaggagagcggccgcggccatgtcgtcgtcagcggcggcgcaggggacggagcacgaggctgacgcgtggtacgcggtaccgggcctcagcctccgcgaccaccggttcgccgtcccgcttgaccactccagtcccgagcgcggggacaccatcaccgtcttcgcgcgcgaggtcgtcgccgctgggaaagaatacatatctctgccttatttattgtacctacaaggagggcctggatttgagagtccccgtcccacggaagcaggtgggtggttaaagaaagcttgtgaagaccaccgcgttgtcctgctagatcagcggggaacaggattatccacaccgttgactccatcatctctttcgcaaattaaatctcctgcaaatcaggtggagtacctgaagcatttcagggcagataatatagttaaggatgcagaatttattcgtgtacgtcttgtaccagatgctaagccttggacagtcctaggacagagttatggtggattttgtgccgttacatatttgagttttgctccagaaggcctgaaatctgttcttttgactggagggctcccaccactaggagaaccttgcactgcagatacggtgtacagagcttgctttaaacaggtccagcagcaaaacgagaagtactataagaggtacccccaagatatacaggtcgttcatgaggttataagatacttaagtgaatctgaagggggaggggttcttcttccatctggtggccggttaacccctaagatgctgcagtgtcttggattatcaggtctaggttttggtggtggatttgaaaggctgcattatctgcttgagagggtgtgggatcctgtacttgtcgctggagctaaaaagaggataagctattacttcttaaaagagttcgaaatgtggctagattttgatcaaaatcctctttatgccctcttgcacgagtctatctactgtgagggctcttcatcaaaatggtctgctgaaaagattcatggcgaatatgggagtttgtttgaccctattaaagctacagaagaaggccgagctgtgtactttactggagagatggtgttcccttgcatgttcgatgacatccctgctctacgagacctaaaggaggctgcctgtttgttagctgagaaggaagactggcctccgctctatgatgtcagcgtgttgaacaacaataaggttccggtagcggctgcggtgtactacgaggacatgttcgttaacttcaacatcgccaaggagaccgcctcccagattgctgggatccggctctgggtgaccaacgagtacatgcactcgggcatccgcgacggcggctcgcacgtctttgagtatctcatggctcttctgaacggcaagaagcctttgttttagctgtttcagaagccctgctatctaggttcgagtgtcagttgagctgaacctactatgattgaaacgagcaaataatgaggtccgtttggtttcatgaacaaacgaataatgtttaccttgtagaaatttcacggataatgtataacgttttgaaatttggtccgcagctacatcatagaaatggaattggtctgctcgcaagacacgttccgagcagtactatgaaacaaatgtttgtgttcttcgtcgacatttgtgtccaaagtccaaacagatccagaagccagaggtgccattgtttcaaacaggcctggttcttttttttaaattaacaatacaaaatttactttacaaagttcccaataagcctaagcctcctttgtacctgccaagctcatgccgag

SEQ ID NO: 151997 - DNA, 2535 bp, Zea Mays
gggtcgccgtcggccaccgcaagcccatgtgtcctccctctcgccgacacgtcctccgcacgcggcccgccctataatccactgacaccaccaggcccaccgccagctaggcccacccgtcatctctgtgctgcagctccccacgaccccacctcgtgctactgcagcctgctccggtagtcgcggcgcacgcctcccgtccgccttgccgtttgaacactcgagctcgagagcaatttacggcaccatcgcatcgcgcactcgtgccaccccaccccccgattccttcgatcccctcgtggcggtggcgcgtcgtgcgggctctactggagctagatctcggaggagtggaagggagacagccagggagggaagggagaccgcggcgccgcgcatttcgtcgagcacgatgagggcgcggtgggctgtgacgcttctgctgctcgcggtcctagcgctcaccgcgtcggcggcgcggctggacctggacgacgacgacgactcgggcgtgctggacgagctcctggccatcgacgaggaggccgaacggggcgggctgctggacgcggagggcgccggggaggcggtgcggcgggcgcagtcgatggtgctggcgctcgacaatgacaacgcgcgccgcgccgtggaggaccacgcggagctgctgctgctcgggtacgcgccgtggtgtgagcgcagcgcgcagctcatgccgcggttcgccgaggccgccgccgcgctgcgcgccatgggcagcgccgtcgccttcgcgaagctcgacggggagcgctaccccaaggcggctgccgccgtcggggtcaagggcttccccaccgtgctcctcttcgtcaatggcaccgagcacgcctaccatggcctccacaccaaggacgccatagttacttgggtaagaaagaagactggcgtgccaatcattaggcttcagtctaaggattcagctgaggagttcctcaaaaaggacatgacctttgttattggtctattcaagaattttgagggagcagaccatgaagaatttgtgaaggcagcaaccacagacaacgaggtacagtttgtagaaaccagtgatacaagtgttgccaaagttctatttccaggtattacgtccgaggagaaatttgtgggcctcgttaaaagcgagccagagaagtttgaaaagttcgatgggaaatttgaagaaaaggaaattttgcggtttgtggagctcaacaagtttcctctaattactgtattcactgagctcaattctggtaaagtatattcaagccctattgagctacaggtcttcacctttgcagaggcttatgattttgaagatctggaatctatggttgaagaaatagccagagcattcaagacaaagataatgtttatatatgttgacactgctgaagaaaaccttgcaaaaccattcctcactctttatggccttgaatcagaaaaaaagcctactgttacagcatttgatacaagcaatggagccaagtatctgatggaggcagatatcaatgcaaacaacctgagggagttctgcttaagtcttctggatggcacgctcccgccataccacaaatcagaaccattgcctcaagagaagggacttattgaaaaggttgttggtcgtacatttgattcttctgtgctggaaagtcatcaaaacgtcttccttgaggttcatacaccttggtgtgttgactgtgaagcgataagtaaaaatgttgagaagctggcgaagcattttagtggttcggacaatcttaaatttgcgcgcatagatgcttctgtgaatgaacatcccaaattgaaggtgaataattacccgacgctattcctttatcttgctgaagacaaaagcaacccgatcaagctttcaaagaaatcgagtgtcaaggacatggccaaactgatcaaggagaagctgcaaataccagacgtggagacagtagcggcccctgacaacgtcaaggatgagctataacctgtagtagacaaactaaggtccagtgaaggaaaaattgcagcatgtttgcgtgttttgcgccaacctgatcacagagctcagctttattcgcgtgccgtgttaagtgactaaagacaatggtatatatataggtacctaaatcaaagaggcttcggaccctagcattagggatggcaatgggtacccgaaacccgaaacccgatgggtaaaaaccctattagggcacgggtatggcggattttgatacccatgggtattttattgggtcatttgttatgcccatcgggtatggtgggcgtgggtatgttctctgttgccccatacccgctacccgatgggtaacccgctaatatatgacacgtgggtccggatttatgtatctcatataaaatgaatgctatgttttgtccatagttttgtagaatcaatgctatgttttgtgtgatttgaaagcatgatattgccatttaatgtttaatactgttgaatctgtgataaaattatgttgggttcgatacatttgttatgctggt

SEQ ID NO: 151998 - DNA, 2423 bp, Zea Mays
gggtcgccgtcggccaccgcaagcccatgtgtcctccctctcgccgacacgtcctccgcacgcggcccgccctataatccactgacaccaccaggcccaccgccagctaggcccacccgtcatctctgtgctgcagctccccacgaccccacctcgtgctactgcagcctgctccggtagtcgcggcgcacgcctcccgtccgccttgccgtttgaacactcgagctcgagagcaatttacggcaccatcgcatcgcgcactcgtgccaccccaccccccgattccttcgatcccctcgtggcggtggcgcgtcgtgcgggctctactggagctagatctcggaggagtggaagggagacagccagggagggaagggagaccgcggcgccgcgcatttcgtcgagcacgatgagggcgcggtgggctgtgacgcttctgctgctcgcggtcctagcgctcaccgcgtcggcggcgcggctggacctggacgacgacgacgactcgggcgtgctggacgagctcctggccatcgacgaggaggccgaacggggcgggctgctggacgcggagggcgccggggaggcggtgcggcgggcgcagtcgatggtgctggcgctcgacaatgacaacgcgcgccgcgccgtggaggaccacgcggagctgctgctgctcgggtacgcgccgtggtgtgagcgcagcgcgcagctcatgccgcggttcgccgaggccgccgccgcgctgcgcgccatgggcagcgccgtcgccttcgcgaagctcgacggggagcgctaccccaaggcggctgccgccgtcggggtcaagggcttccccaccgtgctcctcttcgtcaatggcaccgagcacgcctaccatggcctccacaccaaggacgccatagttacttgggtaagaaagaagactggcgtgccaatcattaggcttcagtctaaggattcagctgaggagttcctcaaaaaggacatgacctttgttattggtctattcaagaattttgagggagcagaccatgaagaatttgtgaaggcagcaaccacagacaacgaggtacagtttgtagaaaccagtgatacaagtgttgccaaagttctatttccaggtattacgtccgaggagaaatttgtgggcctcgttaaaagcgagccagagaagtttgaaaagttcgatgggaaatttgaagaaaaggaaattttgcggtttgtggagctcaacaagtttcctctaattactgtattcactgagctcaattctggtaaagtatattcaagccctattgagctacaggtcttcacctttgcagaggcttatgattttgaagatctggaatctatggttgaagaaatagccagagcattcaagacaaagataatgtttatatatgttgacactgctgaagaaaaccttgcaaaaccattcctcactctttatggccttgaatcagaaaaaaagcctactgttacagcatttgatacaagcaatggagccaagtatctgatggaggcagatatcaatgcaaacaacctgagggagttctgcttaagtcttctggatggcacgctcccgccataccacaaatcagaaccattgcctcaagagaagggacttattgaaaaggttgttggtcgtacatttgattcttctgtgctggaaagtcatcaaaacgtcttccttgaggttcatacaccttggtgtgttgactgtgaagcgataagtaaaaatgttgagaagctggcgaagcattttagtggttcggacaatcttaaatttgcgcgcatagatgcttctgtgaatgaacatcccaaattgaaggtgaataattacccgacgctattcctttatcttgctgaagacaaaagcaacccgatcaagctttcaaagaaatcgagtgtcaaggacatggccaaactgatcaaggagaagctgcaaataccagacgtggagacagtagcggcccctgacaacgtcaaggatgagctataacctgtagtagacaaactaaggtccagtgaaggaaaaattgcagcatgtttgcgtgttttgcgccaacctgatcacagagctcagctttattcgcgtgccgtgttaagtgactaaagacaatggtatatatataggtacctaaatcaaagaggcttcggaccctagcattggtatcgattgagttattgacaagtattctgctgtaaaattcggagcattggacatgtatgtgtgagactatagcatgctttggggtcagtagactcgtcactaataactatactcaattcatcagtgatgtgttcggggaataccgtgtcaatataggcaccaagctatgctttgtctcaccacatcacacccgaagcaacaagcaagtgaagagggcgaatgtggaaattctcctgagccaagactagagcat

SEQ ID NO: 151999 - DNA, 1802 bp, Zea Mays
aatagtatcgtcagatcgagacatccccgtcgatcgaccggacgcacccggccgccatgatctcgtggcacgacctgtacacggtgctgtgcgcggtggtgccgctgtacgtggcgatgatcctggcgtacggctccgtgcagtggtggggcgtgctgacgccggaccagtgctccggcatcaaccgcttcgtcgccgtcttcgccgtgccgctcctctccttccactgcatctccgccagcaacccgtacgtgatgaacctccgcttcatcgccgccgacacgctgcagaaggtcctcgtcctcgccgcgctcgccgtctggtcgcacctcccgcccgcgcgcggctgcggcggcggcacgaagctgcgggagccgttcgactggtccatcacgctcttctccctgtccaccctgcccaacacgctcatcatggggataccgctcgtcgtggccatgtacgggcggtactcgggcgacctcctggtgcaggtggtggtgctccagtgcatcgtgtggtacacgctcctgctcgtcctctacgagttccgcgccgcgcgggtgctcatcgcggggcagtgcccggacggcgccgcggcgcgcatcgccgacgtgcgcgtggacccggacgtcgtgtccctgtgcggcagccaggcggaggcggaggccgaggtggcgccggacggccgggtgcgcctcgtcgtgcgtcggtccacgtcggcgtcgcggcggtcgctggcgacgccgcgcccgtccaacctggcgggcgtggagatctactcggtgagctcgtcgcgcaatgccacgcccagggggtccagcggcatcgcgcacgcggacgccatctgcgccgccgcgccgccgccgcacggcgcgtcgtcgctgcgcatgtcgagcttcggcgcggcggacctcttctccctgcacccgacgccgcggccgtccagcttcgaggagcaggcggtgcgggccaggtctgccgccgcggtggcgcccagcaacgaccccagggacgcgcacatgttcgagtggagctccggtgcgtccgcgacgtcggaggtgcgcggcttgccggtgttccacggcggcgacatccaccgcggcatggatccccgccggctcgtcccctccgaggcgcctccgagagcgatgcggccgggggagcgcgtcgttacggggtacccggcggacgccgggcaggacatcgttctggccaagctggaatccggctcgacggaggccgagcggaaggacgcctgcggaagagatggcggcgccggagagcagcaggcggcggcgccggccggcgtgatgatgcggctgatcgtgacgatggtatggcggcggctgatccgcaaccccaacacgtacgccagcgtcgtcggcctcacctggtctctcatctcgttccgattccacttcgcgatgccagccatagtgaagaactccatcacgatactctccgatgcagggctaggcatggccatgtttagcttagggctcttcatggccttgcagcccaagatcatcgcctgcgggaacaccgtcgcggccgtcaccatggcaatccgcttcttcctcggccccgccgtcatggccgccacgtccgccgccgtcggcctccgcggcacgctcctgcgcgtcgccgtcgttcaggctgctctgccgcaggggatcgtgcccttcgtgttcgccagagagtacagcctgcacgccaccattctttccaccggggtcatatttggcatgctaatcgctcttcccatcggcttggtctactacgttgttctgggactactgtga

SEQ ID NO: 152000 - DNA, 707 bp, Zea Mays
gttttgcctcgagaaagatgggagcgaacttgctccgaatttggacagcgcaaacagctgacgtgcgcagcgtttaggatctaggcacaggatacacgtatatgtacatgtgcatatgtacataagcatgtacacaacataacctttcacaagtgtttgatgaaacgagaatatatatatgcgtttgtatgtatatatgtgcggagatttcgagaagccaaagatgacatctttgcatacatatacatatataaaaacaaatcacctgttgttggcgtactcgtagaggcggccacgctggagaagacgacgagcgcgacctcggcgtcgcagagcaccgagagctcgtatgccttcttgagcaggccgttgcgacgcttgcagaaggtgacttgccggttcgtcatgttctcgatgcgcttgatctcgatcttgctgctcccctgcctgtcgccgccggagaccgtcactgccggctgccctcctttcgccttggacgacggcccgcagctcagatcggtctgaagaaagagcaggaacgagttaaaagctagagagcagaaccaacgaagcgactgcaagaaattccaatttccgaagatgggggacgaaggaactatagatcgagtaggagacgacgcagatgtacgatatgattttcatagctacagatcgattaggagaaggagtggaggcttcctggctgc

SEQ ID NO: 152001 - DNA, 1124 bp, Zea Mays
aagacagcagttgcactagtcatcgcatccaccataacatgaccatggctaccgcctcagcttcgctagctcttgtcatgctgttcgcctgcagccttctccttgcaggcacggcgttcagtgatgataccatagccatacccttgctggagcggttcaaagcctggcaggctgaatacaaccgcacctatgcgaccccagaggaattccagcaacgcttcatggtctacagcgagaacctccggttcatcaagaccatgaaccagctgtcgaccgggagctcgtatgagctcggtgagaaccaattcaccgacctcaccgaggaggagttcaaggacacatatcttatgaagctcgacgagcagccccctgcagctgaggccatgccaccgatcgtcggcaccatgagcacagcaggcatgtccaacggcgacaacaccggcgaggctcccaacagtgtggactggaggaccaagggagcagtgacgccggtcaagaaccagcaacaatgcggctcttgctgggcgtttgcaacggtggcgtccatcgaaggtgtgcaccagataaagacaggtcgtctggtgtccctgtcggagcaagagatcgtggactgcgaccgtggggggaacgaccacggctgccgtggcggttaccctagatccgccatggagtgggtcacccgcaacggcggcctgaccaccgagtcggactacccgtacgtgggcagccagagacaatgcatgagcggcaagcttggtcaccacgcggccaggatccgtggctaccaggcggtgcagcgcaaaaacgaggccgagctggagcgcgccgtggcgggacgcccggtcgccgtggtcatcgacgcgagcagggcctttcagttctacaagcgcggggtcttctcgggcccctgcaacaccaccaccgtcaaccacgccgtcacggtggtcgggtacggatcagccggcagcgacagcggcggcggccgcaagtactggatcgtcaagaactcgtggggtcagagatggggagagaatggctacgtgcggatggcgaggcgtgtcagggctcgggagggcatgtgcgccatcgccatagagcccctactacccagtgatgtgatctaa

SEQ ID NO: 152002 - DNA, 243 bp, Zea Mays
ttgtaataaaaaatataaaatttctgacaaatttaaattagaaaatcggataaaatgttctctttttattacgtatttgataatttacggattaaaatgaattaaaatagagtgactaaaaattagtccctaaacatccgtttagtctctaaatttctaaataccaaaactaaaactcgattttagtttctaaaatttataaactaaaatagaataaaatggaggcaataaaatagaataaaa

SEQ ID NO: 152003 - DNA, 586 bp, Zea Mays
atcgtttttgtatgcatgatttcttcagatgcgaggctggatacgaggctagggcggatgtggtggccaccacgagctgtaagaagctcgtcatggacatgcactatgaggcccaaatccaggccatcgtcacctaccatggctccgtccttggggagagggtgaccaaaactcaagcccgaaccatgtcgttgaccagggaccagtacctgcaggtaaagtcatgcatgtttggtaccagtactccatgcatgaattttattttatcttctgatatgcactttacgtgtttactttgtagatgattccacattggtgcaccgcacatcctctgcgctgggagcatatggtggataggtggtgttcggctgagtgggacaaggcgcacaccgctagccgggaacgacgtatgattatgcaaggtccctcccaccaccaaggcagccggagcctgggccaatatgtcgaagcatggtcggcgtcacatggtggccgccattgctccaccttctcggcctatgctatggcccataagggcaaggcgacgtccgacgtcacctacaacctggatgacgggcccgagacc

SEQ ID NO: 152004 - DNA, 1382 bp, Zea Mays
ggcggggctcgctttcgaccctggctggggccccacttggcagagacgcaaatcaaaccgctgcacaaaaggagatgctcccctacaccggccgatttgctaatttgtcgttattgccgcttcgaaaatttgcatgaaactcataaaatcacgcagaaaactatacaacgaattcagtgctaaaattccaattatttccctgcaggctgcatcggccaggtggccaagtctcgtcaagtcgtccccgctcccccatagtcgccaccgccggcccgcctgcccgcggcacgcaacccgccacgcccaagcagcggagggccaaaaatgcgctcgcagttgccgtagcgccatcgcgtcgtccatccgctggggagccacgcgatggaggaggacaagcgggcggaggaggcgcggcgcgccaaggaggccggcaacgacgcataccgcaagtccttcctcgagacggccgtcgagcactacacccgcggcgcgctcctcgacccccgagatatctccttcctcactaaccgcgccgccgcctacttccacatgggcaagtataaggagtgcgtgagggactgcgagggggcggtggagcgtggcagggacctcagcgccgccaacaagctgatcgcgaaggcgctgttgcggaaggcgtcggcgctgctcgagctcgcgacatgctccggggattacgcaccggcgatcagggccctgcagcaatcgctcaccgagcattacagcgaggagacgcacgagaagctcaacaaggcggtggtagttaagaaggagcttgaggagcaggagcgattggatcaggagacggccgaccaacaccgcgagagaggcaacgaattgttcaagcagaagcagtaccatgaagcagcaacgcactacacacgagctatgaaaatgaacccaaaggatccaagagcatttagcaacagagctcaatgccacatctatctgggagctttccctcaaggtcttgaggatgcagagaaatgtgttgaactggatccaacttttataaagggctacgtgcgtaaagctaaagttcagttcctgatggaaaattatgaaaatgctatggcaacttacctagagggtttgacgtacgacccaaataatctggaggttcttgatggcttaagaagcttatgtctaaatgatgcacaaatgggaaatttccaatcagaaaataaccttcttaaatttcgaaaagcaacagaacaagctgcaatactcaagaaggaagcttctgatgagcgtttgaagcgtattgaatctgaacgaatgtagtgctagtgctgtatatggctggtgggtggatttagtaatctgatatatttagtgcaatgatatgtagctatcctgcaata

SEQ ID NO: 152005 - DNA, 874 bp, Zea Mays
ggaaggcctcctgatggcataaagaagattgtggaggatgccatggagaaaggcgacctgaactcagtagttgataccttggcaggagactggcctgctttgcacgtccagcagttagcactccttgctcttagttgcacagagatgagccggaggcaccgtcctgatctttcagccgtggtgtgggcagtggatgaggcgatgaaggatgctacaacagtaccttcagcctcatcttctagaccagtgtcggatgaaaataacacaccgtcatatttcatttgccctatatctcaggatgtcatgagcgatccacgtatcgcagctgacgggttcacctacgaagccgaggccatcaggagctggcttgacagtggccacgacacgtctccaatgaccaacatgccactagaacacgacgagctcgttcccaatcgcgcgcttcgttctgccatccaggaatggctccagcggcagaaaacggccttgtagcttgttgttgttcctgttggattgctgcgtgattgattgtccaccaccacaaccacgagacggtgttgcttctccaccagaccaccactacgcacggtcatctactgctgcacgctcggagttcaaggttgtttgctgtgaggattctggagaggcaccctcgccttgtaactctgtttgagcatggtctgatgagtaatctttacttgtctaacgagttcgtacctaaacggaagcctcgaagatgtccttgtgtgtgtgtgtgcagaaaagaggcggaaaattcccaacggagttattgcagaaacttgggtgctgtttggtttatatgtttgtaatgtaacaggtaacaaataacgttaaatcatgtttgtttaagtcc

SEQ ID NO: 152006 - DNA, 2067 bp, Zea Mays
atggagcagttccccgacggggcgcacgtgcggctgcggagccgcgtgcacgcagggtacctccacgccgacgaggacggggtgggggtgtccctgcgccgctggcgccgcaggtcgatgaacgtggcgtggaaggtgcaccgcatcctgcacgacggctccaccagcgtcctcctccacagcgccgcctatggccggtacctcgcggcgtcccacgacccggcgccgccgggccacctcggcctccgcgtcgacctgggcgactacgaccaggacgtggaccccatcctgtggaaggccgtcggctccggggacgccggctacgtcctcctgcgccacgtctccaaccgcctcctccgcgccaacggaaggtaccgcctctggcaccgtggcgtctccgtcgacgacgtcgacaaccagagcacgatgatgcattggaaggtcgagaccatccccaccagccccaggccgccagcacttccagcgccgactcggaggaaccgaggcagcttccgcggcctgttcctcctgcacgaggagcccgtggtgctgcagcggacggtacggttcgtgcgggcggacaactacggcaacttcccggacaactggggcacgctccagttccagggccgctccgtctttgagctgagagcggagatggcgcgtcgcttaaactatgcgctcttcttcttccgcctcctgatgtgcgtccggggcggccgctacgggcgcctgaccccgctactcatcgacctgcctcgcaacgaggagaccctggacatcatcgtcctcttcatcgggacacaaggacctgaaaattgcatcacttgtgtgctgattgctgaagctctccacatgattttgttaactgacagccccatgaggccgcatgtggacatgtctactcggaccactgcgtttaccattacctacacggctacaccgtcgcctaatttgccaacgcccgccgccgttccgatggaaaccgccgcgccggcgcgcgtccaagccctcgctgaggccggcgtgtcccgcctcccggcgcagtacatccagccgcctgagcaccgaccaaccccctcgccttctcctattgccgcggcgctctccgtgccggtcgtcgacctctcaacctccaccgccgacgacgccgtccgcgccgcgtgcgcggactggggcgcctttcacgtggtcggccacggcgtgccggtggatctcctcgacgcggtgcgcgcggcagggctcgccttcttccgcgcgcccatggaggacaaactccggttcgcctgcgacccggccaggggcgccgcctcggaagggtacggcagccgcatgctcgccaacgacgactccgtgctcgactggcgcgactactttgaccaccacacgctcccggagtcccgctgtgatcccgcccgctggcccgacttcgtccccggttacagcatgttacttttgcctataacacgggagataacaccatgtaccttttacagagatactattgcaaaatacagcaacagcatgaaggatcttgctcaaaaattgttgtgcatcatctcagaaaatctgagcctaccaccatcttatatacaagaggcggttggagaagttttccagaacattactattagctactattctccgtgtccacaacctgatcttgctcttggattacaatctcattctgatatgggcgcaataacacttctgatacaagatgatgttggtgggcttgaagtattaaaggatggaatgtggatacctgtgcctgctttgcgtgatggcatccttgtgattctcgctgatcagacagagatcatcaccaatggaagatacaagagttcagttcatcgagctgttgtcaatgctgagcatgcccgcttatcagtagcaacattttatgatccatcaaaatcaaggaaaatatgcactgccccgcagcttgtgagtgagaatgaaccacaaaagtatcgggatgtaatttatggtgactatgtctcatcttggtatagcaaaggtccagagggcaagcgaaacatcgacgccctcctgattcagcactag

SEQ ID NO: 152007 - DNA, 485 bp, Zea Mays
ctcgtcggccaccaggacggcatctccacgcgccgagttcctcccatggctatcccaaaccctagccgagatcccctcctgtgttggccactgtctccttcaccaggcgtcctcccctatccacgtgctggcagcacatggcgagctcacccccctgtgccagacgagttcatcacttcctttagagcaacaccttcatccatggtgcccagctgctccttggagtctactgtggtgatctctaaatccctttgttgttttactagttcttgttcatataggttcttgttaataccctgctgatgtgatgttctctgtgtgtttatgtgtgcgatatggagtaaaattcctggagaattaggtggagaagaaggttaagttcaacgctctttaggtgttcgatgatacgctcgaactggtggccgtcttcgttcttgctgaaatcgagtcgaagcatgatgtggtgagccaagccgtttctccga

SEQ ID NO: 152008 - DNA, 852 bp, Zea Mays
gcgcgaggaaacagagcgcgcgcagggcgacgggcaccgcggcacgtcagggagccggacgcggcacacaaggagatccacggctggaaaaacgccggccagcagagaagtagaggtgagggcgcaccatggacagagaaggcagtgcgcacccacggaacgagcagaggcgagcgtgtagcgtccgatgggtgagcgactggagcagggtgcggctgaggaatgggcagaggccaagctggggcaccgcagcgccggagaggacgcgcagaaagaatccacggcgagggagctcggaggaaaccgcggcgcgtgcgcagggacgagcagggcatagagagcaggacgccgagcgctagtcaccggagcagggagctgggcgaactccatgggcgagcaggagtcgagctcgcaggggaagaggctaggggaagccgagcggtcgagctgagctacggcggacatggcgacaagcgaacagaggggaggggcgctggggaagagagcggcgttgggggccgggcggccgagctcggctgggagttggggctgggcgctggagaagtggagaggctgggcgcgcaggaagccgaagcttgcagggaatccggcgctgggagcttcgagcagaggatccacatccgaccaggcgccggggagaagaggagcagaggctgggcgaggcaccagggagaggcgaccgcgccatgggggctcggtagggagcagggcagaggcactcgactaagagcagaagatagacaccgcgatgggatttttattcagggtggccgagcggatgggaacgaggcaacggcggtgagaaaaatcttgagcagagcggcggcgggg

SEQ ID NO: 152009 - DNA, 1128 bp, Zea Mays
atggggtttatgtgttttcaactagattcgacatacttgtcagcccgccactcccagcctctcctccctgtcgctcacccctgccctagccatgaatgccgtcaggccgcccggtctccagcccgtcctcgccaccaaccacgctcgctcggatccgcgactctctggtaccagccggccattcctgtgctcagcgtccagccccagctcgcccagccctcacccccatggtgccatggacgcagccctgcccttttgctgctcgccgtggacaggctcgacgccctctccgcacttgacgccagcggcaacgtcttggtagtggtcgagcagcatgttgtcgactccgtaaatttttgggcagcccagttgcagtgtcgtcaaaccccggtgaacctcgctgtccctgcatgccctgtgtttgatgttgtccttgtcggagatcattgccaattgggtcctgtcatcatgtgcaaaaaagcagcccatgcagaattagcacaatctctctttgaacgccttgttatccttggagtgaagccattcaggctacaggtccagtatagaatgcatccatgcctctcagagtttccatccaactgcttttatgaaggcacactgcaaaatggagtgactgttaatgagaggcaatcgtctggaattgattttccttggcttgttccaaatcgcccaatgttcttctatgtgcagatgggacaagaagaaatcagtgctagtgggacatcgtatctcaatagaactgaagctgcaaatgttgaaaaaattgtaacaacttttttaagaagtggtgttgtaccaagccagatcggagttatcacaccttatgaagggcaaagggcatacattgtaaattacatgtcaaggaatggctctcttcgccaacaactttacaaggaaatcaaggtcgctagtgtagactcatttcagggtagagagaaagactacattattctatcttgtgttagaagcaatgagcaccaggagggaggccctagaggtagtaagtcatttgtttactccatgatgacaatagcaagcagatcgtggtggtgcctatggatgctacaacaagaaagatcaaaagttcttttggatggatgcagctag

SEQ ID NO: 152010 - DNA, 2641 bp, Zea Mays
ccacatggccgacgtgattgatatggatgttttcacgaaacctgaccagtagccgtcctcgtcttccacgttgtgtttctcgcccacctatctatatttatcataaaaaacagccaaatcgagcgaggcgacgagggcgagtagtagttggcgagttggagcaggtctgggtctggccgtgtgagttatttcccagccaggcatctgagagctttggtcttgacctcgacagagatcgccatggacgcatcggcggaggtggaccacctcgccgccgagaggtcggccgcgcgcttcgatgtcgaggcgatgaaggttgcatgggctggctcgcgacacgccgtcgaagtcggcgaccgcatggcccgactcgtcgcgtccgaccctgtcttccgcaaggataacaggaccatgctctccaggaaggacttgtttaaggacactctaagaaaggcagcccatgcatggaagcgtattgtggaactacgtctcacagaggaggaagcaggtatgctgaggctatacgtcgatcagcctggttatgttgatctgcattggggcatgtttgttcctgctataaaaggtcaaggtactgaggagcagcagaaaaagtggttaccaatggcttacaagttccaaataattgggtgctatgctcagactgaactcggtcatggctcaaacgttcagggccttgaaacaactgccacatttgatccaaagactgatgagtttgtcatccacagtccaactctgacctccagcaaatggtggcctggtggcttggggaaagcttccactcatgcagtggtgtatgctcggctgataactgaaggaaaggactatggtatacatggtttcattgtgcaactgcgaagcttagaggatcactcccctcttcctggtattactctgggtgatattggtggaaaatttggcagtggtgcatataacagtatggacaatggtgttctgcgatttgaccatgtgcgcataccaagggatcaaatgttgatgaggctttcacaagttacaagggaggggaaatatgttcattcagatgtcccaaagcagctgctttatgggacaatggtttttgttcgccagacaatagtcgcagatgcttctaaggctttgtcccgtgctgtttgcattgctgtacgatacagcgccatccgaaagcagtttggctctcaagatggtggccctgagactaaggtccttgattacaagactcaacaaagcagactctttccgttgctggcttcagcatatgcatttagatttgtgggtgactggctgaagtggctatacatggatgtcactcagaaactggaagctaaagactactcaacactgcaagaagcccatgcctgtactgctggtttgaaggctgtgacaacatctgcaacagctgatgccattgaagaatgtagaaagctctgtggcggacatggttacctgaacagcagtgggcttcctgaattgtttgctgtctatgttcctgcttgcacttatgaaggagacaatattgttctgcttttgcaggttgcaaggattctaatgaagaccttatctcaattgacatctggaaaacaacctgttggtacaatggcttacatgggcaatgtacaatatctgatgcaatgcaaatgtgctgttaacacagctgaagattggcttaaccctgttgccatacaagaggcgtttgaagccagggctctcaggatggcagtaaactgtgcccagaacataggccaagcagcaaaccaagaagaaggtttctatgagcggtcccctgatttgctagaggctgcagtagctcacatccagttggtcattgtaaccaagttcatttcgaaggtgcagcaggacattcctggacctggagtgaaggaacagctccagaacctttgcaatgtctatgccctctacattctccacaagcacctgggcgacttcctggcaaccgggtgcatcacacccaagcagggagcgctggcaaacgagcagctgggcaagctttacgcacaggtgcgtccaaatgctgttgcgctggttgatgccttcaactacacagaccactacctggggtctgtgctggggcggtacgatgggaatgtgtacccagcgctgtacgaggaggcgtggaaggaccctctgaacgagacggtggtgcccgaggggtaccacgagtacctccgccccttgctcaagcagcagctcaagctctccaggctctagtctgatcggctaccccccctggaattctccatggcggctgccttctcagaaaatctcacgcgacctccgaatgaaagtgatgtaagctactaacgattcttgttagagccaggaaagaggctctccagccaattataaatttattcctcaagctctgaggatcaagttcaagctgtggattatataggaagcacgtttaataattaataaagagggagaggatgagcatctctctgttgctgctcaagtgttgtgcgcagtgcgagtagtagaatgaatatgtatgtacgagtgcgtgtattgtatggtgaattgaagttccatttgtttgctaaaagtatatcagaaaacaatggcttgatttgcctaagtccaaaatgaaagccagattccgaac

SEQ ID NO: 152011 - DNA, 108 bp, Zea Mays
attatctgctgcttccatcgagtacaagttcgaccggaattgcatgttgtttttttctcacccaagggcaacgtctccgaggcaactccatgaccttttgtttagttc

SEQ ID NO: 152012 - DNA, 264 bp, Zea Mays
agaagccaaaaccaagcatacttggatctacttgcttggcttcagcaggtcgcattcttcgatcttggcaaatctccctcgcactcttggctggctgtctgccagagccttcctgcactctaccttgatcttcctgccaaagttccgcttgatcttcttcttcctatacctggaaagcttttgcttcctttcttcggtcttgaggtcactgatggtcacacaaacatttgctgctggtcgaggcgtgttggctccaaggttctg

SEQ ID NO: 152013 - DNA, 2526 bp, Zea Mays
gtgctctaatcaaaaatcaaacaaaccagaagctcctcctcgcctcccatcacttcctacgccacccgcgaagcgcgcccgaggcggcaccccaccgtcgtagtagaagacacgggacgcacccccgcagcctcgctcgctcgctcccctcacttcctccccgcgcgatccacggcccccgccccccgcgctcctgtctgctctccctctccgcaatggcgacgccctcggccgtgggcgccgcgtgcctcctcctcgcgcgggccgcctggccggccgccgtcggcgaccgggcgcgcccgcggcggctccagcgcgtgctgcgccgccggtgcgtcgcggagctgagcagggagggccccgcgccgcgcccgctgccacccgcgctgctggcgcccccgctcgtgcccggcttcctcgcgccgccggccgagcccacgggtgagccggcatcgacgccgccgcccgtgcccgacgccggcctgggggtcctcggtctcgaacctgaagggattgctgaaggttccatcgataacacagtagttgtggcaagtgagcaagattctgagattgtggttggaaaggagcaagctcgagctaaagtaacacaaaacattgtctttgtaactggcgaagcttctccttatgcaaagtctgggggtctaggagatgtttgtggttcattgccagttgctcttgctgctcgtggtcaccgtgtgatggttgtaatgcccagatatttaaatggtacctccgataagaattatgcaaatgcattttacacagaaaaacacattcggattccatgctttggcggtgaacatgaagttaccttcttccatgagtatagagattcagttgactgggtgtttgttgatcatccctcatatcacagacctggaaatttatatggagataagtttggtgcttttggtgataatcagttcagatacacactcctttgctatgctgcatgtgaggctcctttggtccttgaattgggaggatatatttatggacagaattgcatgtttgttgtcaatgattggcatgccagtctagtgccagtccttcttgctgcaaaatatagaccatatggtgtttataaagactcccgcagcattcttgtaatacataatttagcacatcagggtgtagagcctgcaagcacatatcctgaccttgggttgccacctgaatggtatggagctctggagtgggtattccctgaatgggcgaggaggcatgcccttgacaagggtgaggcagttaattttttgaaaggtgcagttgtgacagcagatcgaatcgtgactgtcagtaagggttattcatgggaggtcacaactgctgaaggtggacagggcctcaatgagctcttaagctccagaaagagtgtattaaacggaattgtaaatggaattgacattaatgattggaaccctgccacagacaaatgtatcccctgtcattattctgttgatgacctctctggaaaggccaaatgtaaaggtgcattgcagaaggagctgggtttacctataaggcctgatgttcctctgattggctttattggaagattggattatcagaaaggcattgatctcattcaacttatcataccagatctcatgcgggaagatgttcaatttgtcatgcttggatctggtgacccagagcttgaagattggatgagatctacagagtcgatcttcaaggataaatttcgtggatgggttggatttagtgttccagtttcccaccgaataactgccggctgcgatatattgttaatgccatccagattcgaaccttgtggtctcaatcagctatatgctatgcagtatggcacagttcctgttgtccatgcaactgggggccttagagataccgtggagaacttcaaccctttcggtgagaatggagagcagggtacagggtgggcattcgcacccctaaccacagaaaacatgttgtggacattgcgaactgcaatatctacatacagggaacacaagtcctcctgggaagggctaatgaagcgaggcatgtcaaaagacttcacgtgggaccatgccgctgaacaatacgaacaaatcttccagtgggccttcatcgatcgaccctatgtcatgtaaaaaaggaccaaagtggtggttccttgaagatcatcagttcatcatcctatagtaagctgaatgatgaaagaaaacccctgtacattacatggaaggcagaccggctattggctccattgctccaatgtctgctttggctgccttgcctcgatggaccggatgcagtgaggaatccagccgaacgacagttttgaaggataggaaggggagctggaagcagtcacgcaggcagcctcgccgtgattcatatggaacaagctggagtcagtttctgctgtgccactcactgtttaccttaagattattacctgtgttgttgtcctttgctcgttagggctgataacataatgactcattagaaaatcatgcctcgtttttattaactgaa

SEQ ID NO: 152014 - DNA, 769 bp, Zea Mays
atagggagtttatgcacaggtggtttcaggatcagttcgttcactgtttaccagattgcagtgatattttttacacagtaacagtaaaactaaaccgctattctactgtattatatggggcagaacatttcacaattgaatgttgacccttcttttgcagacattgcgaactgcaatatctacatacagggaacacaagtcctcctgggaagggctaatgaagcgaggcatgtcaaaagacttcacgtgggaccatgccgctgaacaatacgaacaaatcttccagtgggccttcatcgatcgaccctatgtcatgtaaaaaaggaccaaagtggtggttccttgaagatcatcagttcatcatcctatagtaagctgaatgatgaaagaaaacccctgtacattacatggaaggcagaccggctattggctccattgctccaatgtctgctttggctgccttgcctcgatggaccggatgcagtgaggaatccagccgaacgacagttttgaaggataggaaggggagctggaagcagtcacgcaggcagcctcgccgtgattcatatggaacaagctggagtcagtttctgctgtgccactcactgtttaccttaagattattacctgtgttgttgtcctttgctcgttagggctgataacataatgactcattagaaaatcatgcctcgtttttattaactgaagtggacacttcgcattcttgcccgtttaccagagatggccactgctgatggtgcattttgac

SEQ ID NO: 152015 - DNA, 1093 bp, Zea Mays
atgcccacgagctgtattttagccttaggtggtgctttggctaacattgtagagttccagaaaattgcagaggtggtaggtgattggtacttcgaaagaggagctgccgtggagattgattgcgcctatccctgtgattcaacttgttgcaaccttataccaattgataaggtttgcttggaaatgctgagctttgctaattactctggagacgctgatagcaaaattgttcgagaagtttgggctagactccttgatcaggcacttactaaagggggtgttgcagaagcttgttctgttgtgaaaagagtaggctcgaaacttgatcctgcagatggagcttgtttacctttagatattatatgccttcaccttgagaaggctgcagtggatagattaagttcaggagaagaattagttggtgatgatgatgttgcaagagctcttcttggtgcctgtaaaggtcttcctggacctgtacttgttgtgtatgatcacctgttatcgaacggtgcaatcataccctcactaaatctgaagttgcgcctgctgcgatcagttctagcaatcctccgtgagtgggggatatctgtcattgcacacaggctaggcaccacaagtgctggggcttcattctttcttgatggaacattctcattgaaccaaacaggggactatttcatacaaatgtatttttatcaattatttgaacgttgttaatttcttaaaaaaccattgcattattccactacttggctgttaaattcttaaaaaaatcattgcattattccactacttgacctgcttttattttgttacgtgaaccatgctaccacttcatacatcaccagaccattctcttacattgtattgcaacttcaggtacatgactgaggtgaggcgattaaaccttccatagaaccaaacggagaatgtctaccgtggtttccatgaacttgaggagaaattactatcttcttattaggcaatttgtagtcattactgcatgagctgcttgcccataggagcccaatgccaatgtgcagcttccagactgaactctacattttttcttgcaaactcatgaaaccat

SEQ ID NO: 152016 - DNA, 514 bp, Zea Mays
ttgttgaatgttgcatttgttttctaggagagaaatgataggctattttacaaactcttgattgacaatgtcgaagaactgcttcctgttgtgtatgaaccaacagtgggggaagcttgccagaagtatgggtcgatcttcagacgactacaaggtttatacatctgcctcaaggagaaggtaagaatcttggaggtaccgaggaactggacaaagaagagtattcatgttattgtggtcactaatggtgagcacattttaggcctgggatatctaggttgtcagggcatgggaattccttgggaaagcttgcactgtatactgctattggaggtgtacaaccatccgttgtgggtacttaatatgcgatgtcagtgggttcaggagaggcacgctagcatcggagaagccaccgccggcagtggtcgtggagaaagtgggcaacgaaggtggaggagagggcgagggtctctatgatgcgatcgtgatcgcttcgaccaccgtccaacattag

SEQ ID NO: 152017 - DNA, 886 bp, Zea Mays
gatgcggagtatgtagcagcagatacaacaaagggcggcgagcgagctgccagatggtggtctgccattcgctaccattcagcgcccacggatcacgatccgcgtgaggcctgcaaaatcaataggaaccctccattcccacgcgatccgacggcgactgttccacctccctccccgcccgccgcaaaaaaattttccacgctccgagcgccaaatccgcaccccccgcctcctattaataccgcctcttctcgagagaaatcctccaacgcggcacagagcctcattcatctccattcgaaacaccctcgcacccacactctcccttcgtccccagcctaaatccccgcaacgatggctcgcacgaagcagacggcgcgcaagtccacgggcggcaaggccccgaggaagcagctggcgaccaaggcggcgcgcaagtcggcccctgcgaccggcggcgtgaagaagccgcaccgcttccgcccgggcaccgtggcgctgcgcgagatccgcaagtaccagaagagcacggagctgctcatccgcaagctgcccttccagcgcctggtccgcgagatcgcgcaggacttcaagaccgacctccgcttccagtcctccgccgtcgccgcgctgcaggaggccgccgaggcttacctcgtcggcctgttcgaggacaccaacctctgcgccatccacgccaagcgcgtcaccatcatgcccaaggacatccagctcgcccgccgcatccgcggggagcgcgcctaggcggccggccggccggataggccgtggcgcagtctcttctcggaagtttgtactagtggtcgggtcgtgtggagggagtgtttgtgttcaaaatctccatgtttgcagaagcactactgag

SEQ ID NO: 152018 - DNA, 860 bp, Zea Mays
ctccctccccgcccgccgcaaaaaaattttccacgctccgagcgccaaatccgcaccccccgcctcctattaataccgcctcttctcgagagaaatcctccaacgcggcacagagcctcattcatctccattcgaaacaccctcgcacccacactctcccttcgtccccagcctaaatccccgcaacgatggctcgcacgaagcagacggcgcgcaagtccacgggcggcaaggccccgaggaagcagctggcgaccaaggcggcgcgcaagtcggcccctgcgaccggcggcgtgaagaagccgcaccgcttccgcccgggcaccgtggcgctgcgcgagatccgcaagtaccagaagagcacggagctgctcatccgcaagctgcccttccagcgcctggtccgcgagatcgcgcaggacttcaagaccgacctccgcttccagtcctccgccgtcgccgcgctgcaggaggccgccgaggcttacctcgtcggcctgttcgaggacaccaacctctgcgccatccacgccaagcgcgtcaccatcatgcccaaggacatccagctcgcccgccgcatccgcggggagcgcgcctaggcggccggccggccggataggccgtggcgcagtctcttctcggaagtttgtactagtggtcgggtcgtgtggagggagtggtgtactaatcagcaatgtctcaaaccatgtcaacctctttgttgtcatcaatggaaatcgctacttatgtgtgctaatcttcgtgctgcgtttgtttcgtagtaacactattcgatggattcgtacctgtgaacagtcgatttatatcgtcaccagatgcgaaattggcagtttgtgttc

SEQ ID NO: 152019 - DNA, 5194 bp, Zea Mays
cgacgtgagcaatgacggatgcggcgtccgcatccgcacgcgcctttagctactagctctagctctagctctccggagaggcgtctgcagaccaaccgcagccagccagcagactgttagacgacggccacgcggagccgagcgttgccgcgctttgcttgatgggataaacgccgcgcgctgggaagaagggcctggagttgaagcacgaatcatcgaagcgcagcaaaactgagacacacgtcttacttcttcacaagttcttggacgatggacatcttcgggagcccattctgctccaagcaagccgtcgcctcatgcggcggatggacggacatactcgactcctccagctgcacgaaccatatcctggaaaccggcaccgccgctctgatcaccgtcgctctcgcgctgcacctcctcgtcgtcaggattactacgaagaccagagcgtccgcacgccgcccccctgtcgcgcccggcctgccgctgcagctggccggcgcggcgttcaccgcctgcttgggcctcgtctacctcggcctcgcgtcgtggatgctggggagcaacttcactcagcacgcttccgcttacctcccacactggtgggtgacggcactgtcccagggactctgcttggtcctcgccggcttcgctctcagcggcgtcggaggagcacgtctcctcgggccaatgtctgcgcgcgcgtggtcggctctgctggccgcgtacgccgcgttcgtcgcttgttcctcggtcgttcacatggttgcggatagggcactgaccatgaagggttttctggacgctctgttcctgccaggtgcactgctgcttgtctgtggcgcttggtgcgtcaaggaagaggacggtgatggcggaactggaactgctgcttctttgtataagcccttgaagactgacgacactgttgatgatgagaggggtgggtctgagagccatgtgaccccgttcgctaaagccggggttttcagcgtgatgtcgttctggtggatgaacccgatgatgaagacgggctacgagaagccgctcgaggagaaagacatgccgctcttgggtccctcggaccgagcgtacagccagtacctggtgttcctggagaagctcaacaggaagaagcagctgcgggcacacggcaacccgtcgatgttttggaccatcgtttcttgccagaaaactgggatcttggtctcgggtctctttgcactgctcaaggttctcacgctgtcttcgggcccggtgcttctgaaagcattcatcaacgtctcgctcgggaaagggtccttcaagtacgaaggctacgtgttggccgtagcgatgttcctctgcaaatgctgcgaatctctgtcgcagaggcagtggtacttccgcacgcggaggctagggctccaggtgcggtcgttcctgtcggccgccgtctacaagaagcatcagaggctgtccaactcggcgaagctgaagcactcttccggcgagatcatgaactacgtcaccgtcgacgcctaccggatcggcgagttcccgtactggttccaccagacgtggacgacgagcgtccagctctgcatcgctctagcgatcctgtacgacgcggtcggcctcgccacggtcgcggcgctggccgtcatcatcgccaccgtggtctgcaacgcgccgctggccaagctgcagcacaagttccagagcaggcttatggaggcgcaggacgtgaggttgaaggcgatgtcggagtccttggttcacatgaaggtcctgaagctttacgcgtgggagacccacttcaagaaggtcatcgaggggctgagggaggtcgagatcaaatggctgtcggcgttccagcttaggaaagcgtacaacagcttcctgttctggacgtcgcctatcttggtctcggctgcgaccttcctggcatgctatcttctgaagatccctcttgatgccagcaacgtcttcacttttgtggccaccctgcgcctcgttcaggatccgattcggcagataccagacgtgatcggagttgtgattcaggcgaaagttgccttcaccaggataaccaagttccttgacgcgcctgagctgagtggacaggtcaggaagaaaagctgtctgggggatgagtatccgatagtgatgaattgctgcagtttctcgtgggacgagaacccgtcgaaaccagctctaaagaatgtaaatctggtggtcaaaactggacagaaggttgcaatatgcggcgaggtaggatcaggaaagtctacactgctggctgcagttcttggagaggttccgaaaactgaaggcacgatccaagtttgcgggaaaacagcatatgtttctcagaacgcatggatccaaacaggaaccgtgcaggacaacattctctttgggtcttcgatggacaggcaaaggtaccaggaaacactcgagcggtgttctttagtgaaggatcttgagatgttgccgtatggagaccgtactcagatcggcgagcggggcataaatcttagcggcggtcagaagcagcgtgttcagcttgctcgtgcattgtaccagaatgcagacatctatctccttgatgaccctttcagcgctgttgatgcccacacagcaacgagtctgtttaatggatatgtcatgggagctctgtcagacaagactgttcttttggtgacccaccaagttgattttctgcctgtattcgattctattctgttaatgtcagatggtcaaattattcgttctgcatcttatcatgatctattggcatattgtcaagaatttcagaaccttgtaaatgcccataaagacactattggtgtttcagatcttaacagggtgcctccccatagagaaaatgaaatattgatcaaggagacaattgatgttcatggaagcagatacaaagagtctttgaagccatcaccaacagatcaactgattaagacagaagaaagagaaatgggtgatactggtctcaagccttatattctctacctgcgtcagaataaaggcttcttctatgcttctctgggtattatttcccatatagttttcgtatgtggccaaatatcacagaattcatggatggctactaatgtcgagaatcctgatgttagtactcttaagttgacttctgtgtacattgcaattggaatcttctcggtgttcttcttgctatttagatcattagcagttgttgttcttggggtcaagacatcaagatccttattttctcagttactaaactcattattccgtgcaccaatgtccttttatgattctacccctcttggaagaatacttagccgggtttcttcagatctgagtattgttgaccttgatattccgtttggcttcatgtttagcattggtgctggcataaatgcatatagcaatctaggagtattggctgttgttacatggcaagttctgttcgtctctgtgccaatgattgttttggcaatcaggttgcagaggtattatttagcctcatctaaggaattgatgaggatcaatggcactaccaaatctgctctcgctaatcacttgggcgagtcgattgcaggggctataacaataagggcttttcaggaagaagatcgtttctttgagaaaaacttggaacttgttgacaagaatgctggtccatatttctataattttgcagcaactgaatggctcattcaacgtttggagaccatgagtgctgcagttctttctttttctgcccttatcatggctcttcttcctcaaggaacttttaaccctggctttgtaggaatggcattatcttatggtctatccctgaatatatcctttgttttctctatccaaaaccaatgccagctagctagtcaaatcatctctgtggaaagggttcatcagtacatggacataccaagtgaagcagcagagattattgaagaaaatcgaccagcaccagactggccccaagttggcagggtggaccttaaagatttgaagattagatacagacaagatgctcctcttgtattacatggaatcacctgcagtttccacggtggagataagatcggtatagttgggcgaacaggaagtggaaagacaactttaattggtgcactgtttcgtcttgttgagccaactggagggaaaataattatagactctatagacatcaccacaataggcttacatgacctgcgttcacgtttgggtatcattccgcaagatccgacactctttcaaggaaccataagatataatctagaccctcttgggcaattctctgatcaacaaatatgggaggttctaggcaaatgtcagcttcttgaagctgtccaggagaaggagcagggattggactcacttgttgtggaagatggttcgaactggagcatgggtcaaaggcagctcttttgtttgggacgtgcacttctaagaagatgccgtatcttagttcttgatgaggccacggcatctatagacaacgctactgatgctatccttcagaagacgatcaggacagagtttagagattgcactgtcatcactgtcgcacaccgtatacccaccgttatggactgcgatatggtacttgcaatgagtgacgggaaagtagtggagtacgacaagcctacaaagctcgtggaaaccgaaggatctctcttccgtgatcttgtcaaggagtactggtcatacacatcgaattgaaatatctaggagaaactgtgacaatcacatgttcactcgttgcagtctcttaaaaaagagataacaggagcctgttctcacacacatccgatgaactattctatctcaagtccgaagtagaggtgtcaggcattgtcgggaagtgctttttgttaactagttgaacagggggaaacctgtcgtcccttaaaaaaaaggaaacctccagcgtttttttgctccgatattgagcgaataaaccgaaatatctagtggaaggcgcatcaagtatgcatccttgatactgcatgttcacagaaatgcttgtgcggcaggctgttccaaggctttaaactttatggtgctttacattcctaataaaccgaattgtgtatatgatgtttgggaaaatggtgatttttcaggtttcagctccctctcttgctcacgtttaatgtattatcagtgtaaattcatccgtgattggatttaaggcaaccaa

SEQ ID NO: 152020 - DNA, 153 bp, Zea Mays
atgatcagtctgattgcggcgttagcggtagatcgcgttatcggcatggaaaacgccatgccgtggaacctgcctgccgatctcgcctggtttaaacgcaacaccttaaataaacccgtgattatgggccgccatacctgggaatcaatgggt

SEQ ID NO: 152021 - DNA, 795 bp, Zea Mays
atggggaaggcaaagagcaagggccctaaattcgcggcggtgaagaagattatcaccaagaaaaccatcaataagtacaaggaggatgtgctgaaccacaagaagaaggacgcggacaaggagaaactcggccggaatgtgccgcaggtttcgtcggcgttgttcttcagctacaacacagcattggggccgccgtatcgggtgattgtggataccaacttcatcaatttctcgatacagaataagctggatttggagaagggaatgatggattgcctttatgcaaaatgtaccccatgtatcacggactgtgttatggctgagcttgaaaagctggggcagaagtatcgtgtggccttgagcataactttcatctatctgcacaatctaatttacctccctcacagaattgccaaggaccctaggttccaaatattagcatgcacacacaagggaacctatgctgatgactgcattgtggagagggtcactcaagtagaagggcagccaggtgcagtggtgagagctgtctcactgagtcaccatgatgtgggttctaagggttcgaagcagacttgcatttgcgtggtgtggctgaatgctatgttttccgagattagagattttactatatctgttcccaagcacaaatgctacatagttgctacttgtgatagagatttgaaaaggaggataagaaaggttcctggtgttccaatcatgtacatcacaagacataggtattcgatagaacggctccctgaggccacaattggtggagcaccaagaatctga

SEQ ID NO: 152022 - DNA, 871 bp, Zea Mays
cccaagccatacaaaaaaaaaagtccgccggcccaacatctaaaccctaatcactgccgctccgagcgaccgcgcctccgcccgccgtccgccgccctaacactgccgacctgtcgactgccgtctgctcagccggccagccactatccgccgagcgcccgacggcccgagcaggcgagcagctccgcatcgcgcgacgtcccaagcaggtgagcaaccaggggcagtaaaggcgttcgcgcgacgtccaacagtgcacctgcgcgcgcgacgtctcgctgctttctccaactcctgttcggtatcgccgtttctcgcttggaggttgtcctgtagcggggacgaccgcccattccggcgcccgctcttctgctcctcctcgccttcctgtttctgctgcggggagttcttccgccgcgagccgggacaccgtcgccgccggccgcccgctgtccgacgcgcagagcctcgtgtccaagcgtggcaagttcaagctcggattcttccgtccagggtttggctcgagatggggaaggcaaagagcaagggccctaaattcgcggcggtgaagaagattatcaccaagaaaaccatcaataaatacaaggaggatgtgctgaaccacaagaagaaggacgtggacaaggagaaactcggccggaatgtgccgcaggtttcgtcggcgttgttcttcagctacaacacagcattggggccgccgtatcgggtgattgtggataccaacttcatcaatttctcgatacagaataaggttagtcgtttaattatctgctgctctcctatttcactgatatattttttatgcaacagaggttcaatacttgcatgcccactgcttcactcagttaat

SEQ ID NO: 152023 - DNA, 870 bp, Zea Mays
atggagatgggagggatgagcgatgtggagcggctgttcttcttcgacatggcctgcaagaactccgaggtcgcgtacgagcagaaccccaacgacgccgcggatggaaggttgccagtccaccaaatcgcgcggatggaaggtccacctgctcctcgccgctcccgcaaatcagccgcgcaggtccagctcggcccgcatcgccgccgccgtcctcgcggccgcatcgcccccgcaccccgcgccaccaacgcccgcggatggaaggttgctccaccaaatcgcgcggatggaagcctgcaaattggtggtttcttggttcttatcagtggagctggctttggaatttgcaggcaccgttctgagctgcgctggtgctcctggaaaggtgctggtgcctggagctattttaaaagactctacttggagaagagtggagcaaagtctattggaacaacagccaacttgttagttgcagctgctgctggtgcttgtactgttatcgtgacacagccattagatacagcagcttctaggatgcagacaagtgtctttggaaagtctaaagggctgagagaaactcttgcagaaggtacttggatggaagcattcgatggcttaggcatttccattatattgacttgcaatccttctattcaggtactcaaattgaaagatcaatttggtggtacaatattgaatctattgcgtcggctcgagcttcacttgatcgagaggtggtggagcaagaaggtgttggtagcatactgggtgcaaccaaggttggccttgccgtggaacaattgtgagaggacatcatggtggcaggaagtcgaagaaggtgttttttacaagatcaagatgaggtag

SEQ ID NO: 152024 - DNA, 1560 bp, Zea Mays
atgcctatgacacttgtaaatgcccataaagacactattggtgtttcagatcttaacagggtgcctccccatagagaaaatgaaatattgatcaagaagacaattgatgttcatggaagcagatacaaagagtctttgaaaccatcaccaacagatcaactgattaagacagaagaaagagaaatgggtgatactggtctcaagccttatattctctacctgcgtcagaataaaggcttcttctatgcttctctgggtattatttcccatataattttcgtatgtggccaaatatcacagaattcatggatggctactaatgtcgagaatcctgatgttagtactcttaagttgacttctgtgtacattgcaattggaatcttctcggtgttcttcttgctatttagatcattagcagttgttgttcttggggtcaagacatcaagatccttattttctaagttactcaactcattattccgtgcaccaatgtccttttatgattctacccctcttggaagaatacttagccgggtttcttcagatctgagtattgttgaccttgatattccgtttggcttcatgtttagcgttggtgctggcataaatgcatatagcaatctaggagtattggctattgttacatggcaagttctgttcgtctctgtgccaatgattgttttggcaatcaggttgcagaggtattatttagcctcatctaaggaattgatgaggatcaatggcactaccaaatctgctctcgctaatcacttgggcgagtcgattgcaggggctataacaataagggcttttcaggaagaagatcgtttctttgagaaaaacttggaacttgttgacaagaatgctggtccatatttctataattttgcagcaactgaatggctcattcaacgtttggagaccatgagtgatgcagttctttctttttctgcccttatcatggctcttcttcctcaaggaacttttagccctggctttgtaggaatggcattatcttatggtctatccctgaatatatcctttgttttctctatccaaaaccaatgccagctagctagtcaaatcatctctgtggaaagggttcatcagtacatggacataccaagtgaagcagcagagattattgaagaaaatcgaccagcaccagactggccccaagttggcagggtggaccttaaagatttgaagatacagacaagatatgctcctcttgtattacatggaatcacctgcagtttccacggtggagataagatcggtatagttgggcgaacaggaagtggaaagacaactttaattggtgcactgtttcgtcttgttgagccaactggagggaaaataattatagactctatagatatcaccacaataggcttacatgacctgcgttcacgtttgggtatcattccgcaagatccgacactctttcaaggaaccataagatataatctagaccctcttgggcaattctctgatcaacaaatatgggaggttctcggcaaatgtcagcttcttgaagctgtccaggagaaggaatag

SEQ ID NO: 152025 - DNA, 190 bp, Zea Mays
attatggaaacaagagttccggctttagcatacaaatgcgtacaaccattacataacgattattggaccatagagcagttgcttgaataattaaactaactcaaagaaaacaaaatgccatgactatagaaaacactagccatcttcaattcttgcattcgagcgccatccatgcattgcaaaaacttcc

SEQ ID NO: 152026 - DNA, 438 bp, Zea Mays
aggaacagaactcaggcgttggcgattggcatctccctcccctgagccatggccaccgggcggcccgtacgactcgtgctggatgcctccctcctcctcgacccctcctccactagggaggcggcagcggtggctctgcggcccggggtagaggagctgctgcggcggttgcgctactccaacctcaccgtggcaatctgctatgcagagggcatgccaactaatgaggaactatgtgactcatctgttctggtgattggatatataatgaaaaaatcccgtgaggaagacttcgcaagggcaagttactttagagtttagagtgtaaatgaatattaacagctacttatgtattgggtaacaacatgaacatcatgctttttcatcttgcttacttacggagatgtggttctgtcacttctgtgaccgttgccgtgt

SEQ ID NO: 152027 - DNA, 1522 bp, Zea Mays
aaatcgcatctctctcacttgatcagccaaacctaggtacggcaagatgctcggcggtctgtacggcgaccttccgccgccgtcgtcggcgggcgacgacgacaaagcctccacggcctccgtttggtccagcgccaccaagatggcgcctcccaccctccgcaagccgtccaccgccttcgccacacccccgtctattctccgcaaccagcacctgcgtccgcccaaagccgcccccacctccgtccccgctccctccgccgttgctgccgaacccgccgcggccacctccttccagcccgcgttcgtcgctgtccagcccaccgtgctggaggagtacgaccctgccaggcccaacgactacgaggactaccgtaaggacaagctccgacgcgccaacgaggctaagctgaacaaggagcttgagaggcggcgccgtgaggatcaagagccggagagggaacgcgagcagcgggagagggaagcccgcgagcgcgaggagaaggactaccagtccagggcctcttccctcaacatatccggggaggaggcgtggaagaggagggcagcgatgagcggtggcggtgctgctgctaggactccctcgtccccacctcacggggatggattcgccattgggagctcatcttctgctgggttgggtgtgggcgccggcggacagatgactgctgcccagcggatgatggccaagatggggtggaaagaaggtcaggggcttggcaagcaagagcaggggatcaccgcgcctcttgtggccaagaagaccgataggaggggaggagttattgttgatgagagcagttccaggccttcagaaaagaagtcgagatctgtcaactttgatgggcaaccaacacgagttttgctgctccgcaacatggttggtcctggcgaggttgacgacgagctggaagacgaggtggcatcggagtgtgccaggtacgggacggtgtcccgggtgctgatattcgagatcacacaggcatacttcccgtccgatgaggctgtaaggatattcatacagtttgagcgggcggaagaagcaaccaaggcaatggtcgatctgcaggggcggttctttggcgggcgcgtggtgcaggcaaccttctttgacgaggaaaggtttgcgaggaacgaactcgctccgatgccaggggaagtaccagggttcttcgactaaagccaaacgttttggtgtggtatcagtataatatcaggtgagaggtgggttgtggccttgtagttctttctgttaatcgaggatgaagtagagcatacagtcagacaatttgcatgctttctagtgctaggtgtagtgtactggaaatattgtggatataagatatgtttttttttttttgtgccgtgtctcctgctactgaactaccttctacgtatatacatgaaaaattttgtcctgattttcgatcttgtaatcacctaactgcgatatgacatctcagacgaaatccttattgttgacagaatagcattgctggaa

SEQ ID NO: 152028 - DNA, 1211 bp, Zea Mays
agctagccagccatgcaagacggcgcgggagcggaagaagggggcatccagacgctcctggcgctgctcgccgacggcgaggagcaggcgcgccagctcggggagatggtggccgccgaagacgacgggccgtggtcgtcgtcccgacgagcggcggcggagcactacaggggcgcggcgcggcggctgcagcgcacgctcgggcgggcggcggccgtcgctagggccttcgaggccgccgcgccggggtcgtcgcggggcaccgaccgctccgacgactcgccgcggtcggcggacgagagctcgggccggacggtcgctgtcgacgcgcaggcgcaggagcgccaaagcaccatgtgcaagaggagaaaaggtctgccaagatggaccgcgaagttccgagtgccagaaacaagcttggaggccaccccggacgacggcttcagctggcggaagtacggccagaaggacattctcggcgccaagtttcccaggggctactaccggtgcacgtaccgcgccgcgcaggcgtgcgccgccacgaagcaggtgcagcgatccgacgccgacttgtgcgtcttcgacgtcacgtaccagggcgagcacacctgccaccagaagccgcggcgcgccaccgcggccttgtccgcgcccggcgggaggagccagacaccgccgccgccgccaacgccgcctgcactaccgctggagcagcaggacccgggcatgcggctgctggggatgggattcaggcgcgtcctcagggtagagacggcggggctggcgctccacgacgaccccgacgaccgcggccccgcctccgcacccgccgcgcccttctccttcccctccgtgccgccgcctctcctccacgccggcgaggcggcgacgacgacggacagcatccccgtggcagcggccttctcgccgcccgcgtcgagctacggcttctccgcgccgtcgtacgactgcgctcccgcgacctgctacggcgacgtctacgactacgactacgaggctcctcagggggcgcgcatgcgcggggcggagtcgtcggagctcggcgaggtcgtctccagggcgatggtcgccgcccccgcctcgttcgactactcgtcgtcgctcttccaccaccaagccgagctcgacccgcacctgccgtttccaccgtttggcgggccgccccatgacccataccagtaggcatgggc

SEQ ID NO: 152029 - DNA, 240 bp, Zea Mays
atggcgatcgtgctctactgggtgtacgccgacggctaccagctgatccttcaccgctggctgcttgagcggtacaggctccacacactggacgaggaggaggacaacgtcgtcagcctctccaccgttgtccgtggtgtactcctacagcagctcatgcatgccatccacgtgatggtcttgttcatggttcatttttcagctatcttctaccagaaaacatctagctttccagagtaa

SEQ ID NO: 152030 - DNA, 873 bp, Zea Mays
atggagactaaactcatcacttgtatactcatctctgcaaccaggcttcattctatttcatttgtttcaaaattgttgttggccattttctgggtgtcgagtaggaagggttatttactagctcctgtcaattcaatatttggtctccagagaaacttgccaatctctctctccctcttcccacctgattttcgcgatgggtcgtttatcattttgctttgtgatgaatacttgttgtctctgaagaaactgcgatgcaggctgatgctgccactaaccctgctcttggataccactgggcatgtcattactcctactaaacgtgcaagctcattggaagagttacaacaggaggacaaccctatagatgaggttggaccttttactacttcactggttgtctcaaattactcaacagtcgagacacaagtgagtagcactaaaaaaagggcttgtgcatcatctaccgaaaaaattgcaaagaagctctttgcaaatgaagatgcaaaaaataatggtgaggctgagttgttgaagccagacacagcggaaggaactgatattgaaattcctgaattcaatattaaacaactcatggaccaagaggttgttaatttatcaggtggagagctccaaagagttgttatgtgcttctgccttggaaagtggctgctctccgcggtcaaggccaaggggctcaagcaagagacggtgactcggatcctcatcaactacgcgcagaactcgctgcacgggctcatggccagagacgtgcgcaggtgcatcccaacatcagggggtggagcggtaccagttgtgcaagtcgatgcagccacacaacataaaacgagtgactctcagatggcggtgtag

SEQ ID NO: 152031 - DNA, 712 bp, Zea Mays
acctctggctcggcttccaaatccaaacggccgtgggctcgcctcaggccacttcggtccctcctcgagctccatccgatcctccctccccgtcgtgccggcatcgcgcgcagggaggaccggccggacggccggcccgcccgcccgccgccatgccgggatcgcccaaggtcttcttcgcctcctccgcctcgcgccgctccgggtcgctgcgccggctgctctcgacgccggtcttctccgcggcctgcctcctcttcggcctcgccggcttcgtcgccgccgcgctcgccctctcgcgctccccgtccgtcactcacagccgctgccccgattcctcgcgcccgctctccgtctcagtcgcgtgggaccgcagcccaggggatggctccgcagggggctccgcggagctcccggcctcgctcgccactggatcgcgcggccgccacaaggtcatggccttcgtcgggatcttcaccgggttcggctccatcggccgccgccgcgcgctgcgccggacatggctacccgcggatcgccagggtctacttcggtcagtcgctggtatcacggcttgttagttcgttttcgcttctgccggtcgagatctagctggacttttagagttcggactgtcgatgtatttcgttgcttctagcctgctgctctcatagcagtagtataatatatggtgagactggttgcaaactta

SEQ ID NO: 152032 - DNA, 1476 bp, Zea Mays
acctctggctcggcttccaaatccaaacggccgtgggctcgcctcaggccacttcggtccctcctcgagctccatccgatcctccctccccgtcgtgccggcatcgcgcgcagggaggaccggccggacggccggcccgcccgcccgccgccatgccgggatcgcccaaggtcttcttcgcctcctccgcctcgcgccgctccgggtcgctgcgccggctgctctcgacgccggtcttctccgcggcctgcctcctcttcggcctcgccggcttcgtcgccgccgcgctcgccctctcgcgctccccgtccgtcactcacagccgctgccccgattcctcgcgcccgctctccgtctcagtcgcgtgggaccgcagcccaggggatggctccgcagggggctccgcggagctcccggcctcgctcgccactggatcgcgcggccgccacaaggtcatggccttcgtcgggatcttcaccgggttcggctccatcggccgccgccgcgcgctgcgccggacatggctacccgcggatcgccagggtctacttcggttggaggaagctactggtctggcattccggttcgtgattggaaaaagcaattcaaagaacaagatggccgctcttaatagagaagttgaagaatatgatgattttgtgcttttagatctcgaagaggagtatagcaggctcccgtacaaaacgttagctttctttaaggctgcctatgcattgtttgattctgatttctatgttaaagcggatgatgacatttacttgcgaccagatagactttccttgcttctggctaaagagcggtcacatccacaaacatacattggatgcatgaagaaggggcctgtttttactgatcctaagttgaaatggtatgagccccaatccttcttactcggatcagaatactttcttcatgcatatgggccaatttatgctttatcagctgacgtggtggctagcttggttgctttgaggaacaacagtttccgtatgtttagcaacgaggacgttacaattggatcgtggatgcttgctatgaacgtcaaccatgagaacacacatgcgctctgtgaacctgactgcacggagtcttcagttgctgtttgggacattccaaaatgctcagggttacggaggtagtacgagtggtaggtttggggtccaggaccaggacctcgacgcttgggcgccgtcgggcggttggatggggaggcgaggtactgttcaagcggatgaacagcgccacgcggatgaacagtgctgttcactgggtggcctgcgagggtttgggggcgacggcttgggttaggggcgttggggaggtcggccgcagggatttccccacggccaggaagagagaagggatttccttctaatctcttgtttaccttcaattgatacaatctttctccttatatagagagggttacttgatatctaagcactagatctaatc

SEQ ID NO: 152033 - DNA, 1370 bp, Zea Mays
acctctggctcggcttccaaatccaaacggccgtgggctcgcctcaggccacttcggtccctcctcgagctccatccgatcctccctccccgtcgtgccggcatcgcgcgcagggaggaccggccggacggccggcccgcccgcccgccgccatgccgggatcgcccaaggtcttcttcgcctcctccgcctcgcgccgctccgggtcgctgcgccggctgctctcgacgccggtcttctccgcggcctgcctcctcttcggcctcgccggcttcgtcgccgccgcgctcgccctctcgcgctccccgtccgtcactcacagccgctgccccgattcctcgcgcccgctctccgtctcagtcgcgtgggaccgcagcccaggggatggctccgcagggggctccgcggagctcccggcctcgctcgccactggatcgcgcggccgccacaaggtcatggccttcgtcgggatcttcaccgggttcggctccatcggccgccgccgcgcgctgcgccggacatggctacccgcggatcgccagggtctacttcggttggaggaagctactggtctggcattccggttcgtgattggaaaaagcaattcaaagaacaagatggccgctcttaatagagaagttgaagaatatgatgattttgtgcttttagatctcgaagaggagtatagcaggctcccgtacaaaacgttagctttctttaaggctgcctatgcattgtttgattctgatttctatgttaaagcggatgatgacatttacttgcgaccagatagactttccttgcttctggctaaagagcggtcacatccacaaacatacattggatgcatgaagaaggggcctgtttttactgatcctaagttgaaatggtatgagccccaatccttcttactcggatcagaatactttcttcatgcatatgggccaatttatgctttatcagctgacgtggtggctagcttggttgctttgaggaacaacagtttccgtatgtttagcaacgaggacgttacaattggatcgtggatgcttgctatgaacgtcaaccatgagaacacacatgcgctctgtgaacctgactgcacggagtcttcagttgctgtttgggacattccaaaatgctcagggctatgccacccagaggtaaaaatgctagagcttcatcaaagaaaagaatgcacaggtggtccaaccgttgcagccgaggtgtccgagtccgaggactgatgatttctcggttggaacacaaactaacggatccgatagttgacctccgccctcactcagtagatgcgtttggagtattcgtttgattcattcatttatcaggtgcaatcaatgtggcagcgc

SEQ ID NO: 152034 - DNA, 695 bp, Zea Mays
cgccaagtagtccaacagcactggcggacggacctcaagcaattcgcttccatgtgttctctctctgtcccctcggtctcagtagtgtcgaaggaaaacacacacaggcatgaggcatccctgtgagtttgttggtcttgaactcttgatgctgaaaatggagattaaagagcattattttgaggtctgtgacattatagatgacttgtccgtatcaatattaaaccacttgactgaaaactgcaagaaagaactcgagacaataaacgggcagtatccattttgaacctctgaagtatctagacaaaaccttgaagatcacttacgacgaatgagttcaaatgttaaaggtacaaacttacagctgtctcttgctactgtaacggagtccttctgttagatattacgatcctaacgccttccttttcattttcccatgctttgctatatttgagtccggtagacaaatgcttgttctgctgccctaggcccctagcagcttagtgcaaggagcagttcagcttgattgatatgacgttatttgcattgtctaagcttggtttagttgtgctgtggtgagcttagggagatgcaatccgaccattcacttgcaattgctctcaaagcttcaatttggggtgtatcacacacaaattagagagttaggaagttttagtgatccttttagctttaat

SEQ ID NO: 152035 - DNA, 569 bp, Zea Mays
cgccaagtagtccaacagcactggcggacggacctcaagcaattcgcttccatgtgttctctctctgtcccctcggtctcagtagtgtcgaaggaaaacacacacaggcatgaggcatccctgtgagtttgttggtcttgaactcttgatgctgaaaatggagattaaagagcattattttgaggtctgtgacattatagatgacttgtccgtatcaatattaaaccacttgactgaaaactgcaagaaagaactcgagacaataaacgggcagtatccattttgaacctctgaagtatctagacaaaaccttgaagatcacttacgacgaatgagttcaaatgttaaagacaaatttggatctgctatggaaatggtaaagaatgatatcggtggcaatatcacagtaagcaaatctttcaacaagatttctattaaactagtatcattcaaaggttatcttccattttttctgttggtaaatagctgggcaggttgcgacagtgttaatgttgtctttcagttatctatgttgtgacaatcgatctaaatagctactttagactgat

SEQ ID NO: 152036 - DNA, 1697 bp, Zea Mays
cggcgaaggagactgccacgaggtgggctaacgggcgcaacagctacgtcccaacccacgccattgacgccctctatataagcggggagcccctgcaagcatggtcatcagccaaagtataagcgcagatcgagtcatcaagctagctagcccggagcacgcctagacacgccagcagcaatggcggctcagctggccgtcgcgtttctcgccttgttgtcctcctctgccttcttggccgtgtctggccagaagttcaacgccatcttcagcttcggcgactccatgtccgacaccggcaacctgtgcgtgaacggtccccccgccggcctgacgctcacccagccgccctacggcgagaccttctttggccgcgccacctgccgctgctccgacggccgcctcgtcgtcgacttcctggccgagaagttcgggctgccgctgctgaagccgtcgaagcagggcggctcagacttcaagcagggcgccaacatggcgatcattggcgcgaccaccatggactcgggcttcttccagtcgctgggcatcgccgacaagatctggaacaacgggcccctcaacacccagatccagtggttccagcagctgatgccgtccatctgcggctcgacgcaggcctgcaagtcgtacctgtccaagtccctgttcgtgctgggcgagttcggcggcaacgactacaacgcgcagatcttcggcggctacaccccggagcaggcgagcgggcagagcgccaccatcgtggacgccatcggcaagggcgtggagcagctcatcagcctgggcgccatgtacgtggtggtcccgggcgtgctgcccgtggggtgcttcccgatctacctgacgctgtaccagacctccagcgccggcgactacgaccagtacggctgcctgaagcgcttcaacgcgctgtcggcgcagcacaactcgctgctgcaggccaaggtgtcgagcctgcagagcaagtaccccggcgcgcgggtcatgtacgccgacttctacagccacgtgtacgacatggtgaagagccccggcagctacgggttcagcaccaacctcagggcctgctgcggcgccggcggcggcaagtacaactaccagaacggcgcgcggtgcggcatgcccggcgcgtacgcgtgctctgacccggcgtcgtcgctcagctgggacggcatccacctgacggaggcggcgtataggaagatcgccgacggctgggtcagcggggcctactgccacccggccatctcggcctagaggctgctccgggaccgggggtcgggggctggttggtggttcgctggcccctcaagttaggggaggggaatcggattaattgtaatttttttagctggaatcgaagcaggcaagaagacgatggaggtggtctgcaactgcaagaaataatcaattatataagcataattctctcgtgatcatcgtgcgacagcagtgctaagatcacttgtgtagcctagcgtgccattttagtaataaggctatctatcaggcagggcaggacgaggaggccttcgatggcttccagagtggcttcgctgcgctactcttgaatggccgcgcgcggcgtagctctgccaaggaatttgtcgccagaagagaccgtgcttcaatggcagtggcagagctagaataataaattcaagaggctggccatgttc

SEQ ID NO: 152037 - DNA, 1705 bp, Zea Mays
atcagccaaagtataagcgcagatcgagtcatcaagctagctagcccggagcacgcctagacacgccagcagcaatggcggctcagctggccgtcgcgtttctcgccttgttgtcctcctctgccttcttggccgtgtctggccagaagttcaacgccatcttcagcttcggcgactccatgtccgacaccggcaacctgtgcgtgaacggtccccccgccggcctgacgctcacccagccgccctacggcgagaccttctttggccgcgccacctgccgctgctccgacggccgcctcgtcgtcgacttcctgggtgggtaccgtactctttgctcgcacgcacgtacacacgtcctgacgttcaattcaaacgcaccgattggttttccctccaaaaaagacggttttgctctgctcgacggggacgaacgggacgtggctggcatgctgaaagttctcttttgcttttgtcgttgctgtcgcgcagccgagaagttcgggctgccgctgctgaagccgtcgaagcagggcggctcagacttcaagcagggcgccaacatggcgatcattggcgcgaccaccatggactcgggcttcttccagtcgctgggcatcgccgacaagatctggaacaacgggcccctcaacacccagatccagtggttccagcagctgatgccgtccatctgcggctcgacgcagggtacgtacgtacgtggcgccgttaaatttagatcccatgcacgcacaacgcacgcatggtccatggaccatggaagaagatgaccgatcgatgaggtggccattaattaacataacccgattcgcgcagcctgcaagtcgtacctgtccaagtccctgttcgtgctgggcgagttcggcggcaacgactacaacgcgcagatcttcggcggctacaccccggagcaggcgagcgggcagagcgccaccatcgtggacgccatcggcaagggcgtggagcagctcatcagcctgggcgccatgtacgtggtggtcccgggcgtgctgcccgtggggtgcttcccgatctacctgacgctgtaccagacctccagcgccggcgactacgaccagtacggctgcctgaagcgcttcaacgcgctgtcggcgcagcacaactcgctgctgcaggccaaggtgtcgagcctgcagagcaagtaccccggcgcgcgggtcatgtacgccgacttctacagccacgtgtacgacatggtgaagagccccggcagctacgggttcagcaccaacctcagggcctgctgcggcgccggcggcggcaagtacaactaccagaacggcgcgcggtgcggcatgcccggcgcgtacgcgtgctctgacccggcgtcgtcgctcagctgggacggcatccacctgacggaggcggcgtataggaagatcgccgacggctgggtcagcggggcctactgccacccggccatctcggcctagaggctgctccgggaccgggggtcgggggctggttggtggttcgctggcccctcaagttaggggaggggaatcggattaattgtaatttttttagctggaatcgaagcaggcaagaagacgatggaggtggtctgcaactgcaagaaataatcaattatataagcataattctctcgtgatcatcgtgcgacagcagtgctaagatcacttgtgtagcctagcgtgccatttta

SEQ ID NO: 152038 - DNA, 1731 bp, Zea Mays
atcagccaaagtataagcgcagatcgagtcatcaagctagctagcccggagcacgcctagacacgccagcagcaatggcggctcagctggccgtcgcgtttctcgccttgttgtcctcctctgccttcttggccgtgtctggccagaagttcaacgccatcttcagcttcggcgactccatgtccgacaccggcaacctgtgcgtgaacggtccccccgccggcctgacgctcacccagccgccctacggcgagaccttctttggccgcgccacctgccgctgctccgacggccgcctcgtcgtcgacttcctggccgagaagttcgggctgccgctgctgaagccgtcgaagcagggcggctcagacttcaagcagggcgccaacatggcgatcattggcgcgaccaccatggactcgggcttcttccagtcgctgggcatcgccgacaagatctggaacaacgggcccctcaacacccagatccagtggttccagcagctgatgccgtccatctgcggctcgacgcaggcctgcaagtcgtacctgtccaagtccctgttcgtgctgggcgagttcggcggcaacgactacaacgcgcagatcttcggcggctacaccccggagcaggcgagcgggcagagcgccaccatcgtggacgccatcggcaagggcgtggagcagctcatcagcctgggcgccatgtacgtggtggtcccgggcgtgctgcccgtggggtgcttcccgatctacctgacgctgtaccagacctccagcgccggcgactacgaccagtacggctgcctgaagcgcttcaacgcgctgtcggcgcagcacaactcgctgctgcaggccaaggtgtcgagcctgcagagcaagtaccccggcgcgcgggtcatgtacgccgacttctacagccacgtgtacgacatggtgaagagccccggcagctacgggttcagcaccaacctcagggcctgctgcggcgccggcggcggcaagtacaactaccagaacggcgcgcggtgcggcatgcccggcgcgtacgcgtgctctgacccggcgtcgtcgctcagctgggacggcatccacctgacggaggcggcgtataggaagatcgccgacggctgggtcagcggggcctactgccacccggccatctcggcctagaggctgctccgggaccgggggtcgggggctggttggtggttcgctggcccctcaagttaggggaggggaatcggattaattgtaatttttttagctggaatcgaagcaggcaagaagacgatggaggtggtctgcaactgcaagaaataatcaattatataagcataattctctcgtgatcatcgtgcgacagcagtgctaagatcacttgtgtagcctagcgtgccattttaggccttgttcggttattcccaatacacatggattggatgggattggaaaaaattcttaagaagtttgacttgtttgggattcaaacccatccaatcccactcaatccatatagattgagagctaaccgaacaagcccttagtaataaggctatctatcaggcagggcaggacgaggaggccttcgatggcttccagagtggcttcgctgcgctactcttgaatggccgcgcgcggcgtagctctgccaaggaatttgtcgccagaagagaccgtgcttcaatggcagtggcagagctagaataataaattcaagaggctggccatgttc

SEQ ID NO: 152039 - DNA, 413 bp, Zea Mays
ttattctatcaacatcccggaacccttagtagccagcccaatatacctagagtcggtgggccattatgtcctgccatgcatctgtctggtggaccatcctctgctgagaataattaacatgggttttatgaactcaccttctcaaatacatcaaggtggagcagatacaaactaccaacaaaaaccagttagtggtcatgcagtttgaaatcatgttggtccatcaccaattcgacctccaatgggttttgatatgggtaatagtgatggacactttgaaagagatgaccctcactcttatggaaggtttgatggagcaaaggctctccggtggcaaccaaagcttgctgctctcccaattttacaaaatcccatgggcatgcgtaatggatagccatatcctcggccagaca

SEQ ID NO: 152040 - DNA, 1705 bp, Zea Mays
gctaaaatagacccaaatctcgcagcaacgaattcgcatttcccccacctccacccccactttcccttccgtccccttctcctcgtcgcgatccaaatccgcggccatggacggcggggggcagcccccggacaccgagatgtcggaggccggcgcgggcggcggagggcagccgccgcagcagccactgccgccggtgggcgggggcgtgatgttggacaacatccaggcgacgctcagccacggcggccgcttcatccagtacaacatcttcggcaacgtgttcgaggtcaccgccaagtacaagccccccgtcctccccatcggcaagggcgcctacggcatcgtctgctcggcgctcaactccgagacggcggagcaggtggccatcaagaagatcgccaacgccttcgacaacaagatcgatgccaagcgcacgctccgcgagatcaagctgctccgccacatggaccacgagaatattgttgcaataagggatatcatacctcctgcgcagagggctgcattcaatgatgtgtatattgcatatgaattgatggatactgatctgcatcaaattattcgttcaaatcaagctttgtcagaggagcactgtcagtattttctttatcaaattcttcgtggcttgaagtatatacattcagcaaatgttcttcaccgtgacttgaagcctagcaatcttcttttgaatgcaaactgtgacctcaagatatgtgattttgggcttgctcgcaccacctcagaaactgattttatgactgaatatgttgtcacaagatggtatagagcaccagagcttttgttgaactcctcagaatatactgctgccatcgatgtgtggtctgtgggctgtatatttatggaactgatggaccgcaaacccttgtttcctggaagagaccatgtccatcagctacgtcttctaatggagctcattggcacgccaaatgagggtgatcttgattttgtaaatgaaaatgcaagaagatatatccgccaacttcctcgtcaccctagacagtccttacctgaaaaatttccacatgtacaacccttagcaattgacctggtggaaaagatgctgacttttgatcctagacagagaataactgttgaaggcgcacttgcacacccttacttggcatcacttcatgacataagtgatgagccaggctgctcaatgcccttcagctttgacttcgagcagcatgcattgtctgaagaacaaatgaaggatcttatctaccaagaggctcttgcattcaaccctgattatcagtagccaaagttcaatttcagccggtgattggcttcattgacatggagattttttccccacctgatgtcagtgcaaaaagtcaccaactccgattgctagctgtaaataactgccttacctgaagatactccattcctctgattaaaagctggtgacggtgtcattaagggtagaaaagaacgagcttgtgaaggtcaaatttctgcgaagccatggatttctgtgcttacaatatgttgttttcaatcggactttccttcctttttcttgtcaaaaacgtctcgatgttgtctgtgagaggtagttcgtgaacgatggctgcctgaattcagtggttgtcatcaaagttaacatttctggtcaacttaagattaagacttcgtggcttcttgcttgttttttttt

SEQ ID NO: 152041 - DNA, 3601 bp, Zea Mays
aaaatgacattttttaatttgtttttacagaaccacgtagattgttacagcgcacaggaccattcattaattgccacttaatccggtcggtgttcaactggactcagctcaaaaatgggagggaaaaaaacatccctgcaaaattctctcgattctagtttatcgtccaaactcatgcaaatatctgaattctgcatcaactcccttatcatacactcttatttttaaaaggaaaagcaactagtaaagatcaccgataattgtcggatacacaagcacggcagctacccttgctacttccgtgatcatccatcgcacagcaccaccccggcatcaactccactttgttcaagtaaatcagcacctctctgtattcatctgatgctcccacagctcaccaaattcaccgttaatcctcaattagcctgttgttcagctgcacctcgaaccggagccaagactcggctcgcatttctgtgttcatcatatcactctctggtgcgggatagtagtcctcccgtaactgcatgtccctcagatttggcaccttcaagaaaaaggtcaggaaatgctcatgcgtggtgccatggacgaagagcttcctgagtccaacgcagccctggagcagccccacggcgggcagtgttaggctacgctggttcacttccttgtcttggggaggccaataatccagctcatacaaagtcattagtgaatctataccctgcaaataaaatcgctcccacagagagagatccatttgacctgctggtgcagtaagagcatagccaactgcctcactcagatccaacttcatcttggccagcactgggaaacctgcaagatcactcaggccaaataatgggccagggcgtgcacatgtccggcaatcaccctccactttaattgagatctcctctagaacagggcagctatcaagcccagcagagatgagtggggagagtacctcaccggcagggaaccagagggagagtgaacgcagcatctcccagctgactagatcatccaattccatgtacctacatttcttcgaagcagactcatatgatacttcaccaccgagatcgtcatcttcatgattgcatccggctatgccgttggccacactctcaggctgttcaacttccttccagacacagctgatctcaagactctcaatgcgatcacggatcggacttagagcagtgaggcatgctgccgtgtccagaagccggcagtttaagatactgacttctttgattgtgggccgaagagcagttgctagtctcctgatcccagctggtgtgacaagatcacagccatggatggcaaacttagcaagcctcccgcacccacggcctatggcagcaaggctggcgtcagtgagatccaaacagcccttgatgcatagcgactccagcgaaccgcacacagcaactccgtcgaggtgcagccaagatgccttgcacaagccctggaagccccccagcgtcaagaacttgatccgtgggcacctgcgggcaagcgcctccatcgccggcgctgtctcaagcacattatgccgcatgtcaagcgtgaaatcctccagcgccggtagtgcagcgaagaaggaaaccagccctgcgacggtgattgccgcgtcctctcgttggccggtggccgccggctcgaaaggttcccggagccgcaggatcgccagcttggggcacctggcggcgatggtgagaagcgcgtcgtcgctgacgaagtcaatataccgagggttgaacacacagggcgccacgagcttctggagactggggcaggatccggcgatggcctccagctcggcggcgtggaacccgtccgtggcgcccgcgaggccgaggtcgagctccgtgagcgccgcggcggctgccgggtgcgctgcaagcgccggctcgatgtcctccgtccagcagtagaactcggagaggtcgagcgtcctgagcgcggggcagtcctcgaggagaggctcgagatccgcgcctgcgtcgaggccgggcgggcgctggtgccagcgcacgagcttgacactgcggaggccggacctccagtgcggggtgaggctggcgagcgtggtggggtcgcggcaatagacggcgagcgaggacacggcggggaagcagtaggcgaggcgcgccgcgatgaaggcgttctgctctgcgacctcctccgccgtcacggacggtgcgacggcgtcggcggacggcgccgcggaggagaggaacgggtggccccacggcgacaccagcgagaggtcgagccgctccagcgccgggaagcagaaagtcggcctgaggaagagaaacgcgttcgaccgtgggtccccgcgcagcgagagcgcggcgcgcgtggcccgctccgccgcgaggagccggtggcacgccagcgcggcgcggtgccgggaccgcgcgtcgtcgaggaagcccaggatgtggagcagcagaggctctggcaggtctaggatgggagagcccgccgcggccgccgcgtcttcctcagccatgcgatgcgacgcggcgcggcgatgaggggtgggggtgggacgggatgggatgggggatgcaccgccgcgtccggcaaagtcgtctaccccttttttcctttcccttgcgcgggcgggggggcagttgggggagaggagagggaggaagggagggggatgtggcctgcgggtgaaggggcgggcggagtggggacgggaagctgcacagcgaagtgatatactagtcgacagctctatctttttttcctttttatttttgtctgtatatataatgatgaataattatcttatcctatccgcatcgacctattttttttcccttttggattggaaatataaataatcccccctttctctttccgtcgctctcctatgctctctggcctctgcgtatgcgcctaggcgagcccgtgcgctggttggcctcccggacgcggccgcggcgggcgatggggtcgtcggcgccggtgagggcggcgggaggcacaagggatcccggcgagaacccggcggtggggaggctgcgggagctcttcacaggcgacgcggcaggtgagggtggtcaatgagtcgtcactctcgtttctggtcgttgttgcgggttggggagacgaattcgaaggagttgtcgctagagtttggtttggttgtctgtacgaggggtgggtatgcacgtgccgttgtgcgtgggttcctgatcggtggagcggcgagtagccggggggttctcgttgggttagttggagcttggacgaagcaatgacctaaccatggcaacgaatcactgtggttgagctgttcatgcaatcgtgcttctccagagctgctacagaaatggaggagctgagatacctcagttgaagttgaaccccggcaattgttccggaaagaagacaaaatagaaaacacagttggggcgcttgaagatgctgtatgtatttataaggcaaatgttgtattctgaaaaacagaaaccattgctgatcatgcagagaataatatttcctgcagagcaatggtcgacattgtgatgagtatactacacagttgcagtctcaaattagagtggttgtc

SEQ ID NO: 152042 - DNA, 4090 bp, Zea Mays
aaaatgacattttttaatttgtttttacagaaccacgtagattgttacagcgcacaggaccattcattaattgccacttaatccggtcggtgttcaactggactcagctcaaaaatgggagggaaaaaaacatccctgcaaaattctctcgattctagtttatcgtccaaactcatgcaaatatctgaattctgcatcaactcccttatcatacactcttatttttaaaaggaaaagcaactagtaaagatcaccgataattgtcggatacacaagcacggcagctacccttgctacttccgtgatcatccatcgcacagcaccaccccggcatcaactccactttgttcaagtaaatcagcacctctctgtattcatctgatgctcccacagctcaccaaattcaccgttaatcctcaattagcctgttgttcagctgcacctcgaaccggagccaagactcggctcgcatttctgtgttcatcatatcactctctggtgcgggatagtagtcctcccgtaactgcatgtccctcagatttggcaccttcaagaaaaaggtcaggaaatgctcatgcgtggtgccatggacgaagagcttcctgagtccaacgcagccctggagcagccccacggcgggcagtgttaggctacgctggttcacttccttgtcttggggaggccaataatccagctcatacaaagtcattagtgaatctataccctgcaaataaaatcgctcccacagagagagatccatttgacctgctggtgcagtaagagcatagccaactgcctcactcagatccaacttcatcttggccagcactgggaaacctgcaagatcactcaggccaaataatgggccagggcgtgcacatgtccggcaatcaccctccactttaattgagatctcctctagaacagggcagctatcaagcccagcagagatgagtggggagagtacctcaccggcagggaaccagagggagagtgaacgcagcatctcccagctgactagatcatccaattccatgtacctacatttcttcgaagcagactcatatgatacttcaccaccgagatcgtcatcttcatgattgcatccggctatgccgttggccacactctcaggctgttcaacttccttccagacacagctgatctcaagactctcaatgcgatcacggatcggacttagagcagtgaggcatgctgccgtgtccagaagccggcagtttaagatactgacttctttgattgtgggccgaagagcagttgctagtctcctgatcccagctggtgtgacaagatcacagccatggatggcaaacttagcaagcctcccgcacccacggcctatggcagcaaggctggcgtcagtgagatccaaacagcccttgatgcatagcgactccagcgaaccgcacacagcaactccgtcgaggtgcagccaagatgccttgcacaagccctggaagccccccagcgtcaagaacttgatccgtgggcacctgcgggcaagcgcctccatcgccggcgctgtctcaagcacattatgccgcatgtcaagcgtgaaatcctccagcgccggtagtgcagcgaagaaggaaaccagccctgcgacggtgattgccgcgtcctctcgttggccggtggccgccggctcgaaaggttcccggagccgcaggatcgccagcttggggcacctggcggcgatggtgagaagcgcgtcgtcgctgacgaagtcaatataccgagggttgaacacacagggcgccacgagcttctggagactggggcaggatccggcgatggcctccagctcggcggcgtggaacccgtccgtggcgcccgcgaggccgaggtcgagctccgtgagcgccgcggcggctgccgggtgcgctgcaagcgccggctcgatgtcctccgtccagcagtagaactcggagaggtcgagcgtcctgagcgcggggcagtcctcgaggagaggctcgagatccgcgcctgcgtcgaggccgggcgggcgctggtgccagcgcacgagcttgacactgcggaggccggacctccagtgcggggtgaggctggcgagcgtggtggggtcgcggcaatagacggcgagcgaggacacggcggggaagcagtaggcgaggcgcgccgcgatgaaggcgttctgctctgcgacctcctccgccgtcacggacggtgcgacggcgtcggcggacggcgccgcggaggagaggaacgggtggccccacggcgacaccagcgagaggtcgagccgctccagcgccgggaagcagaaagtcggcctgaggaagagaaacgcgttcgaccgtgggtccccgcgcagcgagagcgcggcgcgcgtggcccgctccgccgcgaggagccggtggcacgccagcgcggcgcggtgccgggaccgcgcgtcgtcgaggaagcccaggatgtggagcagcagaggctctggcaggtctaggatgggagagcccgccgcggccgccgcgtcttcctcagccatgcgatgcgacgcggcgcggcgatgaggggtgggggtgggacgggatgggatgggggatgcaccgccgcgtccggcaaagtcgtctaccccttttttcctttcccttgcgcgggcgggggggcagttgggggagaggagagggaggaagggagggggatgtggcctgcgggtgaaggggcgggcggagtggggacgggaagctgcacagcgaagtgatatactagtcgacagctctatctttttttcctttttatttttgtctgtatatataatgatgaataattatcttatcctatccgcatcgacctattttttttcccttttggattggaaatataaataatcccccctttctctttccgtcgctctcctatgctctctggcctctgcgtatgcgcctaggcgagcccgtgcgctggttggcctcccggacgcggccgcggcgggcgatggggtcgtcggcgccggtgagggcggcgggaggcacaagggatcccggcgagaacccggcggtggggaggctgcgggagctcttcacaggcgacgcggcagatgggtgggagaagtcctgggagtttggtgtgaccccatgggatttgggaaagccaacacctgtcattgaacatcttgctagatcaggaacactcccaaaagggagagctttggttcctggatgtggaatgggatacgatgtggtcgctcttgcaagccctgaacgttttgttgttggcttggatatttctgatatggctgttaagaaggctaagcagtggtcatcctctttgcccaatgcagattattttacttttctggctgaagatttcttcaagtggataccaagtgaacaattcgaccttatatttgattacacgttcttttgtgcacttgacccgagcttaagggtggcttgggcagagacagttaatcggcttctaaaaccagatggagagcttcttaccttgatttatctgataagtgatcaagagggaggaccaccgtacaataatacagttgctgactatcagaaggtactggaaccactgggtttgaagtctgttcttatggaagacaatgagctagccattaaaccacggaagggatgtgagaaaattgggcggtggaagagatgcgcacaccaatcatctctgtgagagaaagcagtggtattttcctaaacaaagaaataaaagaagaatagaccatgtagctgcctcaattatcggatacttcggtgctcctgctccgtcacctttagtcgtcaatgaaattctagcttcaattggggagatgcatagagatctcagttgcctagaggtgtcgcctttagtggctacctgagtacctgtgccactacattcattgcttttaatatggttcagtcgtgaattgtttggatgtaattgcttaattatgaattctgtttgatcgagtagttttgcatggattgtgctggttttggtaagccttgtgcttactaataccatttgaccttcttttctcttctcttgatgaaaaacatgtgttacgggaaaaaaagaatatatggaaggatcaacttcttac

SEQ ID NO: 152043 - DNA, 912 bp, Zea Mays
gagatttcagtcctgaaagttatgaatgaacatgttgtattttgtgagcatcaggtcacgtgattgccattggacaaaaacgtgataaaagtgttaatacttcctattcgatatgttttgtccattcggtgtcattactctaataggaaagacaaagcagagacatggagaagttgaacacaagtattacagcagtacaacactggacaacaaaattaatctctaagcatggtcttgaaaccattagcttctttgaatggtattccattgctttgttcaccatgacgggaatttcttacacagcttcatattacagataagtgatcaagagggaggaccaccgtacaataatacagttgctgactatcagaaggtactggaaccactgggtttgaagtctgttcttatggaagacaatgagctagccattaaaccacggaagggatgtgagaaaattgggcggtggaagagatgcgcacaccaatcatctctgtgagagaaagcagtggtattttcctaaacaaagaaataaaagaagaatagaccatgtagctgcctcaattatcggatacttcggtgctcctgctccgtcacctttagtcgtcaatgaaattctagcttcaattggggagatgcatagagatctcagttgcctagaggtgtcgcctttagtggctacctgagtacctgtgccactacattcattgcttttaatatggttcagtcgtgaattgtttggatgtaattgcttaattatgaattctgtttgatcgagtagttttgcatggattgtgctggttttggtaagccttgtgcttactaataccatttgaccttcttttctcttctcttgatgaaaaacatgtgttacgggaaaaaaagaatatatggaaggatcaacttcttacattt

SEQ ID NO: 152044 - DNA, 908 bp, Zea Mays
ggcaaagctctggttcttcttttaacgcaagaaagaaagaaagaaaaggggcaggaagaaatcgagcctcactcgatccatcgcctcgccgcagcacacacgaggccggcggcgccatggccatgaagctggacatgtccgcgctcgagaccaacttcgccaacctgaccgcctccgccggcgacgacacgtacttctccgccgaggcccccgacgtgccgtccatggtgctccccatctgcgacgacttcgacggcttccaggcggccaccaaggatatggtgaagaataagaaggggacgaccacgcttgccttcatcttcgacaagggcgtcatcgtcgccgctgattccagggccagcatgggcggttatatatcctcacaaaccgtgaggaaaattattgaaataaatccttacatgctggggacaatggctggaggtgctgctgattgccaattttggcataggaacctaggaaccaagtgtcgtctccatgagctttcaaacaagcgaaggatctctattgctggtgcttccaaactgttggctaacatcctttattcatatcgtgggatgggactgtcgattggtacaatgatcgctggatgggatgagaagggtcctggcttgtactatgttgacagtgagggtgcgcggctcgtggggaacaggttctctgttggctctggttcactgtatgcttatggtatcttggatgatgggtaggctctttttaacatctgatgatgtgttgatgtgttgtccgcttattaagtttgagttgcacaatgaacttccctccacttttcagttaccgcttcagcatgtcagttgaggaagccgccgaattagcgcgacgggctatttatggggcaacattccgtgatgcagcaagtggtggttgtg

SEQ ID NO: 152045 - DNA, 1403 bp, Zea Mays
ggcaaagctctggttcttcttttaacgcaagaaagaaagaaagaaaaggggcaggaagaaatcgagcctcactcgatccatcgcctcgccgcagcacacacgaggccggcggcgccatggccatgaagctggacatgtccgcgctcgagaccaacttcgccaacctgaccgcctccgccggcgacgacacgtacttctccgccgaggcccccgacgtgccgtccatggtgctccccatctgcgacgacttcgacggcttccaggcggccaccaaggatatggtgaagaataagaaggggacgaccacgcttgccttcatcttcgacaagggcgtcatcgtcgccgctgattccagggccagcatgggcggttatatatcctcacaaaccgtgaggaaaattattgaaataaatccttacatgctggggacaatggctggaggtgctgctgattgccaattttggcataggaacctaggaaccaagtgtcgtctccatgagctttcaaacaagcgaaggatctctattgctggtgcttccaaactgttggctaacatcctttattcatatcgtgggatgggactgtcgattggtacaatgatcgctggatgggatgagaagggtcctggcttgtactatgttgacagtgagggtgcgcggctcgtggggaacaggttctctgttggctctggttcactgtatgcttatggtatcttggatgatggttaccgcttcagcatgtcagttgaggaagccgccgaattagcgcgacgggctatttatggggcaacattccgtgatgcagcaagtggtggttgtgttagtgtttaccacgttggccctgatggttggacgaagctttctggggatgatgtcggggagctgcactaccactactacccggttcagaaaactccggttgaacaggagatggccgatgcgcctactgcttctgcttaaacctgttgctgagaagaccttgagcggagccgcatgtatccatgaaccatgaattgtagaagcgccatgtttatgaacgaacttggacatgtttgtctcacatcgttagatcactctttgtgttctgttgattgatatcttaaatttgcgcaacagtccttttgagatttttttagatctgtgctatgttgactccagctgtctgcaatcagatctcgttctccgtacgtggacagtagaattcatgcacttctttttgaggctaaatttttaagtcttcaacgcttttttaataccaatttcagtctttctcttctctcactacaggctggttttcttaagctatctctaacatctcttctaaaatatagtgttacatggctatatgcatgcctttacacatgtttaaactatctactccactggtgttggataagtttttta

SEQ ID NO: 152046 - DNA, 1352 bp, Zea Mays
ggcaaagctctggttcttcttttaacgcaagaaagaaagaaagaaaaggggcaggaagaaatcgagcctcactcgatccatcgcctcgccgcagcacacacgaggccggcggcgccatggccatgaagctggacatgtccgcgctcgagaccaacttcgccaacctgaccgcctccgccggcgacgacacgtacttctccgccgaggcccccgacgtgccgtccatggtgctccccatctgcgacgacttcgacggcttccaggcggccaccaaggatatggtgaagaataagaaggggacgaccacgcttgccttcatcttcgacaagggcgtcatcgtcgccgctgattccagggccagcatgggcggttatatatcctcacaaaccgtgaggaaaattattgaaataaatccttacatgctggggacaatggctggaggtgctgctgattgccaattttggcataggaacctaggaaccaagtgtcgtctccatgagctttcaaacaagcgaaggatctctattgctggtgcttccaaactgttggctaacatcctttattcatatcgtgggatgggactgtcgattggtacaatgatcgctggatgggatgagaagggtcctggcttgtactatgttgacagtgagggtgcgcggctcgtggggaacagttaccgcttcagcatgtcagttgaggaagccgccgaattagcgcgacgggctatttatggggcaacattccgtgatgcagcaagtggtggttgtgttagtgtttaccacgttggccctgatggttggacgaagctttctggggatgatgtcggggagctgcactaccactactacccggttcagaaaactccggttgaacaggagatggccgatgcgcctactgcttctgcttaaacctgttgctgagaagaccttgagcggagccgcatgtatccatgaaccatgaattgtagaagcgccatgtttatgaacgaacttggacatgtttgtctcacatcgttagatcactctttgtgttctgttgattgatatcttaaatttgcgcaacagtccttttgagatttttttagatctgtgctatgttgactccagctgtctgcaatcagatctcgttctccgtacgtggacagtagaattcatgcacttctttttgaggctaaatttttaagtcttcaacgcttttttaataccaatttcagtctttctcttctctcactacaggctggttttcttaagctatctctaacatctcttctaaaatatagtgttacatggctatatgcatgcctttacacatgtttaaactatctactccactggtgttggataagtttttta

SEQ ID NO: 152047 - DNA, 696 bp, Zea Mays
atggagaattttccacttcatcaacgtgtagaggcgtcaatggagatttttccaccggtacgacttcctgaaaaaatcctagtgaaattcacaggtccaaatccatgctatggtgtcgctcagatcatatgccaatggctgcaggtacaaggtttacgtggaggggaacgcgtggtcggtgagcgagaagtacatcctggcgtgcgactcgccggtgctgttcgtgacgacgctcttccaggaaggacatcctgtgtccagggggctcgtcgccggcaatcactactggcccccatcaaccgggagcacatgtgcaagtccatcaacttcgccgttggctggggcaacgagcacccagtgcaggcgcaactcatcggcgagcagggcagccggtttgtgagggaggagctgagcatggactacgtctacgactacatgatgcacctgctcaccgagtacgccggactgctccggtacaagcccgccgtgccggagaaggccgtggagatatgcacggagtccgtggcctgccctgcccagagcctgcaccgggactgcatgatggattccatggagagtcacgttgcaggcttcgacctatgcacactgccaccgccgttcaccgacgaggaggccaaggcaatagccgacagggaagcggaggtcttgaggaaggtagagaagatggaggactag

SEQ ID NO: 152048 - DNA, 2001 bp, Zea Mays
atggagaattttccacttcatcaacgtgtagaggcgtcaatggagatttttccaccggtacgacttcctgaaaaaatcctagtgaaattcacaggtccaaatccatgctatggtgtcgctcagatcatatgccaatggctgcaggtacaaggtttacgtggaggggaacgcgtggtcggtgagcgagaagtacatcctggcgtgcgactcgccggtgctgttcgtgacgacgctcttccaggaaggacatcctgtgtccagggggctcgtcgccggcaatcactactggcccccatcaaccgggagcacatgtgcaagtccatcaacttcgccgttggctggggcaacgagcacccagtgcaggcgcaactcatcggcgagcagggcagccggtttgtgagggaggagctgagcatggactacgtctacgactacatgatgcacctgctcaccgagtacgccggactgctccggtacaagcccgccgtgccggagaaggccgtggagatatgcacggagtccgtggcctgccctgcccagagcctgcaccgggactgcatgatggattccatggagagtcacgttgcaggcttcgacctatgcacactgccaccgccgttcaccgacgaggaggccaaggcaatagccgacagggaagcggaggtcttgaggaaggtagagaagatggaggactaggcggcaagctagatagctgaaatctgacatcaaacaatttgatgcaaatgaggaaaacgagaagtttaatacaggtgcacaggaaaaaatagtcgatgttaaaagcattgtgaaataagtttgtacctgtaagtgcaaaccacctgtatacatccattgccattgatgttccactttcttcaagctcctcattttccgtggatttcacgctttcatttttcattttcctttttctgtcttcaagtgagaagcaagaaacgaatatgacatccagtttcacggtatattttttttcactcccaattctcaaagttgaatcatcaggtatacaggtagataccatatgcattggttttccatgcactgaactatctctgtccctttagacgtgcaattcttcatcctgcagaagagcaaacacttggatgttcttgtatcaaaacaaggcgatttacccaaaaacggggaaacgcataattagaagagtcgattgccagaaaatcattttttccctgtgttgtcaactttaactagataaatctatgatacagagaatgataccagaatacgttaaacatgctattttgttttagtccctaaggaaaaaaaaggatagtggaagcacaagactagagagtagactgccccgttagaaaacaaatggattagatttaaggtggttataacaatatatataattagttagaaggcacgaagcagtgtcttctgccctatcatgaaatcaagtattgctgtgaagtaagatgaacctgttaggcatgtttgtttgggcttcccggaagcttttagacctctgtttctagacctttcaaaacgcttttaaacgctaaaaagctcctggaagccaaaaacaagaagctcagtacagtgagctttggggcatttggcttatgggagcagtttggcttttggaaagtccaaaatctaatagtctaaaaatgaccaaaagctcaaacaaatcaacgggtagtccacaggaatgcgaatgccactagttgtcaacccaataggcataaaaaagatatccagcgtctggtcatgaaataattagttacttacagcatttcctttgacaatgcttcgtcagcctttacttttcaaatgtattatatttattgttgactatgaaatggagtttcacattattaggtagaccctcatcgcgcaattgtaaatcctttttagaaatataacaaacacagcactgatttttaaaacttgtattaaaaaaagacgggtaacagaagggataaatgtgtgttgaataaagatcagaccacctta

SEQ ID NO: 152049 - DNA, 366 bp, Zea Mays
tcttcaagtgagaagcaagaaacgaatatgacatccagtttcacggtatattttttttcactcccaattctcaaagttgaatcatcaggtatacaggtagataccatatgcattggttttccatgcactgaactatctctgtccctttagacgtgcaattcttcatcctgcagaagagcaaacacttggatgttcttgtatcaaaacaaggcgatttacccaaaaacggggaaacgcataattagaagagtcgattgccagaaaatcattttttccctgtgttgtcaactttaactagataaatctatgatacagagaatgataccagaatacgttaaacatgctattttgttttagtccctaagg

SEQ ID NO: 152050 - DNA, 792 bp, Zea Mays
cgcttcctgcccctggctgtggtcttcatccgtcccgccgcgccgccgtccgtttacgccgtctgctctagggtttgttcttctcctccctcctccccgtattcccccacatcgcggcttctcttctcccccctcgccctccctccccccactcccccattctcatccatgtaacctgcgcggtaagatttgcaacctcgtttcccaattttccctggtctgtaaccctagcttcactgtctcctgtccgtggctccatggatgcggtggctgagctgtgtgcgtgtgctctgaagtgctccgctgccgttgatgcagctcctgacaccgtaagtgcttcgtttacggtggcggttgtgcttcgtttacggtggcggttgtagctagggattggatgagattggaaaaaattaagaaagagtttgacttagactttgttcagttagggcttgttcggttattcccaaaacatatggattggatgagattggaaaaatttgagaaagagtttgacttgtttgagattcaaactcatccaatcccactcaatccacattgattgagagctaaccgaacaatacatgggatgaaatcccaccatggatttaatccggatatggattgggtgaatccatacctcacacccaatcccatgatgggattaaatccatcaactaatccatgtgtctctcaaagctacttattcttttgatccatggattttaatgtaaacttgtgcaatatcttcatggatttgttccatacctaatgagttatggatagaatccatgt

SEQ ID NO: 152051 - DNA, 81 bp, Zea Mays
tgttgcgacggaggaaaagctaagtgtgcattcaatctcgcttgtgccgccgtcgtgtgtggtgaggaggcgttgacatcc

SEQ ID NO: 152052 - DNA, 979 bp, Zea Mays
cggcgcgagttctgttttctggtggcaggaagaacacccgagcgcaagaacaccctggggtagattagtccgaagaattgaaaaacagacgttaacagagcgcgggggaataactgtcccaatctggcgcggctgtgagctccagaataccaaaatggcgatgcgcggctgtggagtaataatgtggcgaagccgcgcgacgagattgaataactccgtcccttccggccttccctctatctttcgctcgctctcggcgacagctgggcgaccgtcgtcgccgccgcccttctctaggtgcccaggtcttcgccggtccctttgccgcctcttcgccgccgatgagcaccagccagaaaagaagttgaaccatggggaagagaaagtcagctgctaagccacctcctaagaagcggatggacaagcttgacactgtcttttcctgcccattctgcaaccacgggagtagtgttgagtgccaaattgacatgaagaatctgattggcgaagcatcttgtagaatctgtcaggaaaacttcagcacaactgttaatgatatagtgaatggattgacgagtgtgagcgtgtcaacactgttgaaggcgacgatgatgcgtgagcttgccccatgcgatgaaactgttacctacaatcgtaatgtaatgtgctggtattctcgaatgccatagcccatagtcagccatggcttggaataacgtagtggctgactgatatgccagtaggcaccttatctagtacttacagaactaaaaaaagtttgtactatacatatatggacaaccttttttttttgaacgaaaacggcaggagctctgcccatcatttaaggggaaagagtttagagagtacaaacaacggtctgagaccggacaaaccacacccgagcacactcaaagggaggctaagccccacaccctaaatcctccaggctagcaggaagcagcaatatgaaaattac

SEQ ID NO: 152053 - DNA, 1172 bp, Zea Mays
cggcgcgagttctgttttctggtggcaggaagaacacccgagcgcaagaacaccctggggtagattagtccgaagaattgaaaaacagacgttaacagagcgcgggggaataactgtcccaatctggcgcggctgtgagctccagaataccaaaatggcgatgcgcggctgtggagtaataatgtggcgaagccgcgcgacgagattgaataactccgtcccttccggccttccctctatctttcgctcgctctcggcgacagctgggcgaccgtcgtcgccgccgcccttctctaggtgcccaggtcttcgccggtccctttgccgcctcttcgccgccgatgagcaccagccaggttgtttaggagacttaattactgtaatttgggttggtttgaaggaagaaaagaagttgaaccatggggaagagaaagtcagctgctaagccacctcctaagaagcggatggacaagcttgacactgtcttttcctgcccattctgcaaccacgggagtagtgttgagtgccaaattgacatgaagaatctgattggcgaagcatcttgtagaatctgtcaggaaaacttcagcacaactgttaatgatatagtgaatggattgacgagtgtgagcgtgtcaacactgttgaaggcgacgatgatgcgtgagcttgccccatgcgatgaaactgttacctacaatcgtaatgtaatgtgctggtattctcgaatgccatagcccatagtcagccatggcttggaataacgtagtggctgactgatatgccagtaggcaccttatctagtacttacagaactaaaaaaagtttgtactatacatatatggacaaccttataagtggctatgtgtgtacctatcctaacgcttatcccagatggtgtatcagcgtttttctgtgagattgttttcaagcaaggggttgttcattcattgggtcttctcaggaaaaagagaattatgctgcagttaaccagatggccgctgttgcgtcgacaatatagggtaaaacaaatgcaaccactgcagcgaaagatattcatagatagaattgttttcagttcattcaacgctgaaagcagtttcggtctggaggctgagctttggatcattggatggcagctttgacacctggagtaccgctcattagttttt

SEQ ID NO: 152054 - DNA, 1128 bp, Zea Mays
cggcgcgagttctgttttctggtggcaggaagaacacccgagcgcaagaacaccctggggtagattagtccgaagaattgaaaaacagacgttaacagagcgcgggggaataactgtcccaatctggcgcggctgtgagctccagaataccaaaatggcgatgcgcggctgtggagtaataatgtggcgaagccgcgcgacgagattgaataactccgtcccttccggccttccctctatctttcgctcgctctcggcgacagctgggcgaccgtcgtcgccgccgcccttctctaggtgcccaggtcttcgccggtccctttgccgcctcttcgccgccgatgagcaccagccaggaagaaaagaagttgaaccatggggaagagaaagtcagctgctaagccacctcctaagaagcggatggacaagcttgacactgtcttttcctgcccattctgcaaccacgggagtagtgttgagtgccaaattgacatgaagaatctgattggcgaagcatcttgtagaatctgtcaggaaaacttcagcacaactgttaatgatatagtgaatggattgacgagtgtgagcgtgtcaacactgttgaaggcgacgatgatgcgtgagcttgccccatgcgatgaaactgttacctacaatcgtaatgtaatgtgctggtattctcgaatgccatagcccatagtcagccatggcttggaataacgtagtggctgactgatatgccagtaggcaccttatctagtacttacagaactaaaaaaagtttgtactatacatatatggacaaccttataagtggctatgtgtgtacctatcctaacgcttatcccagatggtgtatcagcgtttttctgtgagattgttttcaagcaaggggttgttcattcattgggtcttctcaggaaaaagagaattatgctgcagttaaccagatggccgctgttgcgtcgacaatatagggtaaaacaaatgcaaccactgcagcgaaagatattcatagatagaattgttttcagttcattcaacgctgaaagcagtttcggtctggaggctgagctttggatcattggatggcagctttgacacctggagtaccgctcattagttttt

SEQ ID NO: 152055 - DNA, 348 bp, Zea Mays
atgctgatgccgttttcttttcggaaaggtatgctgccgccgtcctgcactgcacaccgcttcgcggacagatcgaccgggggctaccacgcatgcgcctcggacacccgacgtccagcgaccattcatcagacgcgagaaggaaacaagcatgacagcatcttaatcgttggcctcgacggtgtggtgttgcgtctagacaagctggcatcctccgcaagaaactctggagcattattgccgttcagatccgctactgttaccggtgccgcgtcccgtgctggagatgctgttgcgggaccgctcgtgagagcaggacggtccgtgttcttcttgctgaattcttga

SEQ ID NO: 152056 - DNA, 2202 bp, Zea Mays
gcacatccctccccatcccgtgcccccgtctccatccccactcctccaacggccgcgtcgttctcgttcgcccgccggcatcccattcgctcgtctcctcccctccgccggtcgctgtcaccccgcgtcgtcacgcgcccccggccgccgccatcactgtcatcgttccccctcctaaagccacccgtacgccagccgcaatggatttttgcaccgcatctgcatcctctcgccatggcgccgccgcccgcgtcgcctgctgactcggcccctgatccaaggccgaccgccagcgcgcccgtgcccatcaccgtgccgagcccgcgtgaccacgcgcaccaccaccacctggtagatcgtcgggacacgccgcggggccgcgcgtgggaaccggagcggaaccggcgcggagaggcgatggacggtgctgcagcggtcaagctggtacccggtgaggccgggtacgtcttagaagacgtgccgcacgtgtcggactacctccccgatctcccgacctactcaaatccattacaagataacccggcatactctgttgtgaagcagtactttgtaaacccagatgacaccgtctgccagaagattgttgttcacaaggatgggcccagaggtaaccatttccgtcgtgctggacctcgccaaaaggtatattttgaaccggatgaggtccacgcatgcattgtcacttgtggaggattgtgccctggacttaatactgtgattagggaaattgtatgtggcttatctgacatgtatggtgtcaccaagatacttgggattcagggtgggtacagaggcttctatgctcgcaataccatcaccttgactccaaagagtgtaaatgacattcacaaaaggggtggaactattcttggatcatctcgaggaggtcatgacaccgtgaagatagttgacagcatccaagatcgtgacataaatcaggtctatgtaattggtggagatggtactcaaaggggtgctggagtgattttcgaagaagttagaagacgcggtctcaaagtttctgttgctggcattccaaagactattgacaatgacatccctgtaattgacaagtcatttggtttcgacacagcagtcgaggaggctcaacgtgcaataaatgctgctcatgtggaggctgtaagtgctgagaatggtataggtcttgtcaagctaatgggtcggcacagtggttttattgcacattatgctactctggctagcagggacgtggattgttgcttgatcccagaatcaccgttctatttggaaggcgaaggcggactttttagatacatagaaaaacgtttgaaggacaatggtcatatggttatcgttgttgctgagggtgctggacagaaacttattgctgaaaccatgcagtcaattgggaaagatgcttcaggcaacgagctgcttcttgatgttggcctttggttatctcagaagataaatgaacatttcaagaaaaacaagatgaccattaatctgaagtacatagatccaacgtacatgatacgtgccatcccaagcaatgcttctgataacgtctattgcacactgctggctcacagcgtggtccatggagccatggctggatatactggttttaccattggccaagtgaatggtcggcactgctacatcccattctataggataacagagaagcagaacagagtttcgataaccgacaggatgtgggcaaggcttctctcgtcgacgaaccagccaagcttcctttgcaacaaagtcgtcgaggaggcaaagaaggaacatgaaagagcaacgcgacttttagatggctcgccttcccatcgaaaaggttgacgtcgagaaggttgcggcttccaacttgggtcctactaccaactgaggtcgactgccgctgatatgtgcggcggatgaaccttttgcttaccacggtttcagtagctacggcgaccggtgtttctctcactccagttttttctatcaaaaaggaacacattatccctttctaataatttaatagtgttaaatactatcactatgtacagtttggctggcacatgtctgactataataacatgccattttcattgttgttcaagtatattcttttgtaattttgtgtaagaataagttcatagacccccaaagaaagttattataattttatgacagaaatctaagaaccac

SEQ ID NO: 152057 - DNA, 3077 bp, Zea Mays
atggcgccgccgcccgcgtcgcctgctgactcggcccctgatccaaggccgaccgccagcgcgcccgtgcccatcaccgtgccgagcccgcgtgaccacgcgcaccaccaccacctggtagatcgtcgggacacgccgcggggccgcgcgtgggaaccggagcggaaccggcgcggagaggcgatggacggtgctgcagcggtcaagctggtacccggtgaggccgggtacgtcttagaagacgtgccgcacgtgtcggactacctccccgatctcccgacctactcaaatccattacaagataacccggcatactctgttgtgaagcagtactttgtaaacccagatgacaccgtctgccagaagattgttgttcacaaggatgggcccagaggtaaccatttccgtcgtgctggacctcgccaaaaggtatattttgaaccggatgaggtccacgcatgcattgtcacttgtggaggattgtgccctggacttaatactgtgattagggaaattgtatgtggcttatctgacatgtatggtgtcaccaagatacttgggattcagggtgggtacagaggcttctatgctcgcaataccatcaccttgactccaaagagtgtaaatgacattcacaaaaggggtggaactattcttggatcatctcgaggaggtcatgacaccgtgaagatagttgacagcatccaagatcgtgacataaatcaggtctatgtaattggtggagatggtactcaaaggggtgctggagtgattttcgaagaagttagaagacgcggtctcaaagtttctgttgctggcattccaaagactattgacaatgacatccctgtaattgacaagtcatttggtttcgacacagcagtcgaggaggctcaacgtgcaataaatgctgctcatgtggaggctgtaagtgctgagaatggtataggtcttgtcaagctaatgggtcggcacagtggttttattgcacattatgctactctggctagcagggacgtggattgttgcttgatcccagaatcaccgttctatttggaaggcgaaggcggactttttagatacatagaaaaacgtttgaaggacaatggtcatatggttatcgttgttgctgagggtgctggacagaaacttattgctgaaaccatgcagtcaattgggaaagatgcttcaggcaacgagctgcttcttgatgttggcctttggttatctcagaagataaatgaacatttcaagaaaaacaagatgaccattaatctgaagtacatagatccaacgtacatgatacgtgccatcccaagcaatgcttctgataacgtctattgcacactgctggctcacagcgtggtccatggagccatggctggatatactggttttaccattggccaagtgaatggtcggcactgctacatcccattctatagcacgctgggttgcgcgcgtggcgtggcccgtgacgactcaaaaaggcccatgtggaaacagaaagttccgtcagcggtgaccggtgagcagtcgcgttttagcgggacgtttgtcccacctcggaagcggaagacggggaggcagggggaggcgggcataagaaacggcggtgggctacctgctgaagacatctttgcgcttggggcaatgacgcagcttatgaggtcataccgaggcgcgtcaattgctggttgaaaactatttccaaaccccctctttggcccactgggccactgagaatttctggaagggctccttttcctcggagaagcaatcttgagtcctggcctgggtcttcgctgccagcacgcttgtggccaagaaacgttgggggcagtttggacctcggagcagcagcatccatggcgggagaggaggccgggaggaggggcgttccctctctgctgaacccgccgtccgcttccagcgaggggcagcaggagcacatcgcctctgatgtcacacagctcatcggatggacacctctggtcgagctcaagcgaatcgccgccaaggaaggggtatgcgcgcgcatcgtcggcaaggtggaggcgtaccagcctctgtgctccgtcaaggatcgcagcgctctgagaatgatcgaagacgcagaggagagggggctgatctcgcccggcaccacgacgctcgtggagccgacgagcggcaacctggggctgggcctggtcctcgtcgccctccgcaagggctacaggttcgtcgcggtcatgccaggccagtactcgctcgacaagcagatcctgctgacatacatgggcgcagagctgtacgtaacagatccatccctggggttcccgggcataaccgccaaggtcgaggagctcaagaaggagctgcccaacgtgcacgtcctcgaccagttctccaacagagcgaatcctgaagcgcatgttagatggactgggcctgagatctggaaggacaccgccggtaaggtggacatattcgtggccggttcaggctcgggaggcacggtgtctggcgtcggcaagtacctcaagacgcagaaccccagcgtcaaggtcatctgcgttgagcctgccgagagcccagttgtttcaggcggggaaccaggcagccacaagatccagggaatagggccgggattcataccggaagtgctggacacctcggtcatcgacgaggccgtcacggtgaccaccgaggaggcgatggcgggcgcccggaggctggccagggaggagggcctgctcgtcggcatctcttccggggccaacctggcggcctgcttgaaggttctgcactgcacatggtcgcggcgcgagaagagagcaaggggaagatgattgtcaccgtgtttccgagcgggggcgagaggtacatgacctccgacctgttcgccgccgccagagaggagtgtattgccatgacgttttgatctttttttaccccctccccccagaaaaaaggggaaaacaaatacgcgtgtatctttatcttcacatggtattggtttaccatgcatgtacatttaaaaatatttttccccgaaacggaatagaacagctgcgtgcttgtttacacatcaa

SEQ ID NO: 152058 - DNA, 3251 bp, Zea Mays
atggcgccgccgcccgcgtcgcctgctgactcggcccctgatccaaggccgaccgccagcgcgcccgtgcccatcaccgtgccgagcccgcgtgaccacgcgcaccaccaccacctggtagatcgtcgggacacgccgcggggccgcgcgtgggaaccggagcggaaccggcgcggagaggcgatggacggtgctgcagcggtcaagctggtacccggtgaggccgggtacgtcttagaagacgtgccgcacgtgtcggactacctccccgatctcccgacctactcaaatccattacaagataacccggcatactctgttgtgaagcagtactttgtaaacccagatgacaccgtctgccagaagattgttgttcacaaggatgggcccagaggtaaccatttccgtcgtgctggacctcgccaaaaggtatattttgaaccggatgaggtccacgcatgcattgtcacttgtggaggattgtgccctggacttaatactgtgattagggaaattgtatgtggcttatctgacatgtatggtgtcaccaagatacttgggattcagggtgggtacagaggcttctatgctcgcaataccatcaccttgactccaaagagtgtaaatgacattcacaaaaggggtggaactattcttggatcatctcgaggaggtcatgacaccgtgaagatagttgacagcatccaagatcgtgacataaatcaggtctatgtaattggtggagatggtactcaaaggggtgctggagtgattttcgaagaagttagaagacgcggtctcaaagtttctgttgctggcattccaaagactattgacaatgacatccctgtaattgacaagtcatttggtttcgacacagcagtcgaggaggctcaacgtgcaataaatgctgctcatgtggaggctgtaagtgctgagaatggtataggtcttgtcaagctaatgggtcggcacagtggttttattgcacattatgctactctggctagcagggacgtggattgttgcttgatcccagaatcaccgttctatttggaaggcgaaggcggactttttagatacatagaaaaacgtttgaaggacaatggtcatatggttatcgttgttgctgagggtgctggacagaaacttattgctgaaaccatgcagtcaattgggaaagatgcttcaggcaacgagctgcttcttgatgttggcctttggttatctcagaagataaatgaacatttcaagaaaaacaagatgaccattaatctgaagtacatagatccaacgtacatgatacgtgccatcccaagcaatgcttctgataacgtctattgcacactgctggctcacagcgtggtccatggagccatggctggatatactggttttaccattggccaagtgaatggtcggcactgctacatcccattctatagcacgctgggttgcgcgcgtggcgtggcccgtgacgactcaaaaaggcccatgtggaaacagaaagttccgtcagcggtgaccggtgagcagtcgcgttttagcgggacgtttgtcccacctcggaagcggaagacggggaggcagggggaggcgggcataagaaacggcggtgggctacctgctgaagacatctttgcgcttggggcaatgacgcagcttatgaggtcataccgaggcgcgtcaattgctggttgaaaactatttccaaaccccctctttggcccactgggccactgagaatttctggaagggctccttttcctcggagaagcaatcttgagtcctggcctgggtcttcgctgccagcacgcttgtggccaagaaacgttgggggcagtttggacctcggagcagcagcatccatggcgggagaggaggccgggaggaggggcgttccctctctgctgaacccgccgtccgcttccagcgaggggcagcaggagcacatcgcctctgatgtcacacagctcatcggatggacacctctggtcgagctcaagcgaatcgccgccaaggaaggggtatgcgcgcgcatcgtcggcaaggtggaggcgtaccagcctctgtgctccgtcaaggatcgcagcgctctgagaatgatcgaagacgcagaggagagggggctgatctcgcccggcaccacgacgctcgtggagccgacgagcggcaacctggggctgggcctggtcctcgtcgccctccgcaagggctacaggttcgtcgcggtcatgccaggccagtactcgctcgacaagcagatcctgctgacatacatgggcgcagagctgtacgtaacagatccatccctggggttcccgggcataaccgccaaggtcgaggagctcaagaaggagctgcccaacgtgcacgtcctcgaccagttctccaacagagcgaatcctgaagcgcatgttagatggactgggcctgagatctggaaggacaccgccggtaaggtggacatattcgtggccggttcaggctcgggaggcacggtgtctggcgtcggcaagtacctcaagacgcagaaccccagcgtcaaggtcatctgcgttgagcctgccgagagcccagttgtttcaggcggggaaccaggcagccacaagatccagggaatagggccgggattcataccggaagtgctggacacctcggtcatcgacgaggccgtcacggtgaccaccgaggaggcgatggcgggcgcccggaggctggccagggaggagggcctgctcgtcggcatctcttccggggccaacctggcggcctgcttgaaggtcgcggcgcgagaagagagcaaggggaagatgattgtcaccgtgtttccgagcgggggcgagaggtacatgacctccgacctgttcgccgccgccagagaggagtgtattgccatgacgttttgatctttttttaccccctccccccagaaaaaaggggaaaacaaatacgcgtgtatctttatcttcacatggtattggtttaccatgcatgtacatttaaaaatatttttccccgaaacggaatagaacagctgcgtgcttgtttacacatcaagtcgatctctcctgaaccgatggtgaaaacagtggcggagcccggatccggaaaagttctaactactacaacaaaaaaaccggtagtatattatcaccgaggtctaatctaatttaggaaccccattttcttaaggtatctccatttttctaagagaaattagctaattttttccttagaaaaaataagaa

SEQ ID NO: 152059 - DNA, 574 bp, Zea Mays
atgcaatcaaacgtcctacggagaacaagtcgtcgatcgacagccgtgctcgtacgtcgtaggcggcggcatcggggcatggacaggtgcggcggcggcgccatggcgtcgtacctggtggcagtcgtcctgctcgttgcgctcttcgcgtcctctgcaaaatcaggtcgtcctgagccactcgacggcggcggcaacgttaacggcaatggcacggcgccgccagtcaacggcggcggccccggccccggccccggcgccgtactgaagctgcagttctgcatccagaggaactgcgtgtacgaaggccgtggcaacgccccgtgcttctgctgcggggccttgaagcccaaccagtgctacgaaacgagggaccggtgcagcggcaactgcgtgtagcggtgtagccgcgccgccgccggcgagggcgagcgatgggagatcgatcgatcggtccatcgatctcagccgccgccgccgccatcgaatggctaaacaacgaactgcgtgtttttttttgtttttctgtcttgaagaagaaccttggtaaattgcgctgttatagtgctatata

SEQ ID NO: 152060 - DNA, 492 bp, Zea Mays
atggcccgcgtgtatgttggcaacttggattcacggatggaggtcgctaactgttgttctcaatgcactgtttgggttgcacgtaaaccacctggctgtgcatttattgattttgacgacaggagggatgcggaggatgctattagcgatctagatggtaagaatggatggagagttgaactatctcgtaattctagtggtcgtggtggtcgtgatcggtatggtggatctgagtcgaagtgctatgaatgtggtgagactggacactttgcacgtgaatgtcatctgcgcattgcctctggaggtctaggcagtggaagacggcgcagtcgtagcaggagcaggagccgcagcggcagccctagataccgcaggagcaggagccgcagccgcatatcagtagatgaagcacatgctttcatatatatgaacatcttcttaaccatgttctttttctttctttttagctgtcatgcaaaccaatgggtttga

SEQ ID NO: 152061 - DNA, 692 bp, Zea Mays
gtgacttttgcacggcacaaaatagctctctgtttccagagttctctgtctccagcgctttctgctttttcagtattcgcgtacctgaggagagaaagagagagcgagttcgccggcagtcgccgatcgccgtcggtgcagccattctggcagccggcgccaacaccgacgccgacgcaaaggccaaggacgcccctgtcatctcgccgcccttcgagagcatcccggagctccacgagggcgccatgaagggaaagtgggaagctactccttcgccttcccaaacttggtagaggacaagatgaactactccaaggagccgtctcagcaggacctccagccggagccagcagcggcatcggcggaggcggccaacaaggccgtgccaacaccggcagaagctgaagcgagggcagacggcagaggcgcagccgcagacgagcagcaacccggaggcgactccggttccgggagcaggacgaaagggcggcttgttctcaagcttcccctgctgctgaatgctgataagcgagcaacatgcagtggccagcatggtatctctgtaaatcaccactagctcgggcgttatgtaaaaatggagtgttgtagagtgcgaagaaatgcagggtgcaagtgtaagggcgaagggtttcctcttcctggtacaaaaaaatggcgttggggcagcaaag

SEQ ID NO: 152062 - DNA, 2103 bp, Zea Mays
gctcttcctgctcggcgaaatgggggccaggcagctccacctcgagatcgcctcccggacgctggtcagcgcctcgcacccgccgccgggcttcccctccgtcctgaccgtctccaacctggacctcgtcctcgggccgttccccatcttcctcatctcaatctacgccgcccccgccgccggcctcgacgcggtcctcgacatcgtgcgcgtcaccttgccgtcctacctctcccgcctcttccccttcgccggccgcgtcgtgattgacccggagaccaagatccctgaggtcgcttgcaacaacgccggcgccgagctcgtcgtcgccgacgccgcggtgccgctcgcggccgttgacttctcggaggtcgaccagtcgctggggctcatccagatacccttcgacgcgaggctcgccctttcagtgcagctggtccggttcgcgtgcggcgggtacgcgctcacgctgggcacgagccacctcctcgcggacggccgcgcgttcaccctgctgctgaccgcgctcgcggagatggtccgcgacggcggcctctcccgcgagcccctgctggaccggtcgctgttcaagccgcggtcgccgccgcggtacagcgcgtcgctggacgccgagttcgcccggttcacgccggagaccatgatcaaccctctcctagccgcggccatcaggcggcggatgtaccgcatcgacgcggccgacctcgcggcgctgcaggccgcggcatcgccctctgccggcgggggccgccgcgcgtcgcgcttcgtggcgctgtgcgcgcacgtgtggaagctcctcgcgcgcgccgtcggcgacgccagccccagctgccggatggcgtggatcgtcgacgggcggaagcaggtggagccgtcggacggcgcgctggaccgctacatcgggaacgtggtgacgtacacggcccgcgaggcgagcgtggcggagctgctgcgcgcgccgctccccgaggtggcgggcatggtgcgcgcggccatcgcgggggtcacgacggcggcgcggttccaggagctggtggactggatggaggagcggaaggcggcgttcagggacggcggcaagtggacggagacggtgaacctggggctcgggagccccgcgctcatcatgtccgggctgcttccgttcgccatcgacggggacctcgggttcgggaagcccagcctcgtgctgccctgggtgcgccatggccggctggggtccgcgtccgtgacggtggtgccctgccccagcggcgacgggtcgtggttcttcggcggcaccaggatgtggccgcggctcatggaggtggtcgaatccgaccctttgatgaagccggcagccaacctgggaatggcgaccgcggcgggatcccgtctgtgactgtgagctcgcgctggcggtaccggccattacggtggtatcgtctaaaattaaatcaagcaatagcatcttgttttgatatgttgctgaactatattctaacttcatttatgactgaagttgtatgtaaatgaatcatatataatttttttaggtagctatatttatataatttgtgatagttcaaaatagtacataaaaatgttgtatacctagatagagaaaagaacggaatgaacaccggaatatatgaaagtgagcaaccaacgctcttgtccaacgtccggtcaaccgccgcatggttggtgcgcgggagttcgggacggtggagagccagccaggtactgctgttcgatttatttatttatttatttgttattccgttacgaatgtttgtcaggttgcatagatggtgtcaggaacattgtacaatacttcgtttatatacccacccgaatgcatttgagtctgtcatgaattcaccgttacaatggcaacatgaaaccctgactagagattggcctgcaggtagcattggggcttacatgttaccggaaatccggaatgcatgcaacgttctgtcgattatccattgaagggcacgtgctctactaatgttcaccatcacaacagaaaatcctatcccactcttaacggacccgcacgccgccatcagaggctgcatgcaatggcattcgttcatt

SEQ ID NO: 152063 - DNA, 591 bp, Zea Mays
atgtcacttatttctctaaatttacaacaccatgtcctggaaatatgtctgtgtggtgtggagaatgctgacaccattcagaccaaagtgtccaaaagaaaaaaggaagatcaaaatgtcatggcaatgcactcctctcgcacatctgcaaagaggtcggagttgatgtatctctcgccgccacttgggaacacagtgacgatcatcttgcccttgttctcctgtctcgaagcgaccttcaaacaagctgccaggtttgctccggaagaaatgcccacgagcaggccctcttccctggccagcctcctcgcattcgccatggcctcctcggtgctcacggtgacggtctcgtcgatgaccgaggtgtccagaacttcaggtagaaaccctgggcctactccctggattttatgcttgccaggcgcgccacctgaaatcactgggctttctgcaggctcaacgcagatgatcttgacgcctggcttttgcatcttcagatacttcccgacgccagaaacagtgcctcctgtgcctgaaccggctacgaatacatccaccttgcctgccgtgtccttccagatctcaggccct

SEQ ID NO: 152064 - DNA, 948 bp, Zea Mays
atgtcacttatttctctaaatttacaacaccatgtcctggaaatatgtctgtgtggtgtggagaatgctgacaccattcagaccaaagtgtccaaaagaaaaaaggaagatcaaaatgtcatggcaatgcactcctctcgcacatctgcaaagaggtcggagttgatgtatctctcgccgccacttgggaacacagtgacgatcatcttgcccttgttctcctgtctcgaagcgaccttcaaacaagctgccaggtttgctccggaagaaatgcccacgagcaggccctcttccctggccagcctcctcgcattcgccatggcctcctcggtgctcacggtgacggtctcgtcgatgaccgaggtgtccagaacttcaggtagaaaccctgggcctactccctggattttatgcttgccaggcgcgccacctgaagaacaccaatgcttaccaatgtgcagatgcagtgctaattcttatactagcaaatactgtatttttgtaaggccgctgctcaaggcttcgaaaagattgtttcgagtcaactgctctttctgcatctgtgtagcactacctgaaatcactgggctttctgcaggctcaacgcagatgatcttgacgcctggcttttgcatcttcagatacttcccgacgccagaaacagtgcctcctgtgcctgaaccggctacgaatacatccaccttgcctgccgtgtccttccagatctcaggcccggtcaatctgaagtgggcttcagaattcgctttgttcgtgacttggttcagaacatgtacatttggcagctgttttcggagctgttcaactttgtcaaacatgcccggaaagccaagggccggatctgttaagtatagctccgcgcccatgaacctcagcaagatctgcttgtcaagcgagtatttagccggcatgactgcaatgagcctgtaa

SEQ ID NO: 152065 - DNA, 508 bp, Zea Mays
aacgaataggtccatcgccgcgcgacagcccactccagccgcgcccagccccgtgaacatccttcctctatcctataccctccagctccagccgccgccagccgtggaggtggagccgcccacgcccagaccccggagcaccgctggagctcgcagcgccgctcgcccggagcacggaggccggaccgccggacggccggagcactgccgtaggtcgcaggcccctcgccccaccggcgcccgaagtccagccgccgactcgccgactcgcaggttgtccagccgccggccgccgactcgtcgttgtccagccgccgaccgtcgactcgttgttgtccagccgccgactggtcgttgtccagccgccgaccacgcggtgaccgtgagcccgtgagcctgtgaccgtgagcacgtgagccaaggagagttactgatttgacatataatctacaaggaattcttcatctaaggtcgtgctccgccactggggagggaggtggtggggaat

SEQ ID NO: 152066 - DNA, 827 bp, Zea Mays
ctccattccctcccgccgctccgctccacgaaaatggcgcctccgctcgaagacctcacccgggtactcgccgagctcgcctcgggcctcgcccagcctcctgctggcggcggtacattctcatccaccgactccctcccggcctccatctcctccctcgccgccgccctcaaccccagcggcgacggggccgccgcctcatccggaaccggggttctggacgccgcgctctccctcatgtgcttcgacccgctagaggtgaatagtgcccgcgtcaactgccttgtccgcaccctcgtctccgtgctctcggcgtcagtctcgtgctgcgtggtccgtcccgatggggacgctgctgaggagatgctctgtgtcgggagttccgtgtcgcccctggactgccgcgagctgctccggtcgtgtgcagccctcgtggagaaattgggggattgtggcgatagaaggcattcctacgatctgttgtatgctgttgtgaaaactatcctgctatcccctcactaccagtgtctttccccgttaccatattataaggaagaggaagaaagagtatctcatatgggaaccattgctgcggagttaataaaccattcttctgatcatatccttcctagtgaccactcaatcccaccaaggttgctttcatggcatcttgatccattaattcttaggcatgatctctcagcaatgctccaggaggtaattagaaggcccttgctttgcctgagaaaggaattgtataatcggatggaatggcgtatcatcataatttgcctggtttgctgcccaacaatatttatggagatgag

SEQ ID NO: 152067 - DNA, 2025 bp, Zea Mays
ctccattccctcccgccgctccgctccacgaaaatggcgcctccgctcgaagacctcacccgggtactcgccgagctcgcctcgggcctcgcccagcctcctgctggcggcggtacattctcatccaccgactccctcccggcctccatctcctccctcgccgccgccctcaaccccagcggcgacggggccgccgcctcatccggaaccggggttctggacgccgcgctctccctcatgtgcttcgacccgctagaggtgaatagtgcccgcgtcaactgccttgtccgcaccctcgtctccgtgctctcggcgtcagtctcgtgctgcgtggtccgtcccgatggggacgctgctgaggagatgctctgtgtcgggagttccgtgtcgcccctggactgccgcgagctgctccggtcgtgtgcagccctcgtggagaaattgggggattgtggcgatagaaggcattcctacgatctgttgtatgctgttgtgaaaactatcctgctatcccctcactaccagtgtctttccccgttaccatattataaggaagaggaagaaagagtatctcatatgggaaccattgctgcggagttaataaaccattcttctgatcatatccttcctagtgaccactcaatcccaccaaggttgctttcatggcatcttgatccattaattcttaggcatgatctctcagcaatgctccaggagatgagatcactattacacttctggcttctagcaacgggtttgggttctgtgctagaacttaacaatgcattggtatcatcagcattagacattcttctcaagcctatgtcatggggaatatccatagaattagggcagagatttcccttttctcatgcttacttcccaagccaacaaagtgacttgcttgcgatactaactggacccttatcttataaaggttttttggacctagtttcttatattagtgccttggttcatttggacaacacaagaactagatgctcttcgcagaaaaacttacaattacaaccatcgaagggattggtaaaatacaattctgcttggtacatgattattagtttccctatttggttcagttatgcaactgctttacttttccacagagaaggctcacaagattatttatcagaaacattatccaaagagataactgctgaatcaataagtgatgtcagtcttgttcagagggcagccttttacctttcttggctgctatgcccttataatcatgatcaacgcgagatgctatcaaacaatattttggaaatatcacattcttgggctaggaacaacaaaaagtgcgtaagctaccaaagtactgtgaataataggaggaaactgcgaatacccacagctgcggactctgagaaattccatgtgccagtcaacactataagctcccttgttaaagaatttgatgatcgctgtgtaaaatgttgtagcccaactgcctttcctcaagcacaagttggaaatctatcggacctccatcccttatactttaacctgttgcatcagtggattcctttgggagtattgcttgtatcacctagttgtgttaacgagcagaactgtgacatcctcctgcgctacacaagcactgggcaggttctggagtcaaatggagcacgagtaaaaacaaaagatgatgccactaatgatggtttcttaggcagctgcattggtactgctgagagatgggcattgactggagcatatctcatctttggctggcttgacgtagttgaggatatggccccattgatatttgattgcgaagataaatgtcatagttttgtcagccaactcagaaacaagacaggcccatacctgctcaagtgcgtgaagtcattatttaagacgttggaacagccaaatcaagataaagattttgtgattgatcttcataataggttgttaaactgggataagaacgtgcaaggctgtgagatatttggggatgttatccttgaaatgaacaagaagtttaatcttcctttgtag

SEQ ID NO: 152068 - DNA, 2994 bp, Zea Mays
ctccattccctcccgccgctccgctccacgaaaatggcgcctccgctcgaagacctcacccgggtactcgccgagctcgcctcgggcctcgcccagcctcctgctggcggcggtacattctcatccaccgactccctcccggcctccatctcctccctcgccgccgccctcaaccccagcggcgacggggccgccgcctcatccggaaccggggttctggacgccgcgctctccctcatgtgcttcgacccgctagaggtgaatagtgcccgcgtcaactgccttgtccgcaccctcgtctccgtgctctcggcgtcagtctcgtgctgcgtggtccgtcccgatggggacgctgctgaggagatgctctgtgtcgggagttccgtgtcgcccctggactgccgcgagctgctccggtcgtgtgcagccctcgtggagaaattgggggattgtggcgatagaaggcattcctacgatctgttgtatgctgttgtgaaaactatcctgctatcccctcactaccagtgtctttccccgttaccatattataaggaagaggaagaaagagtatctcatatgggaaccattgctgcggagttaataaaccattcttctgatcatatccttcctagtgaccactcaatcccaccaaggttgctttcatggcatcttgatccattaattcttaggcatgatctctcagcaatgctccaggaggtaattagaaggcccttgctttgcctgagaaaggaattgtataatcggatggaatggcgtatcatcataatttgcctggtttgctgcccaacaatatttatggagatgagatcactattacacttctggcttctagcaacgtaacttcacaccttaagcactcatgaaatgctctgtactcttgtttgcactgagtttgatttctctcggtctcggtcaatgggcttctacacatacttttaatcttacagatagaactgcagagcagcaaaggttgagtggcttgccacatcatgacactccaccaaatagttatttcagaaacttcgatatgactaaagcatagacaaggcaaaattaggaatgcaccaaacaggtcgttggttaaagttatcttaggaaagtgggttgaaacagatttcatgatgaacactaccaaaccatctctgcagagcttattccacatttatcacttaattttttaattccaattttaaccttacatttttaaagaactaaaattgactgaatttttagttatttattttttgtatcattgcttgttgtaccctaaatgatattttaccaacagtactattatgaatgttacatttacacatctttatgtattgtctgaactggttagtggttatacattgtgggctcactgtttaaggactgcttcttgtaaaatctctttattcatcctttatttgtgcaggggtttgggttctgtgctagaacttaacaatgcattggtatcatcagcattagacattcttctcaagcctatgtcatggggaatatccatagaattagggcagagatttcccttttctcatgcttacttcccaagccaacaaagtgacttgcttgcgatactaactggacccttatcttataaaggttttttggacctagtttcttatattagtgccttggttcatttggacaacacaagaactagatgctcttcgcagaaaaacttacaattacaaccatcgaagggattggtaaaatacaattctgcttggtatggtttttaaatatgcaacacagctagatgtttagcatttgtctgacagaagttaactgcacctgctataactgtgcttctgcaggtacatgattattagtttccctatttggttcagttatgcaactgctttacttttccacagagaaggctcacaagattatttatcagaaacattatccaaagagataactgctgaatcaataagtgatgtcagtcttgttcagagggcagccttttacctttcttggctgctatgcccttataatcatgatcaacgcgagatgctatcaaacaatattttggaaatatcacattcttgggctaggaacaacaaaaagtgcgtaagctaccaaagtactgtgaataataggaggaaactgcgaatacccacagctgcggactctgagaaattccatgtgccagtcaacactataagctcccttgttaaagaatttgatgatcgctgtgtaaaatgttgtagcccaactgcctttcctcaagcacaagttggaaatctatcggacctccatcccttatactttaacctgttgcatcagtggattcctttgggagtattgcttgtatcacctagttgtgttaacgagcagaactgtgacatcctcctgcgctacacaagcactgggcaggttctggagtcaaatggagcacgagtaaaaacaaaagatgatgccactaatgatggtttcttaggcagctgcattggtactgctgagagatgggcattgactggagcatatctcatctttggctggcttgacgtagttgaggatatggccccattgatatttgattgcgaagataaatgtcatagttttgtcagccaactcagaaacaagacaggcccatacctgctcaagtgcgtgaagtcattatttaagacgttggaacagccaaatcaagataaagattttgtgattgatcttcataataggttgttaaactgggataagaacgtgcaaggctgtgagatatttggggatgttatccttgaaatgaacaagaagtttaatcttcctttgtagtagtgaccagggattctatgcagctcttaaatatttgaacgtacttaaaagattgtcttaatatgagcgtatgagaaacggctgtatgaaccttagtttttggcttttgttgagtttcaactctagcctattctaaaagatttttgttgttgtcgttttaaatatctaaaatgaatgtcggattctttgcctctg

SEQ ID NO: 152069 - DNA, 2068 bp, Zea Mays
ctcagtcgttaatccccgacccaaaccaccactcaccgagacaccgcagtcgccttcgccctctcaagattgagatggacgccaccccgccatccaagaaggccaagacgacggccgcgccgccgccgcgcaagctgcgggaggccgccgctctggcggacgaggtccggacgccggataaggccgcgaagaagatgacgccggcggcggcgttcgagcagatcccgacgccggagaagccggaggagatgccgagggcgcgcggccgcagcgtggcgttctccgtcaaggagatccgccgggcggcgctcgggctgcggcggcccgcggcgcaggccgaggcggcggtggaggatgatctcgagtccgtcgagcgggagctcggtgttggcgccggggctggccggagtcccgtcaagcgcaaggcggaggtcaagctgccggagagttatgagatgctcttcgagttcttcaactgcctggagagctctacccgactgctccgtatgaaggggtccaaggccacgttccccaacatctgttctagcattcagaatttgaccgagcggagatttacccacagccatcttgcacagctcaagtacataatgccagaggcgatcgtcatcaacaagatccttttgcgtgacgacacgacatgctgcatgtaccctgatcttcaggtgaacctcctagttggtgctgttgagaacgtccttaagcaaaagggagaaactgcatacctggcattaagaaggacctttaggcagaggctcgtggaattctacagggagcaccctgagggagatgacattccagagcacgagctgccacacccattcaaccgagcgagatcgagcttgccccaggacgaacaaaggactgctcctgaatcttcgtccccactcaagccatctgatgtcaatggacagcagcagaccgctgctgtgatgtcgcacatgtcacagtcgttcaagaggaggttctcgcagagatctccgatcggctctgcaacagccagtgcacccagtccactggtgaaggctgcttccactgctccatcaccactgagcagaaactccctctttggctgtgttgattctggcagcacttgtggtgatgaaaaatcatcaagtgccaaagaagacttctgcaagtccggtgtttcagaaaacacccctgcaaagtttgcctccacaccagcgaggctaatggcgcctacgccaggcctcaagacgccaaagagaccaatctctgccacaggttatgataccccgcctctgagaacggcgaagagatcagctcgcgcgaagctgtttaccactccaacaaagaataacagtacgggtggagagagccaaagcgcaagcgtatctggcgctagcgccgacgacgacttgctcagcttccttccacagtccctccttcagtcggtgaaggagaaggaagacagggctttggtagagaaagaatccggtttcgccgatcaggtcagaaggcagaagctgatcgcctccctgcccagcaccttcgacgtcgtgttcctcatctaccagtcgaggcagcggtcagtgatgacaaagcaggagctagtccacaagatcatcgcgagcagtcctaagatagctgacagaagtgaagttgaggggcatctgacgctgttgaaggagctcgttccagactggttctccgagaaaaccgcacgcagcggggatgctctgtgctgcgtcgatgccactttgagccagtcggagattcggcagagactgtacgctgctgctgctgctgctgagtaggaccggatgcgaagaggacgagcagcggaaaagagcactcagccaagggccgtcagtttctagtgttgttgtgatagaagccttagcttagatgaaaatggatgacttatgtatagtgaagccattctgacaactgatggttcctcactctgaaacacccactgaaattaagacgagtccatttgtctactgaatgatgactggctggcctctttgtaaacccctctcctgcctgaagtagcaatgagatgacaaaaatgtcttggtctgct

SEQ ID NO: 152070 - DNA, 1310 bp, Zea Mays
aacttttctacgtccagaatggtccggactccggactgcgtttccgtttactccggctcacgctcaccccgcctgctctctcattctcgacgatggctgggcgaccgccgccgtcctacgccaggtatcccgcgcttcaaggcggcaggcccttcgccggcgaagagcacccatcagattcccgagttgtttatcccagttatcttgcacccgagggctccgtagcatcttattatgcttcaagacctgttctacctgttggatcagatgttcttagaaacgatgtaatttctcaaccaagaacgcatggttatgatggtccagcaagagtgaccaatcctgctttggctggcctgactggactacctgctggagttacggcacgggggcctagtgctctggaagacccgtctttggctggtctgagtggattagctccagtccgggcaacaggcggagctacggcacgagggtctggtgctttggaagacccgtctttggctggtctgagtggactagctccagccagggcactgggacctagagctttgaaagaagaactggatgtagttgggagaagttcttcagtaggcagaggtgctagcattccagatgttgagcaccacagctcaattccaaactttgatggaccctcagaaaatgaatccaacattctttttgttgattgtcttcctactgattgcacaaggagagaagtagctcatttgtttcgttgttttcctggcttcaaggacatcagagtagtgcacaaggaacccagacgtgtaagtgcttgccttctcaatgcatcatctcttctcacttggaaaatggtttaattcttctttgctagaatgctacttgcccattcttttgtgaatccgagcatttgcattgaattcatgtttttgaacttggcttatgtttaagatatggtttatatatcacactcattttgaaaacaaaagagccacgtttattagattaagaggaatgtgcacattatgaagacaaaaacaagaaactacacaagccacaaggggtcctcagctgcagatatgagattcttagcacccatttctaccaacaacttggtgatatccttgactaggcaaatgagttctgccccaaccttttccatctgttgaaatagtagagatccttggttccttgcattgctctctttccatattatgaagatgattgtccttattacttctaggtagggcaggaaaataagcttgaggctcgcgagccggctcgagctcggagcggctcgcgagcctcgagccagccttttgggcttgttc

SEQ ID NO: 152071 - DNA, 1727 bp, Zea Mays
cttcaccaaagccgcctcgtctggatctctctcactcctttcgcgcacaaggttttcaatggcattgaccggtagaacacgtgcccggacgccaattatctcgccctttcagatttgagaacaacaaggaggaaaagtaaacgcaagttcaggaaaggggagcctcaaaaggagagggagagtgagagggaggggaagtgcgctgcagtgctgcgcagctgcgctggggagaagagaagaaggtgccaaccacttcccaaggagaccgccagctctgctgctgcacgaccgaccagcccgtccactcgcctcgccttcctccgagccccggcgaggaagaggaacccggcgccgccggacgcacttccgatggcgacgccacggaagccgatcaagctcacgctgccgtcccacgagaccaccatcggcaagttcctgacgcacagcgggacgttcacggacggggatctgcgcgtcaacaaggacggcctccgcatcgtctcgcggagggagggaggcgaggctcctcctatagagccgttggatagtcaactgagcttagatgatctagacgttataaaagtgatatcgggaaaggtagcagcggaaatgtgcaattggtccgccacaaatttactggccagttttttgctctgaaggttattcaactaaatattgatgagagtatacgcaaacagattgccaaggagttgaagataaacttatcaacacagtgccaatatgttgttgtgttctatcagtgtttctatttcaatggtgccatttctattgttttggaatacatggatggtggctcccttgcagatttcctgaagactgttaaaaccattccagaggcctacctcgctgctatctgtacgcagatgctaaaaggactgatctatttgcataacgagaagcgcgttatacaccgagatctgaaaccatcaaatatattgataaatcataggggtgaagtaaaaatatcagattttggtgtgagtgccattatatctagttcctcttcgcaacgagatacatttattggcacacgcaactacatggcgccagaaagaatcgatggaaagaaacatggttctatgagtgatatctggagtttgggactagtgatactggaatgtgcaaccggcatctttccatttcctccttgtgaaagcttctacgaacttctcgtggctgttgttgatcaaccgccaccttctgcgccgccggatcagttttcaccagaattctgtgggttcatttctgcatgtctccagaaggatgctaatgacaggtcatcagcccaagccttattggaccatccgttcctgagcatgtatgatgacctgcatgtagatcttgcttcgtacttcacgacagcaggatctcctctcgccaccttcaattccaggcaactctaatttttttgtcctccttattacgcgaacggtgtggcgacaaatttctctttttggacaaggcttggattgtgtactgagctgtaatgatcttgtgtgtgtcaggtcggtgattggctccatcactttacatatatgacatacatgtacagccttttaggataaaaatgagcactgaagttttgcctatctgtatatcggcagcaaacgtttggtcatgtttgtttcaccttgtaatgtattgactcagatatgggattggtcattgtctcatttggtgtatgagtcaagtccagattttcttgt

SEQ ID NO: 152072 - DNA, 1312 bp, Zea Mays
atttgagaacaacaaggaggaaaagtaaacgcaagttcaggaaaggggagcctcaaaaggagagggagagtgagagggaggggaagtgcgctgcagtgctgcgcagctgcgctggggagaagagaagaaggtgccaaccacttcccaaggagaccgccagctctgctgctgcacgaccgaccagcccgtccactcgcctcgccttcctccgagccccggcgaggaagaggaacccggcgccgccggacgcacttccgatggcgacgccacggaagccgatcaagctcacgctgccgtcccacgagaccaccatcggcaagttcctgacgcacagcgggacgttcacggacggggatctgcgcgtcaacaaggacggcctccgcatcgtctcgcggagggagggaggcgaggctcctcctatagagccgttggatagtcaactgagcttagatgatctagacgttataaaagtgatatcgggaaaggtagcagcggaaatgtgcaattggtccgccacaaatttactggccagttttttgctctgaaggttattcaactaaatattgatgagagtatacgcaaacagattgccaaggagttgaagataaacttatcaacacagtgccaatatgttgttgtgttctatcagtgtttctatttcaatggtgccatttctattgttttggaatacatggatggtggctcccttgcagatttcctgaagactgttaaaaccattccagaggcctacctcgctgctatctgtacgcagatgctaaaaggactgatctatttgcataacgagaagcgcgttatacaccgagatctgaaaccatcaaatatattgataaatcataggggtgaagtaaaaatatcagattttggtgtgagtgccattatatctagttcctcttcgcaacgagatacatttattggcacacgcaactacatggcgccagaaagaatcgatggaaagaaacatggttctatgagtgatatctggagtttgggactagtgatactggaatgtgcaaccggcatctttccatttcctccttgtgaaagcttctacgaacttctcgtggctgttgttgatcaaccgccaccttctgcgccgccggatcagttttcaccagaattctgtgggttcatttctgcatgtctccagaaggatgctaatgacaggtcatcagcccaagccttattggaccatccgttcctgagcatgtatgatgacctgcatgtagatcttgcttcgtacttcacgacagcaggatctcctctcgccaccttcaattccaggcaactctaa

SEQ ID NO: 152073 - DNA, 609 bp, Zea Mays
cgacgacgtgcgtgtgcgtataatctctcgttcttcctggaccgcatgccgatggccacggctctagggttcgtcctcctcacagcgagctcgatactcgcgatccacaggtcatggggagtagacgcagccgcgacggcctcagtcgtcgcgtcgtacgccagcctcgcactgctcctccgcttcctgcgcgccttcgagagcgctccgcccggctcgccggccaggggccgcgccaaggccggcgtctggctcacgacggccttgctcacggcggccttctcctggaggacgaccgtcgccctgctcgtgccgtggcccgccggggccgctgccgtctgcttcatgggagcttctaccgttgccggcggcttctacgcgctgttccttcttccttcttcgcgggacgacagctagactgctggagaccactgatcgatgtaaacactcccaacaggatatgcatgagatcgtacgtcttgtgtacaaagttgttgtttgatctctctcgtcgaacgtatatatgtgttagatttgttttcatttcaaccgtgctttctccatgcatgtataggaaacgtttttttaataaatacgtctaatttgctc

SEQ ID NO: 152074 - DNA, 679 bp, Zea Mays
acgcatgcctcggtcggtcgaacaatcttcaataacccagtcggcaggcgtgacccgatgctctcgcgtcgtcggatcgtcgccaccgtctcctccgcgtcgcctacaccgacatggacgaccggcagtatgccggactgaccaaggcaggcttgggcgtgctggccttcaactcgggcctcgccatctacaactcctggggcgacgcgagctccgtcgcgttcgtgctctccgcggactccatcctcgtgctgctcttcctctgcctccgtgagctggagctgcaggggcggggggccgccggcaggggcagggatgtcgggatcatcagagccgcggtgtggacgctgacgacgctgctctcggccatgttcgcgtctagggtggcgccgctgatgccgcccgtcgtcggcgcgctcgtctgggcgacggctgtggccactgccgccggcggcttctgggcggtcttcctcagctgaatgtttaggcttagttcgacgagagagtgatcctgtgcgtgctactagctagtttgttaccatatttgcacttttgtatgcagaagatattttgtatgttgttttctgcattaagacggtctccagttgatcttttgtatgcagaagatattttgtatgttgttttctgcattaagatggtctccgccggttgatcgtgt

SEQ ID NO: 152075 - DNA, 653 bp, Zea Mays
aattcacgagtcacgacgttcacgagtcacgccagcatcaaagccgtgcgtgagtaggccgatctcttggatgatggaggaggaccagcagatagtcgctggcgtggacgccgcggcccgaggcggcggcggcctgggccgcgcgggagccgtctttctcaccgcgacctgcgccgcagccacctacagcgcggcggcggcaggggacgtcccgtccgtggcgttcgtggtcgccagctacggcgcgctcctgcttctgctgcgctccctgcgcgcctacgagctggcgccgccggaggcggctgcacgcagggaagcgctcaggcgcagggtctgggcgctctgcacgctactcagcgtgatgttcgcgtggaaggttgcgagcgtcgtcgcgacgccgtggccggtcgctgtcggcgtctgggccgcggcggccgtcacatctgccgctgggttcgttctgctgttccgccagcagcagcgtcgccaatgaacgagtgatcggtggatgtgtgttccgtctgtaacttgtaagctccaagagcctcaaatagttacaggcatgggatgggatcgatgcctggcctggttgctagctgctgtacgtatcatctcaaactttctgatggtgatacgcaattcgatcaagtgcc

SEQ ID NO: 152076 - DNA, 802 bp, Zea Mays
agaagacttcactagaatctactcgtcgagtcaccaaagataaggctctatcggactcggagtctcggacagcacagcaaagcaagagccgctactcaagtatagtctctgacaccggccgaccctgccctccaacccaagccatggcggacaacaacaaccggcggaaccacgggcagaccttgctcgccggcgcgggcctgggcctgctcgccgtgaactcgggcctcgccatctaccgcgcgaggggcgacacggccgccgtcctcttcgtcgcggggtcctgcgccaccctgctcctcctcttcgcctgcctccgcgcctacgagcgggcggcgcccgggtcgccggcccgggaccgggcgcggcgcgccgtgtggccgctcgccacgctgctcacgctctcgttcgcctggaaggtggcggcggccatgccttccgccgccgcggccgccctcgtatggggcctggccgtggccaccaccgccggcggcttcgtggcactgtacgtgcagcaggcatgaacacgtgggcgcgggacggactaggcaagcagctgcagacttgcagttcgttcagggatctagatctgggcgccgcgcgcttgtgtagaaatgtacagtgtatttggctagcttttcgattttgtgcatatgtatgtagctgactggctgatactataaaacagagtggcctctgtgtacattggccccgatttggtacttagagcatctctaagagaggctctaaatatggtcttattttaaatataggactcaaaaccataaaacattctttcaac

SEQ ID NO: 152077 - DNA, 485 bp, Zea Mays
gcctcctgtaattcattggggccaacaggatagatcgccgccgccaggaacaaaggaagttagcgcctgctgtgagctcgcgattgggatgagagagatgagttgccgcggggagctagggagctcggccagtgttcgcgctgggcatctaaggggtcctcgcgtgtccgtcgacgcgagggctgggtttcctcgccgctgggtggcaaagatgtccgcccgccgtcgtggacctgcgtgtctgatgacattgaagcatcggcaaccatcctgggatgttccctgggacacaaggacggggtacgctgtagccagaccaactttggggccggtgcctaaccaatttctcgtcggcgtgggaacatcaccgcggatctgcagagcacgtggaccgatgtctcctcaccatcattctcgcgcgaggacacgtatcatctgaaaagcaagttggtacctggaatctcaagtgccaggcaagttgtgcc

SEQ ID NO: 152078 - DNA, 945 bp, Zea Mays
agtaaccaccaccacgccagatctttcttcctgttgcttctcccgttccgtctctccccggtccccgcgtcgcctgcttctgcttcttgcaccccccaccccaccacaaccgaaaccccactaataatccgccatggcgctcgcctccggcacgtgccgccccctcctgggtggccccgccagcaccgcgcggctccacctcgctgtctcctcgtcctccaccgcctgctcgatccgcttcccccgcggcgccggcggtggcagggcggccgtctccctccgcgcccccgcgcctccagcggcggcggcggcaacatctggtagcattgctccagcgatttcattgaccgaaaaggccttgaaacatctgaacaaaatgagggctgaacggaacgaagatttgtgcttgagaattggagtgaaacagggtggatgctcaggcatgtcttacaccatggagtttgaaaatcgagcagatgccagccctgatgattctgttgtagagtatgatggttttgccatagtctgtgaccccaaaagccttctcttcatgtttggaatggagctggactacagcaacgcactcattggtggaggcttctcttttcagaatccaaacgcaacaaaaacctgtgggtgcggcaaatctttcgcgactgggaaggaatccgaggctgcagcaaaagcttgcaacaactagagtagtgaaatattgatagcaaatcgtgatgtaacttgttatatagcttgctcctgatcaaatcacgtggctccaccacttatacttgtttcgtttcaaaatagttggctttgtttgtttttttcaggataactttgatcagatatatacaagaaaacattaatacttatggtatataattaatattaattgatagagctttgaatctattttattaaacttatctacagataaaaaaatattaa

SEQ ID NO: 152079 - DNA, 638 bp, Zea Mays
accacgccagatctttcttcctgttgcttctcccgttccgtctctccccggtccccgcgtcgcctgcttctgcttcttgcaccccccaccccaccacaaccgaaaccccactaataatccgccatggcgctcgcctccggcacgtgccgccccctcctgggtggccccgccagcaccgcgcggctccacctcgctgtctcctcgtcctccaccgcctgctcgatccgcttcccccgcggcgccggcggtggcagggcggccgtctccctccgcgcccccgcgcctccagtctgtgaccccaaaagccttctcttcatgtttggaatggagctggactacagcaacgcactcattggtggaggcttctcttttcagaatccaaacgcaacaaaaacctgtgggtgcggcaaatctttcgcgactgggaaggaatccgaggctgcagcaaaagcttgcaacaactagagtagtgaaatattgatagcaaatcgtgatgtaacttgttatatagcttgctcctgatcaaatcacgtggctccaccacttatacttgtttcgtttcaaaatagttggctttgtttgtttttttcaggataactttgatcagatatatacaagaaaacattaatacttatggt

SEQ ID NO: 152080 - DNA, 1511 bp, Zea Mays
ggaaattgatggaaccccgtttctatgcgttatccaaagagctgcatagcagcgcttctcccagccacgtcttcatcacacacggtcgcggcgcgaagcaatggcgaccacggcgccgctgctctcgccccagcgcgcttgccctacccatctccggcgccgcctctcgcccctacatctcgtattccccctcgacgcgtcagcgaggcggctgcgccttcgccgggcgccgccaccttgttcggccaagttcggcaagttcgacgcctccgacgccccggcggaggccgaggaggcggggggcgcgacggatggtgggctggcgcagcccgtggaggaggacgacagttgcttgccatcggatttggagggcgcgattcggcagtcagggaaggcgagcgcagatttcgtaaactccggaggcatgcgagctatcgcagaactgctgatccctcagttggaattcctcaacgaggaaggagcacaggctgaactctgggcgttgtcaaagattttcctggacacacttgtacaagagacaggacaggtttggatacaagaaagttactgccattttccctgacgctggagcagctgcccttctcaagcatcaatggaaagatgcacaattcaagtgtgccagtttaggtgaccggaagccagttggtcctgaagatgaggtcgcagttatgattatccctgatcatcagatgctggaagctgttgaacgcatcacatctcaactctctgatgatcctataagacctcttgtcatgtggaacccacggcttgttagtggagatgttggagtaggctttaatgtacggaatctgcggagaaatttcttaagcacttttaccactgtttactcgatgaggccattgccaactggtgcagtctttagatgctttccagggcagtggaaagtgttttatgatgatccaaataggccaaatcggtatttgcttgcccgagaactcacaagtaggcccgatgcaactgatattgagagaatatttggtggtgccgatgagcaatctgaagaggcaccatcgttgatgaacaatgtcatgggcgtgttcagttccgtgagtcggtttatgagggtcatctccaagtgagagtcgaagcaaacattgttcacacttgaagccatcaacaaccatcatgatgcttgagttatacaagaagattattttagtgcatccatgttgttttcagtctgtaattactccatggtactgctattcggaacagtatagtttggcgttccggcacatgccaccaaatgtgtgcacataccataccgtggattcctggagtcatctgctgatcctacaccgtgaggtcaattatgtaagtgtgacttagaaaaaaaatgtagatagatcctcattctggaaaaagccgggtatttgattgtaattcaatactgtgcttgatatatcacaatcagctcgcattttgtaattcaatactggacgaatataaattcaatcctttgttttaca

SEQ ID NO: 152081 - DNA, 1383 bp, Zea Mays
ggaaattgatggaaccccgtttctatgcgttatccaaagagctgcatagcagcgcttctcccagccacgtcttcatcacacacggtcgcggcgcgaagcaatggcgaccacggcgccgctgctctcgccccagcgcgcttgccctacccatctccggcgccgcctctcgcccctacatctcgtattccccctcgacgcgtcagcgaggcggctgcgccttcgccgggcgccgccaccttgttcggccaagttcggcaagttcgacgcctccgacgccccggcggaggccgaggaggcggggggcgcgacggatggtgggctggcgcagcccgtggaggaggacgacagttgcttgccatcggatttggagggcgcgattcggcagtcagggaaggcgagcgcagatttcgtaaactccggaggcatgcgagctatcgcagaactgctgatccctcagttggaattcctcaacgaggaaggagcacaggctgaactctgggcgttgtcaaagattttcctggacacacttgtacaagagacaggacagaaagttactgccattttccctgacgctggagcagctgcccttctcaagcatcaatggaaagatgcacaattcaagtgtgccagataagacctcttgtcatgtggaacccacggcttgttagtggagatgttggagtaggctttaatgtacggaatctgcggagaaatttcttaagcacttttaccactgtttactcgatgaggccattgccaactggtgcagtctttagatgctttccagggcagtggaaagtgttttatgatgatccaaataggccaaatcggtatttgcttgcccgagaactcacaagtaggcccgatgcaactgatattgagagaatatttggtggtgccgatgagcaatctgaagaggcaccatcgttgatgaacaatgtcatgggcgtgttcagttccgtgagtcggtttatgagggtcatctccaagtgagagtcgaagcaaacattgttcacacttgaagccatcaacaaccatcatgatgcttgagttatacaagaagattattttagtgcatccatgttgttttcagtctgtaattactccatggtactgctattcggaacagtatagtttggcgttccggcacatgccaccaaatgtgtgcacataccataccgtggattcctggagtcatctgctgatcctacaccgtgaggtcaattatgtaagtgtgacttagaaaaaaaatgtagatagatcctcattctggaaaaagccgggtatttgattgtaattcaatactgtgcttgatatatcacaatcagctcgcattttgtaattcaatactggacgaatataaattcaatcctttgttttaca

SEQ ID NO: 152082 - DNA, 1468 bp, Zea Mays
ggaaattgatggaaccccgtttctatgcgttatccaaagagctgcatagcagcgcttctcccagccacgtcttcatcacacacggtcgcggcgcgaagcaatggcgaccacggcgccgctgctctcgccccagcgcgcttgccctacccatctccggcgccgcctctcgcccctacatctcgtattccccctcgacgcgtcagcgaggcggctgcgccttcgccgggcgccgccaccttgttcggccaagttcggcaagttcgacgcctccgacgccccggcggaggccgaggaggcggggggcgcgacggatggtgggctggcgcagcccgtggaggaggacgacaggtcgggttcactgcaccctcaactcgtgcgtaattgagaacacaaaagatgctgacgttgtgaagcggccttcgctgtggttcagttgcttgccatcggatttggagggcgcgattcggcagtcagggaaggcgagcgcagatttcgtaaactccggaggcatgcgagctatcgcagaactgctgatccctcagttggaattcctcaacgaggaaggagcacaggctgaactctgggcgttgtcaaagattttcctggacacacttgtacaagagacaggacagaaagttactgccattttccctgacgctggagcagctgcccttctcaagcatcaatggaaagatgcacaattcaagtgtgccagataagacctcttgtcatgtggaacccacggcttgttagtggagatgttggagtaggctttaatgtacggaatctgcggagaaatttcttaagcacttttaccactgtttactcgatgaggccattgccaactggtgcagtctttagatgctttccagggcagtggaaagtgttttatgatgatccaaataggccaaatcggtatttgcttgcccgagaactcacaagtaggcccgatgcaactgatattgagagaatatttggtggtgccgatgagcaatctgaagaggcaccatcgttgatgaacaatgtcatgggcgtgttcagttccgtgagtcggtttatgagggtcatctccaagtgagagtcgaagcaaacattgttcacacttgaagccatcaacaaccatcatgatgcttgagttatacaagaagattattttagtgcatccatgttgttttcagtctgtaattactccatggtactgctattcggaacagtatagtttggcgttccggcacatgccaccaaatgtgtgcacataccataccgtggattcctggagtcatctgctgatcctacaccgtgaggtcaattatgtaagtgtgacttagaaaaaaaatgtagatagatcctcattctggaaaaagccgggtatttgattgtaattcaatactgtgcttgatatatcacaatcagctcgcattttgtaattcaatactggacgaatataaattcaatcctttgttttaca

SEQ ID NO: 152083 - DNA, 1498 bp, Zea Mays
ggaaattgatggaaccccgtttctatgcgttatccaaagagctgcatagcagcgcttctcccagccacgtcttcatcacacacggtcgcggcgcgaagcaatggcgaccacggcgccgctgctctcgccccagcgcgcttgccctacccatctccggcgccgcctctcgcccctacatctcgtattccccctcgacgcgtcagcgaggcggctgcgccttcgccgggcgccgccaccttgttcggccaagttcggcaagttcgacgcctccgacgccccggcggaggccgaggaggcggggggcgcgacggatggtgggctggcgcagcccgtggaggaggacgacagttgcttgccatcggatttggagggcgcgattcggcagtcagggaaggcgagcgcagatttcgtaaactccggaggcatgcgagctatcgcagaactgctgatccctcagttggaattcctcaacgaggaaggagcacaggctgaactctgggcgttgtcaaagattttcctggacacacttgtacaagagacaggacagaaagttactgccattttccctgacgctggagcagctgcccttctcaagcatcaatggaaagatgcacaattcaagtgtgccagtttaggtgaccggaagccagttggtcctgaagatgaggtcgcagttatgattatccctgatcatcagatgctggaagctgttgaacgcatcacatctcaactctctgatgatcctataagacctcttgtcatgtggaacccacggcttgttagtggagatgttggagtaggctttaatgtacggaatctgcggagaaatttcttaagcacttttaccactgtttactcgatgaggccattgccaactggtgcagtctttagatgctttccagggcagtggaaagtgttttatgatgatccaaataggccaaatcggtatttgcttgcccgagaactcacaagtaggcccgatgcaactgatattgagagaatatttggtggtgccgatgagcaatctgaagaggcaccatcgttgatgaacaatgtcatgggcgtgttcagttccgtgagtcggtttatgagggtcatctccaagtgagagtcgaagcaaacattgttcacacttgaagccatcaacaaccatcatgatgcttgagttatacaagaagattattttagtgcatccatgttgttttcagtctgtaattactccatggtactgctattcggaacagtatagtttggcgttccggcacatgccaccaaatgtgtgcacataccataccgtggattcctggagtcatctgctgatcctacaccgtgaggtcaattatgtaagtgtgacttagaaaaaaaatgtagatagatcctcattctggaaaaagccgggtatttgattgtaattcaatactgtgcttgatatatcacaatcagctcgcattttgtaattcaatactggacgaatataaattcaatcctttgttttaca

SEQ ID NO: 152084 - DNA, 2071 bp, Zea Mays
gaatggccatgtacgtttccttttatatgctatatgtttgtttgcacttatcaaacatcgaaaatggacatctagatattcgggtcacaaagccttaacaataatccacctgcatgatatgttttgattgtgcgatgttaagaaaagattgttggatagatgagcgatgccaatggccgggacctgctgcaccaaacagagccagcggcccgccttcctcctcgcgcctccgaaacagaacagcaacgacgtccagccaggggaggggccatggggccgcagtatatatacctgcgccttgtaccaccgcccaccgtcgcaccgtgcgcgcgtccctcgctcctgcgccgcccgtccgatccggtcactggccggggagggctcagaaacctttcatccaatacatacatctatctgagccctttcccgcggtgaggcccgaccggagtccacacacacacggtgtcgatggcggccgtaataaggagccgccgccgcgtgtccgttttcttctacgtcgtcctcgccgcagctgcagctgcagccgcggcgcaggcatccaataacgtcacctccgacgaggagtactgggcggagcgcgccgaggtggctcggtcgcgcaacctcgccgcctacgtcagcgaccccgtggccgccacgaaccgcttcaacgcggacgtgctgagggccacgacgcggcgggcgctggcgaggtacgatggcccgtgcatggcgaccaaccccatcgaccggtgctggcgctgccgcgccgactgggcgacggaccggaagcggctggcgcagtgcgcgcgcgggttcggccacaggaccgtcggcggcgcggccggcaagctgtacgtggtgagggacccgagcgacgacgagatgatcatcccgcggaagggcacgctgcggcacgccgtgatccaggaccggccgctgtggatcgtgttcgcgcgcgacatggtgatcgagctgcggcaggagctgatcgtgaaccacaacaagacgatcgacgggcggggcgcgcaggtgcacatcatgttcgcgcagatcacgctgcagaacgtgcagaacgtgatcctgcacaacctgcacatccacgactccaaggcgcactcgggcggcatgatccgcgactcgaagcggcactacgggctgcgcacgcggagcgacggcgacggcgtctccgtgctgtcgtccagcaacgtgtggatcgaccacgtgtccatgtccagctgctccgacgggctgatcgacgtggtgaacgggtcgacggccatcaccgtgtccaacagccacttcaccgaccacgaccacgtgatgctgttcggcgccagcaacgacagcccgcaggacgcggtgatgcaggtcacggtggcgttcaaccacttcggccgcgggctggtgcagcggatgccgcgctgccgctacggcttcttccacgtggtgaacaacgactacacgcactggatcatgtacgccatcggcggcaacatgaaccccaccatcatcagccagggcaaccgcttcatcgcccccgacgaccccaacgccaaggaggtgaccaagcgggagtacacgccgtacaaggactacaaggagtgggtgtggaagtcgcagggcgacgtcatgatgaacggcgccttcttcaacgagtccggcggccagaacgagcgcaagtacgacaggttcgacttcatcccggccaagcacggccgctacgtcggtcagctcacgcgcttcgccggaccactcaagtgcatcgtcggccagccgtgctagtagacagcggcccggtcgggcacatactcctcttcctatatacatcggatttggatgggcggcatatatgtacgtgtgtgtaatatattattactacatcttgtactatatgcgacgattgcttgactgatgaatcacgctttttaggttagaccaatttagaagggaattagagtggattaaattcgctcccggtaaaaaatgactcgaagaaaatttagggactgtttggtttgtggttaaatgtgctacactttgtttaatgtttaatgttagtcgttcggat

SEQ ID NO: 152085 - DNA, 2702 bp, Zea Mays
gtacaggccaccaatctggctcttccgtcaaagccctaccagaaccctacctcccgccgccggccgccccctcccgcggctaggaatgaccggcgccgccgcgctccggcaatcttctcgccggattttccggcacctcgccgctgcccccgcgttctctcgcagtgggctccaacatcccgagcgcctcctatcgtcgcagtcgtcgccggagcacggcgcgcgcggcgcggtgtccgggtcggagctggcgctgtacccgccggagcgggttcggaacttctcgatcatcgcgcacgtagaccacggcaagtcgacgctggctgaccggctgctggagctcaccggcaccatccagaagggccatgggcagccccagtacctcgacaaactgcaagttgagagagaaagggggattactgtcaaagcacaaacagcaaccatgttctacaggcacattactgcatctcaggactcagatatgccaagatatttgcttaatctgattgatacaccaggccatgtggatttcagctatgaggtatccaggtcccttgcggcttgccagggtgctcttttagtagttgacgcagcacaaggagtacaagctcaaacaatagcgaacttttaccttgcatttgaatcaaatttgagcatcattcctgtgattaacaagattgatcaaccgactgctgatccagataatgtaaaggatcaattgaagaggttatttgatattgatccaagtgaagctctgcttacttctgccaagactggtagaggccttgaacaggtattgcctgctgttattgaacgcataccttccccgcccgggaaatgtgatgcacctgtacggatgttgcttttggattcctactatgatgaatacagaggagtgatttgccatgttgctgttgttgatggtgctctgcgtaaaggtgataagattgcttcggctgcaactagccgtgcatatgaagttcttgacgttggcattatgcaccctgagcttacacctactggagttctctacactggacaagttggatatgttattagtggaatgcgttcaactaaagaagcacgcatcggtgatacccttcaccaggcaaagagtactgttgagccacttcctggtttcaagcctgtaaaacacatggtcttctctggtctctatcctgccgatggttccgactttgaagctcttagccatgcgattgagaaactaacatgtaatgatgccagtgtctctgttacaaaggagacaagtaatgcacttggcatgggattcagatgtggcttcctaggattgctacacatggatgtgttccatcaacggcttgagcaagaatatggagctcaagtcatatcgaccataccaaccgtaccttatatttttgaatacggtgatggaagcaaggtgcaagttgagaaccctgctgctttggcttcgaatcctggaaagcgtgtagcagcctgttgggagcccacagttattgcaacaatcattattcctagtgagtatgttgggcctgtcattatgctttgttcagaaagaaggggcgaacagctagaatatacatttatcgatgcccaaagggctctgttgaagtaccgattaccattgaaggagataattgtggacttctacaatgagttgaagggcattacgtctggctatgctacttttgactacgaagattcagaataccaacaagctgatctagttaagatggatatccttctcaatggtcaacctgttgatgctatggcaactatagtgcataaccagaaggctcagcgggttggaaaggatttagtggagaagctcaagaaatttatagaaaggcaaatgtttgagatcaccatacaagcagcaattggttcaaaagttattgcaagggaaaccctgtccgcaatgaggaagaatgtcctggccaagtgctatggcggtgatattactcggaagaagaagttgctagagaagcaaaaggaaggcaagaagcgcatgaaacgtgtgggatctgtcgacattcctcaggaagccttccatgagctactgaaggtctccaattcaaaatagatggtgatccactgcaaatttagtttctgtagctgtccaaattttataagtagctgtgtggtgatgagtagcagcaaccttttctagtcatcttctgacagatcttgacagaatgatcgattccattgagtacataatggcctctcctgcgccttgtcagacgagccaacttgtgctggaagttgctcctcctgtagtcctgtcatccatcctgtggtgattgatatacacacaagtcttctcagctggccgcagacggatttcagtagagccaccatctttgtatttgttgattgattgatggaaaaccatcctttgagcacttgctgaacccagttttctctgctgacctgacttgtcacgttacactctattttttgtgttagataacggttttgagcaaaaataataggtcatatacacattaattggtcactgaaacaatgtggtacatgtaataagaggagctgcattgaataaagacatagtagtatcacgtttttggagtttgcgggctatctccttttcatcctgaaatgaacccctcttctaagccgagagtatcgtttggcttcgaacacagaagttgataaataaacacaaaaaataaaaaaaaaga

SEQ ID NO: 152086 - DNA, 2790 bp, Zea Mays
ctcttccgtcaaagccctaccagaaccctacctcccgccgccggccgccccctcccgcggctaggaatgaccggcgccgccgcgctccggcaatcttctcgccggattttccggcacctcgccgctgcccccgcgttctctcgcagtgggctccaacatcccgagcgcctcctatcgtcgcagtcgtcgccggagcacggcgcgcgcggcgcggtgtccgggtcggagctggcgctgtacccgccggagcgggttcggaacttctcgatcatcgcgcacgtagaccacggcaagtcgacgctggctgaccggctgctggagctcaccggcaccatccagaagggccatgggcagccccagtacctcgacaaactgcaagttgagagagaaagggggattactgtcaaagcacaaacagcaaccatgttctacaggcacattactgcatctcaggactcagatatgccaagatatttgcttaatctgattgatacaccaggccatgtggatttcagctatgaggtatccaggtcccttgcggcttgccagggtgctcttttagtagttgacgcagcacaaggagtacaagctcaaacaatagcgaacttttaccttgcatttgaatcaaatttgagcatcattcctgtgattaacaagattgatcaaccgactgctgatccagataatgtaaaggatcaattgaagaggttatttgatattgatccaagtgaagctctgcttacttctgccaagactggtagaggccttgaacaggtattgcctgctgttattgaacgcataccttccccgcccgggaaatgtgatgcacctgtacggatgttgcttttggattcctactatgatgaatacagaggagtgatttgccatgttgctgttgttgatggtgctctgcgtaaaggtgataagattgcttcggctgcaactagccgtgcatatgaagttcttgacgttggcattatgcaccctgagcttacacctactggagttctctacactggacaagttggatatgttattagtggaatgcgttcaactaaagaagcacgcatcggtgatacccttcaccaggcaaagagtactgttgagccacttcctggtttcaagcctgtaaaacacatggtcttctctggtctctatcctgccgatggttccgactttgaagctcttagccatgcgattgagaaactaacatgtaatgatgccagtgtctctgttacaaaggagacaagtaatgcacttggcatgggattcaggtaccactgtacccgatttcctacatgtgaactagttcgtttctgttgttttcattacactgagtatgggacttgcagcaatctgtttttttatgtctgctttacagatgtggcttcctaggattgctacacatggatgtgttccatcaacggcttgagcaagaatatggagctcaagtcatatcgaccataccaaccgtaccttatatttttgaatacggtgatggaagcaaggtgcaagttgagaaccctgctgctttggcttcgaatcctggaaagcgtgtagcagcctgttgggagcccacagttattgcaacaatcattattcctagtgagtatgttgggcctgtcattatgctttgttcagaaagaaggggcgaacagctagaatatacatttatcgatgcccaaagggctctgttgaagtaccgattaccattgaaggagataattgtggacttctacaatgagttgaagggcattacgtctggctatgctacttttgactacgaagattcagaataccaacaagctgatctagttaagatggatatccttctcaatggtcaacctgttgatgctatggcaactatagtgcataaccagaaggctcagcgggttggaaaggatttagtggagaagctcaagaaatttatagaaaggcaaatgtttgagatcaccatacaagcagcaattggttcaaaagttattgcaagggaaaccctgtccgcaatgaggaagaatgtcctggccaagtgctatggcggtgatattactcggaagaagaagttgctagagaagcaaaaggaaggcaagaagcgcatgaaacgtgtgggatctgtcgacattcctcaggaagccttccatgagctactgaaggtctccaattcaaaatagatggtgatccactgcaaatttagtttctgtagctgtccaaattttataagtagctgtgtggtgatgagtagcagcaaccttttctagtcatcttctgacagatcttgacagaatgatcgattccattgagtacataatggcctctcctgcgccttgtcagacgagccaacttgtgctggaagttgctcctcctgtagtcctgtcatccatcctgtggtgattgatatacacacaagtcttctcagctggccgcagacggatttcagtagagccaccatctttgtatttgttgattgattgatggaaaaccatcctttgagcacttgctgaacccagttttctctgctgacctgacttgtcacgttacactctattttttgtgttagataacggttttgagcaaaaataataggtcatatacacattaattggtcactgaaacaatgtggtacatgtaataagaggagctgcattgaataaagacatagtagtatcacgtttttggagtttgcgggctatctccttttcatcctgaaatgaacccctcttctaagccgagagtatcgtttggcttcgaacacagaagttgataaataaacacaaaaaataaaaaaaaaga

SEQ ID NO: 152087 - DNA, 648 bp, Zea Mays
atgatccttcatcactttacgctgtcacaactggaagtgtcaactaagcgtgaagggactgagacagtgatactgaccagccaacgccttgaagacagtgtcagcaaccaggcgtccagagatgatgtcgaagacatgagccgtgcaagtggtgaagctgaagatggcgagctcaagaaggtggtcaggatccgtaaaccaaacgtgcgcgtgggtggtccggagtggacagacatgtcgaccccaccgccgtccatcgccgccgtgtgggactggcggactgcgattgctgaaccgggcaaaattgaggcaatgaccacagttcgcattgatctttggtccaacaatcattttaccccaaaagagttgacatatattttgtacttgttgaggtatttattgggtctgttcttttcaactgccagtaaggttttagacattgtgtcatcaaagagagtctcgaatcaattgaccatacaacaatacacttcaaactgttctatcacaacacccattattttgaacgatgcaaagattcttggaaggaactttttaattgatctgttaagttacgaggataattcatgccgctatgccatccctgctaacatacaacaaagacttatcaatatcgctaaaaaggattag

SEQ ID NO: 152088 - DNA, 451 bp, Zea Mays
aaacacacaccggcctcgcagtcgcagcctcgctccggaggcggagcgccggagccccgcccacctcccctaaacggccagggcctgaccacccccacctcagtccctctcctgtgggcggcgtcctcccgcgcccatggggatctcgcacctccagcccgtcctcctcctcctcatgctccgggctctcgcgtcgcttcccacgcaggccgccgcgagaggcggccacgatccgtcaggtttctctccctctactttccgtctgtgtctgtgatgtcggggttggatatgcattgcaatggggggcgtgatggtgcggttggaactcataaccgtcccccatccgtgtgaaagcggtggtgtgggtgtcccacttgggagactggggcactgcgcatccggcagcttgtctggtgtgggtctataggcacccgactgtcagatggcttta

SEQ ID NO: 152089 - DNA, 1858 bp, Zea Mays
aaacacacaccggcctcgcagtcgcagcctcgctccggaggcggagcgccggagccccgcccacctcccctaaacggccagggcctgaccacccccacctcagtccctctcctgtgggcggcgtcctcccgcgcccatggggatctcgcacctccagcccgtcctcctcctcctcatgctccgggctctcgcgtcgcttcccacgcaggccgccgcgagaggcggccacgatccgtcagatgatggagcccacgggccattttcacgtaaacttcttgaagataagcctcagatcacagaagaaatggtccgtggatatatgagcaacactgagcttgagactgctgtacatgcctttggaagtcgttgttccaatatctccagggtgtacagcattggaaagagtgtgaatcattttccattgtgggtgattgaaatatcagacaagcccaggcaaagggaatctgaaccagcattcaagttcattggaaatgttcatggtgatgagcctgttggaagagaggttcttatgcatcttgcaaattggctgtgtgataactatctgaaagattcactggcaactctcattgttgagaacatgcaccttcatatacttccgacgatgaaccctgatgggtttgctcttagatggcgtggtaatgcaaacaatattgatctcaacagggattttcctgaccaattcttccccgttaacaacgatattgactacagacagcctgaaactagagccattatgaattgggtaaagcaagaacacttcacggcttctgctagcttgcatgggggggctcttgttgccaactatccatgggatggaactagagacacaagcaaacactactacggatgtcctgacgataagacattccagcacatggcatctgtgtatagtcggtctcactataacatgtctttgagcaaagaatttgaaggagggataacaaatggagcattctggtacccaatatatggtggtatgcaggactggaactatatacatggaggctgctttgagttaactctggagattagtgacacaaagtggccaaaagcagatgagcttcctatcatctgggaacacaataggatgagtatgctcaatcttctagcaagcctaataaagtcaggggttcatggaaggatatttgcagcagatacgggcaggcctgtacccggctcagtgatgataaagggcattgattccaaggtaagcgcgagcagcacttttggagattaccatcgaattgttgcgcctggtgagacatatgaagtggtggcatcgatgcgaggcttccggcaaaaatctacacgcatcaggctggagcaggaagccgtcagcctggatttcatcctggacccggatggagccgatgggcagacgaagctgctgccccgtagtaacgaccggggctgccgctgcgacaacgacaacgccgccaagccgttccatgtccacgaagctcacctctggttgtacctccttatcgtgtccgttctcctggccctctacgtagtcttcaagaggaaaacggtgccgaggctgctggcgtatagacactcatcgtcactcagacggcctgttgctgtataagaggaactaattttgtggtctaggcggatagttttgtactacctctgttctcgaatagttgttgtccgctagttaatttttatagctagttcatttttatactaaaatgtgacaaatagaaaagaacggagggaaggagcaactgaagttagtcttctctttgccaaaacggtcggttgctgtataagttgaaggatgggtaatgtaccatggaaatgacattttttttgaatcaatgaaatacat

SEQ ID NO: 152090 - DNA, 1847 bp, Zea Mays
aaacacacaccggcctcgcagtcgcagcctcgctccggaggcggagcgccggagccccgcccacctcccctaaacggccagggcctgaccacccccacctcagtccctctcctgtgggcggcgtcctcccgcgcccatggggatctcgcacctccagcccgtcctcctcctcctcatgctccgggctctcgcgtcgcttcccacgcaggccgccgcgagaggcggccacgatccgtcagatgatggagcccacgggccattttcacgtaaacttcttgaagataagcctcagatcacagaagaaatggtccgtggatatatgagcaacactgagcttgagactgctgtacatgcctttggaagtcgttgttccaatatctccagggtgtacagcattggaaagagtgtgaatcattttccattgtgggtgattgaaatatcagacaagcccaggcaaagggaatctgaaccagcattcaagttcattggaaatgttcatggtgatgagcctgttggaagagaggttcttatgcatcttgcaaattggctgtgtgataactatctgaaagattcactggcaactctcattgttgagaacatgcaccttcatatacttccgacgatgaaccctgatgggtttgctcttagatggcgtggtaatgcaaacaatattgatctcaacagggattttcctgaccaaacagcctgaaactagagccattatgaattgggtaaagcaagaacacttcacggcttctgctagcttgcatgggggggctcttgttgccaactatccatgggatggaactagagacacaagcaaacactactacggatgtcctgacgataagacattccagcacatggcatctgtgtatagtcggtctcactataacatgtctttgagcaaagaatttgaaggagggataacaaatggagcattctggtacccaatatatggtggtatgcaggactggaactatatacatggaggctgctttgagttaactctggagattagtgacacaaagtggccaaaagcagatgagcttcctatcatctgggaacacaataggatgagtatgctcaatcttctagcaagcctaataaagtcaggggttcatggaaggatatttgcagcagatacgggcaggcctgtacccggctcagtgatgataaagggcattgattccaaggtaagcgcgagcagcacttttggagattaccatcgaattgttgcgcctggtgagacatatgaagtggtggcatcgatgcgaggcttccggcaaaaatctacacgcatcaggctggagcaggaagccgtcagcctggatttcatcctggacccggatggagccgatgggcagacgaagctgctgccccgtagtaacgaccggggctgccgctgcgacaacgacaacgccgccaagccgttccatgtccacgaagctcacctctggttgtacctccttatcgtgtccgttctcctggccctctacgtagtcttcaagaggaaaacggtgccgaggctgctggcgtatagacactcatcgtcactcagacggcctgttgctgtataagaggaactaattttgtggtctaggcggatagttttgtactacctctgttctcgaatagttgttgtccgctagttaatttttatagctagttcatttttatactaaaatgtgacaaatagaaaagaacggagggaaggagcaactgaagttagtcttctctttgccaaaacggtcggttgctgtataagttgaaggatgggtaatgtaccatggaaatgacattttttttgaatcaatgaaatacatgttgcgttgatgacaaggaaa

SEQ ID NO: 152091 - DNA, 2618 bp, Zea Mays
ctctccctctcgctcgctcgctcctcactccccctataaaagccgccgcggcctcctcctcctccctccgcaagaatccagcgagccaacaaggcaacaacaaacacctccctccttcttcacttccctgccgttgttgcaggaagcaagcgagggcacacaaaccgacaaggccgcccacgcgcgcgtcggccgccgccgttgccgaccagcaggcaggcagcatggtcgtgaacaacaaggtggacagcctgtcgtacgacgtcgaggcgccgccgccctctgccgccggcgccgccgcggggcaagcgccaccgccggcgtcgccagctccggcgccggcaccggcaacccacgcgcccgtgacgcgggaaggcggcgcggcgtcggtgctggagctgcacaaggtgtcgctgccggagcggcggacgacggcgaaggcgctgcggcagcgcctggccgaggtgttcttcccggacgacccgctgcaccagttcaagaaccagtcgtcggcgcggcgcctcgtgctggcgctgcactacttcttccccatcttccagtgggggtccgcctacagcccgcgcctcctgcgctccgacctcgtcgccggcctcaccattgccagcctcgccatcccgcagggaatcagctacgccaagctcgccaacctgccgccaatcgttggcctatattccagcttcgtgccgccgctcatctacgcgctgctggggagctcgcgggacctggcggtggggccggtgtccatcgcgtcgctggtgatggggtccatgctccgggacgccgtgtcgccggacgagcagccgctcctctacctgcagctggccttcaccgccaccttcttcgccggcgtcttccaggcgtccctgggattcctcaggctgggcttcatcgtggacttcctgtccaaggcgacgctgacgggcttcatgggcggcgccgccgtcatcgtgtcgctgcagcagctcaagggcctgctcggcatctcccacttcacctcccacatgggattcctcgacgtcatgcgctccgtcgtcaaccgccacgacgagtggaagtggcagacgatcgtcatgggctccgccttcctcgccatcctcctcctcacgcgccaaatcagcgccaggaatccaaagcttttctgggtatcagcaggtgctcccctggcgtcggtgatcatctccaccatcctctccttcatctggaaatcccccagcatcagtgttatcggcatcctccccaggggagtgaaccctccttcggcgaacatgctcagcttcagcggctcctacgtggcgctgacgatcaaaaccgggatcatgacaggcatcctgtccttaacagaagggatcgcagtgggcaggacctttgcgtccatcaacaactaccaggtggacgggaacaaggagatgatggcgatcgggctgatgaacatggcgggctcctgcgcctcctgctacgtgacgacggggtccttctcccggtcggcggtgaactacagcgcgggctgcaggacggcgttgtccaacgtcgtgatggcggcggcggtgctggtgacgctgctgttcctcatgccgctgttccactacaccccgaacgtgatcctggcggcgatcatcatcacggcggtggtggggctggtggacgtgcgcggcgccgccaggctgtggaaggtggacaagctggacttcctggcgtgcgtggcggcgttcctcggcgtgctgctggtgtccgtgcagacgggcctgggcgtcgccgtcggcatctcgctcttcaaggtcctgctgcaggtcacccgccccaacgtcgtggtggagggcctcgtcccggggacgcagagctaccgcagcgtggcgcagtaccgcgaggccgtccgcgtgccgggcttcctcgtcgtcggcgtcgagtccgccgtctacttcgccaactccatgtacctggtggagcgggtcatgcgctacctccgcgacgaggaggagcgcgcgctcaagtccaaccacccctccatccgatgcgtcgtcctcgacatgggcgccgtcgcggcgatcgacaccagcggtctagacgcgctgtccgagctcaagaaagtcctggacaaaagaaacatcgagctggtgcttgccaacccggtggggtcggtggcggagaggatgttcaactcggcggtgggcgagagcttcgggtcgggccgcctcttcttcagcgtagcggaggccgtcgcggcgggggcgtgcaaagcggcgcagccctgacgacgacgacaggctgatccctgaggtgccgcacgggagcatgcataggaataggatgggtcagagacagactaccggtgctgctagtggtagtagggcaggacgacgtacgaataacatggtgatggcctctcttcctccactccgatgcgatgcgagtgtgcgacgcaggggaggggagaagagtttttgaaggatgtgaccagttgctgttgtagttgttgtcaagtacgtagtaatgaaacgagaattgctgcgtggcaattcaggcctgttttttctttttgcatcaaggaaaaataagtgctggtacagatgagattattttaactagaaccaagttacttg

SEQ ID NO: 152092 - DNA, 1511 bp, Zea Mays
tagtaaaaacttaagaaaaagagaacgaagcccctgctgccagcaggaccctgcgggcgcgctcccgtaggccgaatacccccgactgggcaatcgccgccgccgttctctccgttgtctgtctctcggcaaggcagcaactgtgctaccgccgccgcggtgcccagttcttcgccgcgccctcggcccttcggcggcagctagcacccagcaggagactggtgcagttcggtttcccaataaaatgtccggttccaagagaagcctccccccttggatgagtttttctaaagatggagaggacgattcacgcaagaagaagcatgcaggcacctcccaaaaggcccagaaagggcccgatttctccaaacttttgggttcgtgaacccggagaggagcacgcttcgttcacaagcattggacatgggagccgaatatcgagccgattggacatcagactgcacccttcttgtttgtgcatttgtcaacacccccaagtttcgacaggttcaggcggataatggaaccattatctcaaaggactggatctttgagtctcacaagcaaagaaaacttgtggacattgaacctttccttatgcatgctggaaaaccatggcgaaaaaataaggagcccatcaaaactgatcaagatgagaaggaaacatgcaaagagcatcaaaaacaagttcaacgatctcgtgtcaagccatccacctctgatgccatggaggcaggaaatttagaatcagcaaacaaatgtttttctccctcaaaaataaagcaatgggccatggatgatttggcacagactatgtcatggctggacagccaagaagagaagccagagccaagtgaactgaaggctatagcctctgaaggggtaatcacttgtcttcaagatgccatagaatccctcgagcaaggcaatgatatcaagggagttgcagagcagtggagcttcgtcccccatgttgtcaacgagctgttaaaactagatggaggcggaaaaggtgcggctctgcccaaagagcagctacgtcaactagcaggcaagtgcaagaagatctaccaggccgagtttgctcgcacggacatgggcgacaagaacaagggtaggcatcaaaatgacccacatgtgaccgagcaccgcaggaagaccaataccaaatcagaggatgaccactacgatagcgatgccacgatagaaatgacggaggaagagattgatttcgcgtgcagacggctccctgggctctatgcggatgatacatgatactatctagttgagatgtcaggtgtgtgaggaaggctctgttaggttgttccggattggggccctggattaattcctagccggattacttctctaatttatatagattttgataagctggaatgaatcatggctcattccggtaccaccgaagaggcccgaagggtacttgatgtcaggtgtgttgttgtcggttgtttgatagacgacgggtatgatgtagatctatcgcaacg

SEQ ID NO: 152093 - DNA, 1608 bp, Zea Mays
tagtaaaaacttaagaaaaagagaacgaagcccctgctgccagcaggaccctgcgggcgcgctcccgtaggccgaatacccccgactgggcaatcgccgccgccgttctctccgttgtctgtctctcggcaaggcagcaactgtgctaccgccgccgcggtgcccagttcttcgccgcgccctcggcccttcggcggcagctagcacccagcaggagactggtgcagttcggtttcccaataaaatgtccggttccaagagaagcctccccccttggatgagtttttctaaagatggagaggacgattcacgcaagaagaagcatgcaggcacctcccaaaaggcccagaaagggcccgatttctccaaacttttggacggggtggtgtttgtgctgtcagggttcgtgaacccggagaggagcacgcttcgttcacaagcattggacatgggagccgaatatcgagccgattggacatcagactgcacccttcttgtttgtgcatttgtcaacacccccaagtttcgacaggttcaggcggataatggaaccattatctcaaaggactggatctttgagtctcacaagcaaagaaaacttgtggacattgaacctttccttatgcatgctggaaaaccatggcgaaaaaataaggagcccatcaaaactgatcaagatgagaaggaaacatgcaaagagcatcaaaaacaagttcaacgatctcgtgtcaagccatccacctctgatgccatggaggcaggaaatttagaatcagcaaacaaatgtttttctccctcaaaaataaagcaatgggccatggatgatttggcacagactatgtcatggctggacagccaagaagagaagccagagccaagtgaactgaaggctatagcctctgaaggggtaatcacttgtcttcaagatgccatagaatccctcgagcaaggcaatgatatcaagggagttgcagagcagtggagcttcgtcccccatgttgtcaacgagctgttaaaactagatggaggcggaaaaggtgcggctctgcccaaagagcagctacgtcaactagcaggcaagtgcaagaagatctaccaggccgagtttgctcgcacggacatgggcgacaagaacaagggtaggcatcaaaatgacccacatgtgaccgagcaccgcaggaagaccaataccaaatcagaggatgaccactacgatagcgatgccacgatagaaatgacggaggaagagattgatttcgcgtgcagacggctccctgggctctatgcggatgatacatgatactatctagttgagatgtcaggtgtgtgaggaaggctctgttaggttgttccggattggggccctggattaattcctagccggattacttctctaatttatatagattttgataagctggaatgaatcatggctcattccggtaccaccgaagaggcccgaagggtacttgatgtcaggtgtgttgttgtcggttgtttgatagacgacgggtatgatgtagatctatcgcaacgagacaagatcctccctgctcacttaacaatacagaaagtgaaaaaacaccctccagcagttcctctttccaa

SEQ ID NO: 152094 - DNA, 926 bp, Zea Mays
ttaatagcataatgagaggaaaaccttcagaataaagcattgaaatcgtaggttcaagttaagacatacagcccatcatttcctccactgatgctgtttggattcattcatggacctaaatgcatcaccgtgggtgtcccactgtcccttaacatgagactcacctccaccttgcccctcccagtcggatcacctcttccgttccagaatccctgtgcgccctatcgtcgccagcatcattcttcacgtttgtcgcatcgccgtacagatccttcagcttcgccaggttcgacaattctggagccctaccaaacgggctggagcgatgtttgtcgccatcacttctgccacggactggactcctgctcctgctcctgcggacgcttgcatgtctactccggtcagaatccctgtccctcctttcacggcctcgtgtttcgccatccctgttcgaataatcagaccgacgatgatcgcggtctctgtgctcacgagcatgccgatcaggctccctatccttgtagtacctgccactgccacgttcacgatccgagcgctccctctccaaatcatgatcacgctcagagctccgactccggtgcttcatcggtggcgatttcgcacggtcaccttccttgtcctgtttggaaggtaacgttcttcggaccggggaagaatcccttgtggatgcacggtgtggagcgcgctgaccaaaggagacagacaaagaagcctttacggaaggaggccttctggcggtatcatttgattcaagcctgttggaatccccagtcattcctgactgctttgttggaagctttagcttctcaaggtggctagtgacctgtcggaggattgggagaggcactcgtggaaggagactgtcgaaatagtactgcaaaaagaataacaaatatcattgacac

SEQ ID NO: 152095 - DNA, 2286 bp, Zea Mays
aaggaatgaattggtacatacaaaactaagtagctttattacattaactgaaacatgtcagctccagctcattctcctagttggcgtcgtaccacaatttcagtattaacatgcacagtaacaacgttacatcggtgctctgtaaattctttttagtatatacaccgtgactattaatctatggtgctataggctttgtcgtccctctttgggatttgtgcatttggccacctcccacggcacgcttcagttctatccagacaacacaatcgtaaaacagcatgatgagcgtcctccgaatcaacttttgcacatattgccttttatctatccaattccattcttcttggtggttccttcccctacttcatcaacagaagggcatcacgatgacgccctaggagggtcaatgcagttgcagctatgtgatgagcagttaggccagccaggtcaagttgctctgcgagcgatgcatgctcaatgtacctgtctggcagcacaatgggtcgccactgcagagttacaaagaaacgggaaccttgagatcagcatgtagaaacaagaaaagtcagtagacaagtaaacacggcctgaaattgctaacaactatcacatcaagagcactggaaagtgttagctgcgaagcatggggctcgtgcctccattgcaagattcgcagaaacagcttcgtgctggataggggtcacaaacagcattgcaaagtgggcaaggtacctttgttcgaccgtcaagtagaccatcgagagaaataaactgtgagacatgtgatccaaagccaccaaccgttccttcttccactgtgataagaaaactatgctgctggcacagcgttctgattaggtcgatgtcaagcggcttgcaaaacctcgcatttgcaactgtcgcctgaatgccaaagttggataaaagagatcgagcaatcaagcatctctggaccacctcgccatagccaagaaaagctatctcttttccctcgacaagaatctctcctttaccaatctgaaaaagggaacggggaacatttacaacctgcctacacttcagaatatctcataatataatgacaaagctcatctttcttgttttcaaaacaatagattgctttatatttttgtaatgtccagcaatatggtagatgtgcttgaaatgtttgggctgtactatttgaacgtaatgttgacttagagcaaaatatgttcaagggggcctacctcaaatggattcccatatgttacacttccactagtcccaacaatggcacccctaggatagcggaagcaaataggtctgtcctcaatcattgcagctgttgccaccatgtcaataagttcatcctcattagatggtgacatgacaatcatgtttggcaagcatgacatgaatgtaatatcaaatggtcctgaattagttggaccctcagatcctaccagaccagcatttgtgatagcaaatcgaactggtatcttttgcatgtccacatcttcaattatctgccatagatgtgagctttatgaaatttaatgtacataaaagtaaagcagccttgcagatttgatgaagcacaggaagattatgcacacactaatttagcagcattatgtattggcacctgatcatatgctcgctgaagaaatgtggatggaattatgcagaaaggctttagacctccgcatgccaaaccagcagaaaaggtaacagcatgttgctcagcgatgcccaagtcaaaaaatctgtctgggaacctggactggaataagcggagtgatcgatcgattcccatgccgccatgaactaccacaatgcgcttgtcattctctgcttctgctgttagtgcttctacaaagcagtcattatatgtcctagaaagtccagttcctaaaaactttagaagatcagggcttgagtttgaaggccctgttgtcagtaaaaaataaggttaatccataaagtactcattcaatatataggcctcagtctttgtatctgttttggtctatattagaccttttttctcctatcttaatataatgaggcgcggttcttctgcacgcgagaaaaatacagctagtaatggttctaagaggacaataatgtaacacgactgcaaaagcagcagtacattagtaaccgtagactcttagtgtacttattagaatgtggaaacttaaacagacctgtaaaagttgtgaaattgatcgcacagatgctaataatgacatatacatatttttaaagaagtttgtttgccatgagcactgacactcc

SEQ ID NO: 152096 - DNA, 942 bp, Zea Mays
aatgctttgggctgatctgcaaacttgcggtgaaattccggcttcggcggtttggccagcctccttccgcggggtggatttggatagcgcggcgcagagaaaaatggcggcttcggctctccacctccaccgccggcgggtgtgaagcttcagcagaggcagctgcgctcgcggcagggtggcctatctcgaagacttttgaaagttgtgtcctattacagtctcacaactccaccatataaactggatgctctggaaccttacatgagcaagaggacagttgaacttcactggggtaagcaccatcaagattacgtggatggcttgaataagcagctggctaccagccctctgtatggatatacgctggaggatctgataaaagaagcctacaacaatggcaatccattaccagaatataacaatgcagcacaggtctggaaccatcacttcttctgggaatcgatgcaaccagaaggtggtggcttacctgagggaggtgtgctgcagcagattgaaaaggattttggctcgtttactaattttagggaagagtttatccgctcagccttacaactattggggtctggttgggtttggcttgtcttgaagagaaatgagacaaagctttcagtggttcatacacaaaatgctatcttcccacttgcttttggtgatatcccaatcatcaacctagacttatggtaggtaaggacatggattctgagttgtagattctttttttgtgccaaatgttaacacttcttttctctccagcatgcttactacttagactacaaggatgataggctaacatatgttacaaactttatgggccatctcatctcttggcatactatcactctacgcatgatgcgtgcagagtcttttgtgaaccttggtgagcctaatattccggtggcatgagctacagatacaccc

SEQ ID NO: 152097 - DNA, 989 bp, Zea Mays
aatgctttgggctgatctgcaaacttgcggtgaaattccggcttcggcggtttggccagcctccttccgcggggtggatttggatagcgcggcgcagagaaaaatggcggcttcggctctccacctccaccgccggcgggtgtgaagcttcagcagaggcagctgcgctcgcggcagggtggcctatctcgaagacttttgaaagttgtgtcctattacagtctcacaactccaccatataaactggttgtaagcttgttgacgtcaatctcaaaagattcacgtgctgtcattaaaggaatatccaaattttaactttgtttacctttgttttctggtacaatgctcaggatgctctggaaccttacatgagcaagaggacagttgaacttcactggggtaagcaccatcaagattacgtggatggcttgaataagcagctggctaccagccctctgtatggatatacgctggaggatctgataaaagaagcctacaacaatggcaatccattaccagaatataacaatgcagcacaggtctggaaccatcacttcttctgggaatcgatgcaaccagaaggtggtggcttacctgagggaggtgtgctgcagcagattgaaaaggattttggctcgtttactaattttagggaagagtttatccgctcagccttacaactattggggtctggttgggtttggcttgtcttgaagagaaatgagacaaagctttcagtggttcatacacaaaatgctatcttcccacttgcttttggtgatatcccaatcatcaacctagacttatgcatgcttactacttagactacaaggatgataggctaacatatgttacaaactttatgggccatctcatctcttggcatactatcactctacgcatgatgcgtgcagagtcttttgtgaaccttggtgagcctaatattccggtggcatgagctacagatacaccctagttatcatcatgag

SEQ ID NO: 152098 - DNA, 892 bp, Zea Mays
aatgctttgggctgatctgcaaacttgcggtgaaattccggcttcggcggtttggccagcctccttccgcggggtggatttggatagcgcggcgcagagaaaaatggcggcttcggctctccacctccaccgccggcgggtgtgaagcttcagcagaggcagctgcgctcgcggcagggtggcctatctcgaagacttttgaaagttgtgtcctattacagtctcacaactccaccatataaactggttgatgctctggaaccttacatgagcaagaggacagttgaacttcactggggtaagcaccatcaagattacgtggatggcttgaataagcagctggctaccagccctctgtatggatatacgctggaggatctgataaaagaagcctacaacaatggcaatccattaccagaatataacaatgcagcacaggtctggaaccatcacttcttctgggaatcgatgcaaccagaaggtggtggcttacctgagggaggtgtgctgcagcagattgaaaaggattttggctcgtttactaattttagggaagagtttatccgctcagccttacaactattggggtctggttgggtttggcttgtcttgaagagaaatgagacaaagctttcagtggttcatacacaaaatgctatcttcccacttgcttttggtgatatcccaatcatcaacctagacttatggtagcatgcttactacttagactacaaggatgataggctaacatatgttacaaactttatgggccatctcatctcttggcatactatcactctacgcatgatgcgtgcagagtcttttgtgaaccttggtgagcctaatattccggtggcatgagctacagatacaccctagttatcatcatgag

SEQ ID NO: 152099 - DNA, 1572 bp, Zea Mays
aacggctctgctccgtgtccgcttttcagaaagacagagaggaaaggaagaaaaaactcgcccccctctctctctctcttgtgtgtgaggtggcgaacccgaggagcggaggccacaagtccaatccgcccgtatctaatccgctgcgacgaggtgggggcgcggcggggcggtcttgatccgggctctttcctcgcgggagcgcacggttggcatttcaagtgcgagaccttggcttctttgaatcccacaaagcacggttgagccatggctggctcccttgctgcctcagccttcttccctggcccaggggcttctccggcagcatccgccaaaacatcaaagaacttggctggtgaattaccggataatttgagcgtgcgtggtattgtcgcaacgcctaatgccccttcggggaacatgcaagtcaaggctcaagcacaagcccttcccaaggttaatggtaccaaggttaacctcaagaatgcaagcccagacacagaggaggcgataccctacattgctcccaagacattctacaaccaactgccagattggagcatgcttcttgcggctgtcactaccatctttcttgcagcagagaagcagttgacactgcttgactggaagccgaagaaacccgacatgcttgttgatacatttggttttggtaggatcattcaggatgggctggtttttaggcaaaacttctggattcggtcctatgagattggtgccgatcgtacggcttctatagagacattaatgaatcatttacaggaaacagctcttaatcatgtgaaaacagctggccttcttggagatggttttggcgccacaccagagatgagcaaacgaaacttgatctgggttgtcagcaaaattcagcttcttgttgagcaatacccctcatggggagatactgttcaagtggacacatgggtagctgctgctgggaaaaatggcatgcgtcgagattggcatgttcgtgacgaaaactctggacgcacaatcttgagagctacaagtgtttgggtgatgatgaataagaacactagaaggctttcgaaaatgccggacgaagttagggccgagataggcccatatttcaatggccgctcagccataacagacgagcaaagcgagaagttggctaagccagggagcgctcctgacggtggtactatgaagcagcagttcattaggaaggggctcactcctagatggggtgaccttgatgtcaaccagcacgtgaataacgtcaagtatatcggttggatccttgagagtgctccgatctcgatcctggagcagcacgagctcgcgagcatgacgctggactacaggaaggagtgtggccgcgacagcgtgctgcagtcgctcaccaccgtcgcaggagaacgcatggacggccacgcgggcgactccaccatccagtgccagcacctgctccagctggagtccggggccgacatagtgaaggcgcacacggagtggcgcccgaagcgggcgcgtggcgaggggagcttgaggggagcttcgggggttttccggccgagaatgcatgaatga

SEQ ID NO: 152100 - DNA, 1923 bp, Zea Mays
gactgcggaacacgacgacgaagcgaaagaacgcaaggtcaagtcagaggcagagggcagaggcaggagcagtggtagcgcgacgccgccggggagtgatggcactggcgtgatacatggagggcaaaaaggccaagatcctcgcgggcgcggtggctgtcttgctcgtggctctcgagctcgccttgttcctctgcttccgcctgtcgaggccgttctacctctcgacggcggtcatcctgtcggccgcgctggcgggcaccgtcacggtcctgctgtgccacgcgctgtacccccacggacgggccgagcgcatggcgaggcggctggtgctggacggcggcgaggatgtgccggcggcggcgcgcgtggagtacagctacttccgcaaggtggccgggctgcccagaaggttctcgctggaggcgctgtcggcggcgacggacggcttccagtacgtggtggggcaggggtcgtcggggacggtgttcaagggcatcctcgacgacggcacgcccgtggcggtgaagcggatcgacgggtcggcgcacgtggacaaggagttcaggtcggaggtgtcggccatcggcagcgtgcagcacgtgagcctggtgcgcctgctcggcttctgcctcgtccgcaacggcccgcgcttcctcgtgtacgagtacatggacaacgggtcgctggacaggtggatcttcccgcaggcgcggcacggcggcggcgccggcgggcggtgcctgacgtggctgcagcggtaccaggtggccgtggacgtggccagggcgctggcgtacctgcaccacgactgccgcgccaaggtggtgcacctggacgtgaagcccgagaacatcctcctcgacgaccgcctccgcgggatgctctccgacttcgggctgtccacgctgatggggaaggagcagagccgggtggtgaccacggtgcgcggcaccacggggtacctggccccggagtggctcctgggcgccggcgtcacggagaagtccgacgtgtacagctacgggatggtgcttatggagatgctcggcgggcggcggaacctgcaggccgagcccgggcccagcgggtcccggcggtggtcctacttcccgaagctggtcgccgacagggcgcgggaggggcgcgtggcggaggtgctggaccggcggctcgcctcgtccgcgggggacgaggcgagcgtgaggcggctggcccacgtggcgctgtggactgtggtgcgcgcaggagaagcccggggcgcgcccgaccatggcgcgcgtggtggagatgctggaggccaggggcggcgccagcgtggagcccccgccgccgtcggacatgatcgtggtggacctgctcgcgctcgaccccgcgcagacgcaccacggcggcggcggcggcccgttcgggctccccgggttgccaccgggaccgagctcggtggggacggccgcgtcggcggcgatgagcatgggcgaatcgttcgcgctctcctacctgtccgggcggtagcgcacgtggctgtgccgcgccgcaattccgtagcgatcgatcggccattcaggactccaccaggatgctgcaaaaggactacccaacagtggagtggcagtagcttcatgccttcatgatctggtgcggtgactggtgagtgatttcaggctgcggtctgacaaactgtacgtactactacagagtgcaatcattgaaacgaaggtgcagaccttggcgcaccaagttcagctgcaagctgactggcacagtgtcattgaagattagatgcaggcgtgggagaagctggaacgccatcaatggttatgcgcataatacgattctaagttttttattctaattttttctgtaaaatttccattccccaaataggtagcccttcatttcaaccggttccacccaactaaa

SEQ ID NO: 152101 - DNA, 107 bp, Zea Mays
aggggcttggcttgagccttgagggcaggctgagacggcgtctacccggctgctgtctcgttctcgctctcactcacgcaccactcgctcgctttccagctgcccac

SEQ ID NO: 152102 - DNA, 870 bp, Zea Mays
gttcaacaatttacccatttcacggtatgtctcacaggcatagcgatcatgattctgattcgagtgatagtgaggacgaaacacttatgcttgtcaatcttcttgtcctcaacatagaggccagacgccagcaccgaagacggtcccgtttgcctcgccgcgttattcacaaggatcattttggtggagaaaatcttatccatcatcactacttcgccccgaacccagtgtatccaccccacgtctttcgtagaaggtacccactacttgttattcgaatactgtcggggaccataattaggggtaccctcaaggcgcctaattctcagctggtaacccccatcagcataaagctgcaaaggcctgatgggcgcgattaagtcagggatcagtccacacgagtgactcgatcacgcttcacccgagcctagcctcggccaaaggcagccgacctcgagagacttccgtctcgcccgaggccccctttttatggcggacacatcaccggctcgcccaaggccttggcttcgctcagaagcaaccttgactaaatcaccacaccgactgaccaaattgcaggggcatttaacgcaaaggtggcctgacacctctatcctgacacgcgcccccggcagagccgaggtgaccgccgtcactccaccgctccactggccagtctgacagaaggacagcgccgcctgcgccactccgactgcagtgccactcgacagagtgagtctgacaggcagtcaggccttgccaaaggcgccacggcgaactccgctccgcccgaccccagggctcggactcgggctaagacccggaagacggcgaactccgccccgcccgaccccagggctcggactcggg

SEQ ID NO: 152103 - DNA, 990 bp, Zea Mays
cgcccgccgcttctcccctcccctccccgcgtccgccgattgtttgtgtggttgggttcccgttccccggccgatgctcttggtggcgcaacggcgcctataaatccttggcctctcctgcgtctggcaacacatccatcctcgctagctcgctcgctctccttgcaactccagtgctgctcactgccactgccagcagatcgagctgctccgtctcacaaaccctcttgctttgctgctgcacctgcaagtctgcaaccgcgcacacagagatgtcgacgacggtgagccgtgcgtccctcgaccagaagctcgccctcgccaagcgttgctcccgagaggcgaccctcgccggagccaaggcggcagcggtggcgactatcgcctccgcgatccccaccctggccagcgtgcggatgctgccatgggccaaggccaacatcaaccccaccggccaggcgctcatcgtctccacggtggctgggatggcctacttcatcgccgccgacaagaagatcctgtcgctggcgaggcgccactcgttcgagcaagcccctgagcacctcaagaacacctccttccagggcaccggccgtccccacccagccttcttcaggccgtgagacgagacctccgtccagagctagctacctacctctttttccagtttgccaatgcaagcaccaaatgcccaccgatgcatgcctgaataaactactgtaattgcgaggctgctgaacgtcgatgcgctagtataactactactactacgaggctagctgcgcgctgaacacagcgctgtaaagtagtgttggtgtgctaaattcagaatgtgtaagtttaatttatgttattaccagttaaccaactttgtgtgtgctattttcttgtaaaaaaataaagtggttagtggccatgtatgttggctttgcaggggaaaaaaaatttaaaacaactgaaaccttgcagaaaaaaaaattaataataccc

SEQ ID NO: 152104 - DNA, 1013 bp, Zea Mays
ccgcttctcccctcccctccccgcgtccgccgattctcgctcgctctccttgcaactccagtgctgctcactgccactgccagcagatcgagctgctccgtctcacaaaccctcttgctttgctgctgcacctgcaagtctgcaaccgcgcacacagagatgtcgacgacggtgagccgtgcgtccctcgaccagaagctcgccctcgccaagcgttgctcccgaggtacgtgcgaggcacactagctctgccctcgaaccaaacaaacaagctagcctgtttattacgcaggcagtacagtagtacactgactaaactgactgatcgatgcttgtctgtatgtcgcatgcatggtctgcagaggcgaccctcgccggagccaaggcggcagcggtggcgactatcgcctccgcgatccccaccctggccagcgtgcggatgctgccatgggccaaggccaacatcaaccccaccggccaggcgctcatcgtctccacggtggctgggatggcctacttcatcgccgccgacaagaagatcctgtcgctggcgaggcgccactcgttcgagcaagcccctgagcacctcaagaacacctccttccagggcaccggccgtccccacccagccttcttcaggccgtgagacgagacctccgtccagagctagctacctacctctttttccagtttgccaatgcaagcaccaaatgcccaccgatgcatgcctgaataaactactgtaattgcgaggctgctgaacgtcgatgcgctagtataactactactactacgaggctagctgcgcgctgaacacagcgctgtaaagtagtgttggtgtgctaaattcagaatgtgtaagtttaatttatgttattaccagttaaccaactttgtgtgtgctattttcttgtaaaaaaataaagtggttagtggccatgtatgttggctttgcaggggaaaaaaaatttaaaacaactgaaaccttgcagaaaaaaaaattaataataccc

SEQ ID NO: 152105 - DNA, 1511 bp, Zea Mays
gagaactccactcaagaaaaaattgcacgcaagggtccacgcggcgaacagatcgtgccgttccgcggcggcgtcggtgcggcgctggagccgaagtgaaaagtcgatcgggattgggccgttgggggtgcgatacccctcgcctcgaatgcgagctccgtaggtccgcccccccggcggatggccgagctgggccgccgccgccgcccgctgggatgaggcagcgtgaggagtcgcgctcgcggcttccctgcccccaggcctccgctctgaatatccccgacgcgacggtaaccgaacaagcctcagttagaaaggctaagatcagagcatctccgtgtctccacaacacatcctggattcgcaattattgaggtgcctccactataaaaggccaaccatcctcaaggaatgaacacagccagccagcaagcaagcagagaacaaggataacacagcaactgaaaaccttattaccaagaacaaacaactacaagaggctttgcaagttcacagaggcagctgttcactgcgaatgaacaaccagaggaagcctggagactggaactgcaagaactgccagcatctcaacttcagccgccgtgactactgccagcgttgccgtgatccacgccctgacttgcagttcggcgacggctatagcacggttggtgtgctgacctccctggacatccgcccaggtgactggtactgcagctgcggctaccacaacttcgccagccgcagcagctgcttcaagtgcggcacgatcgtcagagacttcccagcggggcaaggcgcagccggtgctgagggtgactttgctggtggacgcgacagcgccgcagtccgtgctgggtggaaagctggcgactggatctgcacgaggcctggttgcaacgtacacaactttgcgagcaggatggagtgctataggtgcaatgcaccaagggaggcagcaggcaccgggaggtaagaggcgactggggtgataccaagagcgtgagatgtgacgagctggccgagcagtggaacctactgccgtcacacactcaccatcaggcatccaggaaggatgagtctactacgtacacgactatattgctgattgccgcgcgtagtgccgctgctgtggtttgcgtgggtggagaagtacccaagcgcaacacctgttacgtgtgttgtttgctcctttttgaggttgtgttgattcagtgacagctgagttgtacggcctgatgatgtactcgcattgtgtatttgtcttaaacagcatatataattatgtaataataagtgcttgcttatctatgctctgctgatgcatctgtcattctgtctccttgtattgtcaatgttttgctccttggatggttttcaaggtggtttagtctgatgtgggaccatcctagacgctcaacgtggcgtggcgtggcgccatatcaaccaccacgaggaaggtaaaatggactacgttgagcacagttcacgggtcaaatcgttttaccaaa

SEQ ID NO: 152106 - DNA, 1489 bp, Zea Mays
aaattgcacgcaagggtccacgcggcgaacagatcgtgccgttccgcggcggcgtcggtgcggcgctggagccgaagtgaaaagtcgatcgggattgggccgttgggggtgcgatacccctcgcctcgaatgcgagctccgtaggtccgcccccccggcggatggccgagctgggccgccgccgccgcccgctgggatgaggcagcgtgaggagtcgcgctcgcggcttccctgcccccaggcctccgctctgaatatccccgacgcgacggtaaccgaacaagcctcagttagaaaggctaagatcagagcatctccgtgtctccacaacacatcctggattcgcaattattgaggtgcctccactataaaaggccaaccatcctcaaggaatgaacacagccagccagcaagcaagcagagaacaaggataacacagcaactgaaaaccttattaccaagaacaaacaactacaagaggctttgcaagttcacagaggcagctgttcactgcgaatgaacaaccagaggaagcctggagactggaactgcaagaactgccagcatctcaacttcagccgccgtgactactgccagcgttgccgtgatccacgccctgacttgcagttcggcgacggctatagcacggttggtgtgctgacctccctggacatccgcccaggtgactggtactgcagctgcggctaccacaacttcgccagccgcagcagctgcttcaagtgcggcacgatcgtcagagacttcccagcggggcaaggcgcagccggtgctgagggtgactttgctggtggacgcgacagcgccgcagtccgtgctgggtggaaagctggcgactggatctgcacgaggcctggttgcaacgtacacaactttgcgagcaggatggagtgctataggtgcaatgcaccaagggaggcaggcaccgggaggtaagaggcgactggggtgataccaagagcgtgagatgtgacgagctggccgagcagtggaacctactgccgtcacacactcaccatcaggcatccaggaaggatgagtctactacgtacacgactatattgctgattgccgcgcgtagtgccgctgctgtggtttgcgtgggtggagaagtacccaagcgcaacacctgttacgtgtgttgtttgctcctttttgaggttgtgttgattcagtgacagctgagttgtacggcctgatgatgtactcgcattgtgtatttgtcttaaacagcatatataattatgtaataataagtgcttgcttatctatgctctgctgatgcatctgtcattctgtctccttgtattgtcaatgttttgctccttggatggttttcaaggtggtttagtctgatgtgggaccatcctagacgctcaacgtggcgtggcgtggcgccatatcaaccaccacgaggaaggtaaaatggactacgttgagcacagttcacgggtcaaatcgttttaccaaa

SEQ ID NO: 152107 - DNA, 1327 bp, Zea Mays
atagaaatataatgtagctttagagaagaccaccggcccaccgccatgcagaatttatgttctctatatatgttacgaatacagcaactggacgctgcatacgtgagctccctctcagggaacagttagaaaggctaagatcagagcatctccgtgtctccacaacacatcctggattcgcaattattgaggtgcctccactataaaaggccaaccatcctcaaggaatgaacacagccagccagcaagcaagcagagaacaaggataacacagcaactgaaaaccttattaccaagaacaaacaactacaagaggctttgcaagttcacagaggcagctgttcactgcgaatgaacaaccagaggaagcctggagactggaactgcaagaactgccagcatctcaacttcagccgccgtgactactgccagcgttgccgtgatccacgccctgacttgcagttcggcgacggctatagcacggttggtgtgctgacctccctggacatccgcccaggtgactggtactgcagctgcggctaccacaacttcgccagccgcagcagctgcttcaagtgcggcacgatcgtcagagacttcccagcggggcaaggcgcagccggtgctgagggtgactttgctggtggacgcgacagcgccgcagtccgtgctgggtggaaagctggcgactggatctgcacgaggcctggttgcaacgtacacaactttgcgagcaggatggagtgctataggtgcaatgcaccaagggaggcagcaggcaccgggaggtaagaggcgactggggtgataccaagagcgtgagatgtgacgagctggccgagcagtggaacctactgccgtcacacactcaccatcaggcatccaggaaggatgagtctactacgtacacgactatattgctgattgccgcgcgtagtgccgctgctgtggtttgcgtgggtggagaagtacccaagcgcaacacctgttacgtgtgttgtttgctcctttttgaggttgtgttgattcagtgacagctgagttgtacggcctgatgatgtactcgcattgtgtatttgtcttaaacagcatatataattatgtaataataagtgcttgcttatctatgctctgctgatgcatctgtcattctgtctccttgtattgtcaatgttttgctccttggatggttttcaaggtggtttagtctgatgtgggaccatcctagacgctcaacgtggcgtggcgtggcgccatatcaaccaccacgaggaaggtaaaatggactacgttgagcacagttcacgggtcaaatcgttttaccaaa

SEQ ID NO: 152108 - DNA, 2333 bp, Zea Mays
atgcatggcatgcagggcagctgttcactgcgaatgaacaaccagaggaagcctggagactggaactgcaagaactgccagcatctcaacttcagccgccgtgactactgccagcgttgccgtgatccacgccctgacttgcagttcggcgacggctatagcacggttggtgtgctgacctccctggacatccgcccaggtgactggtactgcagctgcggctaccacaacttcgccagccgcagcagctgcttcaagtgcggcacgatcgtcagagacttcccagcggggcaaggcgcagccggtgctgagggtgactttgctggtggacgcgacagcgccgcagtccgtgctgggtggaaagctggcgactggatctgcacgaggcctggttgcaacgtacacaactttgcgagcaggatggagtgctataggtgcaatgcaccaagggaggcagtttcagtttttaacaaatgggctggtaattccggaggcccatgtacaattggcccatgggtggcgcgtatagcccactaccacacaagtccacagcccgtcgttctggagtctggacccacatggcatggacacacgccgcctccgtccaatgatccaattcaatccaactacctaccttcactgcactgcactgcacctacccggctacccctgcggccttgccggggagtcggggacggggaaggaaacggcaacgagcctgcagctccagctaccccgaaaccccgtccaacgtccatggctatccacctccgggcccacgccttcgcggccaacccgctgcgtggcgtctccgccgccaccacctccatgtccccctccgcggccgccgaggcactccgctacctcctcgaccccagctccgccgccgccgccgccaatcccagccagtacctctccaagatccttcctttccgccggggccgcccgctcgcgcgctccacggaccctcccgcggtgccggcctggcgcctcgcgtggctcccgccgtcccgcgtccccggggtggccctggatgccttcgtcttcctgggcgcgctcgtcgagggggacggcaaggaagcctccgcgtactgggcggtcgacgtcagcgagggcgagggagccagggttggtgggccggcggacggggatgggccgtcggcgtttgtggacttgaggacgctcatggtggccacggactggagcgacaaggacgccatggcggagctcgccatcgcaggacatgctcgagcactgctagaatggcacagcacggcaaaattttgtggagcttgtggagcaaaggctgtacctactgaagccgggaggcgtaagcagtgcagcaacgattcctgcaagaagaggatataccctagaattgatccggttgtgatcatgttggtcattgataaagaaaatgatcgggcactcttaagccgccagtcaagatttgtgcctcgtatgtggagttgtcttgctggtttcatagagccaggagaaagcctggaagaggcagtgagacgagaaacatgggaggaaactggtatcgaagttgggcaagtcgtttatcacagttctcaaccatggcctgttgggccaaatactatgccgtgtcaactgatggtgggcttctttgcttatgctaaatcattggagataaacgtggacaagcaggagcttgaagatgcccagtggcacaaccgcgaagacgtcaagaaagcgttgacgtttgctgaatacgagaaagcccagagaacaagcgctgccaaggtcgatcagatctgcaagggcgctgagaaagggcagaacccctctgccgacttcaaagttggaagcggcgagcctgctccaatgtttgtcccaggaccctacgccattgctcaccaccttatctcgtcgtgggctttcgagggagcaccgaagctgcctagttcattctcaaacctataagcctggaccctggtgttcagacagacgatgacaggaactggacccctgtgctgcgggctcatggatcacctgtgttgccgtgagtgtaattctgatagtgtgtgtccgttgccggttgtgataaaataaaatagcaatagagtactgggtacagaagacttgccggaggatttggcatcaatggacatgtatatccattgcctttttacatgttgatcctctttgtatcacacgtaatgttgcatacttgcatagatacaacaatgatatacatcacacagtgtactcatgcatttatacatgtattcagataactggattcaatagtagagtctttgtctgtctctctctctttttctcacatgtggtttgataattgctac

SEQ ID NO: 152109 - DNA, 1891 bp, Zea Mays
acttgcccttcactgcgactgcgagcaagcagctctggtagtctggtctgatcactgatcagatcagccatggcggtcggcgtcgtcgccgctgagggcggccaggaccgccgctacggcggaaggatcaccgccttcgttgtgctgtcctgcatgaccgccggcatgggcggtgtcatcttcggctacgacatcgggatcgcaggcggcgtgtcgtcgatggagccgttcctgcgcaggttcttcccggacgtgtaccgccggatgcgcggcgacacgcgggtgagcaactactgcaagttcgacagccagctgctgacagccttcacgtcgtcgctgtacgtggcgggcctgctgaccacgttcctggcgtcgcgggtcacggcagggcgcggccgcagggcgtccatggtcctgggcggcgccgcgttcctggcgggcgcggccgtgggcggcgcgtcggtgaacgtctacatggtgatcctggggcgggtgctgctgggcgtcgggctcggcttcgccaaccaggccgtgccgctgtacctgtcggagatggcgccggcccggctccgcggcgcgttcagcaacgggttccagctcagcgtcggggtcggcgcgctggcggcgaacgtgatcaacttcggcacggagaagatcggcggcggctggggctggcgcgtgtcgctggcgctcgccgccgtgcccgcggggctcctcaccctcggcgcgctgttcctcccggagacgcccagcagcctggtgcagcaaggcagggaccgccgcgacgtggcgcggctgctgcagaaggtccgcggtgccggcgtcgacgtgggcgacgagctggacgacatcgtcgccgcgggtgagtctgcggccggagccggagggggcggcctgcgtcggctgctcgtggagcggcggtaccgccctcagctggtgatggcggtggcgatccctttctttcagcaggtgacggggatcaacgcgatcgcgttctacgcgccggtgctgctgcgcaccatcggcatgggcgagagcgcgtcgctgctgtcggcggtggtgacgggcgtcgtgggcgtggcctccacctccgcgtccatgctcgccgtggaccgctttgggcgccgcacgctgttcctggccggcggcgcgcagatgctggcgtcgcaggtgctgatcggcgccatcatggccgcggagctgcgggacagcggcggcgtggggaaggcctgggcgggggtgctcatcctgctcatcgccgtgtacgtggccgggttcggctggtcctggggccccctcgggtggctggtccccagcgagatcttcccgctggaggtgcgcgccgccgggcagagcgtcacggtggcggtgagcttcgcgttcaccgtgttcgtggcgcaggcgttcctgtccatgctgtgccacatgaaggccggcatcttcttcttcttcgccgtgtggctcgccgtcatgaccgccttcgtgtacctcctgctgccggagacgaagggggtgcccatcgagcagatggccggggtgtggcgcgcgcactggttctggagcagggtcgtggggccggagtcggaccccgacatagacgaggagcgcgcgcgcgggaaattatagtgcggatgcaacgaacagaaccatatgaggtcttgttcgtttgtgtcggattggtgggtcggaacgattccgacctgcgagctggattgcttctctaacttatataaactttgattaggcctgaggaagctaggtgaggaaggccaagcaaactagagtagacggcctcaggtgacttgaaagaaaacagacagtattcagacaagttctgtgagccttcattcatcaagtgaaaattgcaggatcatcataaccatgcaggttg

SEQ ID NO: 152110 - DNA, 1721 bp, Zea Mays
tggtctgatcactgatcagatcagccatggcggtcggcgtcgtcgccgctgagggcggccaggaccgccgctacggcggaaggatcaccgccttcgttgtgctgtcctgcatgaccgccgctgtacgtggcgggcctgctgaccacgttcctggcgtcgcgggtcacggcagggcgcggccgcagggcgtccatggtcctgggcggcgccgcgttcctggcgggcgcggccgtgggcggcgcgtcggtgaacgtctacatggtgatcctggggcgggtgctgctgggcgtcgggctcggcttcgccaaccaggccgtgccgctgtacctgtcggagatggcgccggcccggctccgcggcgcgttcagcaacgggttccagctcagcgtcggggtcggcgcgctggcggcgaacgtgatcaacttcggcacggagaagatcggcggcggctggggctggcgcgtgtcgctggcgctcgccgccgtgcccgcggggctcctcaccctcggcgcgctgttcctcccggagacgcccagcagcctggtgcagcaaggcagggaccgccgcgacgtggcgcggctgctgcagaaggtccgcggtgccggcgtcgacgtgggcgacgagctggacgacatcgtcgccgcgggtgagtctgcggccggagccggagggggcggcctgcgtcggctgctcgtggagcggcggtaccgccctcagctggtgatggcggtggcgatccctttctttcagcaggtgacggggatcaacgcgatcgcgttctacgcgccggtgctgctgcgcaccatcggcatgggcgagagcgcgtcgctgctgtcggcggtggtgacgggcgtcgtgggcgtggcctccacctccgcgtccatgctcgccgtggaccgctttgggcgccgcacgctgttcctggccggcggcgcgcagatgctggcgtcgcaggtgctgatcggcgccatcatggccgcggagctgcgggacagcggcggcgtggggaaggcctgggcgggggtgctcatcctgctcatcgccgtgtacgtggccgggttcggctggtcctggggccccctcgggtggctggtccccagcgagatcttcccgctggaggtgcgcgccgccgggcagagcgtcacggtggcggtgagcttcgcgttcaccgtgttcgtggcgcaggcgttcctgtccatgctgtgccacatgaaggccggcatcttcttcttcttcgccgtgtggctcgccgtcatgaccgccttcgtgtacctcctgctgccggagacgaagggggtgcccatcgagcagatggccggggtgtggcgcgcgcactggttctggagcagggtcgtggggccggagtcggaccccgacatagacgaggagcgcgcgcgcgggaaattatagtgcggatgcaacgaacagaaccatatgaggtcttgttcgtttgtgtcggattggtgggtcggaacgattccgacctgcgagctggattgcttctctaacttatataaactttgattaggcctgaggaagctaggtgaggaaggccaagcaaactagagtagacggcctcaggtgacttgaaagaaaacagacagtattcagacaagttctgtgagccttcattcatcaagtgaaaattgcaggatcatcataaccatgcaggttggcaggttgcagatgcagccccaagctacaagatgtcagaccgcagc

SEQ ID NO: 152111 - DNA, 907 bp, Zea Mays
tacacatctcctctaatcaatcaatcacgctcgcctcgccgccatcatatcatagcggcgacgccaacctcatctccatttaacaaccccccctgtttcctcataggagagggcggggcgcgcgcgcgagcgagcgagttcgttcccgtggtgaagaaacgatcgaccggcagtcgggacgcggtgccgtgggccggctgtccctcccacccatcgatcgaggattcaaggatgctgatcctggatctgggcatctgggtgctacccttgacgctgctgctggcgccggcgcgccggatggtgcgcctcgtcgacggcctgcagcggatcttcctcgccgtcgcctgccaccgggcgccgccgcccgcgctcgggcggctgtggagccgcctcgaccgcctcgactccgccaccgtcatgccctgaccctgatcattcagtggatatggatggatcagcgggtctacgctcccgaacgcgctgtttttttttctccattgacaaaaaaaagggcgctcttttgctgtaaatttcagctcttgctgtctgcttagactccgttttttgttttgttttgttttctgcttctctgtggtaatgcgatccctgtaaatctctgtaactagaggctgccaaccatatgattgatgaacgaaaagaatcccctatgcatgtatacagtgaaagaggcttggggtgctccttttttttttcattctgattatgctgctgatccgcgattgcaaatttggtgcgcgtttttgataggatgaatgccattgccatgctatgtcccagaccatcttagcatctcctcagtcgtttcctttccatgcgacggagattcagaagtgacagtctcactcaccgtgtctccctctccctagagcaaccaaataaaaaaaca

SEQ ID NO: 152112 - DNA, 1182 bp, Zea Mays
atgcacaaggtcgtcctcttcagtcttcgcctcggaggtgtcctcgttttcctaggattttttcccggagttctacgcgcattttgttctgggtttgctttccggttgggagaggaatcgggtgcggcgcaggaagacactggttttatcccacatgtccaatcagtagcagctaggaacagtaggcgtgcgccagtgcgtgtgatgcgaagcgaggagaggatgaaagtggaggaagccggcggcggcgagattggagaaatggagccccccgcggtcagcacggtggcggtggcggtcagcgggggcaggagtagcaggcacgcgctcaagtgggccctcgacaagttcgtccccgaagggagggtcctcttccggatcctgcacgtccgcccggcgatcaccatggtccctactccaatgggaaattttataccaatctcacaagtacgcgaggacgtggcatctgcctacagaaaagaagaagaatggcgagcgagtaatatgctagttcctttccagaagatgtgtgctcagagaaaggtagaggccgaagctgttttacttgaatcagatgatgttgcttctgctataagcgaagagatagggaaattcaatatttgcaagttagttttaggttcttcatcaaagagcatatttcgaaggaaactcaaaggaagtaagactgcaaccaaaatatctgagtgcattccaagcttttgtacagcatatgttatttcaaaaggcaaactatcatttgtgcgctcagctacatctgatattgttgaaacgcctcgatctatatcctcttcaactatttcttcacctagcactagaagtctttcctcctgtgcaccttcagaatggggagacatatatgcaacaacaaatgtaccattgcatcaaccttccttgccattgcagcgtgatcaagcgttggcaatcataaacaagttgtcaaacaggagagttagctcttcgagcagtgttgtgagcgagatctcttacaatgatgagccggccctgacaaggtcacactccatgatatctgagatgcagttcagcagtggtagcagtggaaattctgtttacaagagcttccaaagggataatttgcctaacaactctgatgaggcatcagtttcagaaatttcagaaaatgtaaatcatctgagtggtcag

SEQ ID NO: 152113 - DNA, 1445 bp, Zea Mays
tcagcttgattcgtcttctgctcttatgatcggtaagggatcgtatggcacagtttacagggcgaagcttcgtcatacagtagcagctgtcaaagtactgaactcccctgaaggctgtggaactcagcaactacagcaggagctcgaggtcctcggcaaaatccggcaccctcacctgctgatgatgctgggagcatgccctgaacacggctgcctggtctacgagtacatggaaaacggcagcctagacgacatgctgcaacgaaggaagcagaactcgtcgccgctggcctggttcgaccggttcagggtggcctgggaggtggcggcggctctgatgttcctccacagctcaaagccagagcccatcatccaccgcgacctgaagcccgcgaacatactgctggacgggaacctggtgagcaagataggcgacgtaggcctgtcgaccctgctcccagtcccaggcacgggcggcggcggtcaggacgtgccgtcgacgatggtcaaggacaccgcccccgtcggcacgttctgctacatcgacccggagtaccagaggaccggtgtcctgtccatgaagtccgacgtctacgcgctgggcatcgtgctcctgcagctgctgacggcgaggccgccggtggggctcgcgcacgccgtggagaccgcgctggaggagggccgattcgctgacgtcctggacgcggccgccgggcagtggcctctgggcgaggcgcaggagctggccgttctcgcgctgcggtgctccgagatgcggcgcaaggaccggcccgacttgaacggccgtgttctcccggcgctagagcggctcaaggatgtcgcggccaaggccagagaaggcgcctttcagggtcacgcggcggcacctccgagccatttcatctgccccatacttcaggaagtgatggtcgatccatacgtcgcgtcagatggctacacctacgacggcaaggccattgagctgtggctgagcacgaacgagacgtccccgatgaccaacctgcgtttgcccaacaagagcctgataccgaatcactcccttcgttctgcgatcatggactggaggtcgagaagcaagtgacttgtgattcgttcagccctcgggattgcatgcttcttgatgccgcagcgatgaccgatttgtcttgcacaacgaagctgccagggttttttttttattttgttctaagaaatgtatgcgagtagtattcagatagggttttagaggttgtgcagcagctcaagcaaaaatgtaaaaaaaaaaacgtcatctgatagcattacctcgctgtctcagcgaagccattccttctcctctctctcgtatgcaaacaatgcatttgcataagcctgtagtcaatgtcaattgttatgatctagcatctgattccgagacgaaatgaactgtgcatattagaacagtg

SEQ ID NO: 152114 - DNA, 1505 bp, Zea Mays
tttcattcccattaactttcttcaccaatcaattagtagtagtacaaacaatcactcacgctgttatttctcaccaacccagcagcagcagaggttaggtgcgagctggttttacatgacactaacacggcgtccatcagggaaaaaaaaagcagacagccatcttttggtttgtttgtttgtttgttgctcgttcgtcgttttcagaaacccacccaactgatgaatgaattcatcgaagaaggaaagaacagaagaaaaaaaaaacaaatctcctctcgtctcctgattgattaattgtaattaattaattgattaattaccccaaccgccagtccaccacctgcgagatcctctcctaatcgtcgtcaatcaccatcttcttcgatctaaccttttttccacttgccatggcaagatcgaccgagcagcgagcaatgcatggatcggtcgacggacatggacgtgtgtcacggcggcatcagaagagttctctggtgacgagcggcggcgcggcggtgttccacgtgccctggctcgtccggtcaacggcggcggccgggaagaactggcagtggctgggcctgggcacgacgctgccgccaccggcggcgacggtaggcttggggtggcattgcggcgggggcggctggtggtggtggctagcggcggccgcgacgcggcggcaggacgggcacattgtgagggtggcggcggccgaggcgggctgcgcggcggccgacgacggcggcgcggccttgagcgccctgaggtcggccagctccttctcgaggcgcttgttctcgtcggcgaggcggtcgcaccagcgcttgaggtactcgcagtccacctccgtctgcttcagcttggtccgcgcgcggcggttctggaaccacacctccacctgccgcggccggaggcccaggcggttggccagctgcaccttctgcttctgcaacacccgagaccacacgacaaaaaaattatcagacacaccgccgggacaagatcgcatcgaacctgccgcgaccgacggcgaggaggaaagggtgggagggatgctagcttacggggttgagcgtgctgtgcgtcttgaagcactcctcgaggacggcggcctggtccttggagagcctgagcttcttgcgcccgccggcgccgccgtccgcgccgtcctcctcgtcgctgcggacgcctccggagccggtgcgctcgagctccccctccctctccctcttggcggtggtggtgtcgccgctgtcgggcgacgtggacgcgcgcatcgtcatcgcggcgccggcgtggtgctgcgcgtacgcgtcaccccgcgccctggcgacgtcggccacgacggagctcagcgcggctgcccagggggaggagccggcggtggtggtggaggaggagaggctgccctgggaggtgagggtgaggcccaggctgaggccgaggtcgaggctagcgctggcctggggcatcatcctgagacgactgtgagggtgagg

SEQ ID NO: 152115 - DNA, 397 bp, Zea Mays
gtcctcccgtcgtggaaacaaaccacgaaccagcgtgaggctgcggcggcggctacatcggcggctacctggctacgacacgaagatcagcgtggagaacatcagcttttcaccgattagatggtaagatgatggctagatgtggccatagttgctagagagctgagaatgtctagaccagttggacaacagtgttgatctatagatatgaaatgttagaacctacgaatatactgcttgttaaactgtaaccagatctccttgctttggtactgttgcttatgttctcgtgatccaacttatcttatcgccagcataggtcaagcctagtggttctttatactgttttcccgtcagttggccatgctcgttaaactgcaaccagatttctttatca

SEQ ID NO: 152116 - DNA, 2828 bp, Zea Mays
gtagactatataatattaaacccataacttgagtcgacaatgatatagatcttcaatgttggtttttaattaagggccatcaatcatttttagattttttaagttaacaaccgatgataaaaggttgttttactgctactttcgaagtagtaaccggtaataatggaccgagaaaacatgtctactgaacattagccaattcacattgtaaactgcgtgatttcttcttttgacacgttcaagatgccaaagcggcagtacatagtacccattattgcgctccaacgaaaaggccaaaaaaaaaaaaaaacaaacccatcacccacttatgacctgatcgtcgatgatcagacgcgatccggagtggtttgagagccctcgcaatttacgttattgaccatccaagtatccaaacattagctcattagccgccgccatggctcttcatcggagcttccttatcttcaccgtcatgtcgtcgtttgccacccttactgcagttgtggtgtgtggccaggtccagcactactacacggcttaccacccttactgctccacgacgggaaactacagcaccggcagtccgtaccaggtcaacctagtgaagctaatgggcgagctcccctcgatcgccctcgccaaccgcggtttccaggtcgacacggccggcgagcaccccagcacggtgttcggcctcgccatgtgctacgcggacaccagctggaccgcgtgccgcccctgcctcgaggccggggccgccggggtgcagcaggcgtgcccgttcggccgggagatgaaggccctatacgacgaggtctgcctcctgcgctactccgaccagcccttcttctcggccgccgacgtcgacgtcgcgttctacgtctggcagaaggactccgtcgtcgccgccgccgacgtgcccgccttcaacgccacgcggtggaggctgatggcgcggctcgccgccgaggctgccgtctcctcgctgcggctggcgaacgggagcgaagcgtacgccgcggaggcggaggactcgcggggagccggcgcccagcaggtcgccgtgcccgtgcacgggctggtgcagtgcaccagggaccttaacgccagcgagtgcaccagatgcctcacgagtttcctcgccggcctgtcgagctcgctccccaactacacctacggcaccgccaagggctatagctgctatatggcttacagggtcggggacaagctggacatcaccattccgccgccggcactagtagcatcgtcgccaccgccgctgccatcaactaccacgtcgcctctgcctgaccgcacgccgacggcagctctggtggccggtgtgtcagttagttctgcggcagtcttcatcgtctccgcgggcgtctcgatttggctcctgctgcggcggcggcgacgcaggcaaaaggcgagagaacaagaactgcgtgcgtttgatggtgactacaactacaacgacgaggaggagcccctgcaagacgaatttgagaaagggacagggccgaggaggttccgctaccgcgagctggccatggccacgggcttcttctccgacgaggagaagctcggcgaaggaggctttgggtcggtgtaccacggctacctcaaggacatgggcattcacgtcgccataaaaagggtgtccaagggctccaagcaggggaggaaggagtacatctccgaggtgaggatcataagccggctgaggcaccgcaacctggtgcagctcatcggctggtgccacggcggcggcgagctcttgctcgtctacgagttcatgcccaacggcagtctcgacactcatatccacaaccacgacaaagtactgccgtggcatctgaggcatgagatcgtgcttggtatcggctccgcgctcctgtacctgcaccaggactgggagcagtgcgtggtgcaccgtgacatcaagccgagcaacgtcgtgctggacgcgtccttcaacgccaagctcggcgacttcgggctggcgaggctggtcgaccacgaccgggagtcccacacgacggcgctcgccggcaccatgggctacatggacccggagtgcatggtcactggcaccgcgtgcgccgtgtccgacgtgtacagcttcggagtggtggcgctcgagaccgcctgcggccggcggccggtcgtggtcctgcgagagacgcagcaagggtcagaagccacggcggggcacacgcacctggtgcggtgggtctgggaacactacggccgcggcagggtggtcgacgcggcggacgcgcggctgagcggcgagttcgacaggtcggaggtggagcgcgtcatggtcaccgcgctgtggtgcgcgcatcctgaccgcagcctcaggccgtccatcaggcaggccgtcaacgtgctgcggctcgaggcgccgctgcccatcctgccggcgaagatgccggtcgcgacgttcgtgccacctgcgcacggtctcctgtctgaagcaatggcgatcgtgaccgacagcggcagctccgggagtggcaccacaagctccagcaccgtgttggcaccacaggaatcgtccccgactccccgctgagatgacaacgcgcgtgaccgggtctgataccattagaacggacactgttgatgctcaaaagtgttctatatgtaatactggttcagaaaactggacaaacatcacaacctgtttaagggcctatttgtttcagcttataaattatataatctggattataatctaaattatataatccagattataatctagatatattataatctatatgtagttgtttgatagtttagattatacaaatgta

SEQ ID NO: 152117 - DNA, 1400 bp, Zea Mays
accactgactcgtccggcccaactgaacaccgaacctaacaggaggtgcctcttctcttcagttcttctcagtttctttcttgtgagggaggccaaacgatacaggaatacgatacgccgctcgcctgaatcgagaccaccaccgctcccgctctgcctcacctcgccgactagagtttttgccgccgcggatctcgccgtccccgccatggatacgtcgggctcctccgcagccgccggcgacgccccgaccaccggggagcaccggatggggaccaccattgtcggggtctgctacgagggtggcgtcgtcctcggcgctgattccagaaccagcactggaatgtatgtagccaaccgtgcttcagacaagattacccaattgacagacaatgtgtacgtttgtcgctctggatctgtaagtgttgttgtcttctaatgttattgctctactatgatgtttggtagaaactttcttcttactttgccctttcacaagttattaatgaacattccgtgtcgttactgaatcagttaaacggtatatgagctagtagttattctcattgctgtttttatgctaccccgtctcatattgtctttgctagaaagtaattcctcctttgcatggtgccagagatggcacattcatttttgcaagtttcaaattcacatgcaaaactcttgctattttaatttatcacaggctgctgatacacaagtcatttcggactatatacgttatttcctccaccaacacacaatccagcttggacaaccagctactgttaaagttgcagctaacttgattaggttgctagcttatcagaataagaacatgttgcaagctggcatgattgttggaggatgggataagtacgagggaggccaaattttctcagtccctcttggtggaacgatcttgaagcaaccatttgcaattggaggctcaggttccagttatctttatgcacttcttgatcatgaatggaaagagggaatgagccaggaagaggcagagaaatttgtggtgaaggtagtttcccttgctatggcccgtgatggtgctagcggaggggttgtccgtacagttacaataaatgcggatggcgtgaagaggaacttctaccctggcgacaagctacccctgtggcacgacgagctggagccccagaactcgttgcttgatattcttgctgccgggaaccctgatcccatggtgcagtgaatttgccctccacttccgttgtgaacttttcactgtacctgacttgttcttgatttcaaccgaagaaagaattggaacatttcctgtcgaactaatgtcgcgccagagtatttacatactgttgttatcacaccttagtaaattcatggttactactgctgtcgtcgtttta

SEQ ID NO: 152118 - DNA, 1112 bp, Zea Mays
accactgactcgtccggcccaactgaacaccgaacctaacaggaggtgcctcttctcttcagttcttctcagtttctttcttgtgagggaggccaaacgatacaggaatacgatacgccgctcgcctgaatcgagaccaccaccgctcccgctctgcctcacctcgccgactagagtttttgccgccgcggatctcgccgtccccgccatggatacgtcgggctcctccgcagccgccggcgacgccccgaccaccggggagcaccggatggggaccaccattgtcggggtctgctacgagggtggcgtcgtcctcggcgctgattccagaaccagcactggaatgtatgtagccaaccgtgcttcagacaagattacccaattgacagacaatgtgtacgtttgtcgctctggatctgctgctgatacacaagtcatttcggactatatacgttatttcctccaccaacacacaatccagcttggacaaccagctactgttaaagttgcagctaacttgattaggttgctagcttatcagaataagaacatgttgcaagctggcatgattgttggaggatgggataagtacgagggaggccaaattttctcagtccctcttggtggaacgatcttgaagcaaccatttgcaattggaggctcaggttccagttatctttatgcacttcttgatcatgaatggaaagagggaatgagccaggaagaggcagagaaatttgtggtgaaggtagtttcccttgctatggcccgtgatggtgctagcggaggggttgtccgtacagttacaataaatgcggatggcgtgaagaggaacttctaccctggcgacaagctacccctgtggcacgacgagctggagccccagaactcgttgcttgatattcttgctgccgggaaccctgatcccatggtgcagtgaatttgccctccacttccgttgtgaacttttcactgtacctgacttgttcttgatttcaaccgaagaaagaattggaacatttcctgtcgaactaatgtcgcgccagagtatttacatactgttgttatcacaccttagtaaattcatggttactactgctgtcgtcgtttta

SEQ ID NO: 152119 - DNA, 507 bp, Zea Mays
atgcagagggaggtgggcccgcaggtccagccgatgcctccccacgccgcggccgccgtgaagaagcgcggcccgccgtggcccgccgccgcggggaactggaaccccaggctgtgggactgggacaggcgcgcgctcaccgccaggccgtcggccgatgcgctccgcctcgccggtggccagccccatcaggcgaccgaggtgcaccgtcagggggccgggggaagcggcgcgctgaagctccagctcggcccgcgggaatgctccgcgaccccgacggacgctagcccgacgtcgtccccgcctgcttcggggcagatcctggtggtcaggccgagcaagcaggtgcggtcaggatcgcctggcagcgtgggcggcggcggggctgccaacggaggcgcgggctacccgatgttccaggtggatgactgccggggggaggggagcacacgcagagagagggcaggggcagtctacactaatgacttaatagttagtagagattga

SEQ ID NO: 152120 - DNA, 278 bp, Zea Mays
gtacatccactcacggtcttctatcctctaacatatataaccgagtatagtttaatacagaagcgggcccagacatttgagattgggtattcaaaaattcaaaagactaaagaaattagtgctataacactattttgtgtaatacattattaacaaattactatagatcaccaaaaacttgggtattcaatgaatacccatgaaaccccctgggcccgcctctggtttaatataaacatgtaatgcatgtacactactatcctaccttctaataggtg

SEQ ID NO: 152121 - DNA, 162 bp, Zea Mays
atggcgagctcctcggccgtgtacccctgcacgagagccatcgcgtcggcggcgttggcgccgtcgccgccgccgccaccggaggaagaggaggacggcgccatggccatcgtcccgccgccggagcgtgagaccccctgctctgtagtctctgatgagtag

SEQ ID NO: 152122 - DNA, 3839 bp, Zea Mays
agttctacttctcatcatcaccctggcccaacttggcccatacctcttcgatctctcagtctcaagtatggtagcttcggcagcgctccgccgggtccgctcctcgccgcacctacggcacgccgtcgcgtacgtatcttacggcagcgctgctgccacgtccgccgccgtggggctcgagcgcgcacaggatccaaaccgcctcatcgttgacctggctgcggcggggcgcgtgtgggacgcgcgcaagctgttcgacggaacgcccgagcgggacgtggtgtcctggacagcgctggtgtccgcgtacgcgcggcgggggatgctgcgcgacgcgcggtcgctgttcgaccgctccgacgcgcgccggaacgtggtgacctggacggcgctcctctcgggctacgcacgcgccggcctcgtcgacgaggccgaggtgctgttccagcggatgccccagaggaacgtcgtctcctggaacacgatgctggaggcttacgctgtggcgggaagggcgggtgatgcctgcgccctgttcgaccgcatgccagtcagggatgccggctcctggaacattctgctggccatgctagtgcggtcggggagcgtggataaggcgcgcgagctgtttggaagaatgccggagagggatgtaatggcttggacgacgatggttgacggcgttgcgcggagcggtaatgttgacgaggctcgattgttgtttgatagcatgccagagaggaatgtagtttcttggaatgccatgatatctgggtatacaagaaaccacaggcttgacgaggcactggatttgttcacgaagatgccccatagggatattgcttcttgcaacattatgatcactggttttatacaaaacaaagatttgaagagggcacggaagctctttgatgaaatgccagaaaggaatgttgtcacttggacgaccatgatgaatggttacttgaaaggcaagcagagcgagctgtcattggggttatttaggggtatgttaatgtcaggtatcagaccaaaccaagtgacatttttgggtgcacttgatgcatgcagcgatctggcgacactatgtgaagggaagcaggtgcatcaaatgatatgcaaaacagcatttcaggttgatacttttgtcggctctgccctgatgaatgtctatgcgaagtgtggtgaagttgggttggcaagaaagttgtttgatctttcaagggagaaggacttgatctcttggaatggaattattgcggcatatgcacaccatggtgttggcatagaagcaatccacttgtatgaaaagatgcaaggaaatggatataggcctaatgatgtcacctatgtggtgttgctctcagcatgtagccactctggtttggttgacgaagggcttaagatcttcgaatcaatggtaaatgatagatcaattgcagtgcgtgacgaacattatacttgtttgattgatctttgtagccgagcaggacgacttgatgatgccaaaagattaattcactatcttaagattaagcctgcatcaggttctgtctggagtgcccttctaggcgggtgtaatgcacatggaaatgagagcattggcaatttggcagctagaaatctcatacaagcagaacctgataacgctggaacctatactctcctatccaatatctatgcttcagctggtaagtggaaagaagcagcagaaattaggtcagagatgaataatcgaggactaaagaaacaacctggttgtagttggatagaggtggcaaataaggttcatgtgtttgtagcacgtgataagtctcacagtgaatctgatttaatctatggtttgctgcaaaatatccattacatgatgaggattgttggaactgtccccagtgaccttgtgcatgttgatgaggaattgatgatgtagtgtatattcagttacaagctgaagtatttcatttcaactgtatggattcagtcaaacaaagtaacatccagcattcaatctaagggcaaccctacgaaaacatcaggtagcaattccacttacatcactttgaggatacaagtacagtgtattcgcaaaaaaggtacagtgctttatgctactatgtttcatctatttcctgtttgcacttatatggctggattttgatgctagaaatttgaactgtggcgcaagccattcctcctgcaattgattggcaatatgtcagaagaggatctcttgacatgaacactagctgcaaagctgaatgcatatactgctgaactctgcgctgcaaatatgcaaaagagaattagctccaggattgatgagatctcaaagaaaggatggctcatcttgagggaaatttagatctattgttacaatacagaaacaagagaactgcatgattctgctgaaaaaaaggagtagttcggttgttcaccattgccatgatggcctcagtcatcctttcttcactttgctcacacatggtacatcctggatacgatcatacgaaatctagcttttggaaacatttggagctgttttaactgctcgaccgaagagacctctctttatcttcgttaggcccaaaggtgctttaacaagcccattaatgggaccaccttttggtccatacggcccgactgcctaccggcccaccagcaccaaccgtccgacacttcgtcccttcgagtagcccccacagggccacactgccgagcagcaaaccaaccagcccacccgccggttggtcacgctcctccccgatcccgaattcccgatctccggccgacgccatggcagccccctccgcggccgtcataggggtgctcgtcctcctcgtcgtgggggcctcgggcgcgcgcctcccaggccgcggcagcaccacccggggagctgcgctgccgcgcgggggagcgccggccacggcggtgttcgcgctgggaagcttctggcggtcggaggcggcgttcgggtgcctccacggcgtgatccgcacctccgtcggctacgctggcggctccaagtccaaccccgagtaccgcaacctcgccgaccacgccgagtgcgtcaaggttgagtatgatccccggttgattcactacaggcaacttttggatgtgttctgggcaagtcatgacccacgtgaggtgtttgggcaagggccagatgttggcaaccagtatagatctgtcatcttcactaatggaaccatcgaggccagattggctggtcttagcaaagaaaaagaacaagctaaagaccgtagcagcgttgttaccacacagatccaaccattgggggtctttcatcatgctgaaccagaacatcaggtagcaaggatccaaatgcaattcattgtgctacttttatttcctgtttgcatttatatgagctgaatttctgcgccagaaatttgaactgaagcgtaaaccgttcctcttgcaattgattgggaatttgccggaggaggagctcctgacatcaacactagctgcaaaactgaatgcatatgccgctgagctctgccctgtgaatacccaaaagagaattaactccaagattgatgaggtcacaaagaaaggatggcccattttaagggacatttaactctttctagcttttggactgaaaccgatcgatgcaatgtagacacagaagaggtgcatgattttgcaaagaagatttttaggaatatttcagctgttcgccactgccatgatgacctcaatcatccattcttcattttgctcacaaagattatatagttggtcataacatgtcgttgtgttactatatttgtaacgcatattcatggttcgaagcttactcaacagacaac

SEQ ID NO: 152123 - DNA, 3892 bp, Zea Mays
agttctacttctcatcatcaccctggcccaacttggcccatacctcttcgatctctcagtctcaagtatggtagcttcggcagcgctccgccgggtccgctcctcgccgcacctacggcacgccgtcgcgtacgtatcttacggcagcgctgctgccacgtccgccgccgtggggctcgagcgcgcacaggatccaaaccgcctcatcgttgacctggctgcggcggggcgcgtgtgggacgcgcgcaagctgttcgacggaacgcccgagcgggacgtggtgtcctggacagcgctggtgtccgcgtacgcgcggcgggggatgctgcgcgacgcgcggtcgctgttcgaccgctccgacgcgcgccggaacgtggtgacctggacggcgctcctctcgggctacgcacgcgccggcctcgtcgacgaggccgaggtgctgttccagcggatgccccagaggaacgtcgtctcctggaacacgatgctggaggcttacgctgtggcgggaagggcgggtgatgcctgcgccctgttcgaccgcatgccagtcagggatgccggctcctggaacattctgctggccatgctagtgcggtcggggagcgtggataaggcgcgcgagctgtttggaagaatgccggagagggatgtaatggcttggacgacgatggttgacggcgttgcgcggagcggtaatgttgacgaggctcgattgttgtttgatagcatgccagagaggaatgtagtttcttggaatgccatgatatctgggtatacaagaaaccacaggcttgacgaggcactggatttgttcacgaagatgccccatagggatattgcttcttgcaacattatgatcactggttttatacaaaacaaagatttgaagagggcacggaagctctttgatgaaatgccagaaaggaatgttgtcacttggacgaccatgatgaatggttacttgaaaggcaagcagagcgagctgtcattggggttatttaggggtatgttaatgtcaggtatcagaccaaaccaagtgacatttttgggtgcacttgatgcatgcagcgatctggcgacactatgtgaagggaagcaggtgcatcaaatgatatgcaaaacagcatttcaggttgatacttttgtcggctctgccctgatgaatgtctatgcgaagtgtggtgaagttgggttggcaagaaagttgtttgatctttcaagggagaaggacttgatctcttggaatggaattattgcggcatatgcacaccatggtgttggcatagaagcaatccacttgtatgaaaagatgcaaggaaatggatataggcctaatgatgtcacctatgtggtgttgctctcagcatgtagccactctggtttggttgacgaagggcttaagatcttcgaatcaatggtaaatgatagatcaattgcagtgcgtgacgaacattatacttgtttgattgatctttgtagccgagcaggacgacttgatgatgccaaaagattaattcactatcttaagattaagcctgcatcaggttctgtctggagtgcccttctaggcgggtgtaatgcacatggaaatgagagcattggcaatttggcagctagaaatctcatacaagcagaacctgataacgctggaacctatactctcctatccaatatctatgcttcagctggtaagtggaaagaagcagcagaaattaggtcagagatgaataatcgaggactaaagaaacaacctggttgtagttggatagaggtggcaaataaggttcatgtgtttgtagcacgtgataagtctcacagtgaatctgatttaatctatggtttgctgcaaaatatccattacatgatgaggattgttggaactgtccccagtgaccttgtgcatgttgatgaggaattgatgatgtagtgtatattcagttacaagctgaagtatttcatttcaactgtatggattcagtcaaacaaagtaacatccagcattcaatctaagggcaaccctacgaaaacatcaggtagcaattccacttacatcactttgaggatacaagtacagtgtattcgcaaaaaaggtacagtgctttatgctactatgtttcatctatttcctgtttgcacttatatggctggattttgatgctagaaatttgaactgtggcgcaagccattcctcctgcaattgattggcaatatgtcagaagaggatctcttgacatgaacactagctgcaaagctgaatgcatatactgctgaactctgcgctgcaaatatgcaaaagagaattagctccaggattgatgagatctcaaagaaaggatggctcatcttgagggaaatttagatctattgttacaatacagaaacaagagaactgcatgattctgctgaaaaaaaggagtagttcggttgttcaccattgccatgatggcctcagtcatcctttcttcactttgctcacacatggtacatcctggatacgatcatacgaaatctagcttttggaaacatttggagctgttttaactgctcgaccgaagagacctctctttatcttcgttaggcccaaaggtgctttaacaagcccattaatgggaccaccttttggtccatacggcccgactgcctaccggcccaccagcaccaaccgtccgacacttcgtcccttcgagtagcccccacagggccacactgccgagcagcaaaccaaccagcccacccgccggttggtcacgctcctccccgatcccgaattcccgatctccggccgacgccatggcagccccctccgcggccgtcataggggtgctcgtcctcctcgtcgtgggggcctcgggcgcgcgcctcccaggccgcggcagcaccacccggggagctgcgctgccgcgcgggggagcgccggccacggcggtgttcgcgctgggaagcttctggcggtcggaggcggcgttcgggtgcctccacggcgtgatccgcacctccgtcggctacgctggcggctccaagtccaaccccgagtaccgcaacctcgccgaccacgccgagtgcgtcaaggttgagtatgatccccggttgattcactacaggcaacttttggatgtgttctgggcaagtcatgacccacgtgaggtgtttgggcaagggccagatgttggcaaccagtatagatctgtcatcttcactaatggaaccatcgaggccagattggctggtcttagcaaagaaaaagaacaagctaaagaccgtagcagcgttgttaccacacagatccaaccattgggggtctttcatcatgctgaaccagaacatcagaaatttgaactgaagcgtaaaccgttcctcttgcaattgattgggaatttgccggaggaggagctcctgacatcaacactagctgcaaaactgaatgcatatgccgctgagctctgccctgtgaatacccaaaagagaattaactccaagattgatgaggtcacaaagaaaggatggcccattttaagggacatttaactctttctagcttttggactgaaaccgatcgatgcaatgtagacacagaagaggtgcatgattttgcaaagaagatttttaggaatatttcagctgttcgccactgccatgatgacctcaatcatccattcttcattttgctcacaaagattatatagttggtcataacatgtcgttgtgttactatatttgtaacgcatattcatggttcgaagcttactcaacagacaactttttttcgtattgtttgtttttcatttatgaaaatatagatgttttgtttttatttaataggtattgtgcatgttgtgactgatgttgtactagtaaattgctcgcgcaaagtactgttaaattgaagatc

SEQ ID NO: 152124 - DNA, 1290 bp, Zea Mays
acctggcaacactatcccctttcgccggcgccgctcccgctccgtcccacccgcgctctccagtctccacggatcgatcgaagcttccgtcttccggcgcgatgttcccgtgccgccccttggctccgccgcacctgccgcgtgccccttccctcgcgcggcttccactgtcgtcgctgcggccgccgtcgtcgtcgctgcgcgtggtgcggtgcatggcgaaggagcggcgggtacggatggtggcgaagcagatccagcgggagctcgccgacatgctcacccgcgaccccgtgctgcagcgcgccgtgctccccgaagccgcgctcggcgctgaccgctacctgtcgtcgctcaccaccatcgccgacgtcgagctctccaacgacctccaggtgtgcaaagtgtacgtgtccgtgtttggggacgagagggggaagaaggtggccatcgaggggctcaaggccaagaccaagtacgtcaggagccagataggcaggaggatgaagcttcgcctcacgccggagataaggttcatcgaggatgagtctatggagcgtggaagcaggatccttgctatacttgacaaactaaaggaggaaagggagcaacaagaaggaaaagatggagaggaagatgatgattcatatatatcagaagaagatgatggtgactgggatgcagatgagccagatgaggaggacatcatttacgtaaaatagcccattgtcttctaggaacttggccatcattcatccagaacacagcagttctcttcagagtttaattctgtgaagttcactgctcgcctgcttgtcgaagcactccaaagtatatcagcacttgaagaggtctacactctacagagacatctcttttgccaattgaagcaggacatatcacacccttgctgccatttagaagctggtcatgtccttttttatggcttttcaatgcgggggatatttcaaagaggaatttggaagtctttttttttcctgtccactgaattatgatatctgaccattgacgcaagacagtttgggctgatgctcattcctctgttatgttaactagcacttgtttaatttgtacttgcctagttatcttgctgtatttcagtctccatttcttctatggttttggtacagtatttcctctttctataagccattatgtaatagagtagcatcagtatgattttaatgataatttatcactctctcatctgatctaacaaaaacgatctggacaaagttacataaggcaaatcagtccttgagttcctaa

SEQ ID NO: 152125 - DNA, 386 bp, Zea Mays
ggagaaaagtgcctacagaaacatcagttgagtttcagctattgtcattagatggataaaatgtggaaggtactgaatggctctccagtaaggactgatttggtgaccagggaattggatggatccatgggcatggatcccatataattccctggtcacaaaaccagccctaagtgtgcacccaacactgcactttgttgggaaaaaagcccaaagggtttactcaagccaattcaagaaggtaaccactggaatactggatatcctacatttaatgttttgatgagaacaatatcagctgagctcatttctgcagagtaagcatgtaagcctgaagaaatcaatgaagatgataaaactttaaactcgtccagaatgatgagctt

SEQ ID NO: 152126 - DNA, 555 bp, Zea Mays
agtaggaattgtactaatgcctgcattgcgctttcccacgataaagccatagatggcaccgacagttggagctatcagctagctctgcagttaaattaggtcagaaaacaccctgcatttctgcatatgatgagcttgggaactagtagtagtgtagtacatgatgaatccacgatggttgtctgaactgaactctgacgacaggtggtccgcctgcaactgcaagtgccacaccgatagaggatatggttcttttccgagactgcggcaccgacgttctcgcggatcgagccttcgacatgggacgtgcctggagaacgacggcagtagggcactgcgactctgctagtctgccctctgcactgccccctttcacttttcgtgcaacatacctttgcttgctttgagcctatgacatggcacgtgccagagcaacgcatctgtccttgggtcgcttgcagctgcagctcgtcctgtatgtgtttctgcaaccgagcgttccggagctcttggatcctgtgctctgcgtcatatactcgtggtatattgttaaaa

SEQ ID NO: 152127 - DNA, 1574 bp, Zea Mays
cccctgcatcttccccacaaatttgcttcccagacctgaccccccgacacgaggcaatccccccttgctcgcttcgcttcccaaatggctcattccaccactgccactgccactgccactgacggcgagaccgccccggtgccgcgggccctcgcgccggcgcggaaagtggcgctgatcacgggcatcacggggcaggacgggagctacctcacggagctgctcctgtcgaaggggtacgaggtgcacggcctcatgcgccgctcctccaacttcaacacgcagcggctggaccacatctaccacgacccacacgcggtgccgtcgtccccgcggcccccgctgcggctccactacgccgacctgtccgactcctcctccctccgccgcgcgctcgacgccatctcccccgacgaggtctacaacctcgcggcgcagtcgcacgtcgccgtctccttcgaggtccccgactacaccgccgacgtcactgccacgggggcgctccgcctcctggaggccgtccgcctgtcgcgcaggcccattcgctactaccaggctggttcctcggagatgttcggctccacgccgccgccgcagggcgaggacacgcccttccacccgcgctccccctacgccgctgccaaggtcgccgcgcactggtacaccgtcaactaccgcgaggcctacggcgtcttcgcctgcaacggcgtgctcttcaaccacgagtccccgcgccgcggcgagaacttcgtgacgcgcaagatcacgcgcgccgtcggccgcatcaagctcggcctgcagaccaaggtcttcctgggcaacctctcggcggccagggactgggggttcgcgggggactacgtggaggcaatgtggctcatgctgcagcaggatcagccggccgactacgtcgtcgccaccgaggagtcccacacagtcgaggagttcttgcaggctgccttcggctacgccggcctcaactggaaggatcatgtggtcattgacaagaagtacttccgccccgcagaggtcgacagcctccagggagactccaccaaggcgaggaagttgctcaaatggaagcccaaggttgggttccagcagctcgttgagatgatggttgatcgcgacgttgagctcgccaagaaggagaaggtcctggtcgatgctgggtaccgtgaccccaagcagcagccatagaagcagcacggctgcttcttgctctgctgcgttccggattcagactgttgctcatacacggtgattctcagagtaaaggttgacccaagttactatcgatacttctccaggtaagaaataaggatggttgcagtatgaccctcacagtatcttcattactttttttttcctgactatgttacacgtcttaaggggtgtttggtttctagggactaaactttagtccctagaaaccaaacacccccttaaacaaaacgatgaataatccatgccagtttggtatttggaagaggatgaaacgcctgtctgattgtagctgttgatgttaagacatactgatagcatcagtttgtattgttctacttcagctactg

SEQ ID NO: 152128 - DNA, 105 bp, Zea Mays
tccaatataaagccaagagagttaaaatatgctcagtcttatagcataaaatgggtcacatttttcttctccaatatacgtcctcacatttgtttcttctatttg

SEQ ID NO: 152129 - DNA, 3400 bp, Zea Mays
atggcgagcagcggggtgaggaacggggtggggtccaggatgagcgcgaagccggaccggcagggcgccggcgccacgcccaagacggccgcggggaagcaccgcctctcctcggcggcggcggggggcggcgcgtaccggcggaccagctcgggcccgctccacgcggcggcgggcggccgcgcggcgtcggatggagtttctagtagagtaagggttgctgtaaggcttaggcctaggaatgcagaagagttggtggcagatgcagattttggtgattgtgttgaacttcagccagagctcaaaaggttaaagcttcgtaaaaataattgggagtcagaaacatacgaattcgatgaactgctcactgagttttcttcacaaaagcgagtgtatgaagttgttgcaaaaccagttgtggagagtgttatggagggatataatggtacagttatggcatatggccagactggtactgggaaaacttttactctgggaagacttggtgaagaagacaccgctgctaggggaatcatggttcgtgcaatggaggatattctagcagacataacacctgggactgattctgtctcagtatcatatcttcagttgtacatggagatgatacaagatctccttgatcctgtaaatgataatatagccattgtagaagacccaaggactggggatgtttcattgcctggagccacagtagttgaagttagagatcaaaaaagctttgtggaccttctaagggtgggtgaggctcaccgtgttgctgcaaatacaaagttaaacactgagtcatctcgaagtcatgcgatcctcatggtgaatgtcaggaggtctgtaaaaggtagaactgaaatggatgtcagcatttctggtgaaaatgggcattcattgtccatgatggggtctttgagaccacctgttgttaggaaaagtaagcttgtagttgtcgacttggctggatcagagcgcatagacaagtcaggaagcgagggtcatacgttagaagaggcaaagtctatcaacttgtccttaagtgctctgggaaaatgcatcaatgcgcttgctgaaagcagtcctcatgtacctgttcgtgattctaagcttacaagattgcttaaagattcatttggaggctgtcaccgtctggttcacgcacaggcacagccgcacagcagcagcgagtcagcgcccgcccaggcttccttcctggcttcctcaacggtcgccgacgccagtcgcggtcggagcagcaaaagcccaaagcaggagctggcgagcgacgagctgatgtcgagcgcccgcacgcgcgatggagagccctgtcggctgtcgcggtgtcgtcgtgccgcgagtggccaagcagcggcgggagtgcttgagcgtagaccaaggacgcatgcggcaatgaaagttgagaacatggtgaaattgaaggaagagttcgattacaagagtttatgtaggagacttgatattgagctggataaattaattgcagaaaatgaaaggcaaaggaagtattttgacgatgaagttgagagaataagagatgaagctcagtgccgcattgctgaggccgaaagggaatgcaaaatcacattagagaatgagaaaacgaagtgccatcaagaatacttagactcaatcagaatactggaggagaagtggaaagtacatcaacaatcacccaagaaacaaaatgaagaggccgagtctacatccaatgataccagagaagtgcataacttactgcagaatgagaaaatgctacgtcaatcggctgaagatgaggccagtgacctcaagaatcaagtatcacactggaaaaaactggaggctacagctacagctgaggtagtaaaactacggaaaatgctagatactgaagctagccagaaagagaaacttgaagcagaaatagatattttgagaagtcagttattgcagatgagtatggaagcagatgagacagggagtcttgataaaggaaatggaccaggaaaaatatttcctggtttagattcattggtgtctcagactcgaagctcacaattcagagagcagagcaatggaccaaagcaaccaattgccaaactctttgaacaagttgggttacaaaagatattgtcattgctcgaatctgaagaacctgatgtccgcgttcatgcagtgaaagttgttgcaaatctggcagctgaagaggcaaatcaggaaaagattgtagaagcaggtggcctcacttccctccttatgctacttaggagctctgaggatgagacaattcgtagagtagcagcaggagcaattgctaatcttgcaatgaatgaaacaaatcaagatcttatcatggcagaaggaggtgtaaccttgttgtctatgacagcatctgatgcagaggatccacaaactcttagaatggtggctggagcaatagctaacctttgtggcaatgacaaactgcaaatacggttgaggggagaaggtggaatcaaagcattgcttgggatggttaggtgtgggcaccctgatgtccttgctcaagttgcacgtggcattgcaaattttgcaaaatgtgaatctagagcagctactcaaggaaataaggtgggaaaatcactattaatcgacgatggatcgctcccttggattgtaaaaaatgccaataacgaagctgccccaattaggcggcacatagagctcgcactgtgtcatttggcacagcatgaagtaaattcgaacgacattatcaatgaaggagccctatgggagcttgtacggatttcaagggactgttctcgagaagatataaggaagttggcataccggacactgacatccagccccactcttcaagcggagatgaggagactgggaataaaactgtgatgacagagcaacaaagtgcagctggggctggcactatgaagttccatttctcgtgcactttatagaggtacccgttgctctgagtgctggtaatcgacttacctggtttcggcaggcaggcatacacgggcaccacaccgactaatcacaagaggcagtggagcaactttctcctcgagagttcatttttctttgttctgaggggggcagttgaaagcctggacaacactagcaattcatttatttgtaatgatcctagcatagcagatgttgttacctacccaatgcagcgtttgtaatttttttgctgtaaaaatatcaaaggcagaaaaaagtactttcgcagtatacctgttttccgtgaacactagaaagtttttttgtttttgttttattcatatactgcagacgagtcatgtttgctagccgtgattttcttgctttcttaatgcgcgttgacgctttcgtttcttttaccatgtatgctctcagataatct

SEQ ID NO: 152130 - DNA, 1570 bp, Zea Mays
ctcccgccccccaatctacgcgcttgtcttaacccccaccccccctccctggcgcaccgtcggcccggcagcacccgctcgcttcctcccccacccctttgaccgtcacgcccgtcgtcgatcgggacgcaccagctccgccgcgctcgctcgcccgtggccggccgggcggcgatggatcccgtggcggcggcgcacggcggcggccaccacttcgcgccgccagtggcgccgttccaccacgcgttcggcggcggccaccacctgttcccgggacagcagcacccggcgttccagcatttccaggagcaccagctggagctcatgggcggggtccccgccggcgcgaagcaggagctcggcgacgacagcaacaacaccatcaacagcgcggggagcaacgggagcggcgacggcgaccagcagcagcagcagcagcaggccgggggcgacgtcgacaaccaccaccagcaccaccaccaccagcaggccgcggtgatgcgccgcccgcggggtcgccccgcggggtccaagaacaagccgaagccgcccgtgatcatcacgcgggacagcgccagcgcgctgcgcgcgcacgtgctggaggtggccgccggctgcgacgtggtggacagcgtggccggcttcgcgcggcgccgccaggtgggcgtgtgcgtgctcagcggcgccggcagcgtggccaacgtgtgcgtccgccagcccggcgccggcgccggggccgtcacgctgccgggccgcttcgagatcctctccctctgcggctccttcctcccgccgccggcgccgcccgccgccacgggcctcaccgtctacctctccggcgggcagggccaggtggtgggcgggtccgtggccgggccgctcctcgcgtccggccccgtcgtcatcgtcgccgcctgcttcggcaacgccgcctacgagcgcctcccgctcgacgacgacgacctgccgcagcagcagcagcacctgccccctcctcctcctattccgcagggcatgcccggagctgccggcgccggcgggcagtcctcgtccccgccgcccccgccgctgccattgcccggacaacacccgctcgccgaccagctcccccacggcctcatcaacggcctccctctccccgctgacgcctacggctgggccaacccaggaggcggcgccggccgcgtcgccccgtactgatcgatcgaatccgtcgccgtaccggactcggtcgatccggacatggaaggggaaccaacgcttgctgcttcatcgccatcggcggatcgacgacgacaagtaacgatgcagctgctgctaagactcaatccctcctccttcccctttcgcttgccttcttcttcttccccttctacttgctgctgtggcgtgtatcgacgaattctcatgtcatggatcgatgcttaattagtcatagacacccccggctcgtaccgtagcagtgtaatttaatttcccttccccctagtagctcgcagtgtgcttggaactgcatgtcagtctgctgctaaatttccttttactctaatttcacatgatcgatgatcca

SEQ ID NO: 152131 - DNA, 109 bp, Zea Mays
ttttgttttttcacgcactaccaatggttatcattattttttatgaatataatacaaggtgcgtttatacggattgagtacaatatatgctttgtttttttagactttg

SEQ ID NO: 152132 - DNA, 1255 bp, Zea Mays
aatggaacaaaaaacacaagatatctggatgcaaacagaaaaagaagcacactattttacaactaaacacaatcaggaaacaaaaaaaacagatatgtacttaactacacacaatcaggccaacaactaaacacaacaggaaatcaagactgtacaaataagcagatatgtacttagaaatagaggagtatgaggtaaaaactggcctgtgtatgaggtattagcgaatctaggtggtccgccataggcttggatggattctagtatctatacaacaagaaggcaaacaatatcgatccaagttgcaacggcgtgtcgcgttgtttctgcctgatttccttctctgttaatcagctgctgtagtccttgtcccctccgatgcaagacgtgcagagagagagaaaaaaagaaccatgaatcaattaggagccgaaaattctcgcgcgagcggtctaaatctgcagcagttctgggtgcgcgttgccggactccatgaacactctgagccagtagtccaggtcgccgtcggcgccgatggacgaggaggaggcgacagccacgtcgacgtcgtcgaacgcgtcgtcggagggctccatggggacggcgtcgtcgaggctgtccagcggcatcgacagcgtctcggaccagaagctatcgtcgaactggaactcctcggcgtccgagaaggaggtggtgaagctctcctccttggggaacgcgagcgagctccccgtgttgccgtgctcctgctccgtcatggatgactcggtcaccaacgacgaggccgccgaccgttcgggcgacgccggcgcagcggtggtcggggccggtacgacgacgccgtcggcgtcggccgtcgccttcctggctccaccgcccccgcgcttcgctgccgtcgcgggcctgtgcttcttgccgacgccagccgtcggcgtcgtgccgtgctgctgctgctcctgcttggcgggatccacacgcttcttgaggtgtgtgtgtgagacgttcttgatctcgttgtccgtccgcccgggcagcctagtggtgatggcggaccacctaagcagttcagaagagagagcagaagagagagaggtgagagcagcagctgcggcaaaccctagcgtcgtcggctgcggctgagagaaacgagagagaggcgagagccgcggctgcggcaaaccctagccgtcgtctgcgagcgacgagagaggcgagagagaagtcgtcagttgaggcgaaccctaaccaaagtcgg

SEQ ID NO: 152133 - DNA, 1972 bp, Zea Mays
atatgctcccgcagccctcgtggaaaccaagggcggaccttcccctcctccaagcaaatccgaggcccacccacgggccgctcgaacatctgtcaccgccaagtggccccacccacccctcccctccgctgccccttcttctacaaataccccggccggccgcggccgttcccgaatcgagcggtgactggcgaggcaaaagcattgcgaccacagacagcgcgcgcttcaaggcctttttttttgagataacaaggaggagaggaggagatggcggtcacgatcacgtgggtgaaggcgaggcagatcttcgacagccgcggcaaccccaccgtcgaggtggacgtgggccttagcgacggcagctacgcgaggggggccgtacccagcggcgcatccactgggatatatgaggccttggagttgagggatggaggatctgattatcttggcaagggtgttcttaaggctgtcagcaatgtaaataacattattggaccagcaattgttggaaaggaccccactgagcaggttgagattgacaacttcatggtccaacagcttgatgggacctccaatgagtggggctggtgcaaacagaagcttggagcaaatgccatccttgcggtttcacttgcggtgtgcaaagctggagctatggtgaagaagattcctctttaccagcacatcgcaaatcttgctggaaacaaaactctggtgctccctgtacctgcctttaacgtgattaatggagggtcacatgctggaaacaagcttgccatgcaggagttcatgatcctcccaactggtgcctcctcgttcaaggaggccatgaagatgggagttgaggtgtaccacaacctgaagagcatcatcaagaagaagtacggtcaggatgcgacaaatgttggggatgaaggtggttttgcacctaacattcaggaaaacaaagaaggccttgaactattgaaggcagccatagaaaaggctggctacactggaaaggtggtcattggaatggatgttgctgcttctgagttcttcggtgagaaagacaagacttatgatcttaatttcaaggaggagaacaacgatggctcaaagaaaatttcaggcgacagcctgaaagacctgtacaagtcctttgtttctgagtaccctatcgagtcgatcgaagacccatttgatcaggacgactggagcacttatgccaaactcactgatgagattggacagaaagtgcagattgtaggagatgatcttctcgttaccaaccccaccagggtcgccaaggccatcaatgagaagacctgcaatgctctcctcttgaaggtgaaccaaatcgggtctgtgaccgagagtatcgaagctgtcaggatgtccaagcgcgccggatggggagtgatggcaagccacaggagtggcgagacagaggacaccttcattgctgacctctcagttggcctgtctacgggccaaatcaagacgggagctccttgccggtctgagcgcctggccaaatacaaccagctgctcaggatcgaggaagagctcggtgatgccgcggtctacgccggagcaaagttcagggcaccagtggagccctactaagaaaggaagaggatggggatgttttcttgtggagctatactagctcgctgctgccttttgttacaatgtttgtacggtcgcaataaatgtatggtcgtgtttgctcgagagctactcaggtgattttgtcgtgggagcaccaaaagcagaaaagaactgtttttttcttctctctctctagattctgacgagtggtggtctgcactcgtcgtaatgtcgtttgcctaaactgattttgatggaacaggaaatcttgctggtcttgccatatgcgtgcgagtgactttcttgttccttatggtgtgtgaggccattttcgtattcagcatggaaaattacgggttcgttttgtagcgacagg

SEQ ID NO: 152134 - DNA, 1969 bp, Zea Mays
atatgctcccgcagccctcgtggaaaccaagggcggaccttcccctcctccaagcaaatccgaggcccacccacgggccgctcgaacatctgtcaccgccaagtggccccacccacccctcccctccgctgccccttcttctacaaataccccggccggccgcggccgttcccgaatcgagcggtgactggcgaggcaaaagcattgcgaccacagacagcgcgcgcttcaaggcctttttttttgagataacaaggaggagaggaggagatggcggtcacgatcacgtgggtgaaggcgaggcagatcttcgacagccgcggcaaccccaccgtcgaggtggacgtgggccttagcgacggcagctacgcgaggggggccgtacccagcggcgcatccactgggatatatgaggccttggagttgagggatggaggatctgattatcttggcaagggtgttcttaaggctgtcagcaatgtaaataacattattggaccagcaattgttggaaaggaccccactgagcaggttgagattgacaacttcatggtccaacagcttgatgggacctccaatgagtggggctggtgcaaacagaagcttggagcaaatgccatccttgcggtttcacttgcggtgtgcaaagctggagctatggtgaagaagattcctctttaccagcacatcgcaaatcttgctggaaacaaaactctggtgctccctgtacctgcctttaacgtgattaatggagggtcacatgctggaaacaagcttgccatgcagttcatgatcctcccaactggtgcctcctcgttcaaggaggccatgaagatgggagttgaggtgtaccacaacctgaagagcatcatcaagaagaagtacggtcaggatgcgacaaatgttggggatgaaggtggttttgcacctaacattcaggaaaacaaagaaggccttgaactattgaaggcagccatagaaaaggctggctacactggaaaggtggtcattggaatggatgttgctgcttctgagttcttcggtgagaaagacaagacttatgatcttaatttcaaggaggagaacaacgatggctcaaagaaaatttcaggcgacagcctgaaagacctgtacaagtcctttgtttctgagtaccctatcgagtcgatcgaagacccatttgatcaggacgactggagcacttatgccaaactcactgatgagattggacagaaagtgcagattgtaggagatgatcttctcgttaccaaccccaccagggtcgccaaggccatcaatgagaagacctgcaatgctctcctcttgaaggtgaaccaaatcgggtctgtgaccgagagtatcgaagctgtcaggatgtccaagcgcgccggatggggagtgatggcaagccacaggagtggcgagacagaggacaccttcattgctgacctctcagttggcctgtctacgggccaaatcaagacgggagctccttgccggtctgagcgcctggccaaatacaaccagctgctcaggatcgaggaagagctcggtgatgccgcggtctacgccggagcaaagttcagggcaccagtggagccctactaagaaaggaagaggatggggatgttttcttgtggagctatactagctcgctgctgccttttgttacaatgtttgtacggtcgcaataaatgtatggtcgtgtttgctcgagagctactcaggtgattttgtcgtgggagcaccaaaagcagaaaagaactgtttttttcttctctctctctagattctgacgagtggtggtctgcactcgtcgtaatgtcgtttgcctaaactgattttgatggaacaggaaatcttgctggtcttgccatatgcgtgcgagtgactttcttgttccttatggtgtgtgaggccattttcgtattcagcatggaaaattacgggttcgttttgtagcgacagg

SEQ ID NO: 152135 - DNA, 2022 bp, Zea Mays
tcccctcctccaagcaaatccgaggcccacccacgggccgctcgaacatctgtcaccgccaagtggccccacccacccctcccctccgctgccccttcttctacaaataccccggccggccgcggccgttcccgaatcgagcggtgactggcgaggcaaaagcattgcgaccacagacagcgcgcgcttcaaggcctttttttttgagataacaaggaggagaggaggagatggcggtcacgatcacgtgggtgaaggcgaggcagatcttcgacagccgcggcaaccccaccgtcgaggtggacgtgggccttagcgacggcagctacgcgaggggggccgtacccagcggcgcatccactgggatatatgaggccttggagttgagggatggaggatctgattatcttggcaagggtgttcttaaggctgtcagcaatgtaaataacattattggaccagcaattgttggaaaggaccccactgagcaggttgagattgacaacttcatggtccaacagcttgatgggacctccaatgagtggggctggtgcaaacagaagcttggagcaaatgccatccttgcggtttcacttgcggtgtgcaaagctggagctatggtgaagaagattcctctttaccagcacatcgcaaatcttgctggaaacaaaactctggtgctccctgtacctgcctttaacgtgattaatggagggtcacatgctggaaacaagcttgccatgcaggagttcatgatcctcccaactggtgcctcctcgttcaaggaggccatgaagatgggagttgaggtgtaccacaacctgaagagcatcatcaagaagaagtacggtcaggatgcgacaaatgttggggatgaaggtggttttgcacctaacattcaggaaaacaaagaaggccttgaactattgaaggcagccatagaaaaggctggctacactggaaaggtggtcattggaatggatgttgctgcttctgagttcttcggtgagaaagacaagacttatgatcttaatttcaaggaggagaacaacgatggctcaaagaaaatttcaggcgacagcctgaaagacctgtacaagtcctttgtttctgagtaccctatcgagtcgatcgaagacccatttgatcaggacgactggagcacttatgccaaactcactgatgagattggacagaaagtgcagattgtaggagatgatcttctcgttaccaaccccaccagggtcgccaaggccatcaatgagaagacctgcaatgctctcctcttgaaggtgaaccaaatcgggtctgtgaccgagagtatcgaagctgtcaggatgtccaagcgcgccggatggggagtgatggcaagccacaggagtggcgagacagaggacaccttcattgctgacctctcagttggcctgtctacggtacgctgtcaactggtcaagatactgtcgaatcgaacgtcttgcgtactgacctggtttccatgactccgtttcagggccaaatcaagacgggagctccttgccggtctgagcgcctggccaaatacaaccaggtaaagcgcgcgcgcaaaccttcttcgtttcccaaccaggctatgctttacctctgaaaccaaacgttcgcggtttgcagctgctcaggatcgaggaagagctcggtgatgccgcggtctacgccggagcaaagttcagggcaccagtggagccctactaagaaaggaagaggatggggatgttttcttgtggagctatactagctcgctgctgccttttgttacaatgtttgtacggtcgcaataaatgtatggtcgtgtttgctcgagagctactcaggtgattttgtcgtgggagcaccaaaagcagaaaagaactgtttttttcttctctctctctagattctgacgagtggtggtctgcactcgtcgtaatgtcgtttgcctaaactgattttgatggaacaggaaatcttgctggtcttgccatatgcgtgcgagtgactttcttgttc

SEQ ID NO: 152136 - DNA, 1938 bp, Zea Mays
atgtcgatggacttcggtgccccggcggatgaccccaaggctttccgcaacatctgccgcgaccggatactgaaggacctgcttaagcctgacaaggataaggagaccaaaagctcatggaaggttcttataatggacaaattcacggtgaagatcatggcttatgcttgtaagatggcggaaattaccgatgcagggatttcgcttgtagaagatctgttcaagagaagggagccaatgccttcaatggatgcaatctactttcttcagccactgaaagaaaatgtcataatgcttctatctgacatgtctgggagatgcccactttacaggaaggcatacatcttcttcagctcaccgattcctaaagacttggttacttacataaagaatgacagtagtgtaataccacgcatcggtgcactaagagagatgaatttggaattcttcactattgacatgcagggctttgtaactgaccatgatactgccctgattgatttatacggtccaagtgaacaaaattccaaaaagttcaacgatactataagcacaatggctactcgcattgcgactacatttgcatcattgaaggaatttccatgtgtgcggtatcgggcgccaaaaggagatgcttccacaacaactaaattcgatatggttccaaagtggcttgctactgctgtttgggaaattgtgtcaaaatataaatcaactattcctgaatttccccagaaggagacatgtgaactgctaattgtcgacaggcccatagatcagatagcacctgttattcatgaatggacctatgatgcaatgtgccatgatctactcgaaatggatggcaacaaatacatttatgaggtatcaaagatgggttcggaacctgaaaagaaggaatctttattagaggatcatgatcctctttggcttgaacttcgccatgctcacatagctgatgctagtgagaggttgtacgaaaagatgaacaattttgttgccaagaataaagcagcacaactttcaagagatggtggtgaagtctcaacacgggatctgcagaaaatcgttcaagcattaccccaatacagtgatcaagttgagaaattgacgctacatatagagattgctggaaaaatgaacaggtgtatcagggagtatgggctccgtgatattgggcaattggagcaggatttggtttttggagatgcgggagcgaaggaagtcatcagtatcctcaggtcaaagcaggatatgagcccagaaaacaaaatgaggttgctgattatatatgcaattgtatatccagagaagtttgaaggtgacaaaggggaaaagttgatgcagttagcgaagcttccacatgatgatatggatataataaattgtttaggatacttggatggttcaaatacaaaaaaatcatcaaggacgggtactttctctctcaaatttgatgcccaaaagaagaaaaatgctgccagaacagacaaacaagatggtgaggaaacatgggctttatcacgttttttcccacttattgaggagctgattgagaaactgagcaagggtgaattacctctaaaagagtacccatctatgagtgaaccaagttctgcttctgcttctcaagatgccacacaaactgcatcatcaactgcacgaccagcacaaaatccacaaccgatgtctatgagatcaaggaggacaccaacatgggcaaaatctcgtaattcggatgattcttcaagcagtgattcttcagtcctgagacacgcatcaggtgacttcaagaggctaggcaaccggatttttgtcttcatgattggtggagccactagatctgaactgcgcacggtgcacaagcttacaatgaaaatgaagcgcgaaatcgtcttgggctcttctagcatcgatgatcctccgcagtttatttcg

SEQ ID NO: 152137 - DNA, 1741 bp, Zea Mays
gcatcactttgaaggtacatgacaacctttatcgatggtttgacgacgatgatgcgtcggaagaagcaataggtgaaaagtatattatttatttttatttatgtataaattaagatctcacggaacaccacgcgcagggcgcgtggcaatacactagtattaacaaagtacatttataagcacaacggagaccgtgcacgtccagtctggatggttcgcggacctccactccacgacccgaacgttcgggagaaggcaaattccagacaccacacaggacacagcgcattcggctaatttcctcgtctctccccaatccgaccacccccatccattcaccaacccgaaatagaaggccgtccccagccaccagcctccggagttcctccggcgatccccgtccccttgtgtgcgcgctccaggagggccttctgcctccagcttgcagagcccacctaattgctgcgagatggatagagggcagaacgggagggatgacgtcttcggacgcagggatccattttctgggtttggcttcggcccccacaggagcttgttttctggtctccttggggggagggatccatttgacgatccgttctttacccatccgttcgggggtcggatgatgggtgaccatgacatgtttgtacctagtccttttgggccgatgggagggccttttggggacatgaggaacggtgggtttatcgagcaagctcctcctaggggtaacagaagaaggcctgtgatcacagaggtcgaggaggatggtggagagaacgcagagcatggtaaccagcagcctaaccaagatccttatgttcaggagccagacgatgggattgatgagacagaaggtggccaagtcgagctgcacagggatctcagtagggctaatagtggagggcagccgcaggctcgtactttcacatatcagagctcttccgtgacgtttggtggtattaatggagcttactacaccacttcaaagtctcggcggactggtagtgacgggatcactgtggaagaaagcaaggaagctgatacaacaactaaagaggctactcatagaatctcccgtggaatccatgacaagggacattccctgacaaggaaactgaattcggatgggaaggttgacaccacacagacactgcacaacctgaatgaagatgaactagctggatttgagcaatcatggaaggggaatgctggacattacttgcctgactggaaccacaatgctggtgcacctaatagcgataattctggtgaccgtagctccaatggacgtgaccggcgatcggcctcaggctgggcgcttcctgggaccgagcaaggccgtgatccgaggcgcaacgggaagccaaaatcacgggtcatccctatctcctgaagagcatggacggagtagatatatagagtagataaataaacagctggtttgtactactatgcaaggtttaggttcaagatcgtttcaaggaaacgacctgaggtccaggtaaccggagtccgcccagcacctcgcgtgctattgtctgattctgtagctgtacagtgctctgctaccttattatccgtgatgtgaaacaatttgtgtcgtccagtcttgctgtaaaatcatcatcgcgtatattgtaaacctgagtcggtatgtctgagttggctttgctgtgttgttgctagttgtttgggtcgctgaaggatgtgaagcgatctgcttctgtgtttgcgt

SEQ ID NO: 152138 - DNA, 1875 bp, Zea Mays
acgtctgccccctggccacgcgtgtccaccccacgctttggcaccatcacgtccggaaaacaaaagagaaacgcccagaacccgtcgaaccaccaccaagcagcccaacccatcggttcgacaacttcacagaccagtgagtgacacacacccatgccgccgccgccgctcgcgcgccgcctactcctccagccgctgccgcgcggcgcgcgcgccctccacacgaccccggccccgcgccgcggcccgggggtgctggcctgccgcctggcgtcccgcgccgtggtccgcttcgcggggcccgaggcggcgcgcttcctccactcgctgctcaccaacgacctcctctccgccttctccgcggccggcgcgtcgtcgccgcagcggtacgcgcccacgccgaacgcgcccgcgcggggccccgcggcgcccgcctacgccgcgctgctcacgccgcagggcaggttcctctacgacctcttcctctaccggcccccgccgcggtcccagatgctcgaccgcacaggatccgcgccggagaccggtgaggcccccgaggggcacccgcacccgcaggaggtactcgcagacgttgacgccgccgaggtggacgacctcgtcgcctgctttaagagatatcgtttgagatccaaggttgaaatagacaatgtaagtgagaattttgcatgttggcaaagatttggacatgatgtagtgcacactgaaccttctactcaagaacctgaggctcaatccattgggtggggacaaggtgttgaccatgctggcgagtcagctgcgcaagggaacggtcatggatggcaatggctcaaagatcctcggttggactaccttggttacagaggaatttttccagctgacacgataccacccctagttgagtctgacaaagaagcagatgaacgccattatcaactttggcggatagaaaatggagtcgcagaaggttcgactgagatcccaaaaggcgaagcaatcccgctggagtacaatcttgctggcttgaacgccatttcgttcgagaagggctgctacatcgggcaggagcttatcgctcggacgcaccatcgcggtgtcatccggaagcgcctaatgccaatgaagttcgtcgacgggaatgggcaagaactcgagcaggccgtcgctccaggctcggaggtcgtggacgaggcttcaggcaagaaggtcggggcagtgagcaccgctctgggctcccgcgggatgggcctgctaagactcgaagaagcactgaaaccgggctcggtcctccgcgccggcggcaacagggacgtgagggtccaggcgatcaagccggactggtggccagccgagtggacacaggtgcttcaggaacagcgcgcagccgcttgacagcagcggagctgtatgtagtactggaccccaaacccaaaccctgcctgccgtcagttagtcgcctcttggaagaggacccaaacaatccccatagctaaccgttttcagcttcggtttttagtcttgttgtctggtgtatcaaggcggagcctgtttttttttttcctcgcagaagacgaggaaggcaggagggcctgtttctcttcctctctgcctgctgctgtgttcagctgcggcatctcgttcagaacgagatgagcaaactgtgtgagtgtgtgtgtggcccaaacaggcagtgtgttcgaataagtttatctgtactacactgaataataagtttctctgtctggatgatcttgtacaacgttttatattggacggtcatgggctcccggctctgtacgttgcgttgctctcgcatgtaaagcatttcatgctggggattgtctcagcattatacttttttttaggaactaaatt

SEQ ID NO: 152139 - DNA, 116 bp, Zea Mays
ccgggccggcccgagcccgcaaatcatacaatcatacttaacacagaaaacttaaaactgacatccttcctaaacacaaacgcgctctgcaccaagaactatatacaacgtagaaa

SEQ ID NO: 152140 - DNA, 2081 bp, Zea Mays
tattagagccaaacaaacatgcttatcaaattcagaacctaatacacattaggaactgggtcatcaaatacaacgatcagtagactggttaactacaataatcaaaactccactagcatgtaagtggcaactgggtcattgccccgtcattacaaaacatcagttcactaccatcgctcccacaatccatcatctctgaccgcaatacccagccagcctagcttccattccatcaccgtgtcatcacacgactcactcgctacttcgctagacactacacctcggcagcagcttgtaactcactcactcactgggtgctgctgagctgctgaaccacggcctccatggtcggccgctgacctggcgtctcgctcgtgcaatacgcagcaacagccgccagcctcgccgcctccgttctcgagaacgcgccgtcgaggttcgcgtcgaccaggccgccgaggtcgctgacagcggcggcgccgaccttcagctgggagacgtccctccttcccgtgaggacctggaggaccacgaccccgaacgcgaagacgtcgctcttgtccgtgaaccggcccgtggcggcgtactcgggcgcgaggtagcccatggcggcgctcgctttcagggccgagaagacgacgtcgtctgcgaggagcttgtgcagccccggcaccgagagcctcggcgccaggtggtggtcaaggaggatcttgtcggccgatatgttctggtgcaccaccggtggcttgctgcccttcttgctgtggaggccaatcaagaacggtagcaccggaagaaccatccttgacgtccagataccgcgacaggcagccattaaccatgaagtcatacacgaggaagcattcccctctccccctggagcagcagaatcccctcaggctgacaagattgtcgtgctgtaggagggtgagcatcttcagaccacgcaggaaatccgactcctcttgcttgcagctcgtcttgctgaggcttttgacagcgactaccgatccatcccgaaggatccctttgtacgtcgcggcggcgaagccactcttcccgagcaagttcacgtcggagaagtactgcgtcgcgcactctacctcctctaggttgaatctgaagctatcaccaactacttgaccgggtgatccaacaccagccccacctgcagacaacgggtcccagctgttcgagtactcgacgctgatcaaaggagaggcgctccttctgcaggcttccttctgctggaaatggtcggtgctgagcctgctatcagaaacctccagcgagcttccgatcttctgtttctgccggcggtaccaggagaacgcaaataaaccgcaaaatgcagcaccgatcaccgccgcgacaacagcgacgataagaactccttgggacgcgtttgcggactttgagcagctagcgcctgagcagccgtctggatttgctgattgaggcacctgccttgtcttgacagtaccgtctggtccaaaaggctcgggcttgctgggcttcaggccatcctctgaagaaaggcaaagctctagcaaactgaagccagcgccacaaagccctttgttattcatatactggaagccaccattcagtctcctcaatcctagcatccaacacagaattgtagtggttaaaataccatgaagactaacaaaaaaaagtacaagtttcagaaaggctatgagattattaccaacagggacactcccagaaagggtgttgttgcgaacatcaaagacctcaagcaatggaacctcagcaatcttggatgggattgaaccaaacaggctgttgaagctcaaatcaagccgtctcagctgtgttagctcaccaagggttgccggaatggctccatcaagctgattagactgcatcgcgagcacggttagcttattcaggttgcccagctggggaggtatgctgcctgtcaactgattgtaaccaagctgcaacactgcaaaagggtagtgagagaactatgtaaattaatttatggcattgcaaatcagcacttttgatgttaaaagaccaaactcatcagctcttttctgaactttcatgat

SEQ ID NO: 152141 - DNA, 695 bp, Zea Mays
aacagcaagaaactgacgaaaaatggaataaccattttcgccatttgaaatacggatcctttgtaccaaaacgaggaaagaacggccatggatagtgcaatggttcttgaatcgctgaaaatggagcttacgcaacttgtacttaaacagtgccactttggtttgaaaagaaagcaagatatccagcatggaagacccctaaaaggatttctgtaacttagcaaaaggtgaagtagcccctttataaaggtcaaatggaggaagagaacatattcctcccccagtgttcaaatccgaaatacgaacgagctcagaatgtcaggcacgtaaaccccagtcaccaggcaagcgaaatgttcactgattactgaacccaggaaaagccaaccaagaagatgtcctttatccaactttccacccagaaaaacccgagaatgaaggcacggaaagctcaaaatctcaccttggaggttggcaatggcagcaatctccacgggcacgggcccggtgagatggttcacgtcgaggtacaggtccgtgagctcggacagcttcccaatctcccgcggaatgggccccttgatgccgttgtagtggaggtacagcccctggagccgccgcagcccggcgaccgccggcggcagggttcccgagagcccgcggccctgcagcgatacggcggtgacgcggccgtc

SEQ ID NO: 152142 - DNA, 1524 bp, Zea Mays
ctttcccgtctccgcaccgcacacgcatcgagcggctcggcggctccgtctcatgagagccgtcgctgctgccgcctcgcccccgctccgcgccctcctcctcctctcccgccacccacgccgcgcaggcttcaccaactggccgtcgctgcctaggggccagaacgcaggacccacagccccgccggccgccaccgcccccaagcctgctgcgccgtccaggaggcaaggccgcggcctcactgccagcctgcctcgccaagtcgcccggatctcgacgccccacctgcggccgccggcgaccccgccaaggtgccctgacagacgccatcagagccacggagttcgtgcgctggctggttgtccgcggaagacggtccgccacctccctgctccaacctcgcacctccggttcaccatgaacccttcgtcgtcctcctcctcctctggcgggtaccactccagggccgctgccttcgcttccccgcagccacgcggcggtggcggcagacggcgtggtggcggccgcggccaagacgggagcgaccgcatcgacgcccttggccgcctgctgacgagggtgttgcgccacatggcggcggagctgcgcctagatatgaggaccgatggatacgtgcgcgtccgcgacctgctgaagctcaaccttcagaccttcgccaaggtccctctcaagtctcacactgttgacgagatcagggaggcagtcaggcgggataacaagcagagatttagtctgttggaggaagatggcgagctgttgatccgggcgaaccagggacacacagtaacaatgggatgaagctttatatttcagacaacaaagtgatcttgacagaaggttttggttttgatggcgttgtccctgtgaaatactttgaaagaatcgaaacatggccaggacgagctccaataccgttccaaagataacaggccatgtttcagcattgctagttcgtacgtactgaaaaatgatttgtcatgatgtatcccggagaaccattttttttggtaattcacatacactattttggggggttggcttttttttttgggtgggggggagtcactttgattgtgttgggacctctcagatattcgtttgatgatttttgcatactctgtgaaaagccgtggttcttcgtgacctttttttttggatttttgtgtgtaacgaaaccgaaagacgagcgagttcttttcttcgtgcttgtcaaccgtatatcctaattatctgaattaggcgatgcaaatccatggcgcttaggacatgatatccgtgcatggagtatgagaagaagtatccagaggatgcagcaagcagaccttgaaatgaaaagtatcatcgatctgagagttgcctgctggctgggctggtgtccttcctgtaagttcattaccatctctgctcctggtgttagagctgattgacgtgcggatgatggcttttaaattttaatgtcatgaggcttgatcattcagaaatacagcatagcagtttggcaa

SEQ ID NO: 152143 - DNA, 2098 bp, Zea Mays
gcctccaccacgcgagcctcaaaacctaacgctgtccgccgccacctctcctccggcatcgacgaggcgaaaccctagcgcccgagtccctctccctgctcccacaacccatggcggcggatatggcgtacgcgccgccgatgaaggctggcaaggccgggttcgaggctggcatgatggatccacagcacaggatccgcatcacgctctcctccaagagcgtcaagaacctcgagaaagtctgcggggatctggtgaagggcgccaagggtaaggagctcaaggtcaagggccccgtgcggatgcctaccaaggtgctccacatcaccaccaggaagtctccctgtggagaaggtgacctctccttacctccccctcaacttctcacgtccaacaggaaggtctcgaatcgtcacgtttgttgtgatggatatctagagctgtgggttgcgatgtgtggtatgctgagcagatgatgttaacatctacatcgactgagatctttcgggatctctgatgtccaaaaatcgagctttttaaaactgatgcttagcgtattgtcaccgagaaagattcatcttcgtttacggatcatgttgtattaatgtgtatcaacatttaagcgcatttgtgtggtgtcgtattctttggatacgatcttaggctgaacatatgatgttaactaggagatgctgctgagatattacatcattgaagtctctaaaaccgagctttttaaaactgatgcttggcctatgatagtatgtttagtgcggatcacattctagatattgcatggttttagctaaacattggtttagttactgtttttgatcatatactactttcacactggctgttaaataatctttttgtttgggcctgtctcaaatttagcatgcatcgtttagtattgaataggctttgcccagagttggtagtcttgatggtgaaattgcgtgaccaattttgggcattcaaggcctttgtttcctgatttccaacagttgctgcatattttttaagggaacagctgatgcatatattaagttaccatatattcttttttgataccttcttgctttcctaaatatccttctgtatcctagaaagttaagctcaatactgagcatctactttattttagggcttcaccctgtcactctaagttatctgagttaatgtgttgggcacttgggcttgatctttgttgtgggctaaccatgtgatgctaaacaatttactcctgagattttctgaggacttaacaaattcgagctttttaaaactgatggttggccccatttcattctctaatcatttttacttttactacacttttgaggatgttctttgtttctttgttaaataggatctgcacttgtatgccttgagtatatgggttatgtcattttgttacattgaatgaccctatgtatggtaggttaatatatgggttatgtcattttcagactatggttttgttattttctggacatgctgggcaggtgatgatgatgtttggactgatacttgatgtctcaaaatcgagctttttaaaactgatgcccagttcatccttgacttaaatgctgtgatgtttcttattatcctctgacaggttttcttttcggagttcacttttgatacacattgttgatacagttattgataattgtcttgactatttcaggtaccaacacctgggatcgctttgagatgaggattcacaagagggtgatcgatctcgtcagtacaccagacgttgtcaagcagatcacctcaatcaccattgaaccaggtgtcgaggttgaggtgactatcagtgacgcttaatatggtagccttatcatttcaaaaggcttctagtgaacaggatattttcaattcctagtgagaacttgtgtaacagaggaatccaagtatttcatatcaaagtttaaaagtcttatcgagggttcgcggtatggatgtatcctgtttcaaatgatttctcctaatgtatgaatgaaaacggttaatggatgccccagtatgcattgcttttcatgacgtgagaaatatagattctgtttcagatgttatcagatgaaccaga

SEQ ID NO: 152144 - DNA, 774 bp, Zea Mays
gcctccaccacgcgagcctcaaaacctaacgctgtccgccgccacctctcctccggcatcgacgaggcgaaaccctagcgcccgagtccctctccctgctcccacaacccatggcggcggatatggcgtacgcgccgccgatgaaggctggcaaggccgggttcgaggctggcatgatggatccacagcacaggatccgcatcacgctctcctccaagagcgtcaagaacctcgagaaagtctgcggggatctggtgaagggcgccaagggtaaggagctcaaggtcaagggccccgtgcggatgcctaccaaggtgctccacatcaccaccaggaagtctccctgtggagaaggtaccaacacctgggatcgctttgagatgaggattcacaagagggtgatcgatctcgtcagtacaccagacgttgtcaagcagatcacctcaatcaccattgaaccaggtgtcgaggttgaggtgactatcagtgacgcttaatatggtagccttatcatttcaaaaggcttctagtgaacaggatattttcaattcctagtgagaacttgtgtaacagaggaatccaagtatttcatatcaaagtttaaaagtcttatcgagggttcgcggtatggatgtatcctgtttcaaatgatttctcctaatgtatgaatgaaaacggttaatggatgccccagtatgcattgcttttcatgacgtgagaaatatagattctgtttcagatgttatcagatgaaccagagttgcctgtttcact

SEQ ID NO: 152145 - DNA, 663 bp, Zea Mays
tttattattcttattattccaacgaaccactcttgaaatgaaatttggcttacagtgcacaaacttaagatccgaaatagaaacttgctacaaacaactaacgttacagactcaaaacttaatcccgtgaaagagaaaaaacagaacaaaagaaatgtatttcctcagcacaagcctatcacttcaatcaagctgcgtggtagtatcgcacgctttattaattcttgacgaaagtgctcagcacatcgaagtagtcggggaaggtcttccgggtgcacccagggtcccggatggtcacggggacctcggcacaggcggcaagggagaaggccatggccatcctgtggtcgtcgtacgtgtcgatcgccgtcacgttcagcttctccggcggcgtgatgatgcagtagtccggcccttcctcaacagatgctcccagctgtggaaaacacagacagcaaccgaggatggagcgaccgcaggcaagccgctaagaggcagcgagctatggaaagacgacgtgagacatgtgaagtatgtagccttaccttggttagctccgtccggatcgcaaccatcctctcggtctcctttactctccaggaagccactgccaacgagccaatagtttttagtcttgtcaagtagtgatgtagaagaggcatg

SEQ ID NO: 152146 - DNA, 2418 bp, Zea Mays
ctctcggtctctccctctctctttttgcattcggcgattgcatgcgtatgggtatacgaagtacgtacgagtagaaagtacacgagcaaccttttgccgtggggcctgatgacggaagggacggggcatcggcgcatcgcgccggcgcaccgcggaagagtggcgcggccggccatggcggagcagctgtgtgcacgacgccagctgctcagcggcggagcaggcgcgcccaaggaggaggacttgaagcagttcaggcaatggggaagcagaacaccgggccaccctgagaactttgagactccaggagttgaagttaccaccgggcctcttggtcagggtatcgccaatgccgttgggttggcacttgctgagaagcacctggctgcccgcttcaacaagcctgacagtgagatcgtcgaccactacacgtacgttattttgggagatggctgccaaatggagggtattgctaatgaagcttgctccttggctggacactggggtcttggcaagctgattgctttctacgatgacaaccacatttccatcgacggagacacggagattgcattcacagaggacgtgagcacccgcttcgaggctcttgggtggcacacgatctgggttaagaatgggaacaccggatatgatgacatccgcgcagccattaaggaggcgaaggcagttactgacaagcccaccttgatcaaggtgactaccacgatcggttttggatctcccaacaaggccaactcatacagtgttcatggaagtgcactgggtgccaaagaggttgaagcaaccaggcagaaccttggatggccctatgacacattctttgtaccagaggacgtcaagagtcactggagccgccacacacccgaaggtgctgcacttgaggctgattggaacgctaagtttgcagagtacgagaagaagtatgcagatgatgcagcaaccttgaaaagtatcatcacgggggagttacccactggctgggttgatgctcttcctaaatacactccagagagcccaggagatgccaccaggaacctctcccagcagtgcctgaacgcccttgctaatgttgtgcctggtcttatcggaggcagtgctgatcttgcatcctccaacatgactctgctgaagatgtttggtgacttccagaaggatacagctgaagagcgcaatgtccgcttcggagtcagagagcacggaatgggcgccatttgcaacggcattgctctgcacagcccagggtttgttccgtactgtgctacattctttgtcttcactgattacatgagaggtgccatgaggatctcggccctgtctgaagccggagtcatctatgtcatgacccacgactctattggtctcggagaagatggcccgacccatcagcccatcgagcacctggtgagcttccgtgcgatgccgaacatactgatgctccgccctgctgatggcaacgagactgccggagcatacaaagtcgcggtcctcaacaggaagaggccgtccatcctcgctctctccaggcaaaagctccctcacctgcctggcacctcgatcgagggcgtggagaagggcgggtacaccatctctgacaactcgaccggcaacaagcctgacatcattgtgatgggcaccggctccgagctggagatcgcggccaaggccgccgacgagctgaggaaggaggggaagacggtccgcgtcgtctcgttcgtctcctgggaactctttgatgagcagtcggatgagtacaaggagagcgtcctccctgccgccgtcacagcgaggatcagcatcgaggccgggtccactctcggctggcagaagtacgtcggagcccagggcaaggccattggcatcgacaagttcggcgcgagtgctcctgccgggacgatctacaaggagtacggcatcaccgtggagagcatcattgcagctgccaagagcttttaagagctaacaacggtctggagttttttttattgtcgtcgttgatgccaaaggaacactgtacctagaggacagtcctatgcctcggagcttggaataatgatgatggagggagcggaaggatgcctgccatttgttggagcgtgcgtggtagtatttctaggcctgtaataaacaatgcctttttccatttacgttgttggttttatccggtgaccctcacacgattcatcaaggtggtgagcctggctattaaatcgggtgctgttttttttttgggtaaacattggcaatggccttactgtcttgcagcagtgctttttcgtttgctggattgtgggtttaagatgctgcattttggctcttttgttgatacattttcccattggcttttgtttgtgatacatacatagcatttatatattaagctcaataatgtgacgtttt

SEQ ID NO: 152147 - DNA, 3653 bp, Zea Mays
ctctcggtctctccctctctctttttgcattcggcgattgcatgcgtatgggtatacgaagtacgtacgagtagaaagtacacgagcaaccttttgccgtggggcctgatgacggaagggacggggcatcggcgcatcgcgccggcgcaccgcggaagagtggcgcggccggccatggcggagcagctgtgtgcacgacgccagctgctcagcggcggagcaggcgcgcccaaggtaggtcaagttcctcaccacgtccgggcgcccggagttggctttaggcgtgactcacgccgcgtgaggaacgggtagtttcatgtacgagatgcatgcaagaggagccggcgcccgtagcttatggcttgttaagactactttgaacagatcctttatcttattatttttcaaacttatctctaaaaacagtgtctatttacagtctcgtctcgtgtcccctattttatagatattcaaggtgtgcctgtttttgttcagtacgacctacgcatactgctcatccaaatctaacttttcctcctttcacatttttactcaacaaaaaaggtacatttaggtcatcaagaggtcgataggagtgcacttatactataaaaatcaagtatttgctgaccaaagcccctagctgccaatgtctccttaaaacctagtagtgctaccggtacaaacccctggtccatggaccatgtccaccgggatttccgtagccgcctcagctcggctgggctgggctgctaccgtctcgattggcaacgcgtccccccacaaacgcaccccggcgtctgccctatacataacccccctctcctcccatctccgcgaccgcaggcagactactagactcggcatctccgccgctcctctctccacccggcgcgcgcgcacacacagcacagacacctacagtcaccacacgcgccatggctacgcactcggtcgccgccgcgcacgccaccatcgccgcgcgcgcgggcgccgccggggcgccggccccggcgagcgcctgcttcgcgcctgggctcccgccggggcctgccgccgcccgccgcgcgcgccccggccgcctcccgccgccatcgcgtcgtgcgtgccgccgccgtcgagacgctccagggcaaggccgccaccggcgagctgctcgagaagtcggtcaacacgatccggttcctggccatcgacgccgtcgagaaggccaactccggccacccgggcctccccatgggctgcgcgcccatgggccacgtcctctacgacgaggtcatgcgctacaaccccaagaacccctactggttcaaccgcgaccgcttcgtcctctccgccggccacggctgcatgctccagtacgccctcctccacctcgccggatacgacagcgttaaggaggaggacttgaagcagttcaggcaatggggaagcagaacaccgggccaccctgagaactttgagactccaggagttgaagttaccaccgggcctcttggtcagggtatcgccaatgccgttgggttggcacttgctgagaagcacctggctgcccgcttcaacaagcctgacagtgagatcgtcgaccactacacgtacgttattttgggagatggctgccaaatggagggtattgctaatgaagcttgctccttggctggacactggggtcttggcaagctgattgctttctacgatgacaaccacatttccatcgacggagacacggagattgcattcacagaggacgtgagcacccgcttcgaggctcttgggtggcacacgatctgggttaagaatgggaacaccggatatgatgacatccgcgcagccattaaggaggcgaaggcagttactgacaagcccaccttgatcaaggtgactaccacgatcggttttggatctcccaacaaggccaactcatacagtgttcatggaagtgcactgggtgccaaagaggttgaagcaaccaggcagaaccttggatggccctatgacacattctttgtaccagaggacgtcaagagtcactggagccgccacacacccgaaggtgctgcacttgaggctgattggaacgctaagtttgcagagtacgagaagaagtatgcagatgatgcagcaaccttgaaaagtatcatcacgggggagttacccactggctgggttgatgctcttcctaaatacactccagagagcccaggagatgccaccaggaacctctcccagcagtgcctgaacgcccttgctaatgttgtgcctggtcttatcggaggcagtgctgatcttgcatcctccaacatgactctgctgaagatgtttggtgacttccagaaggatacagctgaagagcgcaatgtccgcttcggagtcagagagcacggaatgggcgccatttgcaacggcattgctctgcacagcccagggtttgttccgtactgtgctacattctttgtcttcactgattacatgagaggtgccatgaggatctcggccctgtctgaagccggagtcatctatgtcatgacccacgactctattggtctcggagaagatggcccgacccatcagcccatcgagcacctggtgagcttccgtgcgatgccgaacatactgatgctccgccctgctgatggcaacgagactgccggagcatacaaagtcgcggtcctcaacaggaagaggccgtccatcctcgctctctccaggcaaaagctccctcacctgcctggcacctcgatcgagggcgtggagaagggcgggtacaccatctctgacaactcgaccggcaacaagcctgacatcattgtgatgggcaccggctccgagctggagatcgcggccaaggccgccgacgagctgaggaaggaggggaagacggtccgcgtcgtctcgttcgtctcctgggaactctttgatgagcagtcggatgagtacaaggagagcgtcctccctgccgccgtcacagcgaggatcagcatcgaggccgggtccactctcggctggcagaagtacgtcggagcccagggcaaggccattggcatcgacaagttcggcgcgagtgctcctgccgggacgatctacaaggagtacggcatcaccgtggagagcatcattgcagctgccaagagcttttaagagctaacaacggtctggagttttttttattgtcgtcgttgatgccaaaggaacactgtacctagaggacagtcctatgcctcggagcttggaataatgatgatggagggagcggaaggatgcctgccatttgttggagcgtgcgtggtagtatttctaggcctgtaataaacaatgcctttttccatttacgttgttggttttatccggtgaccctcacacgattcatcaaggtggtgagcctggctattaaatcgggtgctgttttttttttgggtaaacattggcaatggccttactgtcttgcagcagtgctttttcgtttgctggattgtgggtttaagatgctgcattttggctcttttgttgatacattttcccattggcttttgtttgtgatacatacatagcatttatatattaagctcaataatgtgacgttttatttcggtttctcttgaaatcaaacggaacttggcaagaaccattgcgacctttgtgcccaactttaccgc

SEQ ID NO: 152148 - DNA, 2241 bp, Zea Mays
gcgtccccccacaaacgcaccccggcgtctgccctatacataacccccctctcctcccatctccgcgaccgcaggcagactactagactcggcatctccgccgctcctctctccacccggcgcgcgcgcacacacagcacagacacctacagtcaccacacgcgcccgcgcgccccggccgcctcccgccgccatcgcgtcgtgcgtgccgccgccgtcgagacgctccagggcaaggccgccaccggcgagctgctcgagaagtcggtcaacacgatccggttcctggccatcgacgccgtcgagaaggccaactccggccacccgggcctccccatgggctgcgcgcccatgggccacgtcctctacgacgaggtcatgcgctacaaccccaagaacccctactggttcaaccgcgaccgcttcgtcctctccgccggccacggctgcatgctccagtacgccctcctccacctcgccggatacgacagcgttaaggaggaggacttgaagcagttcaggcaatggggaagcagaacaccgggccaccctgagaactttgagactccaggagttgaagttaccaccgggcctcttggtcagggtatcgccaatgccgttgggttggcacttgctgagaagcacctggctgcccgcttcaacaagcctgacagtgagatcgtcgaccactacacgtacgttattttgggagatggctgccaaatggagggtattgctaatgaagcttgctccttggctggacactggggtcttggcaagctgattgctttctacgatgacaaccacatttccatcgacggagacacggagattgcattcacagaggacgtgagcacccgcttcgaggctcttgggtggcacacgatctgggttaagaatgggaacaccggatatgatgacatccgcgcagccattaaggaggcgaaggcagttactgacaagcccaccttgatcaaggtgactaccacgatcggttttggatctcccaacaaggccaactcatacagtgttcatggaagtgcactgggtgccaaagaggttgaagcaaccaggcagaaccttggatggccctatgacacattctttgtaccagaggacgtcaagagtcactggagccgccacacacccgaaggtgctgcacttgaggctgattggaacgctaagtttgcagagtacgagaagaagtatgcagatgatgcagcaaccttgaaaagtatcatcacgggggagttacccactggctgggttgatgctcttcctaaatacactccagagagcccaggagatgccaccaggaacctctcccagcagtgcctgaacgcccttgctaatgttgtgcctggtcttatcggaggcagtgctgatcttgcatcctccaacatgactctgctgaagatgtttggtgacttccagaaggatacagctgaagagcgcaatgtccgcttcggagtcagagagcacggaatgggcgccatttgcaacggcattgctctgcacagcccagggtttgttccgtactgtgctacattctttgtcttcactgattacatgagaggtgccatgaggatctcggccctgtctgaagccggagtcatctatgtcatgacccacgactctattggtctcggagaagatggcccgacccatcagcccatcgagcacctggtgagcttccgtgcgatgccgaacatactgatgctccgccctgctgatggcaacgagactgccggagcatacaaagtcgcggtcctcaacaggaagaggccgtccatcctcgctctctccaggcaaaagctccctcacctgcctggcacctcgatcgagggcgtggagaagggcgggtacaccatctctgacaactcgaccggcaacaagcctgacatcattgtgatgggcaccggctccgagctggagatcgcggccaaggccgccgacgagctgaggaaggaggggaagacggtccgcgtcgtctcgttcgtctcctgggaactctttgatgagcagtcggatgagtacaaggagagcgtcctccctgccgccgtcacagcgaggatcagcatcgaggccgggtccactctcggctggcagaagtacgtcggagcccagggcaaggccattggcatcgacaagttcggcgcgagtgctcctgccgggacgatctacaaggagtacggcatcaccgtggagagcatcattgcagctgccaagagcttttaagag

SEQ ID NO: 152149 - DNA, 629 bp, Zea Mays
atggctgggagtcgaagctgtcttctcgctgggtgcccaaggtggataaatgtgggcaagctgaggatattggtgacaggtctggttcgatgggcactgttattctggaacctgtgcgcagccctgctacaaccacgtgcaaggtggatttggttgagcagcttgcgaggcatttctctaggcctttgaccaaggaacaaatggaggcaattatggagctggcaactcaggggaaggaaaaggaagggatcaagaagaagggcagcaaggtgacgcccctcaaggctcctatcatcgaggcttctgagatgctctaagttgtaatttgagttgtgggggtagttctagtgcatcatgttgtgtcgctggtgtacttgcctgtgggtcgcccaggttcttttgctggctgtttcgtgtgccaggttgttgcctgggcagcggtgtttgtttctttggttggtaatttcggtgtctctatctgtcttattatctgttgtaagacgctggtcttttgcttctggaagcaagttacggatggtggaagcctggttggctcctgttcttctctcctatcctgtgttccccatgtgtgacaattatttaattagtggagctgttttggattaatg

SEQ ID NO: 152150 - DNA, 2206 bp, Zea Mays
atccaaccgcacaagaattgcatcatcatcgttagctgccacagatggagatcttccaagtgacgacgatgatcctgcagcatccgttactcacatacttcttctctgcactcctgctcacacagctgctgacggcgcctattgcggcggcggagacaacggtgaaagtgagcaccacccctatcttccccgagatcccacaaggccaggcgagaaaggacttccaagtgctggtgcgcgtcgaggcgccggcgcgtccagaggcgcgcatccccatcgacgtcgtcgccgtcctcgatgtcagcggcagcatgaacaacccggcggcagcgccgacggagagaacgagaacgacgtcgaggctggacctgctgaagacggccgccaagttcatggtcgcgaaactcgaggacggagaccgcctctccatcgtcgcgttcagcgatcggccagtcagagaactgagctccggcttgctgtacatgactgccgacggccggaggaacgccattaggagcttggaccagctggaggcccgcggcggcactgcgctcgtgccggccttcgaggaggcggtgaaggtcctggacgggcggcagggagacggcggggaccgcctgggcttcatcgtcctcctcacggacggcgccgaggacgcgagcgggtcgttcacgttgagcgagcgccgccgcgaggtgatccgaggcgccctccgcaagtaccccgtccacgcgttcggcctcggcacggcgcacggccccgaggtcctgctgtacctggcccaagagtcccgcggcacctactccttcgtcgacggcgacaacgtcggcgaggtggccggcgccctcgccgtgtgcctcggcgggctgaccaccgtggccgccgtggacacgcgcgtggtcctcagggccgacgagctgaacggggtgcgcgtagaccgcgtcgactccggcggccacgacagcagcgtcagctgcggcgggacctcatgcgaggtctccgtgggcgtcctgtacgccggcgaggccaagcatttcgtggtccacctccacgtgccagctattactgcgacggcctcggcgtcaacggagggcggttactactgcgacggcctcggcgtgtgtgaccactaccgccaccaccgccaccaccgccacgggcagcacctgctcgccgtcggctactcgtaccgcagccatccgagcgcccgggcgatcacggtagaagcgcacggcgtgttcgtgcagcggtcaccggcggtgttagacttagacggcgggcggcacgctcctgttattccctccccctcccccgtggtcctgcagcacatcgtccggttcgagctgctggaagtggtggcaaacagcctcgtccgcggcgagctgatcagcaacgacgacagagcgcgtgccgcggacgtgctgcaggtcaagtgggaggagttcagggcgtgccaccagttctggggcggcgggctcctcgacctgatgagcggcctggagaaggaggtggacggcatggtgggcagcctcagggcgggggtggcggcgtacgtctacgcctgggtatcgagccaccagatgcagcgggccaccagcatcggctcgccggacaaggcggccgtcgagttcctgacgccggcgatgcggctcctgttggaggaggcgcgaaagctgccgcgctggcagcaggctgcaacgacgacggcggcgcccacgaacgtccagtacgcgggctgcgtcggcggcggcggcttcgagatggtggaccggaggctggagctgtggtccaagatgaagcgcgacgtgcagctcctcgtgtcggtccaggagcaggcggcggcggacgaagaggagcagcacctcgccgccgtcttccaggaggcgtcgctggcggccatcgaccgcgcgatgcaccgcgacatttacctggccgcggtttatgcgagcaagcagacgcgatgccactcggtcgggtgccaacaagtgaaggactgagaactcgatcgacaccagtagattaagtgggcatgacgtcaataactaattgattacctacctagccgcttgtactagtcatgctctactttatattactttaaaagatacatttcgttgtgtaatcatcttatggttcatcatcgtcatgtgctccactatatactgtctcagatctatattcatcactggcagatctcaatctagct

SEQ ID NO: 152151 - DNA, 149 bp, Zea Mays
agcatgtacaacccagatactgctgcacggtactccaagtacaagatacaactaaaacacaacataatacagtggtcatgtctaaaacatgtgtcttacgatattcattgtaccaatcagagtattcaataaattaaagtgaccaatca

SEQ ID NO: 152152 - DNA, 650 bp, Zea Mays
accatccaatccaatccaatcgaaccaccacctgattgactagagcgaaagcacaagccgcccacgcatctcgattcgagcagcagcagcagcagcagaagcggcgcgcagagctcgtgacgagagcaaccttccttccgttcctcgatcgccatggacaaggtgctggccttctcgatcctgagcgcgtcgccggccgacctctcctccacgggcgccggcttcggcgggagctgggcgcggctgtcgtggcggaggggcgcggacgaccagcgtgcgccgcggcgggagcagcagcaggaggaggacgaggacagggagaagcgagacttgcgctcccgcgacggcggagctcacgcgagcggagggggagcggcggcggcgccaccgcggttcgcgccggagtttgacggcatcgactggttcggaaccatcgtgtcgcgctgatcaacaatccgggctcggccgacgcgccccccgagttaaccacgtgaccaatcctgtctactatgttttttttaccttatggtggattaattgtcccaacacagataattgggactccgcgtgttgtacatacagggaactgctcaattaccaggtgggatggggaacatttatttgttcctgtcctctgcatttttttttct

SEQ ID NO: 152153 - DNA, 1500 bp, Zea Mays
atgcacgcactacgggagcacgacgcactagcggccccgggcgcgggtggggtgcgcacgtatgcatgcatgctggtcgagtggttagtggtgcgcgcggtatgcaatgcgtgcatgcatgcatgcacacgccatatggatgtgtatcggggccctgttgttgttggtcgggagctagacgttgttgttcatggtcaagtccgcgtgcagcgccgacacggaccgtgcgaggctccacaggtcgccgtccacggcggcggcggcggcggcgctaggctcgacgtcgaagaacgcggccatgttcttggacgcgtcgttggagaggccgttgaggtggtcgtaggcggcgaggcggtccagcgcgtcgtcgtcgtcgtcccagccggcggcggcggcggcgccgtactcgcgcgctcctggtggtggtgggcttggcggcaggccggcgtgctcgaggggcgggagcttcatgaacttcccgtagtagaagccggcggcggccctagtagtaggcgctgcggcaaggtggtggtgcagatggtccagctgctccagcagcgccggcttggtgtccggcgcgggcgcctgcctgccgccgcccatgtactgctgcaggatgtggtccagcgcgtcgtcgtcgctgctggcggagtggtgcgtgtgcatcatcagcaacgacgcctgcgcctgctgctgcttgtcgttaacgttggcgtgcacgtggtcgctgatgacggtcaccgacgagcactggctcgggctgctctcgtccatgtgcgctgccgccgccgccgtatgggacgccgcgtggtcgtctcctgctgcctgctgcttcacgccgctgctctggccgtggtgcacgaggttcttcttcttgaacaccctgcagatcacccacccctcctgctcctgcgccgcttggtctcccgccgcgccacggatcgttgcggtagtagtagaagaaggcgcctgcggcggcgaggtgtagtagggaggatgttcggcggcggggagcagcaggtggtgcgcggcgccggcgccggcgtcgacgggcgcctcgaggcggtactcgtgcatgatccagtcggacttctgcccgtgcggggcgcggcccttgtagaagacgagcgtcttgcgcatgccgatgcggcgggcgcccggcgaggcgtagatggccttgtcgcggccggtggccttccagaacccggcggcggtggcgcggttggtgcgcgtccccgtcgggtacttcttgtccttgtggctgaagaagtaccagtcgttctgggggcccgaaccgatgcggcacttctcttggatgtcccatggctccagcttgttcaggtcgacgtcgcggatgacgtccaggtcgatgcgctccgacgccaccttcttcttcaggtagtaggtcagcagctcctcctccgtcgggtggaaacggaaccccggcggcaccaccgactgcccgttcaccgagatgctcatgatcggtctcctagctag

SEQ ID NO: 152154 - DNA, 109 bp, Zea Mays
ggaattgaatgcagcggctggtacttcagcaggccgtccaaggaccttcgccaaggtttccacacttttctttcaacaatttattttctattgatgttcatttaacaat

SEQ ID NO: 152155 - DNA, 481 bp, Zea Mays
caaagtgaaagtatacagatgaacttcagcaagtcagaactcagaagtacattcagtatcataagctcagttttaactatgtaaagaaaatgaacatctagaacgacctcatctcaatgattgtgtataaaatttaaggcaaaaccaaactgcattgcttaacacacatatggttgttgtcaatacccaattacagtaagacaaaatgtagccaactcaaaaggaaaaacaaaaggatatggactatataccagtctatgacacttgtcctctggtgggacatacaacgccgatatcaccactggcacgaaggagatgccaactcctaacccctcatagctcgaattcaccatccaactttagcgcctcagctgcagcggcagcctcctcttcctcatcatcaatggcaaagtacgaaggtgactgccatggctcaaaaccagagccctttcgggtcatagttacactgtttctccctatc

SEQ ID NO: 152156 - DNA, 1454 bp, Zea Mays
acattggacgaaaagccagattctgctatttctcacgctatctcccactcgcggcgccggcgactacaccattgaaacccacaggccacacagcgcaggaacaaaaaacggcggcgcgataagaagggcgccgctgttggcgccgggccggcccgctcccgagcggtgtccttcttcaggtccgccctccggagcaacccctctcacttccccgccgcgccgcgtcggactgcggaccccttgggcttgcgacggtgctgctcagctgctgctgctggggtcggggctcgtgctcgggcgacgcgggatttgagtcgccattattggatttttcttccattgattgcgaacattttgttctggtacgctctgtgtctactcctgctcgtccttgtccccctcgtactcgcgccgccgtcgtcgtcgtcgtgtctttgaccttgaatgctagattgcattctttcttggacggaggaagcacttatttgtgtatatttctacatcttctaaacccaaaccctagatcgaatcgagtttgtgcgcggaccgttctccggatcggctgtcgcttcacataaacaccagcaaggtgccgtctcgccgccgttccattgcctggcagttggcatcgatggcggcaggggctgggaaccatgcggtggcgcctgacatggcttccgagtcaagtttgacctgctgcggtgctctgctacgctactcctgatggatgaatggatcatggatactaccccactccccactggagccctgatgctccgcagtggtgatatccttcccccagtgttcttaaggcgcctaggcgagcaagtggaccagacaaccgccttagcgcctaggcggtgcctaggcgacgcctaggcgggaatggcgagcaaggcgaccagttttgcccgggcgcctggacgcctaggcgacgccttaagaacactgtcttcccctgttgttgcctcttgcctgtgggatatttaactttttgcaatcttctctccttcaccctgccttattttttctaggggtgggcacacctggtggggagaaatttgtaattgtgtcattataaaacgtgtgtttcgctagattgccattaaataaatgagttttgttcgtatgctattatgaacaataacgtatacgctaaaatgccatttgcttgtttaataaaacaaaaaagactgaatacaattttgtggaacattctaccttatggccctgcctgatgtcctctgctcctactcccgaacgaacccatgtttctagagaactcgacggtggcctcgaagacctgcttgcttgcagtcgagaatggcacgtccctggccaccagcccgatgaccacttgcgtaggcccgacaagcatctcgcgtgcactcgacgcggaggctggacccaaggaatctcatgaggtagctgcggttgccggcggcatggtacag

SEQ ID NO: 152157 - DNA, 784 bp, Zea Mays
acattggacgaaaagccagattctgctatttctcacgctatctcccactcgcggcgccggcgactacaccattgaaacccacaggccacacagcgcaggaacaaaaaacggcggcgcgataagaagggcgccgctgttggcgccgggccggcccgctcccgagcggtgtccttcttcaggtccgccctccggagcaacccctctcacttccccgccgcgccgcgtcggactgcggaccccttgggcttgcgacggtgctgctcagctgctgctgctggggtcggggctcgtgctcgggcgacgcgggatttgagtcgccattattggatttttcttccattgattgcgaacattttgttctggctgcccttcacttgtctttctgctggatctggacctgctacctgggtcaatattattgagaatttgagactaatatggcaagtcagtatcatctcatatgcacctacctaaatgcccctcaagaataaaaaaaacaagtttccagtgtggggcagtgatcaataactatggctgacaaaagcgccttggagcaatcaaggctgctatgggtaccaaactggaatactcatgtccatctcttggagatcttttcaattagctctaatgatagtggctttgtccctggatggtcatgccctcttcatgtgtgataaccggggcaactccacttatcatgtcaggagaagttgatgtggtgataaaagatgatggggataaggttaaatgattgggcaaaggcgaagctgagcccccctttcaa

SEQ ID NO: 152158 - DNA, 94 bp, Zea Mays
gctgcttaactaggatggcccatgccttactagaaggtggttctatctctgtttgcttcttaactaggatgccttgcgcctctagcagtcaccc

SEQ ID NO: 152159 - DNA, 562 bp, Zea Mays
gatgtgacaaccagcacagttccacttacattgagatgactaagttgcgctgcaagagaaatgtgaagtcgttttgcatgattgaataagggtgatgctgagcccttcttttataggttatgttatcatgctttatgttttatccttttgttttatactaactcttgagtgactatgatggttcaaatttccattagagagctgtgcactaaaggagatgtcctccatcttgatttgagatcttctgagctggtactgcagatacagtccaaacaaaaagctattctgtctccatttgttgtgtaactaggatggcttgtacctcactagtcactacctccatctcgaaaggaatgcaattttgtctatgcaccctgacaagcattcgttttgggggcagtggtaagtacaagtaaccagttatgcggccatgggagagacagaaagagagagagagagagaggttacattgtgcttccactataaattgcacttgctatgatgataatggttgaatctgagccactcaagtgacctttttcctcctagtaccactgtctga

SEQ ID NO: 152160 - DNA, 217 bp, Zea Mays
ttttttgtttcataccgcgcttgagtggctaagattgttctgctttccattacagagcttctgcactctaccatcttctgagctgatgatacctgggatattctttgacgtttgctgctttactacgatggcccatgccttactagaaggtgattctatatctgtttgctgctttaactaggatgccttgcaccttagagcatctctagcagtcacc

SEQ ID NO: 152161 - DNA, 367 bp, Zea Mays
cttctctactgccgttgccgcttcacggatcagtaataaatcttacaagcctgtttacaaatgctattcattttgcagctgtttagtccatcacggattctttatggagtttcccaatctaaatctctggtagctggtgtttgaatctttcaatgtcagaaatgtagtggttattggctagggatccatgaggctgcggtgtgtcttaccaatcagagatctatctgtctgttatggtatcttttacgctaattctttaattcaataattatgagattttggtgatgactggtcaaaattgagccagctctgtaattcataattcatagtttggtaattcaataattatgagattttggtgtacaga

SEQ ID NO: 152162 - DNA, 292 bp, Zea Mays
gagagagagaaaagaacggctagtgcgcggcgcgggtgcgatcgcacgcagcttggccgggccggcgcacactctccggctcgaagcgaagcgataacgttacgagacatccatcgtgcggtccgcgcgcgtgcggagctttgttggcagagcccggtgccgggccccgcgcggcgctctgcaggcgtttggccgcgcccagatcgcatctgcgcgcgcgcgcgtggtggcgacatggagccccgggccgcatgttcctgccccgggttacggcctccccaggccccgccgc

SEQ ID NO: 152163 - DNA, 3369 bp, Zea Mays
ccacgagaaagagagagccaccacgccaccaacaaaaggcaagcgagggactggaaaacaaaagggagacgctcctggcgggtgagcgggcccaccggaggcagcggacgctataaaagaggcctcggcgccccaccgtaaccctcgcctcggtcacgacgcgcagtcgcccattccgcatctcgccctcccgtcccgtccgtccgttctccgattggccgccgcccgcctcgccctcctcgtcaacaaaagcccaccgcaagcgagcgagcgagccaccccgcccgatagccgccgccgccgtcccgcccccacccgactcctcctgaccgccggcgtggggtgcccgggctccacctccggcgacgacaccctccccgccgcgcgcgcccccaccgcctgctccgtttgcgggggtagccggggctccggcctcggcggctttcaaagccccctccctcacaacaggatccaaaatcccgtcctagacttcttctacctccccttccagaacttcctcttttggcatcccggacggtcgatctcgacccccttcgatttcgattcatctcttcttatcgattgatctttcttctagcttatttcgtatactgtcattttgattccttccttcttcccgccgccggtagctaatcccaaatcccaatcgaatcgactcccccctgttcgtcggattctcttcctccgtccgcacccagctaacgccaccgaaaacagaaaatttacccgccgcccaaaaaaaaacagaaaggctaacctccttttttctctctctatctttctctccatctgtggacttctccggttttgtttgacgagatgcctgcgctcgccgtcgacgccgcgacacccgtggcgcacgccttcgcgtcctgcgacgcggcgcgcttccccgccccgcccgtggtgggccccgccgccgcggccgaggccgccccctggtcggccgacctctccgcggcgctctacaacgtggacggctggggcgcgccctacttcttcgtcaacgacgacggcgacgtggccgtgcgcccgcacggcgccgcgactctcccgggccaggagatcgacctggccaaggtcgtggccaaggccgcgggcccgcgcgccggaggcgggctcggcctgccgctgccgctgctcgtgcgcttccccgacgtcctgcgccaccgcgtcgagacgctcaacgccgccttcggctacgccgtccgctccaccggctacggctcaaggtaccagggcgtgtacccggtcaagtgcaaccaggacaggtacgtcgtcgaggacattgtggagttcggcgcgccctttgggttcggcctcgaggccggctccaagcccgagctgctgctcgccatgagctgcctcgccgcgcgcggcggcctggacgccctgctcatctgcaacgggtacaaggacgacggctacgtctcgctcgcgctcatggcgcgctccatgggcctcaacaccgtcatcgtgctcgagcaggaggaggagctcgacattgtcgtcgaggccagccgccgcctcggcgtgcgccccgtcgtcggcatgcgcgccaagctgcgcaccaagcacgccggccacttcggctccacgtccggggagaagggcaagttcggcctcagcgccgcgcagatactgtccgtggtcaccaagctcaaggccatcggtatgctcgactgcctccagctgctgcacttccacatcggctcccagatcccgaccaccgccctgctctccgacggcgtcggcgaggccgcgcagatctactgcgagctcgcccgcctcggcgcggacatgcgcgtcatcgacgtcggcggcggcctcggcattgactacgacgggacccactcggcgcagaccgacatgtcggtggcgtacagcctggaggagtacgcgggcgccgtggtggccgccgtgggccgcgtgtgtgaccgcaagggggtgcagcaccccatcatctgcagcgagagcggccgcgcgctggtgtcgcaccactcggtcctggtgttcgaggccttctcggctacggcgccgggacgcctggacgcggccacggcctacctcctcgacgagctcacggacgactgccgcgccgactaccgcaacgtgatggccgccgccgtgcgcggcgactacgacacgtgcggcctgtacgccgaccagctgaagcggcggtccgcggagcagttcaaggagggggtccttggcctggagcacctcgccgcggtggacgccttctgcgagctcgtcgcccgcggcatgggcgcgcccgagccgccgcgcacctaccacatcaacctgtccgtgttcacctccctgccggacatgtgggccatcgggcagcagttccccatcatcccgatccagcggctgcaggagcggcccgccgtcgacggcgtgctctcggacctcacctgcgacagcgacggcaaggtgagcgagttcatcggcgggaggcacagcctgccgctgcacgagctgcccacccacgccactcgcggctactacctgggcatgttcctcgggggcgcctaccaggaggccctcggcgggctgcacaaccttttcggcgggcccagcgtggtgcgcgtgtcccagtgcgacgggccccactgctttgccgtgacgcgcgccgccgcgggcccgtcctgcgccgacgtgctccgcgcgatgcagcacgagcccgaggtgatgtacgaggtgctgaagcagaggaccgacggcgccacggccgccgccctcgcccgggccttcggcgcaatgccgtacctggtgttcgaccccgaggccgccgtgatgtccggcggcgagagcagcgactcggagcggtcggccgccggcgccgccgaggaggaagacgatgaggagtgggagttcatgcgcgggctcaccgtctgatgacgtgcccgcccgcccgccccgggtgaaacaaggcgagtccgtcgccaggaagttgtcagtggccggccggcgttggtttacataataacccccaccgcccggtgttgtatcgtgtcgtggtcgtagtcgtcgggtgtctcgtcgtcgccggagttgtttggcgccacctttttattccgaacgcgtcagtgtccactgttcgcctttccttttttttctctctctttcatgggaataatctgaaggaaactaatagcaagtttctctttaactggaaatttcgttttttcaagaattcattctgtctgttgctgtgtcggttccgctctcccgttgcgtggtgcgctgccaccggagaacaccttcctctcgtctcgacgtcgtcgctttctcttttcttctccatcgtcgcgtcgtgggcagggggcaggtgtcacggcc

SEQ ID NO: 152164 - DNA, 858 bp, Zea Mays
acctgtattacgcccatcagacctttgcagcttgtgctgatggtggttaccagcagagtttaggagtcttggggtacccctaattatggtccccgacaattaccaaacactattttagcaaatatattaccaataacaatctacataaatttctaacaaatagtatctcacaaatggtcacaaatatgtgcaattgatagaaatctatctgatcataaatttgtacggaaattcagtagtattctacagaaatttattttagcgagacatgtatatattaaacaataaaatcaattaccatatcgatcaagcaccacatcagcaccactaaaagatgcgttggcatcagccatggtctttcctttctctacgtgagtagcaacacgatgctcactaggatggtcaaccacgtgcacttcatcttcgctgtccgaatcccacaacatcgcaggaattgtgccagcgcctccacccaactcgtcgctgtcctgcgcttgctgctagccggtagaacagatcaccaactgaaatgcatcaagttgtacaaaaaatacagtagtattatacctgtcttgtggagagccgccacgtgaagaactagtgcacagcaggccaacaacacatatgcagaactttctcgcgcacagctcttccttcacacgagatggtagtgcgggcagcgtgggagtcagagggtggaagctagcagcaaatttgtgggcgtcagactcttggagaacagccacacggaagaagctagcagcaaatctgacgagcggttgtgctgggttgctggcgggattggcgggatggagacaatctgcaaagctgcagcctgcccgtgaccgtgaagaacac

SEQ ID NO: 152165 - DNA, 405 bp, Zea Mays
atgctcactaggatggtcaaccacgtgcacttcatcttcgctgtccgaatcccacaacatcgcaggaattgtgccagcgcctccacccaactcgtcgctgtcctgcgcttgctgtcttgtggagagccgccacgtgaagaactagtgcacagcaggccaacaacacatatgcagaactttctcgcgcacagctcttccttcacacgagatggtagtgcgggcagcgtgggagtcagagggtggaagctagcagcaaatttgtgggcgtcagactcttggagaacagccacacggaagaagctagcagcaaatctgacgagcggttgtgctgggttgctggcgggattggcgggatggagacaatctgcaaagctgcagcctgcccgtgaccgtgaagaacactag

SEQ ID NO: 152166 - DNA, 1037 bp, Zea Mays
atccatactataatagaatttttacccatccgacctcaagttcgacgtacccactgcccatcccactgagaaatttgctattttgtcactctcaattttggctgcctgtcattatgccatcccgtgtctatgactggtgggaccgtctgtgtctatgatttgtgggtccgatggcatactggcgaagcccacaaatgataatggcaaaattgccaatggctccatcccactaccactctacccataccagtttggcgtacccattgcctcttcgacacggagtgcaaaaccgactaggtgcccgttccgccgcgaagcccgcctattccaaacccacgtcgccctcggtcgctggcagcccgggccccacgtctttcgccacgtcaccgatccgtgcttcccgtcccgcaaggaagaaatcgagcagccaaggagaggagaagatggctcgtacgaagcagaccgcccgcaagtccaccggaggcaaggccccgcgcaagcagctcgccaccaaggcggcgaggaagtcggcgccgacgaccggcggcgtgaagaagccccacaggtacaggcccgggacggtggcgctgcgcgagatccgcaagtaccagaagagcacggagctgctgatccggaagttgcccttccagcgcctggtccgtgagatcgctcaggacttcaagacggatctgcggttccagagccacgccgtcctggccctccaggaagccgccgaggcctacctcgtcggcctgttcgaggacaccaacctctgcgccatccacgcaaagcgcgtcaccatcatgcccaaagacatccagctcgcccgccgcatccgcggcgagcgcgcgtaggcgtatctcgcgcccggccccagtggcggcggagggatggaggagtgcaatttgtaactttatgctgtttgttcgcttttagacggcgcggcgaagaagtagtgtaaaaacggctttacaagtctattttgtgcggtagttcgtgtaggccgcttcgtcccgaagcgatcttggtaaaagact

SEQ ID NO: 152167 - DNA, 795 bp, Zea Mays
atataactccccccgcgccccagttcccgtccctagccaccgcatcgtcgccctcaaattcgttccgtccaggcaaggaagaaatcgagcagccaaggagaggagaagatggctcgtacgaagcagaccgcccgcaagtccaccggaggcaaggccccgcgcaagcagctcgccaccaaggttcgtctctacctacccgtaccgatctgctgttccgatcccctcgatggttcccgttgtaagacggcgctgacgcggcggcggttgttgttttgttgcaggcggcgaggaagtcggcgccgacgaccggcggcgtgaagaagccccacaggtacaggcccgggacggtggcgctgcgcgagatccgcaagtaccagaagagcacggagctgctgatccggaagttgcccttccagcgcctggtccgtgagatcgctcaggacttcaagacggatctgcggttccagagccacgccgtcctggccctccaggaagccgccgaggcctacctcgtcggcctgttcgaggacaccaacctctgcgccatccacgcaaagcgcgtcaccatcatgcccaaagacatccagctcgcccgccgcatccgcggcgagcgcgcgtaggcgtatctcgcgcccggccccagtggcggcggagggatggaggagtgcaatttgtaactttatgctgtttgttcgcttttagacggcgcggcgaagaagtagtgtaaaaacggctttacaagtctattttgtgcggtagttcgtgtaggccgcttcgtcccgaagcgatcttggt

SEQ ID NO: 152168 - DNA, 1120 bp, Zea Mays
atataactccccccgcgccccagttcccgtccctagccaccgcatcgtcgccctcaaattcgttccgtccaggcaaggaagaaatcgagcagccaaggagaggagaagatggctcgtacgaagcagaccgcccgcaagtccaccggaggcaaggccccgcgcaagcagctcgccaccaaggcggcgaggaagtcggcgccgacgaccggcggcgtgaagaagccccacaggtacaggcccgggacggtggcgctgcgcgagatccgcaagtaccagaagagcacggagctgctgatccggaagttgcccttccagcgcctggtccgtgagatcgctcaggacttcaagacggatctgcggttccagagccacgccgtcctggccctccaggaagccgccgaggcctacctcgtcggcctgttcgaggacaccaacctctgcgccatccacgcaaagcgcgtcaccatcatgcccaaagacatccagctcgcccgccgcatccgcggcgagcgcgcgtaggcgtatctcgcgcccggccccagtggcggcggagggatggaggagtgcaatttgtaactttatgctgtttgttcgcttttagacggcgcggcgaagaagtagtgtaaaaacggctttacaagtctattttgtgcggtagttcgtgtaggccgcttcgtcccgaagcgatcttggtaaaagactgatcattcgtgttgccaaacgacacaattcgtatttttttgtgtgccgtgtagaacacggtttgttgttattggaatggttcaccgaaatctgtgtgcccgtttgggtaaatatcgagggcacgggaatcagcagctagacctaatcgatgtactgtaattgccctcagacgcaagacaatgaggcaattagcagtcgttgcgttggagggctgtccggtctgaaaaatgtggtgttagtccggattttggaacaaaattgtctttttttttctcttctaataggacgcgaaccccggatacacgtgcaacacgatggtctttttgaggtcggttttgaattccgtttccgtggactctgcagctaacagggaaatgagtttccccgatattcaaactcttctactcttctatagagc

SEQ ID NO: 152169 - DNA, 980 bp, Zea Mays
gcttagggtcgcacagcacagaccggaagcacatcgcccacccacccgctgcgtcccgctcaccaagtcaccactcaccagccttgctgcgcgcgtcctcccacccgccgcccgtagccatggtgagccttctctcccgccgcccgacctgtgtgctatcctatcctattcgtatcccgtactgacggcgtcgacgcgcggatggctgtggcagtcggtgacgctgcacacgaacctgggcgacatcaagtgcgaggtgttctgcgaccaggtgccccgcacggcggagaacttcctggccctctgcgccagcggctactacgacggcaccgtgttccaccgaaacatcaagggcttcatgatccagggcggcgaccccaccggctccggcaagggcggctcctccatctggggcaccaagttcgcggacgagttcagggagtccctcaagcacaacgcacgggggatcatgtcgatggccaacaacgggcccaacaccaacggcagccagttcttcatcacctacgccaagcagccgcacctcaacggccactacaccgtcttcgccaaggtcatccacggcttcgaggtcctcgacctcatggagaaggcgcagaccggccccggggacaggccgctcgccgagatcaggctcaaccgcgtcaccatccacgccaacccgctagccctctgaactactactgccttccacctgctcctgcagtcctgtcccgtggccttattaattactattattactcatggaaatcaggatgaggagagtaatttcgcgaggacacttttgattgattttgaaacatggatctgtagctctctaaacacttgtagttgtagagctctaaaaaaaactttagattctcatttctgaacaacttcagatttgcgagttctgtttctgggtatcctagagactatagttctgcgaataattcagcagcagacaccaccttttttgtgta

SEQ ID NO: 152170 - DNA, 888 bp, Zea Mays
gcttagggtcgcacagcacagaccggaagcacatcgcccacccacccgctgcgtcccgctcaccaagtcaccactcaccagccttgctgcgcgcgtcctcccacccgccgcccgtagccatgtcggtgacgctgcacacgaacctgggcgacatcaagtgcgaggtgttctgcgaccaggtgccccgcacggcggagaacttcctggccctctgcgccagcggctactacgacggcaccgtgttccaccgaaacatcaagggcttcatgatccagggcggcgaccccaccggctccggcaagggcggctcctccatctggggcaccaagttcgcggacgagttcagggagtccctcaagcacaacgcacgggggatcatgtcgatggccaacaacgggcccaacaccaacggcagccagttcttcatcacctacgccaagcagccgcacctcaacggccactacaccgtcttcgccaaggtcatccacggcttcgaggtcctcgacctcatggagaaggcgcagaccggccccggggacaggccgctcgccgagatcaggctcaaccgcgtcaccatccacgccaacccgctagccctctgaactactactgccttccacctgctcctgcagtcctgtcccgtggccttattaattactattattactcatggaaatcaggatgaggagagtaatttcgcgaggacacttttgattgattttgaaacatggatctgtagctctctaaacacttgtagttgtagagctctaaaaaaaactttagattctcatttctgaacaacttcagatttgcgagttctgtttctgggtatcctagagactatagttctgcgaataattcagcagcagacaccaccttttttgtgta

SEQ ID NO: 152171 - DNA, 90 bp, Zea Mays
gttgggtagaggtatcgctatgagtatgacaataagtggtgctcttcgatgccgagatcatacagtggagtctgaaaccgtgaatgagat

SEQ ID NO: 152172 - DNA, 1988 bp, Zea Mays
cgaggcccgtgccgaccctccgcatttcaaattccctcggctttcccttctcccttcgaccgatcctccggccaggccagccttcaaacacctcgccgacgccgccgtgcccgtcccggcgcggacgggcgctagaggcaggtaccccgtcctccccgcatggacagcgacgacgaggagatgtgcgacgccgcctcctccgccccgtcctcgcccgccgccggcggcggggtgggagagggggaggaggaggagggcggcgtagatgacggcaggcgcgggagcgagggggtggtgatcatggaggtcacgtggttccaggtggacctggactatgagttcgacgcgcccaggtggttcgaccttgcccaagaggaggcgccgctggatgccgctgcggcgcaagagtggttcacctccgcccccagctacccgccctctcccttaattgctaagatgttagctgaggatcttgggttacaaaccattagaagcattgcagatacagatgatctgcattgttctacagcttctcacgaatgttctagtggcatgggaccaaaaatccgtcagcttgaagttaaaataggacgaaaagcttgcaatggtgcatcagaaaatgaacgccgttctcactatcaaactaccatgaagggcaattctttgagaggttccacactgatgaagcctactgccagccaattagccaagcaaaacagaccggcacagttaaagaatttgacacagaataaaaagtcagtgggagttataagagagagaagtaccataagctcaaacgattgcaattaccaatccactaaaagacaaagattagagaatgggcatctcaacaaggctgctgctactgctatccagcatgagtttattcataaaaatcatgaaaagaatgttatgaatcaaaacatggatcagcccactgttctgcccagattgaagattacaattcctagatcacctgatttggcaacaaagctaagagcagagaggtcaaaagctcaaagagcagtgccaactcttccaaagcagttaaatgacttaattcaacgggttgcaccctctgctcctacagttcaagtcgcaccaactagaaaggtagttcaacctttttgggctactggtcatcaacatgcaagcagacaacacgaggatgttgggtcaaatgtggcagcatgtacatccaatcatgcaaggcatcttaagagcgtagataacaaaaccgaagataccaggcatggtctgtttaaatttaaagcccgtccgttggatagaaagatgttagagaacaaaggtgatggtgtatttcgatgtgcaaaaaggaatacaactgtgcctaaggaatttaacctatcaacaggcaggaaagccaatccagctccgttgtctgaactatttaacaagctttctttaactgcgggtgcacatcaaaatcgtggagtagggcgtcagatcagggatctgccaaattatatcactaccaaggactgcaaagagaacatgattggtaacatgcatcgctagtctgactcatgtcaatgaagaagtagaatatacaggatttctcttttgatagttagtgcctggtttaggctcaacgtcaccccacccgcacagagaccaagcgtttgttttggtgttttggacagttgactcagaaggaagctcgcatcctcctaacctgctcatacattatttgagattaagagcaccatcgctgaggtcgagtgtggaggcactgattctcgtctcggtcatagagttgcttctgctgagcatgttacagttatctcagctgcccggagccaatgagtcatggctgtgatggggtggtttttgtacagcaagagataaaccatagtgtaggggcggctcactcggtggatctgcagccctgcgggctcccgcagagactccaaagtgtaacgtattgcaatcgtcttggcaaggtcgtgctcttcttttcgtctttg

SEQ ID NO: 152173 - DNA, 1997 bp, Zea Mays
ccgcatttcaaattccctcggctttcccttctcccttcgaccgatcctccggccaggccagccttcaaacacctcgccgacgccgccgtgcccgtcccggcgcggacgggcgctagaggcaggtaccccgtcctccccgcatggacagcgacgacgaggagatgtgcgacgccgcctcctccgccccgtcctcgcccgccgccggcggcggggtgggagagggggaggaggaggagggcggcgtagatgacggcaggcgcgggagcgagggggtggtgatcatggaggtcacgtggttccaggtggacctggactatgagttcgacgcgcccaggtggttcgaccttgcccaagaggaggcgccgctggatgccgctgcggcgcaagagtggttcacctccgcccccagctacccgccctctcccttaattgctaagatgttagctgaggatcttgggttacaaaccattagaagcattgcagatacagatgatctgcattgttctacagcttctcacgaatgttctagtggcatgggaccaaaaatccgtcagcttgaagttaaaataggacgaaaagcttgcaatggtgcatcagaaaatgaacgccgttctcactatcaaactaccatgaagggcaattctttgagaggttccacactgatgaagcctactgccagccaattagccaagcaaaacagaccggcacagttaaagaatttgacacagaataaaaagtcagtgggagttataagagagagaagtaccataagctcaaacgattgcaattaccaatccactaaaagacaaagattagagaatgggcatctcaacaaggctgctgctactgctatccagcatgagtttattcataaaaatcatgaaaagaatgttatgaatcaaaacatggatcagcccactgttctgcccagattgaagattacaattcctagatcacctgatttggcaacaaagctaagagcagagaggtcaaaagctcaaagagcagtgccaactcttccaaagcagttaaatgacttaattcaacgggttgcaccctctgctcctacagttcaagtcgcaccaactagaaaggtagttcaacctttttgggctactggtcatcaacatgcaagcagacaacacgaggatgttgggtcaaatgtggcagcatgtacatccaatcatgcaaggcatcttaagagcgtagataacaaaaccgaagataccaggcatggtctgtttaaatttaaagcccgtccgttggatagaaagatgttagagaacaaaggtgatggtgtatttcgatgtgcaaaaaggaatacaactgtgcctaaggaatttaacctatcaacaggcaggaaagccaatccagctccgttgtctgaactatttaacaagctttctttaactgcgggtgcacatcaaaatcgtggagtagggcgtcagatcagggatctgccaaattatatcactaccaaggactgcaaagagaacatgattggtaacatgcatcgctagtctgacacacttccatttttttcactttccagactcatgtcaatgaagaagtagaatatacaggatttctcttttgatagttagtgcctggtttaggctcaacgtcaccccacccgcacagagaccaagcgtttgttttggtgttttggacagttgactcagaaggaagctcgcatcctcctaacctgctcatacattatttgagattaagagcaccatcgctgaggtcgagtgtggaggcactgattctcgtctcggtcatagagttgcttctgctgagcatgttacagttatctcagctgcccggagccaatgagtcatggctgtgatggggtggtttttgtacagcaagagataaaccatagtgtaggggcggctcactcggtggatctgcagccctgcgggctcccgcagagactccaaagtgtaacgtattgcaatcgtcttggcaaggtcgtgctcttcttttcgtctttg

SEQ ID NO: 152174 - DNA, 1959 bp, Zea Mays
ccgcatttcaaattccctcggctttcccttctcccttcgaccgatcctccggccaggccagccttcaaacacctcgccgacgccgccgtgcccgtcccggcgcggacgggcgctagaggcaggtaccccgtcctccccgcatggacagcgacgacgaggagatgtgcgacgccgcctcctccgccccgtcctcgcccgccgccggcggcggggtgggagagggggaggaggaggagggcggcgtagatgacggcaggcgcgggagcgagggggtggtgatcatggaggtcacgtggttccaggtggacctggactatgagttcgacgcgcccaggtggttcgaccttgcccaagaggaggcgccgctggatgccgctgcggcgcaagagtggttcacctccgcccccagctacccgccctctcccttaattgctaagatgttagctgaggatcttgggttacaaaccattagaagcattgcagatacagatgatctgcattgttctacagcttctcacgaatgttctagtggcatgggaccaaaaatccgtcagcttgaagttaaaataggacgaaaagcttgcaatggtgcatcagaaaatgaacgccgttctcactatcaaactaccatgaagggcaattctttgagaggttccacactgatgaagcctactgccagccaattagccaagcaaaacagaccggcacagttaaagaatttgacacagaataaaaagtcagtgggagttataagagagagaagtaccataagctcaaacgattgcaattaccaatccactaaaagacaaagattagagaatgggcatctcaacaaggctgctgctactgctatccagcatgagtttattcataaaaatcatgaaaagaatgttatgaatcaaaacatggatcagcccactgttctgcccagattgaagattacaattcctagatcacctgatttggcaacaaagctaagagcagagaggtcaaaagctcaaagagcagtgccaactcttccaaagcagttaaatgacttaattcaacgggttgcaccctctgctcctacagttcaagtcgcaccaactagaaaggtagttcaacctttttgggctactggtcatcaacatgcaagcagacaacacgaggatgttgggtcaaatgtggcagcatgtacatccaatcatgcaaggcatcttaagagcgtagataacaaaaccgaagataccaggcatggtctgtttaaatttaaagcccgtccgttggatagaaagatgttagagaacaaaggtgatggtgtatttcgatgtgcaaaaaggaatacaactgtgcctaaggaatttaacctatcaacaggcaggaaagccaatccagctccgttgtctgaactatttaacaagctttctttaactgcgggtgcacatcaaaatcgtggagtagggcgtcagatcagggatctgccaaattatatcactaccaagagaacatgattggtaacatgcatcgctagtctgactcatgtcaatgaagaagtagaatatacaggatttctcttttgatagttagtgcctggtttaggctcaacgtcaccccacccgcacagagaccaagcgtttgttttggtgttttggacagttgactcagaaggaagctcgcatcctcctaacctgctcatacattatttgagattaagagcaccatcgctgaggtcgagtgtggaggcactgattctcgtctcggtcatagagttgcttctgctgagcatgttacagttatctcagctgcccggagccaatgagtcatggctgtgatggggtggtttttgtacagcaagagataaaccatagtgtaggggcggctcactcggtggatctgcagccctgcgggctcccgcagagactccaaagtgtaacgtattgcaatcgtcttggcaaggtcgtgctcttcttttcgtctttg

SEQ ID NO: 152175 - DNA, 1926 bp, Zea Mays
ccgcatttcaaattccctcggctttcccttctcccttcgaccgatcctccggccaggccagccttcaaacacctcgccgacgccgccgtgcccgtcccggcgcggacgggcgctagaggcaggtaccccgtcctccccgcatggacagcgacgacgaggagatgtgcgacgccgcctcctccgccccgtcctcgcccgccgccggcggcggggtgggagagggggaggaggaggagggcggcgtagatgacggcaggcgcgggagcgagggggtggtgatcatggaggtcacgtggttccaggtggacctggactatgagttcgacgcgcccaggtggttcgaccttgcccaagaggaggcgccgctggatgccgctgcggcgcaagagtggttcacctccgcccccagctacccgccctctcccttaattgctaagatgttagctgaggatcttgggttacaaaccattagaagcattgcagatacagatgatctgcattgttctacagcttctcacgaatgttctagtggcatgggaccaaaaatccgtcagcttgaagttaaaataggacgaaaagcttgcaatggtgcatcagaaaatgaacgccgttctcactatcaaactaccatgaagggcaattctttgagaggttccacactgatgaagcctactgccagccaattagccaagcaaaacagaccggcacagttaaagaatttgacacagaataaaaagtcagtgggagttataagagagagaagtaccataagctcaaacgattgcaattaccaatccactaaaagacaaagattagagaatgggcatctcaacaaggctgctgctactgctatccagcatgagtttattcataaaaatcatgaaaagaatgttatgaatcaaaacatggatcagcccactgttctgcccagattgaagattacaattcctagatcacctgatttggcaacaaagctaagagcagagaggtcaaaagctcaaagagcagtgccaactcttccaaagcagttaaatgacttaattcaacgggttgcaccctctgctcctacagttcaagtcgcaccaactagaaaggtagttcaacctttttgggctactggtcatcaacatgcaagcagacaacacgaggatgttgggtcaaatgtggcagcatgtacatccaatcatgcaaggcatcttaagagcgtagataacaaaaccgaagataccaggcatggtctgtttaaatttaaagcccgtccgttggatagaaagatgttagagaacaaaggtgatggtgtatttcgatgtgcaaaaaggaatacaactgtgcctaaggaatttaacctatcaacaggcaggaaagccaatccagctccgttgtctgaactatttaacaagctttctttaactgcgggtgcacatcaaaatcgtggagtagggcgtcagatcagggatctgccaaattatatcactaccaagactcatgtcaatgaagaagtagaatatacaggatttctcttttgatagttagtgcctggtttaggctcaacgtcaccccacccgcacagagaccaagcgtttgttttggtgttttggacagttgactcagaaggaagctcgcatcctcctaacctgctcatacattatttgagattaagagcaccatcgctgaggtcgagtgtggaggcactgattctcgtctcggtcatagagttgcttctgctgagcatgttacagttatctcagctgcccggagccaatgagtcatggctgtgatggggtggtttttgtacagcaagagataaaccatagtgtaggggcggctcactcggtggatctgcagccctgcgggctcccgcagagactccaaagtgtaacgtattgcaatcgtcttggcaaggtcgtgctcttcttttcgtctttg

SEQ ID NO: 152176 - DNA, 315 bp, Zea Mays
gattaacctgatcaagcttgctgattatgttaagccgaacatctggaaattcatccttcagcaaagagagaaaaattggaagaagctgttccatggtagcatcctgccaaaaaaaaggagccattcccataatgactgaggctaaagctgaacgaacatgctgggatgaatctgatgacaattcctataaatgcaattagcatgaactagttaattcactcagaaaaaaaatagcaacaaaacgaataattgctttgcacccaccttaacgcacggaagaatatgttggattgaaagctgtggatttaatatgcg

SEQ ID NO: 152177 - DNA, 1329 bp, Zea Mays
aattgctctacgtgaacgaagcttctggaaactcgctggcccgatggcatcggaggccgcgattgctcgtgcgcagtgcctccttcgcttccgccgctggtcgccactgccgcttcttcctctcccttcccctcccgctaccacacgagcagcttcctgccgccgcagcgtacgcatggcctcgtcggacggctctgccgcggccctgcccagcgctaccgtcgatgtgcccggcgccggggcccctgtcctcgtcgtgggcgcgccggggctccccgaggctgacttcaggaacgcggtggagtcgtcgctgttcaagcagtggctgcggaacctgcagtcggagaagggcgtcctcacctacgggaggctgagcctcacgcgggttctcatccaggtgatatgcgtttctgctgctggctcgtcgaattgttgttgtgctctgtgattgattgattggatgacgtttctcaatttgcgctcgattgcgtctggatctgcgatgcagggcgttgacatgttcgggaaacgggtgggctttctcaagttcaaggctgatatcgtggacgaggaaaccaaaaccaaggttccaggaattgtctttgcaagagggcccgcggttgctgtgttgattcttttggagtcgaatggagaaacatatgctgtgcttaccgaacaggttagagttcctattggaaaattcctgttggagctgcctgctgggatgctagatgacgaaaaaggtgattttgttggcaccgcagtccgtgaggtggaagaagagactggtataaagctgaatatagaagacatggttgatcttacggcactgctggaccctgctactggaggtcgaatgctaccatcaccgggtggctgcgacgaagagattggcctgttcctgtacaggggccgcgttgacgaggagaccataagatcgctccaggggaaggaaaccgggctgcgcgaccacggtgagctgatcaagctgcgcgtggttccgtacagcgagctctggcggtcgaccggcgacgcgaaagcactctccgcgatagccctgtacgagatggccaagagggaaggcctgctgccgcagccgacgccgtcggccaacttgtgaagacctgctagcactttaaaacagtggtggccgtcatgcctgtaaaatggaaggaggaacgtcactcgcgaaaccaaatcatatatatctctatctcttcgtttggtataacgcgcttaagcttgtctgtttgtgttatgtatacatatactaataatttaaaaataaaagtataatcgtgtttaaataaatatttcatttaatcctat

SEQ ID NO: 152178 - DNA, 1218 bp, Zea Mays
aattgctctacgtgaacgaagcttctggaaactcgctggcccgatggcatcggaggccgcgattgctcgtgcgcagtgcctccttcgcttccgccgctggtcgccactgccgcttcttcctctcccttcccctcccgctaccacacgagcagcttcctgccgccgcagcgtacgcatggcctcgtcggacggctctgccgcggccctgcccagcgctaccgtcgatgtgcccggcgccggggcccctgtcctcgtcgtgggcgcgccggggctccccgaggctgacttcaggaacgcggtggagtcgtcgctgttcaagcagtggctgcggaacctgcagtcggagaagggcgtcctcacctacgggaggctgagcctcacgcgggttctcatccagggcgttgacatgttcgggaaacgggtgggctttctcaagttcaaggctgatatcgtggacgaggaaaccaaaaccaaggttccaggaattgtctttgcaagagggcccgcggttgctgtgttgattcttttggagtcgaatggagaaacatatgctgtgcttaccgaacaggttagagttcctattggaaaattcctgttggagctgcctgctgggatgctagatgacgaaaaaggtgattttgttggcaccgcagtccgtgaggtggaagaagagactggtataaagctgaatatagaagacatggttgatcttacggcactgctggaccctgctactggaggtcgaatgctaccatcaccgggtggctgcgacgaagagattggcctgttcctgtacaggggccgcgttgacgaggagaccataagatcgctccaggggaaggaaaccgggctgcgcgaccacggtgagctgatcaagctgcgcgtggttccgtacagcgagctctggcggtcgaccggcgacgcgaaagcactctccgcgatagccctgtacgagatggccaagagggaaggcctgctgccgcagccgacgccgtcggccaacttgtgaagacctgctagcactttaaaacagtggtggccgtcatgcctgtaaaatggaaggaggaacgtcactcgcgaaaccaaatcatatatatctctatctcttcgtttggtataacgcgcttaagcttgtctgtttgtgttatgtatacatatactaataatttaaaaataaaagtataatcgtgtttaaataaatatttcatttaatcctat

SEQ ID NO: 152179 - DNA, 1246 bp, Zea Mays
aattgctctacgtgaacgaagcttctggaaactcgctggcccgatggcatcggaggccgcgattgctcgtgcgcagtgcctccttcgcttccgccgctggtcgccactgccgcttcttcctctcccttcccctcccgctaccacacgagcagcttcctgccgccgcagcgtacgcatggcctcgtcggacggctctgccgcggccctgcccagcgctaccgtcgatgtgcccggcgccggggcccctgtcctcgtcgtgggcgcgccggggctccccgaggctgacttcaggaacgcggtggagtcgtcgctgttcaagcagtggctgcggaacctgcagtcggagaagggcgtcctcacctacgggaggctgagcctcacgcgggttctcatccagggcgttgacatgttcgggaaacgggtgggctttctcaagttcaaggctgatatcgtggacgaggaaaccaaaaccaaggttccaggaattgtctttgcaagagggcccgcggttgctgtgttgattcttttggagtcgaatggagaaacatatgctgtgcttaccgaacaggttagagttcctattggaaaattcctgttggagctgcctgctgggatgctagatgacgaaaaaggtgattttgttggcaccgcagtccgtgaggtggaagaagagactggtataaagctgaatatagaagacatggttgatcttacggcactgctggaccctgctactggaggtcgaatgctaccatcaccggtaactggccaaaacttctattcacctgggtggctgcgacgaagagattggcctgttcctgtacaggggccgcgttgacgaggagaccataagatcgctccaggggaaggaaaccgggctgcgcgaccacggtgagctgatcaagctgcgcgtggttccgtacagcgagctctggcggtcgaccggcgacgcgaaagcactctccgcgatagccctgtacgagatggccaagagggaaggcctgctgccgcagccgacgccgtcggccaacttgtgaagacctgctagcactttaaaacagtggtggccgtcatgcctgtaaaatggaaggaggaacgtcactcgcgaaaccaaatcatatatatctctatctcttcgtttggtataacgcgcttaagcttgtctgtttgtgttatgtatacatatactaataatttaaaaataaaagtataatcgtgtttaaataaatatttcatttaatcctat

SEQ ID NO: 152180 - DNA, 984 bp, Zea Mays
gcttcttcctctcccttcccctcccgctaccacacgagcagcttcctgccgccgcagcgtacgcatggcctcgtcgctgttcaagcagtggctgcggaacctgcagtcggagaagggcgtcctcacctacgggaggctgagcctcacgcgggttctcatccagggcgttgacatgttcgggaaacgggtgggctttctcaagttcaaggctgatatcgtggacgaggaaaccaaaaccaaggttccaggaattgtctttgcaagagggcccgcggttgctgtgttgattcttttggagtcgaatggagaaacatatgctgtgcttaccgaacaggttagagttcctattggaaaattcctgttggagctgcctgctgggatgctagatgacgaaaaaggtgattttgttggcaccgcagtccgtgaggtggaagaagagactggtataaagctgaatatagaagacatggttgatcttacggcactgctggaccctgctactggaggtcgaatgctaccatcaccgggtggctgcgacgaagagattggcctgttcctgtacaggggccgcgttgacgaggagaccataagatcgctccaggggaaggaaaccgggctgcgcgaccacggtgagctgatcaagctgcgcgtggttccgtacagcgagctctggcggtcgaccggcgacgcgaaagcactctccgcgatagccctgtacgagatggccaagagggaaggcctgctgccgcagccgacgccgtcggccaacttgtgaagacctgctagcactttaaaacagtggtggccgtcatgcctgtaaaatggaaggaggaacgtcactcgcgaaaccaaatcatatatatctctatctcttcgtttggtataacgcgcttaagcttgtctgtttgtgttatgtatacatatactaataatttaaaaataaaagtataatcgtgtttaaataaatatttcatttaatcctat

SEQ ID NO: 152181 - DNA, 1356 bp, Zea Mays
tgctgcaaactgaatttatcattgcgtgtgacttcgaagcgtcaagcatcctttgttcaggccaacgacatctcagttaaaaagaggacataactgtggagcatttcaagtagctccaggcaaagcaataagacaaaaaaaaagtacaaggaaaaaaggtactaaaatagtttctttggctacatgcaagtatggatcctctaaaacgcaaaatgagcaccatcacactcttaccaaccttctgtttaatttcaaatggacctgcaggtctccattccgacgttaggtagatccagttattctccgcccccgcctcagaggtcactcgcagtcccgcaccagacaatacatcaacggaggtggtgcccccatcgcatagcagccgccaccaacgctgccaccgcctctaggacgtgcttgggctgatgatgtcgaaaagaacagaaacgttggccggatttcagagtacatacaggcatcacagcgcttgcagagcaaatagccgagcgctcgaaacggtcctgctgttattgagacaaacacaaacggcgaggacaaaagaaaaccacctattgatcggcgcagatagagtcaagcagctgggccgtcccctccccgacctccacgttctcgatcttcagccgctgccgcatcccggggaacttcttcccggcggcagcgtacgtccgcaccagcggctcgaacaccggtgcgcccagatccttctgcaccttcttcagagcccccacgtaccgctcggccccatcgacgtccttgttctcctcgaagtagctcatcagggtctccgtcacggcgggcggcggcacccaaatcctgccgctgctgtgccccttcttcatcgcgcggtccgcgcaccaatgggccatcttgagatcccccgtcttgaggtaatgctccatgaagatctcccatgtcttggcgttcagccttccgccgcgcatcttggcacgcttcttcatggcgacagctttgtcaagcatgccctcggtaatgtacgccttgatcatagcgtttgctacccggatgtcatattttggatgcttcggctggaggtcctctgctgtctcgtccccggtttccttggtgccagactgattattaggcgggttacttggagattttggatctgcaccaggtgtattatctgcccccgagccctttgtgttggtcttgggtggatggatgtgtcgggcttcccactccttaaaacaggcttcggcagcagacaggtccttcaagttggccaaaacctgaatcatgttaaggtagctcatgtttgccattctagggttatcccgcttcagcgatcgccagacacggtgaacttccactaag

SEQ ID NO: 152182 - DNA, 1943 bp, Zea Mays
caaaatcgtattaagaattccagccccggagacaaaatttggcatacacacctcattatcagattcatatcagcaaacatctcacagaatttgtcccgtgttcaaatcctactcccatgatcagatctaacaacaggaacacccgtagcacacgacttcacggggcccaaaccgagatcacgaagtgagatacacaaaggaagggctgaaccttgagcgacgggcggtagagcgcgttccgccgcatccggcggacgcaaacgcccacctcccacttgaacgcccgcttccggctgtcgaggaagccatccacctcctctcgaaccgcctgcggcgtcgaccccttccggaacagacgccggtacagcgcctcctccacgtacttcttggtcgacctccgcgccacgtccttcatccgcgtcgccatctccgcctccgccctctcctcttcaccgccggcgtctcgggttttgagggttttggcggcggcgcggggagaagctctcgcctcactactccccagtcccactcgtgtgatcgcgttgggcttttctgggccttgatgggccgtgggctctgaaattacaagccgtcggtttctccccattagccaggggtaaaacgggaaagacggagaacgaagaggaggggaggggggcgacgtcgccggcggtcggaggcgacggggatgagtcggaaggaggcggagccggcaggacaggatgggtcttcttcgtctgccactgatgggggaggaggaagtggcagtggccgggagctggcagatgcgctggcgcggcgacgtttgtaccgggaggtgacgctggcgctgcactcagggttgcgcgacgccaaggcggacttctccttcctccgcgcgcgtgggctccgcagcctgctcggattccttcgctccaccgcctccgcggccgacgacgcgctgctgctccttttccgccactcccaatccatccccgatctccaagttattcctgttctctttcagaattcgttgcatcaaccaaagcaagatcctgttgtgacattggatcatatatttggaacggaaccaatgaagattacaagcccccctacaggttctgaaattgctcttgcacttagagtcttggaaggttgttgccttttatatagccgatgcacagctctggcccacaaatacaaggctgtgaaggtactcttgaatatattagccagccgaggtccaactgagcaaggagtttgcttggacacactgatatcgctgatgttggactcaccctccaatcagatggatttcgaagaatacagtggacttgaaaaggttgctgaacttttaaaggatgtgcaagtggaaaagcatataagattgaaatgtggggaattcctattgttgctcattggacatgtttttgtgaaggaaaactctcccatacatgaacaaatgaaaaatctgtttggtgagcagtgcgcatcacttatatgggcagcaagccggttcggctccaccttggatgcagagcaaaggcagacgaccttgcaaatacaagcaatgagagttgtcgaatccttggaaccctactaggactggtgcattcatctgtgtaacttacgggtgatgacaatttgatgtctctaatctgagctgcatgctccattttgttcatgcaagctttgttgtcattctcttctgtgtaaagccattcttatgctactctttttagtaagctttgttaaaaggatcgtattagttccatttgagaacaatgcattagggagacactaggaaaacattaaaatatccattttgttgtggtagatttgagctgttgtacctgtgattcaaataaaagtggttagtccaaagtgctagtgaatgttattgatcccttaactgattaaactgaatacagtcggttcttgttcagtgcattggcacgcattgc

SEQ ID NO: 152183 - DNA, 1982 bp, Zea Mays
gatatttatcccttcccccgttctctttcttctcaaccagtatcggaacgcccaacagggaaaaaaacgacgcccagagcgccgggccatcccgcccatacctacgttagcacgttcgctgggctccgatctctccgccgccccaaacccgacggcccccaccgtccgacctaaaccaataatacggcgaaatagctgccaccgcaactcctggtccgacctgacgtgcatagcgccagggctaccgaagttcgcttccgattcgatctccacagctccgacccgaccgccgcatctccgctcttactcgaaggtggaggtctccttcagccgccttctacgtcatcgcaactgccggggtcggtggctgcctcgagcaccgtggcacctcacggaaccttacagccttacagtttcatggagtgtggacttctgttgcgaacaaacatggagaaaagatatctgtgatctcaactgaaatatggagccagtcaaactagttgaggggtacaactttgatgaccatactacaagtgatgtccgtgtttgctttaaactgattgatgagcagccggaatggttttcctgccactcatctgttctttcccaaaacagcaagtatttttcagatcggcttggtcaaaatgatatccgctctaatagttgcgttgaaattgaatgcccaagagctcagtatgaccattatgtcaagatgttgaagttgatgtatcttcccggggaatcaattgtagattcatttgattctgttaaatcagctctgggtgttcttcgagcatcaaattcactcggatgcgagttggttaccaaaggatgtattgcatacattgaagctgtcccatgggatgataatgaggaggaggagatattagaagtagctcggagccttggctcagatgcagtgtctctattagctcgtctgcatgccccaagtgcagacgctgttaagaatgtcttcatctctgccatacgatttgctacgtgcatggaaacgctgttccctccttttctggatgacctcaagacttctgctcaggagcaaactgactttatgatccatgaagacgatgaaactgctctggttatgatggatgaagatgtcagatctgtggtgcaggaaggtataacaaaactgttatctggacttaggaccgggcttgatctgttggcaaccgagtttgatcaatcacctgatcaagcagagaaagggattctgtgtagcttagctgacatcgactgggtagctaatctgtcaaccaagattgagatgacgcacgcctttgtttctggctggtcagaaatgtcgggccatattctttcagtggttcaggacagcaagtatagctcaggcttgtgggctgtcaaggcaaagcttatcgaagtgactggaaaggccctggacgctgttggctacggcacagtggttctcccggcaccatctagattccatctcctgaagacatggcttccttatatccaaacgacaaaacgttcgctggatggaaatagcaagggcgaaatgtctctgcagatggattcagacatgtggcagaatgtggagagcgcaatagtctcgatggtgctagcgctgccgtctgatgaccaggccgatatcctgtcggagtggatgaagaacgcagagcagttcaggtatcctgatctcaccgaggcattcgaggtgtggtgctatcgcagcaaaacagcaaagagaaggcttgtgggaggactgaatgggtctagctctagcaatcccacagttagctcctaaggctactgttagtttggcctttttgttgtagcccctgatcagctaaactggccggttggtaccaagtatatgcagccaactgtatccccatcgttgtatgctgtaaagcaactgctcatgttttatatacttcagtttcattgcagtgccagcttatgttcggttcagtaaggaaagtagcctaatcttgtttcat

SEQ ID NO: 152184 - DNA, 168 bp, Zea Mays
atgaggccgtcgcggtcgcggatgagacgggtccggacgatgccggggtggacgcagttggccgtgacgttggcgcccatctcgctgagccggtcggcgagcgctctggtgtgcaggacgttggcgagcttggacagcgcgtacgccctcgtcggatcatacggtctg

SEQ ID NO: 152185 - DNA, 666 bp, Zea Mays
atgtcaacgtcgccgctgcggcccaagaacggcgtcgagctggaggtgacggtgctgtcggcggactcgctgcgcctgccgacgtcctactggcctctgccgcggcggctgcggccgtacgtgaccgtgtcgtcgccggacgcgctgcgcagctcggcctacagcacggcggtggcgccggccggcggtacgggtacggacgagcacgcgtggggcgccacgctcgtcgtccccgtgggcgcgggcttcctcgagggccgcgccgacgtccgcgtctccgtgctgtcggagcccgccgcctgctgccggctcgtcggcgccacgccgctgggctggtgcggcatccccgcggccgacgtgctcgacggcctccgcccgccgcgcgcgctccgccgcctcagctactcgctgcgctgcccgcgccgctgcgggggcgggggcgcacccgggcggggccacggcgtcgtgcacctcgccgtgcgcgtgctcggcctgcgcgacgacgcgccggcgaggacggctgcgacagcgccgctggccgcggccactgcgccggtgcagcggggctggtgccgcgtcgcgatgggcatccccgtgtccggggccgcgtcggccgtcgtcggggtgcccttgtcgtcgtggggcgccagcgccacgtcacggtga

SEQ ID NO: 152186 - DNA, 240 bp, Zea Mays
atggaggcgatcagcaacaccaggttagccctcgggatcctggtggccgacagtgtggtcctcgtcggcgagaaggtgacatccaagctcttccaaatctcgcgctccgctgatgtccggaggcctccgcccctttgggatctccttcttattcacaaggtgggacaagcaccacggcgtgatgggaggccggacttggagcagtgcgttggggaacggcgtgatgggaggccgagctag

SEQ ID NO: 152187 - DNA, 512 bp, Zea Mays
gagcatgaagcctgatgggtacttagatctcacaagcttgcatggtggatgcccagttataaaaggcaacaaatggtcatcgacgaagtggatgcgtgttcatgagtacaaagtttagatacaaaaagacacagaacttgaggtacgacattttgcttagaaaccaaaatactacttttttagtttgcctactgcaaaaagtaatgctgggcctctaccttgcaccaacaatatccccggcatacattgaaatgctcgccgtcagatttgaagatacatttcaaattcattggaattttattgactctatgcaggtcatgcaccggttcaaatgagtggacattttggcacatgtcgagagttttgattttccatagaggattaatttacagttcatcttttctagctgttactgaggcaatgtcttaggctccgtgttgtacattaacatgttaggctgatgaacataaacgataaacctgatgattcagagatggacgtgttgggtgtct

SEQ ID NO: 152188 - DNA, 582 bp, Zea Mays
tcagtataatactattataaaggttgttttattaattaagtcagaatgggattgcagaagaagatacatagttgtctgacgcattgctgctactcgttgattccttcccgaccaccgctttgcgcccgccgttgtttcggacattgacagacaggctcacagccgtgtgccatttcatatagagccatctagttgataatttggtcaaaaccaattacctgcagggccaagaaaatgaacagaagtatagaattactatcacacatgaatggtcgttgatcgctcacaagagacttatgaatacttatatatattgaagagacgagaaggagcagggagaaaaagaagaaagctagctttacctgtatcaaatcgctttctttatcaatattatgccaaaaccgttagtgaattagaccatgaaaaataccagtgtgaaactaataacagaatagtgataaactacttcaaaagacatgaaaaaaggccctcttctttccagcataattcattccactgaattgttatttctgttatgttaatagttgaattggaaaggaatgaaagtaaaatgaaatcaac

SEQ ID NO: 152189 - DNA, 787 bp, Zea Mays
aggatggtggtccaacgatgtgctggtcagctcgtccaggagacgtgggcggcagttgcggctacggcgggggcggcgtcgacgggagacggagatgtgagagcctccgtgccgttggagatggttgtggtggggcatggaccgggagcgaggggaagaagtggggcgcgtcacggagctggatcctactcgacgcggtcggggacgagcaggtgctggacgccgataagtacgccatcatgtgccacgtcgacatcaacgtgcgtgacctccgcatcctcgacccgctgctatcctacccctcagcgaggtggcgttgctgctgctgccgatcgatcgtcatgggggtgggacggcgcgcgctcggcggcgccagcccaagctccagctccatgccacaagtcttcttgcttgctggcaacgctgcgagctttgggacttggatgctctctgtttcctatagaaacacgcgcgctggctgctgcacttgcacggagggagaaagcttgggattcagatgcgatggatggcggacgtgggcggggataagcagatgctccgcacagatccactccctttggcaggagtcaccgtgatgaagggccggtgatttgaggatggagcgcgggattcgtcaccatagaaggaagcctccgcgggcgggattcgcggcagatttggcagactggcgattcacggatccatggattcgtcgatccatctcaagtcgcacaaggaaaggggcaggcaggcgctgttgggggaggggggcaaggctgccatgccg

SEQ ID NO: 152190 - DNA, 2128 bp, Zea Mays
ccgtgtctccctcccctcggtgtcgtcaatcaccgcacccgctgctgctagcccgcaactccctcgcttcctgcacccacatccccgcggcgctacctgcctacccagatcccgctcgccggtggtgccctcctcagtcctcactctcccgccgctggcgccgccggagcgagggggactgcccataccctactaggacgagcagtaggaggcggaggggcgagatccggcggaggccgccccgatgggggacttcaatgtggcactggtgatcgtggcggcggtggtcagcgtgctggtgctgctcgtcagcgtctaccttctcgtcaactaccagcaccccgacgacgtcaaccaggcctacttccccaagctcgtcgtcgtgctcggcctcaccgtcgccgtcctctccatcctcatgctccccgccgacgtcgccaaccgccaggcatgccgcaaggccgtctacaacggcgcctgcagcctcacgctccccatgaggacgctctggctcgtcgtttacatcgttgacgccgtcctcgtcttcctcgtcatccccttcgcaatgttctactacgagggcgaccaggacaagtccgtcgggaagaggctcaggaccgcgctcatctgggtcgtcgcgtccgcggtagtgtgcggcctcgtcctcggcatcctatacggacttgttggtaaagtggacttcactgtcaggcacctatcttcctcggtccagacatttccaaactcattttctggattctcaagtggccagccgtgcattagtccattgactcgtcagtgtgcggcttctactgcaccggctaactcgcaaacaacttggacaatgcgtgctaccttccctgaatatgtggttgctcttactacaattgttggatctgtgcttttcacgatatttggtggtgtcggaattgcctgccttccattgggacttatattctcatttgttcggcgtccaaaagctgtaattacacgctcacaatatataaaggaagcaactgaattggggaagaaggccagggagctgaaaaaggcggctgaagctcttcaccaagaagaaagaagtgggaacaagggccggaaatggcgaaaaaacgtgaaggctgtagagaaggagttactacttctggaagatgacatgaaggctctagaagagatgtatcctcaaggagaacaggcagaggctacttgggcattcacagtccttgggtacattggaaaacttatatttggtgttgttgggttaattgtttcaatagcttgggttgcacatatcgtcatatacttgttgattgatcctcctctatcttctttcctgaatgaagtcttcataaagttggatggtgtttggggtctccttgggactgctgctttcgcattcttctgcttctatctccttattgcagtgattgctggggagatgatgcttggtttgaaacttgttttcatcacaattcacccaatgaaatggggaggcactttaatgaactcctttttgtttaatgttgggctcatactactttgctccatcagtgtgattcagttctgtgccacggcttttgcctattatgcacaagcaactgctgctcaagagatctttggccacacattgcaatcccttcgtggaattaagtatctttacaagtacaatgttttccagtatggctttgttgctcttgccatcctcacactcttctactatgctatatttgggtggagaaaaaagaagccaacagggaggttccagctctcaaaatgattcatcacatttcccccctgagtgatagttcagttagcgtcgtacggatgtatatgaacgaaaccaaatcttttcaaagagctgaggagctgcaaatggtgtatattatcaactacgtgacctcaaagccgagaatgttggttaccacggacatggatgttagaagtagaacccagttaactttgcagcgtttggtgtgtttgggggcgctttgccgcccccagttcgatattcatttcttggttgtgtctggagttagtcagttcattgcttttgtatgtattatatactgtgattacaacacaaggttctaggttgtattaatgatatgtcctgatcattcctgtgccc

SEQ ID NO: 152191 - DNA, 629 bp, Zea Mays
cgaaaaatcatcttaatctaactaccatacttttcctgccatatgtgtgcagtgtgattcagttctgtgccacggcttttgcctattatgcacaagcaactgctgctcaagagatctttggccacacattgcaatcccttcgtggaattaagtatctttacaagtacaatgttttccagtatggctttgttgctcttgccatcctcacactcttctactatgctatatttgggtggagaaaaaagaagccaacagggaggttccagctctcaaaatgattcatcacatttcccccctgagtgatagttcagttagcgtcgtacggatgtatatgaacgaaaccaaatcttttcaaagagctgaggagctgcaaatggtgtatattatcaactacgtgacctcaaagccgagaatgttggttaccacggacatggatgttagaagtagaacccagttaactttgcagcgtttggtgtgtttgggggcgctttgccgcccccagttcgatattcatttcttggttgtgtctggagttagtcagttcattgcttttgtatgtattatatactgtgattacaacacaaggttctaggttgtattaatgatatgtcctgatcattcctgtgccc

SEQ ID NO: 152192 - DNA, 1893 bp, Zea Mays
atggaggtggtgctgggttccgccgctcgccgctgcctggcttccactgccgtcgccgccgcgcgggctctgctgcagaggatgagcaccgcgcagcgattcgacatcctcccctacggcttctccaagcgggcgagcaaccgcggcgatggctccggcgccgcgccgcgcgtcgcggcgcccgacgccaggagcggtggcggcggcggcacctgctccttccgcgcccacccggcgccgccagtcacgcaggccgtttcctggggcgccaagccggagcccggcggcaatggcgctgcgtgggagaggagcagggccgttaagcgggcccatgaggaagacgcaggcgaggagtacggcggccccgtcgttcgcgccaagcggacgaggatgggcggggacggggataaggtatggttccatcgatccattgcagggacagtgcaagcggccgggtccggcgacggacacgaagccgaggaagagaaggccttcctggtgccgagcgccgcggcgttcccccacggcatgtccgccgccgccgcgggcccgtcgctggccgtggccaagaaagaggagttcagcaagtcgccgtccaactcgccggcctcgtcgggcggcacggacggcggctcgtcggctgtcccgtggccggagcagctccacgcgcagaacggcgccgcggcgcgggtggaggccatggagctcgtcgtcgcgctcaccgcctgcgccgactccgtcgccgcctgcaaccacgacgccgccaactactacctggcgcggctgggcgagatggcctcccccgcggggcccacgccgatgcaccgcgtggccgcctacttcgcggaggcgctcacgctgcgcgtggtgcgcatgtggccccaggtgttcgacgttagcccgccgcgcgagctcaccgacggcgccgtcgccgccgacgacgacgcgacggcgctgcgggtgctcaacgccgtcaccccgatcccgcgcttcctgcacttcaccctcaacgagcgggtgctccgcgcgttcgacggccacgaccgcgtccacgtcattgacttcgacatcaagcaggggctgcagtggccgggcctcctccagagcctcgccacgcgcgtggctcccccggcgcacgtgcggatcaccggcgtcggcgagtcaagacaggagctgcaggagaccggcgcgcggctggggcgcgtggccgccgcgctcgggctcgcgttcgagttccacgccgtggtggaccgcctcgaggacgtccgcctgtggatgctccacgtgaagcgcggcgagtgcgtcgccgtgaactgcgtcctcgcggcgcaccgcctgctccgcgacgagaccggcgccgcggtggccgacttcctcgggctcacgcgcagcacgggcgccgccatcctcctcctgggcgagcacgaggacgccctcaactccgggcggtgggaggcgcggttcgcgcgcgcgctgcggtactacgccgcggcgttcgacgccgtggaggcggctgggctggcggacgccagccccgcgagggccaaggcggaggagatgttcgcgcgggagatccgcaacgcggtggcgttcgaggccgcggaccgcttcgagcggcacgagaccttcaccgggtggcggcagcgcatgcaggaaggcgggttccagaacgccggcatcggcgaccgggaggcgttgcaggggcgcatgatcgcgaggatgttcgcgccgggcaactacagcgtgcaggtgcagggcgacggcgaggggctcacgctccggtggatggaccaggccatgtacaccgtgtccgcgtggacgccggtcagcgacgggggcagcacggtgtctgcgtctgtctccaccacagcatcccattctcagcatagctga

SEQ ID NO: 152193 - DNA, 1253 bp, Zea Mays
aggaagcccacttgcagtgcgggcgcggatgtgcatttcccttttcaacccacttgcagtgtcgactgggctaccgcggtattaccgccgccgccgccgccgccctacgccggttaccgaggtcttcgtcagccccttcgccggcggcgagcaccctttaggtattcctttcccggctcccgctgcgcgaaaccggccacccaaatttgtccttcactgggtgtctgggtccgatcctggcctggctgaaggggcttccagcaacacacacgtgggcgaggttggtgatagaggcaggtaggagcggctccgatgcggaccgcctaagatgagcccattacgttctcgcgtcggcttacactggctcccacgccgtgggtggatgtttcgccaggccaagacgagcatccatgcttgtcgcgactggtgctgatgcctggttgcaggcctttggcggaccgacgttgcttcctcgggtcaaggttttggcctctcacgaagaggatgccaggaaagagaatgacatggtggaggagattctaatccccaagcaaacaattggtggcaattggtttgttccgtttcgtgctccatgagacatgcagctcaccttcgtcgtcgctccctccgtcaaagctttgctccactacctatggcaaagagttggataaagtgactggtcaaaagagatggaagggttctcaaattagcgctgctacctcaggtatggcagaattatcaaaacaggcacttggctctacggaggattgtctgctcgagtctctgatgggttgcttggcatctccctcttctcttggagctggcgggagggggccccacatacagggaacttgagctacctgcctgttgattgatatcttacttccacagaaagtttgagaaagagaggaagtcgatttgcgttttgcatggaatcattctttaccgggggaaccatttcacatttggtatgtgcctgtttggtggaatgcgttagcatgtatctaaacttgtgcgatgggatttaaacctatcaataagctactttatccattgtacctagaagtatctttgtaccttacatctaaaagtttagcatcttagattcaaatgcatcactaaacttaggccctgtttgatttagtttttttctgaggaacttttctgagaatttgggtaggaagaatctgagtatcgtgtaaattacatgtagaggaagataaaagaatccatagggtttagtacgtagaaaa

SEQ ID NO: 152194 - DNA, 1134 bp, Zea Mays
aggaagcccacttgcagtgcgggcgcggatgtgcatttcccttttcaacccacttgcagtgtcgactgggctaccgcggtattaccgccgccgccgccgccgccctacgccggttaccgaggtcttcgtcagccccttcgccggcggcgagcaccctttaggttggtgatagaggcaggtaggagcggctccgatgcggaccgcctaagatgagcccattacgttctcgcgtcggcttacactggctcccacgccgtgggtggatgtttcgccaggccaagacgagcatccatgcttgtcgcgactggtgctgatgcctggttgcaggcctttggcggaccgacgttgcttcctcgggtcaaggttttggcctctcacgaagaggatgccaggaaagagaatgacatggtggaggagattctaatccccaagcaaacaattggtggcaattggtttgttccgtttcgtgctccatgagacatgcagctcaccttcgtcgtcgctccctccgtcaaagctttgctccactacctatggcaaagagttggataaagtgactggtcaaaagagatggaagggttctcaaattagcgctgctacctcaggtatggcagaattatcaaaacaggcacttggctctacggaggattgtctgctcgagtctctgatgggttgcttggcatctccctcttctcttggagctggcgggagggggccccacatacagggaacttgagctacctgcctgttgattgatatcttacttccacagaaagtttgagaaagagaggaagtcgatttgcgttttgcatggaatcattctttaccgggggaaccatttcacatttggtatgtgcctgtttggtggaatgcgttagcatgtatctaaacttgtgcgatgggatttaaacctatcaataagctactttatccattgtacctagaagtatctttgtaccttacatctaaaagtttagcatcttagattcaaatgcatcactaaacttaggccctgtttgatttagtttttttctgaggaacttttctgagaatttgggtaggaagaatctgagtatcgtgtaaattacatgtagaggaagataaaagaatccatagggtttagtacgtagaaaa

SEQ ID NO: 152195 - DNA, 1363 bp, Zea Mays
aggaagcccacttgcagtgcgggcgcggatgtgcatttcccttttcaacccacttgcagtgtcgactgggctaccgcggtattaccgccgccgccgccgccgccctacgccggttaccgaggtcttcgtcagccccttcgccggcggcgagcaccctttagcaaacaattggtggcaattggtttgttccgtttcgtgctccatgagacatgcagctcaccttcgtcgtcgctccctccgtcaaagctttgctccactacctatggcaaagagttggataaagtgactggtcaaaagagatggaagggttctcaaattagcgctgctacctcaggtatggcagaattatcaaaacaggcacttggctctacggaggattgtctgctcgagtctctgatgggttgcttggcatctccctcttctcttggagctggcgggagggggccccacatacagggaacttgagctacctgcctgttgattgatatcttacttccacagaaagtttgagaaagagaggaagtcgatttgcgttttgcatggaatcattctttaccgggggaaccatttcacatttgcacaggcagtgttctagcaagacaacatttgtgcacaagagaaagtacgcatcaaccccgcatgttggtcgggcagcaagggcattatccagaaacagacatgtgagatcgtgtgttttcatcagacaaagcagtgaaaaacgatactggtatacaggcaagcgtgtgcaagtccttacagcatggtaggcatacggcggtttccaaaagaaagcagtgaaaacttctggcgcatgctgggtcacagctgatgttctacttcaaaattgtgggcttgaaatcaagagacgcactgtgttgttgcaatcagaattgtgggcttcttggggcacattttgctcttgatttcattagtacggtggtgaatggagggcacattatgattttttagatcagaattgtggttccttgggctgccttaatgtgttgatttcttttctttatacgatgatagacatagagttgtctaattgtaggtacaaggtgctaaagccatcatgtttaccagtttgctacacgttctctcaatttggtagtaattgtcagtttggaacatgtaatctgagtgttagtcagtttgctacatgtagctgaatttgtgtcaatctgagtttggaccatgttatcaacttgtgtcaatctgccacctgtaagtggcgctgctatctgtttctgaattatttaattttgttcatgcatgtggcattggtatctgtttctgaattatttcgatttggttcatttaagtggaccatgtaatcttgcctctattcttttgaatccag

SEQ ID NO: 152196 - DNA, 121 bp, Zea Mays
gagaaattattttttattttaattttctgtttggttcaggtccttgttcttcctgatttagtattcaggtctttgttcttcctgatttagtattttattccttcacatgggacactgtcga

SEQ ID NO: 152197 - DNA, 1126 bp, Zea Mays
ctccatcgccgccctgccccgatcatctttgaccgacgacccggcctgcgtgctcctcagtcctcaccaccgtgcctttataactgacggtggcacgcgcgtcgtccttgcagctgcagttggcggcgtcatcgtcaccgtcacataaaccaactcgatcgatcgcgtgcgactgcgagccgtccgtccgtcatggcggacgtgctggtgggctccgagcgccgtgtcctcatcagcggctacgggtacggccttcccccgcagcccccgcccccgccgccggcagagagccagctgctcggccgcctcgaccagatcgacctccggctgcggcagctggaggagcagcagcagcgccgcccgtcgcacgccgacccggccccggccccggcccgccgcgcgccggcgccgcagcaccagcacaccaagtccctgccgtcggcgctgcaacacgtgcaggtgcggagcgacctcatggaccgcctcaacctgctggagtcccgcatcaggcagctcagcagcgagctggacctggacgtcggcggcaaggccgccggccacgccgcccaccagctggtgctggggacctcctcgtcggtgccgcaggtcgaggaccccgccacgtggtccgacctcgcgccggtggcggtggtggacccggcccctgctgcggcgttcggcggcggcggcggcggcaacgagagcaagagcaagcccgcggcggcggcggccggcgggagctggagcgccgtggagatcctgcagcggggcgcgcgccagctccaccgcagcaccagcagcaagcctaacgcgcccaccaaggtgaagaaactgcaagaaacaaaatgcgcgtgccagaaggagaagaggaaggcggagcgcagcaagacgagcaggcggtggttcatggttggatgctgaagaagtggaagttggcagtaacacgcatggcgatgaactaactgatcttggtcgatcgtgtacaagccatatatatatatatattttttgtattgtttttgtactctgctttgatctacttccgtccaccattagttgtaaagtattgtcatggtccatgaatgcagcatttttctcgtctatcaaatgaagaagaacttcctaa

SEQ ID NO: 152198 - DNA, 3266 bp, Zea Mays
tttcaccgcttccctcctccctctcctccgattgggcccaccaaccagggagagggtgagagggccccgccaccgtcaacaaaacaacccacccaaccccagtcacaacgaggcctgccgccctccggtgcgggccggtggtcggtggtgacgagcagacacgctagactagctcgctagctagctacctaggtagaagcaagcgctggaccagccatgacgcgccgcgggacgctcccgctggcgctgctgctactactgctggcggcggcggcggcaaccgtgtccgggcaaggccggcccgtgaccgacagcggcgcgcagacgccgcccacgccgtccagcttcacgcctaaagacagcttcctgatcgactgcggcgggacggcgcccctcaccgccgacggcaagtcgtacaagacggacgcgcaggccaaccacctgctctccgccaccgacgccatccgcgtcgccgccgacgacaaggccgacgtgccctcgccgctgtacgccaccgcgcgggtgtttaaggaggaggccgtctacagcttcccgctcaccgtcccgggctggcacttcatccgcctctacttcttcccgctcaagggcggcgacgtggacctcgcgtcggtgacctttagcgtcgtcaccgacgacaacgtcctgctccacagcttcaccccgggggacaagcccgtcatgaacgagtacctggtgaacgccaccgagaaccacctggcgctcaagttccagccgctcagtggctccgccgccttcgtcaacgccatcgaggtggtgaacgcgcccgacgagctcgtcaccgactcggcgctggccgtcgcgccgctgggcgagatcaccggcctggtgcacgacgcgtaccaggtcctgtaccggatcaacgtcggcggtcccgccatcggcccggccaaggacacgctgggccggcggtgggagaccgacgccgcgtacgtgcagtccaaggaggcggtgaaggacgtgtcggtgcccaccagcaccatcaggttccccgaagggacgtcccggctggtggcgccggcgctggtgtacgccagcgctgccaggatggcggacgccgacgtggggagccccaacttcaacctgacgtggaaggtggacgtggacccgtccttcagctacctggtccgcctcttcttcgccgacatcgtgagcaaggccaccaacgacctctacttcgacgtgtacatcggcgggcgcaaggccgtgtccgggctggacctgtcgacggtggccggcggcgagctggcggcgccctactacaaggacttcgtggtgaactcgtcgttgctggaggacggcaagctgagcgtccaggtcgggcccatggggcaggacacggggcggatcgacgcgctgctcaacggcatggaggtgctgaagatgagcaactccgtgggcagcctggacggcgagtttggcgtggacgggcagaaggccgacgacgggagcggtgggcgcaaggcggtggcggccgtcgggttcgccatgatgttcggcgcgttcgcggggctgggcgccatggtggtgaagtggtacaagcggccgcaggactgggagcggcgggagagcttctcgtcgtggctgctccccatccacacgggccagtccttcaccggcaagggcagccggtacgggtccaagagcggcaacaccttctcctccaccatgggtctgggccgcttcttctcgttcgcggagatccaggcggccacccagaacttcgacgagaaggccatcatcggcgtgggcgggttcggcaacgtgtacgtcggggagatcgacgacggcaccaaggtggcggtgaagcgcgggagcgcggagtcggagcagggcatcaacgagttcaacacggagatccagatgctgtccaagctgcggcaccggcacctggtgtccctgatcggctactgcgacgagaaccaggagatgatcctggtgtacgagtacatgcacaacggcgtgttccgggaccacatctacggcagcgaggggaaggcgccgctgccgtggaagcagcggctggagatctgcatcggcgctgcccgggggctgcactacctgcacacgggcacggcgcaggggatcatccaccgcgacgtgaagaccaccaacatcctgctggacgacaacttcgtggccaaggtgtcggacttcgggctgtccaaggacgggcccgggatgaaccagctgcacgtgagcaccgccgtgaagggcagcttcgggtacctggacccggagtacttccggtgccagcagctgacggacaagtccgacgtgtactccttcggcgtggtgctgctggaggcgctgtgcgcgcggccccccatcgacccgcagctgccccgggagcaggtcagcctggcggagtggggcatgcagtggaagcgcaagggcctcatcgagaagatcatggaccccaagctcgccggcaccgtcaacccggagtcgctcgccaagttcgccgagaccgccgagaagtgcctcgccgagttcggcagcgaccgcatctccatgggcgacgtgctgtggaacctcgagtacgcgctgcagctgcaggacgccaacccgcccgagggcgcgcggcagggcggcgacggggacgaccaggacggcgccgcggcggcgggcggcggcggcgctgtcgtacccgcgggcggtgccgtgcccgacgcgtccaccgccgccgccggggagctcttccagcagctcgccgacatgcaggggaggtgaggtcgatcgccggtcgtacgtcaaaactctacacacactgcacactgtacgtggcatggcaatctgactgagctcgtctcgtgcacgtcgacacatcgatagatgcatgtgtactgcacccggtgaaaatttgaaacgatgaatattcactagaacacaaactgaacagagtggtgagtcctacgtacgtacgtgtaacaactagcaccggtcgatcgatacaatattcttcaacctgacacgtggggtctgcactaccggcgacggacgagggtgagctcgtcatattctcaaatttccaatatttaatatacgtgtgtgcgataatgtatttatttgtaatttcgcgattgtgtaatacttgggggatttgctatgtttcggtcgcctctaaaatacactatatttttagacaacgatctttatcgttaattagttcatgagcatgtaaagctaagattcattttaacgcagggaaaaaaaacaagaacgaa

SEQ ID NO: 152199 - DNA, 447 bp, Zea Mays
atggcgcccaagcccagcttctttctccctcagctcccatggtgctctctctctcctgctcgctctctggtgtcgcgcgtcttctctgctcgtcggtgctcgccacgggagacggcgctcggtcgcccaaccttcctgctcctccctgctatcgtgtccctcagcgccggtcgcttcttcttgctattccatgccgcggcaatcgccctgctgctccagtgcgcccagccgagcgattctctgctctgtgcgcgcggtatttctccagcatgccgcgcccagtccctgctccttgtttttctcagagatgtggagtctcatcgtcgcgcggatctctctccttcctaccctgctcggattgtgccgcgcttgctgtcgcgttcggcctgcttcggatccgaagttggtcgcctcggtgtgaaatcgccgtcgcgtccagggttttga

SEQ ID NO: 152200 - DNA, 898 bp, Zea Mays
gaaaatcccaccgcccctctctctgatccttatctctctgcgcacgcaggctacttatccccaatcatcttctccttccctgcagcggcgtggtcctctgctcctccccagcgtccctcgccgagcaccctctgccccggctcctccttcctggccgcgcgtcctgtgcctgctcgtgcccagcctatgcttcctctctaccgccgctcgcaaggctccctccctcagcttgccggtcgtgagtccctggtgccgtgcgcgcgcgtccctgggcccagtttggtgctcaccccgccatggagctcgcgctgaccgcgccctctccagccatggcgcgctcgaccggagctctgctcccctagctcctctgcgcgcgccgtcttccagccgccctcgccccacctctctcctctgccgtcgtctagctcggacccgcccccagccgcgaacacccatggcgcccaagcccagcttctttctccctcagctcccatggtgctctctgtctcctgctcgctctctggtgctgcgtgtcttctctgctcgtcggtgctcgccgcgggagacggcgctcggtcgcccaaccttcctgctcctccctgctgtcgtgtccctcggcgccggtcgcttcttcttgctattccatgccgcggcaatcgccctgctgctccagtgcgcccagccaagcgattctctgctctgcgcgcggtatttctccagcatgccgcgcccagtccctgctccttgtttttctctgcgacatggagtctcctcgccgcgcggatcctctccttcctaccctgctcggattgtgccacgcttgctgtcgcgttcggcctgcttcggatccgaagttggtcgcctcggtgtgaaatcgccatcgcgtccggggttttga

SEQ ID NO: 152201 - DNA, 607 bp, Zea Mays
ttccttattttccctcgtcggtcgacctcgtcgcgacttagttcgttcatcatgctggtcgctatcccataatgtacctattagctcgaatccagtccagctcgtcgtcgcgtcgtttgccgtcgagtcgtcaaacacgtcatcctctgctcaaaccccacctcaccagctcgctcccgacttcagctgaaagtcatcatcgttccgcgcgtcagcgagaaatcccaagaatcgggtgaagacgaagctagcagcgcgatattccccaagcgctcgacaaattgcctggatcggaaaatcgctatcgatctcgcggattcgtgtcagctgtggaaatggtaagctgataaattattcagaatagttcgatcaatgaataaattaatgtgctagtgtgatgcttattaaggtgctcgataaattgcgtaagtcacgaaactctcgtcgacttggcagttcttgcgattatcgagccaggttcagttatagcgagttatttcgctattccggtcaattagctgaattaatataccgagtagaatattagtaggcatgtgtgataaagaaatgtttgattaattgtggacatgtaaaatatgtgaggagt

SEQ ID NO: 152202 - DNA, 3217 bp, Zea Mays
tttccatagacatccctgtcccacaaaaaaaatgcagaaacagaaaaaacagtagtgcagcagtattagcagacagcaggggtgtgcatgtgaccccaagaggccaggacaggtaggcgcacatgccacatcccccgcgagcaactactaccatggcatcctcccctccacctcctcgccaggaagaggaccagcaacgggaagaagggcaccaccatggcgacggaggcgacgacgaccagatcaccacaccgctcctggtggaagcggcgacgacgtcgtcgccgtcgccgtcggagggagacgatccagagaactcgccgatcgagcaggtggcgctgacggtgccggtgggcgacgacccgtcgacgccggtgctgacgttccggatgtgggtgctgggcacggcgtcgtgcgcgctgctgtcgttcctgaaccagttcttctggtaccgcaaggagccgctgaccatcacggccatctcggcgcagatcgcggtggtgccgctgggccgcctgatggcggcggcgctccccgcgcgcgccgtgctccgcggcacccgctgggagttctcgctcaacccgggccccttcagcgtcaaggagcacgtgctcgtcaccatcttcgccaactccggcgccggcaccgtctacgccatccacgtcatcaccgccgtccgcgtcttctacggcaagcacatcaccttcttcgtctccctcctcgtcgtgctcaccacccaggtgctggggttcggctgggcgggaatattccggcggtacctggtggagccggcggcgatgtggtggccgtctaacctcgtgcaggtctccctcttcaggtacaccacaactccccaaccgtttctggccaatatgtgtgttatacgattattttaattttggagcagagggaatacgattattttgtatcagctctctgtttttttatttgttacgctttagataaaaaatgaaccagcgaataacaaatattcgagaacgaaaatagtagaagctatcattgattagttgattgtgtactgcttgattggatctacaataggggtgtgagcgaggagagatgtggtaagcaatgtgtgtgtttggcgttctgattcagcataaagacataaggacgtcgccaaggtagacaatggcgcgtggatcacgtggcatgggatatgccacgtcggcttggagctcgcttgcatccaaggccgaaaagggactattcaagattcttacagattcatacggatgtacattatttgttttgttttgccactaaaaactccagtggtgacaaggaagttgacacaaacacactggcctccgctccgcacgtgtgtgctggatcaccagggcgctccacgagaaggagcggcgcgtgaagggaggcatgacgcggaaccagttcttcctggtggcattcgtctgcagcttcgcctactacgtcttcccgggctacctgttccagatgctcacctccctgtcgtggctctgctgggcgttcccgcgctccgtggtggcgcagcagctggggtcggggctgagcgggctgggcgtgggcgcggtggggctcgactggtccaccatctcctcctacctcggaagcccgctcgccagcccctggttcgccaccgccaacgtggccgccggcttcgtcctcatcatgtacgtcatcacgcccgccgcgtactactggctcggcctgtacggggcgcgcagcttccccatcttctccgacgggctcttcaccgccgccgggcagacgtacaacatctccagcatcgtggactccaacttccggttcgacaccgaggcatacgagcgcaacggcccgctctacctcagcaccttcttcgccgtcacctacggggtcggcttcgcgtccctcaccgccacggttgtgcacgtcttcctcttccacgggagcgagatctggcagctgagcaggtcagcgttccaagagaagaaggtggacgtgcacacgaggctgatgaggaggtacaggcaggtccccgagtggtggttcatctgcatcctcgtcgccaacgtcgccgtcaccatattcgcctgcgagtactacatcgagcagctccagctgccctggtggggcgtcctgctcgcctgcgccatcgccttcttcttcaccctcccgatagggatcatcacagcgacgacgaaccagactccaggcctgaacatcatcaccgaatacatcatggggtacctgtacccgggccgtcccgtcgccaacatgtgcttcaaggtgtacggctacatcagcatgacgcaggcgctggccttcctgcaagacttcaagctgggccactacatgaagatcccgccgaggaccatgttcatggcgcaggtggtggggacgctgatcgcggcgctcgtgtacatcgggacggcgtggtggctcatggacagcgtccccaacatctgcagcacggagctgctccccgccgacagcccctggacgtgccccatggaccacgtgttctacgacgcgtccgtcatctggggcctcatcggcccgcgcaggatcttcggcgacctcggcacctactcggcggtcaactggttcttcctgggcggcgccgtcgcgcccctcctcgtgtggctcgcgcaccgggtgttcccgagccagagctggatcctgctcgtcaacatgcccgtgctcatcggctccaccggcatgatgccgccggccaccgccgtcaactacaccacgtggatcattgccgggttcctgtcggggtacgtggtctacaggtaccggcgtcactggtgggagcgccacaactacctgctctctggcgcgctcgacgctggcctggcgttcatggccgtgctcatctacctgtgcttgggcttggagaacgtcggcctcaactggtggggcaatgatctggacgggtgccctctcgcctcttgtcccactgccaaaggtatcgttgttgagggctgcccggtgtatacatgaggaattgagaacccatgcattcggagaagagaacatggcaatgcaagtggacaagtgtctcaagagcaatgtaaataatttatcttttcaaacaatttagggatgggaaattggtgttcctttcattgtaaaatggctggtaattacggctattccagctcggaatcaaatttattccgtggtacaacaaaacataatttattcaaaaaagcgatctcgcatgctc

SEQ ID NO: 152203 - DNA, 2694 bp, Zea Mays
tttccatagacatccctgtcccacaaaaaaaatgcagaaacagaaaaaacagtagtgcagcagtattagcagacagcaggggtgtgcatgtgaccccaagaggccaggacaggtaggcgcacatgccacatcccccgcgagcaactactaccatggcatcctcccctccacctcctcgccaggaagaggaccagcaacgggaagaagggcaccaccatggcgacggaggcgacgacgaccagatcaccacaccgctcctggtggaagcggcgacgacgtcgtcgccgtcgccgtcggagggagacgatccagagaactcgccgatcgagcaggtggcgctgacggtgccggtgggcgacgacccgtcgacgccggtgctgacgttccggatgtgggtgctgggcacggcgtcgtgcgcgctgctgtcgttcctgaaccagttcttctggtaccgcaaggagccgctgaccatcacggccatctcggcgcagatcgcggtggtgccgctgggccgcctgatggcggcggcgctccccgcgcgcgccgtgctccgcggcacccgctgggagttctcgctcaacccgggccccttcagcgtcaaggagcacgtgctcgtcaccatcttcgccaactccggcgccggcaccgtctacgccatccacgtcatcaccgccgtccgcgtcttctacggcaagcacatcaccttcttcgtctccctcctcgtcgtgctcaccacccaggtgctggggttcggctgggcgggaatattccggcggtacctggtggagccggcggcgatgtggtggccgtctaacctcgtgcaggtctccctcttcagggcgctccacgagaaggagcggcgcgtgaagggaggcatgacgcggaaccagttcttcctggtggcattcgtctgcagcttcgcctactacgtcttcccgggctacctgttccagatgctcacctccctgtcgtggctctgctgggcgttcccgcgctccgtggtggcgcagcagctggggtcggggctgagcgggctgggcgtgggcgcggtggggctcgactggtccaccatctcctcctacctcggaagcccgctcgccagcccctggttcgccaccgccaacgtggccgccggcttcgtcctcatcatgtacgtcatcacgcccgccgcgtactactggctcggcctgtacggggcgcgcagcttccccatcttctccgacgggctcttcaccgccgccgggcagacgtacaacatctccagcatcgtggactccaacttccggttcgacaccgaggcatacgagcgcaacggcccgctctacctcagcaccttcttcgccgtcacctacggggtcggcttcgcgtccctcaccgccacggttgtgcacgtcttcctcttccacgggagcgagatctggcagctgagcaggtcagcgttccaagagaagaaggtggacgtgcacacgaggctgatgaggaggtacaggcaggtccccgagtggtggttcatctgcatcctcgtcgccaacgtcgccgtcaccatattcgcctgcgagtactacatcgagcagctccagctgccctggtggggcgtcctgctcgcctgcgccatcgccttcttcttcaccctcccgatagggatcatcacagcgacgacgaaccagactccaggcctgaacatcatcaccgaatacatcatggggtacctgtacccgggccgtcccgtcgccaacatgtgcttcaaggtgtacggctacatcagcatgacgcaggcgctggccttcctgcaagacttcaagctgggccactacatgaagatcccgccgaggaccatgttcatggcgcaggtggtggggacgctgatcgcggcgctcgtgtacatcgggacggcgtggtggctcatggacagcgtccccaacatctgcagcacggagctgctccccgccgacagcccctggacgtgccccatggaccacgtgttctacgacgcgtccgtcatctggggcctcatcggcccgcgcaggatcttcggcgacctcggcacctactcggcggtcaactggttcttcctgggcggcgccgtcgcgcccctcctcgtgtggctcgcgcaccgggtgttcccgagccagagctggatcctgctcgtcaacatgcccgtgctcatcggctccaccggcatgatgccgccggccaccgccgtcaactacaccacgtggatcattgccgggttcctgtcggggtacgtggtctacaggtaccggcgtcactggtgggagcgccacaactacctgctctctggcgcgctcgacgctggcctggcgttcatggccgtgctcatctacctgtgcttgggcttggagaacgtcggcctcaactggtggggcaatgatctggacgggtgccctctcgcctcttgtcccactgccaaaggtatcgttgttgagggctgcccggtgtatacatgaggaattgagaacccatgcattcggagaagagaacatggcaatgcaagtggacaagtgtctcaagagcaatgtaaataatttatcttttcaaacaatttagggatgggaaattggtgttcctttcattgtaaaatggctggtaattacggctattccagctcggaatcaaatttattccgtggtacaacaaaacataatttattcaaaaaagcgatctcgcatgctc

SEQ ID NO: 152204 - DNA, 3130 bp, Zea Mays
tttccatagacatccctgtcccacaaaaaaaatgcagaaacagaaaaaacagtagtgcagcagtattagcagacagcaggggtgtgcatgtgaccccaagaggccaggacaggtaggcgcacatgccacatcccccgcgagcaactactaccatggcatcctcccctccacctcctcgccaggaagaggaccagcaacgggaagaagggcaccaccatggcgacggaggcgacgacgaccagatcaccacaccgctcctggtggaagcggcgacgacgtcgtcgccgtcgccgtcggagggagacgatccagagaactcgccgatcgagcaggtggcgctgacggtgccggtgggcgacgacccgtcgacgccggtgctgacgttccggatgtgggtgctgggcacggcgtcgtgcgcgctgctgtcgttcctgaaccagttcttctggtaccgcaaggagccgctgaccatcacggccatctcggcgcagatcgcggtggtgccgctgggccgcctgatggcggcggcgctccccgcgcgcgccgtgctccgcggcacccgctgggagttctcgctcaacccgggccccttcagcgtcaaggagcacgtgctcgtcaccatcttcgccaactccggcgccggcaccgtctacgccatccacgtcatcaccgccgtccgcgtcttctacggcaagcacatcaccttcttcgtctccctcctcgtcgtgctcaccacccaggtaggtaggaaagctggtgcaaggggaatgcgtgtgtgcagtgcgcggctagctagcgccactgtccatatgtttggttcacggatacgtagagcctgaccacatgagcatatacgagaagaaccaggctcctactaaacaggctaaacatatacaagagactcttgtttggttagctgtttagattcatacagaaatgtgtgttcagactcacatatgcatgaactcagcctgtacatgcagcgatgctcctcacgcgcgcaccgagagagcctggctgggagttaagttttgcatgtctagagcctggttggtccatgcagcaaaccaaacaagagatgctttaagtatccgcgactgcatatacttggcagatgcagggaaccaatcatacgatgtgtgtgtctctcgtcacgtacgtgttgtgtgcacgcaggtgctggggttcggctgggcgggaatattccggcggtacctggtggagccggcggcgatgtggtggccgtctaacctcgtgcaggtctccctcttcagggcgctccacgagaaggagcggcgcgtgaagggaggcatgacgcggaaccagttcttcctggtggcattcgtctgcagcttcgcctactacgtcttcccgggctacctgttccagatgctcacctccctgtcgtggctctgctgggcgttcccgcgctccgtggtggcgcagcagctggggtcggggctgagcgggctgggcgtgggcgcggtggggctcgactggtccaccatctcctcctacctcggaagcccgctcgccagcccctggttcgccaccgccaacgtggccgccggcttcgtcctcatcatgtacgtcatcacgcccgccgcgtactactggctcggcctgtacggggcgcgcagcttccccatcttctccgacgggctcttcaccgccgccgggcagacgtacaacatctccagcatcgtggactccaacttccggttcgacaccgaggcatacgagcgcaacggcccgctctacctcagcaccttcttcgccgtcacctacggggtcggcttcgcgtccctcaccgccacggttgtgcacgtcttcctcttccacgggagcgagatctggcagctgagcaggtcagcgttccaagagaagaaggtggacgtgcacacgaggctgatgaggaggtacaggcaggtccccgagtggtggttcatctgcatcctcgtcgccaacgtcgccgtcaccatattcgcctgcgagtactacatcgagcagctccagctgccctggtggggcgtcctgctcgcctgcgccatcgccttcttcttcaccctcccgatagggatcatcacagcgacgacgaaccagactccaggcctgaacatcatcaccgaatacatcatggggtacctgtacccgggccgtcccgtcgccaacatgtgcttcaaggtgtacggctacatcagcatgacgcaggcgctggccttcctgcaagacttcaagctgggccactacatgaagatcccgccgaggaccatgttcatggcgcaggtggtggggacgctgatcgcggcgctcgtgtacatcgggacggcgtggtggctcatggacagcgtccccaacatctgcagcacggagctgctccccgccgacagcccctggacgtgccccatggaccacgtgttctacgacgcgtccgtcatctggggcctcatcggcccgcgcaggatcttcggcgacctcggcacctactcggcggtcaactggttcttcctgggcggcgccgtcgcgcccctcctcgtgtggctcgcgcaccgggtgttcccgagccagagctggatcctgctcgtcaacatgcccgtgctcatcggctccaccggcatgatgccgccggccaccgccgtcaactacaccacgtggatcattgccgggttcctgtcggggtacgtggtctacaggtaccggcgtcactggtgggagcgccacaactacctgctctctggcgcgctcgacgctggcctggcgttcatggccgtgctcatctacctgtgcttgggcttggagaacgtcggcctcaactggtggggcaatgatctggacgggtgccctctcgcctcttgtcccactgccaaaggtatcgttgttgagggctgcccggtgtatacatgaggaattgagaacccatgcattcggagaagagaacatggcaatgcaagtggacaagtgtctcaagagcaatgtaaataatttatcttttcaaacaatttagggatgggaaattggtgttcctttcattgtaaaatggctggtaattacggctattccagctcggaatcaaatttattccgtggtacaacaaaacataatttattcaaaaaagcgatctcgcatgctc

SEQ ID NO: 152205 - DNA, 941 bp, Zea Mays
gatccgtgaggtgctgttgaagaaatctaaactctctactaacaacacaaacaatcttccattcaacgaagcttgtgtcacatccacggtccccccttccttgtccgactctgacccacggccaccagtccaccaccatccaaattcccacgacgttcctccctccacgctgttgtgtcctcctccgacctcgccaccgtcgccagtgttgggccaggttcgcgcgcgccatcgactctgtgtccctgtcgtcggccacgacgctgctcactggcgaccgcctcatgatcttactcttcgtggcccaacacacctcgccgcatcacttgcaatcctcatggtgtccgccctcgtcgtcgagctcgtcgtggatggctccagctctgccctgcttcgtcgcttcggaaccagatgcggatgagctgcgcccctcccctctccctctctcatttgatgatgtccctctctcatgtcactgtttttcccttctttgctattttagcatatggaagcatttcttcataatttgctggatctaccagattccacaaagtcttgcaaggtcattcatgctctctttcttttttttggtgtcgccagctaccgacgccatgaggttgcctgatgtggtactggtgttgttcgtgacctggatctcgggaaggcctccgtgggtgcatgtttgtttgcacagaaattttgtccatttcttcggtcaagtttgcttgccaaatcagtgttgcttttaggattttttatgtgtgttgcattgataggagcaggatagttcagcaggaactatatggatccttttaccaattgttcagagcatttttggctccgtatagttcgtccatggcaagagcttagggaggctataatttgtgaaaatgcgatttcgttctatagtgaatcaatctggcaagaaattattagctatt

SEQ ID NO: 152206 - DNA, 1501 bp, Zea Mays
tttttgtccagaaaaaaggctacaaaacgacaccattttcatggacctgatatataaaaacttgacaacgacaacaaaataacatttgattgttggttttgcagaggcagaaatgctttaaggagctgcagtgatttttgtggacatgttccagtctgatattgattcaggattctgcaatgggactgctaggggtcatcaggttcagggacaagccaaaagtagaatatgttgggccttaccttcatcacggtcccctcagaggtgccatcatgtaatggcttcaataagtgagtttcatcaggctattgaaagtggtgcaggtcagagccaggctagattttgttttggggtaaatgcacttgtcattatcaatttactttgcttgataatgatgcatcatgtcagggaccgcagttatttaactctgattttattataacttgcttctagcgaacggtcatgcaattgaccgaacatgtaaaccataagcaaatgtgatgtaggagatttttatataaatagacttttgcagccactttgatgttttgttttatgtttcctttttgtgaaaaaatattatggtgctattcgagtgtttttttcttattacaatttcaaatacttatgtgaatagcatagcgcccgatagggcgctgtcttattctagtgttcatgcaaaccggacccttcaggatgcaatcaacttgcacaaaatgtggtggttctgggaagactgtgaaggtagggtttccctcttaatgacatatatcagctgcaacaaccaaaaaaaagattatgtagcacagttgtagtatcaggcctcctatgccatgagtcattatagtacacccttggcacaggtatttcactgaggttgatgatcttgaagtctgaattacttttcctcaccatattttattctactagtcatgaatgatttatttcctgattgcatgtaaagtcagctctatcatgttaactaattgagttaccctgtaatggacttcctctatagagcagcttatgaattttgattaatcagcacaacactggttatgtttctatgttattcctttaggaattctgcaagacacgcagaggaaataaagttgtgcctggaacgaaatcagttcgtcttgacatagtgcctggcttcagcaagcaatgcaagatccgtcggcctctcctccgaaatcatcagatttcagatcttagactgtctgcagcagtctatctatagtttatccaaaagcattattttgcattgttctgtatcgtagattacactgcagtctatgtatagtttatccaaaagcattgttttgcactgttttgtatcgtagattacaccgttcgcagagtggagtttgaatatggatataggatagataagttgctggagatagttttagagggtgtttggttcctttaggggatgtttggttcaatgaatcactccatctaaaataaagtggtgtaacataagctaattttcctc

SEQ ID NO: 152207 - DNA, 898 bp, Zea Mays
gattatttcgtccagccctacccgacagcgacgacctccgccaccaccttccgcgctaacgacgtcgccatcacctcgcgtcgagccagacgctcaggtcttcatcgtgctcttcaccggcgacgagaacccaccaacaggccatccgagtcggtctcgatgatggcccataagctgagtcctgacacttccaacctcaggaggccaatggcccagtatacggtgttagtgtagccagtggctgcctgcttctccctcctcaaggcggagcgcagcaccgcggctgcgctgctggcggccagagatgatgacgcgttgcggtgtacaactcctggtggcacgggggatctcctcatcaccatgcctttctcggaggatcaaccaaacggaaagtgaaattgttcggatgtttcatcctccaattcgtcagagtgaggaagcaatagcaaccattgtgccaaggtacacatattctatgcgtgtcttggatgagaggttcattaggatcctgaagatattcaagtggggccctgatgctgagaaggcgctggaggttctcatgcttagagttgatcactggttggtacgagaggttatgaaaactgacgttggggtcaatgtgaagatgcagttcttcagatgggctgcaaagcggaggaattatgagcatgacacatccacttacatggcattgatacattgtttggaagtagtggagcagtatggtgagatgtggaagatgatccaagaaatggtacggaatcccatttgtgttgttaccccaacagaactttcagatgtagttcggaagctggggaatgctaagatggtcagcaaggcaattgcaatcttctaccagatcaaaacgcggaagtgtcagctttttgctgtcatataa

SEQ ID NO: 152208 - DNA, 770 bp, Zea Mays
atgaagggcaagtggaatctccccccagttcgttcacctattctatccttattgatggattctgcaaaaccaacaggatggagaaaggccatgatgctactggaagagatggatgaaaagggtttccctccatgtccagcggcatattgtagcctgattgatgctcttggaaaagccaagcgttatgatcttgcttgtgagctttttcaggaactaaaggaaaattgtggctcgtccagtgctcgggtatatgcagttatgattaaacacttaggaaaggctggacggcttgatgatgctataaatatgtttgacgaaatgaacaaacttggttgcgctcctgatgtttatgcgtacaatgctctcatgtctggattagcaagaacaggcatgattgatgaagctcttagtacgatgagaagaatgcaagagcatgggtgtattcctgatatcaattcatacaatattatccttaatgggctggcaaaaacgggaggacctcaccgtgcaatggaaatgctttccaacatgaaacaatctacagtaagtcctgatgttgtctcctataatactgtccttggtgccttgagtcatgctggcatgtttgaggaggcatcaaagctgatgaaagagatgaatacattggggtttgagtacgatcttattacatattcatctatacttgaggctattggaaaggttgatcatgaatgtgacccttaaggttggaggtgtatcatatgcagtcactcatttggtcaagcagagca

SEQ ID NO: 152209 - DNA, 348 bp, Zea Mays
atggagggacttattttgaccacagcacagtgcaatatctggatctggaaaactatatctgtggtgatgggagacctcctgtgcgaggcgatgggatctgcggcgcaggtcgtggtggtagaggattgcgtggagacaccgaggaccttcgtcctccacctcctcctcaagcgcgcgctcgccggctgcggctccgctgccttcctcgccctcgcgcagcccttctcccattacgaccgcgtcctgcgcaagatggtaccgctcgccccccgccccctcttcacctcaccggcatttcgtcaaacacgttttgtgcttaccggcttcatgtcgggctgcctatgttag

SEQ ID NO: 152210 - DNA, 1504 bp, Zea Mays
aacgttcgacgcagtgtctcttctattaacctgcgagcacgcgtggcgccggcgaggccacacgcagcccaccagtaagccgccaccgccatgcggctcccctccggcgcacgcctcgcgctcctgctcgtccgccgctccctctcctccgcgtcctcctccgccgccgcccccgcatcccgcctctcgcgcgcgcacagaggtgagccccgacagaccccaccccactaggtcctcgattctcccggttcctcgggcgggcctcgcctggtcgccccgtgttcctcgggcgcgcaagcgatgatgctgaggccgcccgcgttagcgtgctgcaaactctacatctccgaggcccgcaactcgggggcgttgcgtgccatcgagcacgcggcggcggcgctccgcccgttggccgtgctcgtcaacaccttcgccgacgacgcctacaaccgggtcgggtacacgctcgtgtcccccctcgcgggcggcgccgcctcgccgccgctgcgctgcgcggcgttccgcgtggtcgcggccgcgatcgaggccgtcgacctggacgcccacgccggcgcgcacccgcgcctcggcgtcgtcgaccacatcgccttccaccctctggccagcgcccgcctcgaggacgtcaccgcgctcgccagggccgtggcggcggacatcggagacaggcttcaagtgccgacgtacctgtacggcgcagctcacagagacggcaggacgctggcgtccatcaggaggcagctgggctacttcacgccgacctcccccggcggcgagcagtggcacggcgcgccggactcgctgctgccggtggccccggacgccgggccccggacgtcgtccgcgtccaatggcgtggtggtggtgggcgccacgccgtgggtggacaactacaacgtgcccctggccacggccgacgtcagcgtcgcgaggcgcatcgcgcgcgcggtcagcgagcgcggcggcgggctcgcgtgcgtgcaggccatggggctcgcgcacggcgacggcgccaccgaggtcgcctgcaacctacttcacccggacgcggtgggcgccgaccaggtgcaggagagggtgagccggctcgccgccggcctcggggtcggcgtcggccaggggtacttcaccgacttctcgcgggagaaggtcgtcgagctgtacttgcaggccgctcaagctgcctgaggcttctcggcagtgatagattgtttattgttcagaaagcagggtaatggaataatctactactgtgtatctaggaatccagcagttgtcagccatggcacaaaaaaaaaagttgagctgcgaacagtatgcaaccatctcaatctggtattcatagcaattatatattgccacaaagaaaaaagactagagattatactacgttgcaagccaggtccttccaaatctccaagtagctgtaattacagaatacaatacgtccaagctgagcacatagaaacgatactctagactgcag

SEQ ID NO: 152211 - DNA, 88 bp, Zea Mays
cggacgcggtgggcgccgaccaggtgcaggggtacttcaccgacttctcgcgggagaaggtcgtcgagctgtacttgcaggccgctca

SEQ ID NO: 152212 - DNA, 1076 bp, Zea Mays
acggctctatacctctcgccctctgagtctcgcgcgggctgcaggccatccgagctccggcttccggcatccaccagacgtccttagaatacggtgcagcgagcagcaagtcgccgagcagccgagccaccgccgagcagccgagccgccgccgagcgccgagtcttctatgtttgcttctccggtgaaaggtgtttgctaggggaccatggaggagcacggagcggaagacctcctgtgcgaggcgatgggatctgcggcgcaggtcgtggtggtagaggattgcgtggaagcaccgggggccttcgtcctccacctcctcctcaagcgcgcgctcgccggctgcggctccgctgccttcctcgccctcgcgcagcccttctcccattacgatcgcgtcctgcgcaagatgggctgtaacctttccctgcataggaggaatgagaggcttcatttctttgaattgctaggattcccaggtggagcaagggaaggcaccattgctgatagctttgctctattgtacaatgaaattcaaagactggtggaggcaaacagggctggagaaaatgaaggccagttcaccatcgttatagacgacgcttccctgttggaagtcgtggcccttggttctgtaagcgatgtgctggatttcttgcactattgtttcacactcacgtctgagatgaattgcaagctagtgatcctcattcacgaggatatatacgcaaatgaggagaacatgggtctccttttacatctgcgctacattgcggatcttgtgattaaagcagcacctttaagcactggtttggctgctgatgttcatggacagctggcggttgtgaacaagggtacattcagcgagcaaagggcaaaagcacagaaagtttggaacttccatttcaaagtgaaagaaaacggtgctgacttcttctatccagggagtagacattagggaatacttgtatacagtagaaacaactctggttgtgataactgataaccagtgctgctattcttcgtgtaccttgtgctaagcacagtaaagttttgtccaatccttcatttcacaa

SEQ ID NO: 152213 - DNA, 1655 bp, Zea Mays
acggctctatacctctcgccctctgagtctcgcgcggtcagtcggtctctctctctcactctctcttgtctccaagtttgtaaccctagccgccaagcttgaagctccagccgtgctcgtgtagggctgcaggccatccgagctccggcttccggcatccaccagacgtccttagaatacggtgcagcgagcagcaagtcgccgagcagccgagccaccgccgagcagccgagccgccgccgagcgccgagtcttctatggtaaattaaacaggctcggataaattagtgtttcaatttagagttttggacaggatttgaaaagattaatcacgctcacggctcacgcacttcaaaccctaacctgacggaggtgtttgcttctcggtggaagtttgcttctccggtgaaaggtgtttgctaggggaccatggaggagcacggagcggaagacctcctgtgcgaggcgatgggatctgcggcgcaggtcgtggtggtagaggattgcgtggaagcaccgggggccttcgtcctccacctcctcctcaagcgcgcgctcgccggctgcggctccgctgccttcctcgccctcgcgcagcccttctcccattacgatcgcgtcctgcgcaagatggtaccgctcgccccccgccccctcttcacctcaccggcatttcgtcaaacacgttttgtgcttaccggcttcatgccgggctgcctatgttagcttcactgttacaacagcgtgcatactggaaaatgcataccggattgctctagtcaaaatctacacatttgcatttatatccatcttttttggtcttcgggaatttgccagggctgtaacctttccctgcataggaggaatgagaggcttcatttctttgaattgctaggattcccaggcaagccgtcattttattgcagtgtgcatttttcagataatgttgggcgattcctagttagggaggtgccattcagtacgtttctttacctgcaggtggagcaagggaaggcaccattgctgatagctttgctctattgtacaatgaaattcaaagactggtggaggcaaacagggctggagaaaatgaaggccagttcaccatcgttatagacgacgcttccctgttggaagtcgtggcccttggttctgtaagcgatgtgctggatttcttgcactattgtttcacactcacgtctgagatgaattgcaagctagtgatcctcattcacgaggatatatacgcaaatgaggagaacatgggtctccttttacatctgcgctacattgcggatcttgtgattaaagcagcacctttaagcactggtttggctgctgatgttcatggacagctggcggttgtgaacaagggtacattcagcgagcaaagggcaaaagcacagaaagtttggaacttccatttcaaagtgaaagaaaacggtgctgacttcttctatccagggagtagacattagggaatacttgtatacagtagaaacaactctggttgtgataactgataaccagtgctgctattcttcgtgtaccttgtgctaagcacagtaaagttttgtccaatccttcatttcacaattttgtttgtgttcaagtcaacatagcttacaaagtgttcgccacagccaagttcattg

SEQ ID NO: 152214 - DNA, 1330 bp, Zea Mays
acctctcgccctctgagtctcgcgcggtcagtcggtctctctctctcactctctcttgtctccaagtttgtaaccctagccgccaagcttgaagctccagccgtgctcgtgtagggctgcaggccatccgagctccggcttccggcatccaccagacgtccttagaatacggtgcagcgagcagcaagtcgccgagcagccgagccaccgccgagcagccgagccgccgccgagcgccgagtcttctatgtttgcttctccggtgaaaggtgtttgctaggggaccatggaggagcacggagcggaagacctcctgtgcgaggcgatgggatctgcggcgcaggtcgtggtggtagaggattgcgtggaagcaccgggggccttcgtcctccacctcctcctcaagcgcgcgctcgccggctgcggctccgctgccttcctcgccctcgcgcagcccttctcccattacgatcgcgtcctgcgcaagatgggctgtaacctttccctgcataggaggaatgagaggcttcatttctttgaattgctaggattcccaggtggagcaagggaaggcaccattgctgatagctttgctctattgtacaatgaaattcaaagactggtggaggcaaacagggctggagaaaatgaaggccagttcaccatcgttatagacgacgcttccctgttggaagtcgtggcccttggttctgtaagcgatgtgctggatttcttgcactattgtttcacactcacgtctgagatggtaaattattgaccaatcaaacattacagtaactactgctgatggctaagtcatggtcatgtcttttacactttattcatgtcctgacagaattgcaagctagtgatcctcattcacgaggatatatacgcaaatgaggagaacatgggtctccttttacatctgcgctacattgcggatcttgtgattaaagcagcacctttaagcactggtttggctgctgatgttcatggacaggttaggctccggatcctacatatttgtttaagtttgagatgtaacatgatggcttagttggtttcttttcgttgacctggtaggttgatgaatttgcattacttgatcttatcttcatgtttaacgtcttccattttgccctgagacaaatctttttattctgaagcggttgaaatgtttctgcagctggcggttgtgaacaagggtacattcagcgagcaaagggcaaaagcacagaaagtttggaacttccatttcaaagtgaaagaaaacggtgctgacttcttctatccagggagtagacattagggaatacttgtatacagt

SEQ ID NO: 152215 - DNA, 1602 bp, Zea Mays
acctctcgccctctgagtctcgcgcggtcagtcggtctctctctctcactctctcttgtctccaagtttgtaaccctagccgccaagcttgaagctccagccgtgctcgtgtagggctgcaggccatccgagctccggcttccggcatccaccagacgtccttagaatacggtgcagcgagcagcaagtcgccgagcagccgagccaccgccgagcagccgagccgccgccgagcgccgagtcttctatgtttgcttctccggtgaaaggtgtttgctaggggaccatggaggagcacggagcggaagacctcctgtgcgaggcgatgggatctgcggcgcaggtcgtggtggtagaggattgcgtggaagcaccgggggccttcgtcctccacctcctcctcaagcgcgcgctcgccggctgcggctccgctgccttcctcgccctcgcgcagcccttctcccattacgatcgcgtcctgcgcaagatgggctgtaacctttccctgcataggaggaatgagaggcttcatttctttgaattgctaggattcccaggtggagcaagggaaggcaccattgctgatagctttgctctattgtacaatgaaattcaaagactggtggaggcaaacagggctggagaaaatgaaggccagttcaccatcgttatagacgacgcttccctgttggaagtcgtggcccttggttctgtaagcgatgtgctggatttcttgcactattgtttcacactcacgtctgagatgaattgcaagctagtgatcctcattcacgaggatatatacgcaaatgaggagaacatgggtctccttttacatctgcgctacattgcggatcttgtgattaaagcagcacctttaagcactggtttggctgctgatgttcatggacagctggcggttgtgaacaagggtacattcagcgagcaaagggcaaaagcacagaaagtttggaacttccatttcaaagtgaaagaaaacggtgctgacttcttctatccagggagtagacattagggaatacttgtatacagtagaaacaactctggttgtgataactgataaccagtgctgctattcttcgtgtaccttgtgctaagcacagtaaagttttgtccaatccttcatttcacaattttgtttgtgttcaagtcaacatagcttacaaagtgttcgccacagccaagttcattgagcttgatctcgcacaagagacctattttgcatctcacgcaacagtcacatttctttttcaaggaaacagggaatgcaaaccccaacttgttttcatttggaaacatgatctttccgcccccaatctgaatttgttcaatgcagctgctcattgggagaaccgattctgatacatgtcattgccactcccacttacaatgccacctccaccgatattttggctcatggtaccattaacatgctctatgtttggtcttgcaatattggcgacagcgctacttccattctgcccattgcacccagtatgaccaactgagataccccttcacactgtagtttgcagcatgtccttcaacaggaggatcaaacacatctgatgaaccacactg

SEQ ID NO: 152216 - DNA, 537 bp, Zea Mays
atggggaatgggaaagttactgtcggagagggaagggcgctgaccgctccagcctgggcgggctcgccggcggcacaatggggcggggctaagcgcgcgccgcgccagaccgccgggactggctacgcgcaggggctggccgcgcgtagggactggagccagggaagggagggtggttgttacctgctcggcggcaagagggcgaaggcatcagcgagcttgacgatggcgaggcacgggcacgatgagcggcgaggctgtagggctcctccacacaacaacggggtgtgcggggacgcgtcgacgaagcagccgtgctggcacggtgaccggcgaacggctacggggcgactccgtgcggggctgggcagcggcgtaggggtagacgggctgggcggcatgcttaaccggcaaccgggctgcagtagcgaggacgactgtacgtgggggagttgctttgggtggagggttgaagcagggccatttgtcaaagatgcgagcacgtctgcagcggaagaagcggagctgagcggttga

SEQ ID NO: 152217 - DNA, 537 bp, Zea Mays
atggggaatgggaaagttactgtcggagagggaggggcgctgaccgctccagcctgggcgggctcgccggcggcacaatggggcggggctgagcgcgcgccgcgccagaccgccgggactggctgcgcgcaggggctggccgcgcgtagggactggagccagggaagggagggcggttgttacctgctcggcggcaagagggcgaaggcatcagcgagcttgacgatggcgaggcacgggcacgacgagcggcgaggctgtagggctcctccacacaacaacggggtgtgcggggacgcgtcggcgaagcagccgtgctggcacggtgaccggcaaacggctacggggcgactccgtgcggggctgggcagcggcgtaggggtagacgggctgggcggcatgcttaaccggcaaccgggctacagtagcgaggacgactgtacgtgggggagttgctttgggtggagggttgaagcagggccatttgtcaaagatgcgagcacgtctgcagcggaagaagcggagctgagcggttga

SEQ ID NO: 152218 - DNA, 918 bp, Zea Mays
aacccccacctgaccttctcttcctccctcccccgaccgcctgtctgtcctccgcgcatccgttctctatcgaaagggaggaggaggagcgcgcgggagtgggctgggggcccaccgatgctgagctcggcgtcctcggccggggcggccatggggatgggcggcgggtaccaacaccagccgctgccactgccgcagcgcggggcggcggccgcggtcttcaccgccgcgcagtgggcggagctggagcagcaggcgctcatctacaagtacctcatggccggcgtccccgtcccgcccgatatcctccgccccgccccccacgccgccgccttctccttcgccagccccgccgcgtcgcccttctactttcccccaccaccacccgtcccgtaagctccccccttacctccatccccctctttttttttgttcgggagagaacagttgcatagatcttttgcccgccatgcttcttactgggattggatttgtctggttgggtattgccgcgatttatctcatcgagtgattcattaagcatgcgctgcctagcatctcggcatctgcctaatgttcgagtggggtggatctttgtcacctcctcacccgcttgctcgcgcaatgggatggggattctttattattcaaacttttaaacaaaacaaagtgggagaaagcatcttcgcattgggttggtcaaatgttcatgtgctttttgatctgccccagtagcaagtacaccatttcattataatatatgtatatactatggtttgtttcccttctgcagtgagttactacgcctactacgggaagaagctggacccggagccgtggcggtgccgccgcaccgacggcaagaagtggcggtgctccaaggaggcgcaccccgactccaagtactgcgagcgccac

SEQ ID NO: 152219 - DNA, 1741 bp, Zea Mays
aacccccacctgaccttctcttcctccctcccccgaccgcctgtctgtcctccgcgcatccgttctctatcgaaagggaggaggaggagcgcgcgggagtgggctgggggcccaccgatgctgagctcggcgtcctcggccggggcggccatggggatgggcggcgggtaccaacaccagccgctgccactgccgcagcgcggggcggcggccgcggtcttcaccgccgcgcagtgggcggagctggagcagcaggcgctcatctacaagtacctcatggccggcgtccccgtcccgcccgatatcctccgccccgccccccacgccgccgccttctccttcgccagccccgccgcgtcgcccttctactttcccccaccaccacccgtccctgagttactacgcctactacgggaagaagctggacccggagccgtggcggtgccgccgcaccgacggcaagaagtggcggtgctccaaggaggcgcaccccgactccaagtactgcgagcgccacatgcaccgtggccgcaaccgttcaagaaagcctgtggaatccaagaccgcctcctcgccgccccagctgtccaccgtcgtcaccaccaccaccacccgggaggccgccgccgcgacgccccttgagtccctcgcgggggcggggggtaaggctcacggcctgtccctcggcggcggggctggctcgtcgcacctcagcgtcgacgcttcgaacgctcactttcgctatggcagcaagtaccctcttggagctaaatccgatgctggcgagctgagcttcttctcaggagcaccagggaactccaggggcttcaccattgattctccagcagataactcttggcactccctgccatccaacgtgcccccgtttacactgtccaagggcagagactctggcctcctgcccggtgcctactcctactcccacattgaaccaccgcaggtgctcggccaggtcaccatcgcctcgctgtcacaggaccaggagcgccaccagtcgtcgttcagcagcggcggggccggcgctggtggattgctggggagcgtgaagcaggagaaccagccgctgaggcccttcttcgacgagtggcctgggacgcgggactcgtggtcggagatggacgacgcgaggtccagtaggacctccttctcgacgacccagctctccatctccattccgatgcccagatgtgattgagaacgaagctcgtgcgcggccagtaggtggcgttgtcgcatgacgcgcacccagcatcgcgctcgctgctagcgagccaccgtcacccggtgattgatgccctcatcctagctatttgtttcgctgaatcgcattaagaacagaactctatgtaagagcaggatccttcctcatgtatcaatgggggcaatgaactccattctgtttctatggttgtagtaccgaccatgctttgtatttgttgtacccagaccgagaatgaaaaccgcccagtcgtcaggcgttgtcgtcgctgcatcagatgatccaagtgtattgtgtgctttccaggctgtgtaagatctgatggcgaatctgttactgcagtgtaggtgtgtagcatctgtggtatggtaccttttgttgtgctactggatctggattgatgcaaaatctggtgctgccgtaggcccctcttccttttctctactgctataataataatacatcttttttttatgataggaaaagaaatgagaagaacag

SEQ ID NO: 152220 - DNA, 3306 bp, Zea Mays
tagagtccgggcaggcagccatctccgtcttctccgcgctctccatcctcggcgggcgggtgggaggggcgagtcgacgaccagcacgcgcgcgcgtccagcgcaaccgcgtcacggaaccctagcgtcgcctcgttcgctgcccaactctcctccagactccagtgcacaggtctccatcacggggaattctcatatagcaagtcgtcgtcctcgtcctcgtcctcgtcctctcctccggtgggtggatcggccatcgcgccgggccgggcgggcatacctacgtacacactccccggttcccgtccccgtccccgtcccgcattcgattggttccttcgtcttcgtctgccgattatcagaatgcctcgaggacaaggctcttctgtgtcaacccgtgagaatcccaaagttgatcgggcaactgattcaaatgatgacagccgcaagaataggaggggtgcttatttgctactgggattgctgatagtgttccttcatggatcatggtctgtttatcagatccagtttggaagccttcctttgccccttgatgctgagcaggctggaaagaggggtttctcggaagcttcggcgctgaagcatgtaaagtatttgacaggcttgggtcctcacccagtcggttcagatcccctcgatcatgctattcagtatgtatatgcagtagcagaaaaaataaagaagacagctcattgggaggttgatgttcaattggagttgtttcacacagatataggcgcaaatcgtctatctggtggtcttttcaagggaaagactctcttgtattcagacttaaagcatgtgctattgagagttactcccaaatatttaccagaagctgaggaaaacttgattctggtttcttctcatattgacactgtttcgacaacggaaggagctggagattgcagttcatgtgtgggagtcatgttagagcttgcacggggagtggcccagtgggcacatgggtttaagagtggtatcttgtttttatttaatactggagaagaagagggtcttgatggcgcccatagttttataactcagcaccactggagaaattcagtaatatttgcggttgatctggaagctatgggtatcagtgggaaatccacactcttccagggtactgaccattgggcattggaaagctttgcagctgtagccaaatacccatctgctcagatagcttcacaggatgtttttagttctggcgcaataaaatctgctactgattttcaaatatatgaggaagttggccgtcttcctggacttgattttgcatataccgatacaacatctgtgtatcatacgaagaatgacaagatggcgcttctgaaaccagggtctcttcagcatattggagataacatgcttgctttcctactccattctgcagcatctccaaaatttttgaaagatgcacaacaaaggaagcaaggaaagacagagcaggatagagctgtttacttcgatatcctgggaaagtacatggtggtctatccgctgcgacttgctaccatgtttcacaactcaatcatattgcagtcacttctaatatggggaacatcattgcttatgggtggacaccctgcactggtgtcctttgcaatatcatgtttgagcatcattctaatgtggatattttctatctgcttaccagttgtggtagcatttgctctgccctatatgtgtccgtttcctattccatatgttgcaaatccatggttaactattggcttatttggttcacctgcactgcttggagcatttattggtcagcatattggatttattctcctgaagaggcatcttcgacgcgtgcattccaaagcaaaaacaggcataactcctagcatgatagaaaatgttactgacctggaagctgagaggtggatttttaaatctggttttgtccagtggttaatagctctgatactaggaacatatttcaaggttggatcatcgtatatagcactcatctggcttgtttctcctgcttttgcatatggttttttggaagctactctctcccctgttcggctacctaaacagcttaaggttgtcacgttggttgtgggtttggttgcaccagttgtgtcttctgctggtttggctgttcgtatggcggatgtaattgttggaagtatagtacgtattgacaggaatcctggcggactaccagactggcttggaaatgtaatagtttcggttgccattgctgttgtcgtttgttccacgtttgtgtatctgctttcatacattcatatctcaggtgataaaagaattctgggtttgctattatccttatcctttggtctttcaattgctttggcatcaagtggcattgtgccagcatttacggaggatgtcgctcgatctgtaaacgttgtacatgtcgtcgataccacaggagtacatggcgggcatatagaaccagtatcctatatctctttgttttccaatacacctggaaagctgacgaatgaattagtggaccttggaggcgaagaattttcttgcggaaggaacatgactactgacttggtaacatttacagtgaagtatggctgttggagttacaaagagagcagtaccggatggagcaggtctgaggttcctgtgctccttgtagaaagtgattcggttataggtggtgctcgacagacagtagtatcagtggataccaagtcatcgacgcgttggacgcttggaatcaacaaagatggaatcgatgacttcacagttcaagtggattcggagaagatagtcctacctggtgataagagcgagatagatgggtggcatacaatccagtttgcagggggcaagaactcgccgacgaagttccagctgacgctatactggtcgtctagcaaaccatctgagagagaagctaaacaagcagcggacgctcctttgctggtgaaactaagaacagatgtgaatagagtcacaccgcaggtggcaagggtggtggagaagctgccacggtggtgcacgcccttcggcaagtccacctctccgtacacgctagctttcttgacggccctccgtgtcgatatttagtcagtcagcagcatttgtttcccatacataggcgtccagtccagcacctttcgttttgaactgtattttagtttgatagtagcaagttataggcccatagaattgtacacaaaagctgccaagggcggtctggtgtaaacgtgctttgcacttgctctaatttgtcctgtatcaaagtttcagattagtttgtggtatttgtgtgtaccattcctg

SEQ ID NO: 152221 - DNA, 960 bp, Zea Mays
ttttttttttgcgaaacaacataatatagtaactcgacgatctgtctcttcttctcaggttgtacatgtcgtcgataccacaggagtacatggcgggcatatagaaccagtatcctatatctctttgttttccaatacacctggaaagctgacgaatgaattagtggaccttggaggcgaagaattttcttgcggaaggaacatgactactgacttggtaacatttacagtgaagtatggctgttggagttacaaagagagcagtaccggatggagcaggtctgaggttcctgtgctccttgtagaaagtgattcggttataggtggtgctcgacagacagtagtatcagtggataccaagtcatcgacgcgttggacgcttggaatcaacaaagatggaatcgatgacttcacagttcaagtggattcggagaagatagtcctacctggtgataagagcgagatagatgggtggcatacaatccagtttgcagggggcaagaactcgccgacgaagttccagctgacgctatactggtcgtctagcaaaccatctgagagagaagctaaacaagcagcggacgctcctttgctggtgaaactaagaacagatgtgaatagagtcacaccgcaggtggcaagggtggtggagaagctgccacggtggtgcacgcccttcggcaagtccacctctccgtacacgctagctttcttgacggccctccgtgtcgatatttagtcagtcagcagcatttgtttcccatacataggcgtccagtccagcacctttcgttttgaactgtattttagtttgatagtagcaagttataggcccatagaattgtacacaaaagctgccaagggcggtctggtgtaaacgtgctttgcacttgctctaatttgtcctgtatcaaagtttcagattagtttgtggtatttgtgtgtaccattcctgccccc

SEQ ID NO: 152222 - DNA, 1095 bp, Zea Mays
cctttcccgccacgcttcccctcctccccgtcctcctataaacgcccgccacgattcctctgccccaccccgcacaccgcgccacgcttgcagtaccagcaatccagagcggggcagatctaccgagatccgcgtcacagaggagagagagatcgccatggtggcggcgctgggacccggccggttctacggcagcggcctgccgaggccacgcttcttcccgggcgaccgcgtggacccgccggcgtccgtcaccgacccgctcctcgactgggcgcgcgaggcgcactggtccatgggcggcttcggcgtgaagcgcctccgcctgcagggccgcatcgagggctccatcgacaagctccgccgccgcacgcgccgcgacgccagggccaagaccaaggcccgctctgctggccacgtgcccgcctcgctgtccccgctcggctccgaggacgaggcggaggaggtggcggcgccggagcgggcgctcgtcgacgacgacgtggactcggacgggtccgacgagtcggagggggaggaggaggacgagcccctcgctgctatcgtcaccgccgccaagaagaggcgcgcgaggaagctcagcgacgagttcgaccgcatcgccgcggagcagcagtaccagctggtcgtggagaagaagcggaaggcgggtgcggccaagccggcgaggacgtcgccgaggaagcaggcttctgcacccgccgctgggtcgtcgccgaagagaaagcaggcttctgcacccgccgctggggcgccggcgatggtgtcgccaaagaggaaggccgccgcaccggccgctgcgccctcgtcggcggctggggcaaggaggacctcgccgaggaacaagcactgagcgtaggtcgctgtatgtgctgttttgtttattgatgtgaatcttgcgatcgtggggtgctactcctgaaaatgtgtaatcagtggctgtgcacaattgctggattggaatgaccatggaatggaatgaaatcgatggttatatctgaaatggaattgaattgacggttatcgtgattggagtgacgatacaatggaattgaatcgatggttatatttgaa

SEQ ID NO: 152223 - DNA, 755 bp, Zea Mays
atccccgaccaaaaccaatcgaacagactcgaggtagcggcgatggagatggagagcctcattgccatggtggccttcagcgaggcaccgttcgaccgcacctcggctgcgtcgtcgcttgccgccgggaacagcccatcctcatccaacgttcccaaggctgcgccgtcgaggttggcgttgctggccgccaagtggccgatggagagggtcgcggccatgatggccttctgcgaggcgccgttcgacggcgcctgggctctgtcgccaggtgccgctgtcggaggccgcgcctgcgcaacgaacgtccccgaggccccggcgaggctggccgcagccgcgaagacgaagaagcggccggtggataggctcgtggccacgatggccttctgcgaggcgccgttcgacggcaccttcgatggcacctcgtcggatgccgccggtgacgttgaagatacggcggcgttgaggcggcggccgtggctggccgacgccaaagaactggaacgagtggccattgcggccgcagcagcggctgctggtgagcgaaaaggttgatgggctcgcatcgcattggagtgaccgatggagtcagcaaggaccaaggagattgtttttttttccagtctcttcttttcctttttttaagatggtctttagggaaaaaccgtaggtgtcttcgctttgcgattttcaatctaattaagactgctgagttttgttcaaatctactactgaaataacgattacccgca

SEQ ID NO: 152224 - DNA, 692 bp, Zea Mays
acatcttaactttgcctcgctcgaaacccaagtcggaagccctcaggcgtagcgcgtccatggcgtccaccgcgctggtggcagtggcagtggggggcgccatttctctcggtctcgtcgcctcctctggcgtcgcgtcctgctccctgcgcgccggcggcgactcccggcggtttggcccccgactcgtcctcctgcggagaggaggcgccgaggtgagagttttcgtcttccccgtccctcctacctccccttgccattccattacttggtagcttcgaatcgggaggtacttgtctttgtttcgttatctgtgcgctatttagtatatttgcaactctgtctgccgaagcagaggggggtgtttgaatgcactagaactaatagttagtggctaaaattagttgaagacatctaaacatcctagctaatagtttaactattaggtatttttagtaaattagttaatagttagctctctttttgttagctagctaattccagtagcaattttttagctaactaattattagcttcatgtcaagttgtaccatttttcttttgccaaggaggtctcctgacttaactgcaaggctaatttgatgtgattgagtgaatccttttgatcagggggaggggacgaggacacggaattgcccaatatttcgttgtgccaataaggtggacgttgt

SEQ ID NO: 152225 - DNA, 1641 bp, Zea Mays
acatcttaactttgcctcgctcgaaacccaagtcggaagccctcaggcgtagcgcgtccatggcgtccaccgcgctggtggcagtggcagtggggggcgccatttctctcggtctcgtcgcctcctctggcgtcgcgtcctgctccctgcgcgccggcggcgactcccggcggtttggcccccgactcgtcctcctgcggagaggaggcgccgagggggaggggacgaggacacggaattgcccaatatttcgttgtgccaataaggtggacgttgtgaccgaggatgacagcgtcgatggtgacgttaccgacgatggagaagaccttgaggatgcagctgatgacgccattgatgctgatgttggtaccgaagatgaactggagtcttcgctgcctgaggatgttgagtggataaagcagcagccacttccttatcctttggtatgtactcagtgtcgatctgctaagattagtagtgaatggaatgacagatagccgccgggacggtaatgtaggatgctctggagccatacataagcaaggagacggtggagcagcactggggagttcaccagcagattcacgtggaccggctcaatggcatgatcggtggcagcgagtgggaaggcatgtcgctggggcagatgatgctcgcctccttcaatgagggcagggagcagccccatcctcccttcttccatgccgcacaggtatggaaccatgatttctattggcgatccatgaaacctggtggcgggggcaagccaccggaacggctcctgaagtttatcaatagagactttggctcccacgagggtatgatccggcaattcatggatgctgcactaactcagttcggttctggatgggtttggctttcctacaaaggaagcgggttgccttatgtgaaatcgagaagccccatcccatcggacaaccatggtaggctggtgatctcaaagactccaaatgccatcaaccctcttgtctggggccactctccactcctcgcgattgatgtttgggagcatgcatactatctggattacgaggatcgaagggctgactatgtttctgcgattctggagaagcttgtgtcgtgggaaacagtcgagtccaggctcgcgaaagccgttgcacgggcggtagaaagagatgagcatctccgcagaaggattctaaggaaacagcgtttagctcaggcaaacggacagagcagagctaggtctcgcgctcggcaagggaggcaaggagaccaggaagtcgccaggagccgtcccgtggaggcatgacaacgcagctggtaaatggggtgcatcaggacaccgttatgtagctgaatggcgatcaaccttttccctggtgacagtcttgagagcttgcatggtcatattggtctgttttaggccgcatccaccctcagcactgcgaggagggtgggataagttttgctaagtaggattaggggtagaggtagagatgtaaaatagacagaatttcgtcagacttggactcttggagaattcgttttgctcgttattctttgtgggatgtgagtgacaatgtaagaggacatgattgtgtgttctgatttctacaatccagtgctcggttttggtgaaatatatggatttaagat

SEQ ID NO: 152226 - DNA, 1572 bp, Zea Mays
acatcttaactttgcctcgctcgaaacccaagtcggaagccctcaggcgtagcgcgtccatggcgtccaccgcgctggtggcagtggcagtggggggcgccatttctctcggtctcgtcgcctcctctggcgtcgcgtcctgctccctgcgcgccggcggcgactcccggcggtttggcccccgactcgtcctcctgcggagaggaggcgccgagggggaggggacgaggacacggaattgcccaatatttcgttgtgccaataaggtggacgttgtgaccgaggatgacagcgtcgatggtgacgttaccgacgatggagaagaccttgaggatgcagctgatgacgccattgatgctgatgttggtaccgaagatgaactggagtcttcgctgcctgaggatgttgagtggataaagcagcagccacttccttatcctttggatgctctggagccatacataagcaaggagacggtggagcagcactggggagttcaccagcagattcacgtggaccggctcaatggcatgatcggtggcagcgagtgggaaggcatgtcgctggggcagatgatgctcgcctccttcaatgagggcagggagcagccccatcctcccttcttccatgccgcacaggtatggaaccatgatttctattggcgatccatgaaacctggtggcgggggcaagccaccggaacggctcctgaagtttatcaatagagactttggctcccacgagggtatgatccggcaattcatggatgctgcactaactcagttcggttctggatgggtttggctttcctacaaaggaagcgggttgccttatgtgaaatcgagaagccccatcccatcggacaaccatggtaggctggtgatctcaaagactccaaatgccatcaaccctcttgtctggggccactctccactcctcgcgattgatgtttgggagcatgcatactatctggattacgaggatcgaagggctgactatgtttctgcgattctggagaagcttgtgtcgtgggaaacagtcgagtccaggctcgcgaaagccgttgcacgggcggtagaaagagatgagcatctccgcagaaggattctaaggaaacagcgtttagctcaggcaaacggacagagcagagctaggtctcgcgctcggcaagggaggcaaggagaccaggaagtcgccaggagccgtcccgtggaggcatgacaacgcagctggtaaatggggtgcatcaggacaccgttatgtagctgaatggcgatcaaccttttccctggtgacagtcttgagagcttgcatggtcatattggtctgttttaggccgcatccaccctcagcactgcgaggagggtgggataagttttgctaagtaggattaggggtagaggtagagatgtaaaatagacagaatttcgtcagacttggactcttggagaattcgttttgctcgttattctttgtgggatgtgagtgacaatgtaagaggacatgattgtgtgttctgatttctacaatccagtgctcggttttggtgaaatatatggatttaagatctcaa

SEQ ID NO: 152227 - DNA, 878 bp, Zea Mays
ccggaggagaaacaaaagacgcaagaagagcaagcagtaacgcgggaagcgagggggggcgggcccacggacaaaacagtggatagatataaacaagagggcgagcgcatcagctcggacttccccgccccgtccaagagcagcgccgtctcgtcgccatgggtctgcaggaggagttcgaggagcacgccgagaaggccaagaccctgcctgccaccacgacgaacgagagcaagctcgtcctctacggcctctacaagcaggccaccgtcggcgacgtcagcaccggtcgtcctggcatcttcagcctgaaagagagagccaaatgggatgcttggaaggctgttgaagggaaatccaaggacgaagcaatggccgactacatcaccaaggtgaagcagctgctggaggccgccgccgcatccacctcctaggctactcaagggaaaacaaaaaccatgatccgcagtcgcatatacgtatacatgttgtcatgatatacgctcgccaataaatcttatcattgttgtactgcttggtatggcttctgatgccatatatactcatcacccttcaaactaaggctgtaaactcttgcgaaaacaaactggatgtccctgtgatactagcatatgctgaaatgtttaggctgggtcccactaacatcggcgtcgacggatgacatggcagtcgttattgcccggttggtctaaatgtcaactggtctgcgctttcgaccagttgacccgatcgataaccggattgattggtatcgacctgcctgctagagaattggttgatgctgattttgatagagaattggttgatgtcgattttgatcgatcgataccaatcatttgttgctatacaacaatttc

SEQ ID NO: 152228 - DNA, 2736 bp, Zea Mays
aaattccagttgctcgctccactccactcccctcccccggtcccgttccgtcggcggccggacaaaaccgccagactctctcgtcccccggcccggccctcccagacccagttccatccttttgcttgcttgcggttgcgggcaaccgctgtgatagagcgagcgaccgacctgtagtacgggagagggttggaaggagcgaaaggagagagaggttggtggttgtttggtggaggagaatagttggttgtcttcagggagggagagagggaaagatggagcgcaaggcggtggtggtgtgcgcggtggtcggcttcctcggcgtcctcgcggcggcgctcggcttcgcggcggaggccacccgcgtcaaggtttcggacgttcaaacaagcggcagtcctggtgaatgcatatacccaagaaccccagccttggcactgggtttaatatctgccgcctctcttatgctcgcccagtccatcataaacgcagtcgctggttgcatctgttgcaagaagcatcctgttccctcagacactaactggagcatagccctgatttcgttcatcgtatcttggtgcactttcataatctcgttccttctcctactgactggggccgccctgaacgaccagagaggcgaggagaacatgtacttcggtagcttctgctacgtggtgaagccgggggtcttctccgggggagcggtgctggccctcgccagcgtggcgctagccatagtctactacgtcgcgctgtcatcatccaagggccctccgccggcgttcgcagccccgcagaaccagggcatcgcgatgggccagcccgtgatcatcccgcagcagagcagcgagccggtgttcgtccacgaggacacgtacaatcggcggcaacaggtcccgtgacctgaccacacagaggtctatggttggttcggttggttgtgcttggtctgtataggttgcaggttagaacagtagccgtcgccattgctgttatagctagatcctgttctttttgtttttgttctacttgtaccctcgtgtttgtcgagcatggaatgtttggttctgaatgaactgggtaatgttgaagagagcctgcttgtttcgtgttctgtaaacgtgggggctcgccggcatgaagtgcttccctttcgtcgacctccgcagcattcgctcactagatatcctcgtgtctgttacaaaatattgtatattgtatatgtgaccaatccaaagggtgcgacagattctccctaagggacataccccttgagagacaccccttcacatgtatataatcaggactctcctgcaataataaaggacaactgtcatttgcactgttcctctgttcacttgttttccactgagttacaacacgttatcagcacgaactctctccactgaacgaggaaaagtcttgcgtgtgcaccagcgacggcggttaccggatcgtcttcggcaacagtgaacatgacgatgtgcaggcaggctgatgatgtgcaagcacggatgcagtggttcatggcgttggccacgtgaacaaccaaaaagtaaatctctattatattcaggtttgagatttaccttttgatctagcaaattaaatatgcatgtttgctctaccaacgttgtgccgctacccatctcggtatgcattccagtgattgggatgtgtcgcttccgttcgcacgtccacgcatggcagcgacggcgagtctgcggcaacagcgaaatgcactccgcgggccacgcatgcagcaaacgctatgccgctggcggggctgagaagcccaccaccgtaatggtgcagttgcaccggaccatgcaatggtgcggttgcaggcttgcagcagcgctcgcatgcgtgttcggacccgagcggcgtaggaggttgggcattggctggggctgttgcgcccgtactgggccgtcacatggtcggagcccatgctggaggaggacgccggggccgcgcaccggagtgtgttgtggccggcaaagccagcctcggagccgtgcccggccgaagcgccagcgtcgggacgccgagccaccaggggccgctcccgcgcacccgcacaggggctgcgcgcagccaccgccggctgtgcgcccgttggggagcgcctgcagtgtggccgtcgtagggcggcgtgccccgatgacggggccacgacaccggtggccacgcccgcgtccgcagggctgctagggccagggtcgccgtgcccaggccgcaccatggccgcgcccgcgcgtgcaatgctgctggggccggagtcgccgtgcccaggccgcaccatggccggatcccgtgcctggccgcatgccgcgccatcggcagtggccgccggggcttggccggagcaaacaccatggcggcggctgcaagaaggtaggagcggttagggtttccaatacccttaataccgtgtctggccgcctggccatgcttgggccgcaccaggcctcatgggctggccgcgcctggccgcgtgggtcgcgccagaccgcctagatgcttggaccgcttgggccgtgcctggcttggctgagccgcccggccacatgtatgactggctaaatttactcattattttctgcaaatttaattacaagactctatgatgtatcacagtttcaatcagtatttagtatctaaatttgaatatttagactgctgatgatatatataattgtgatagtcatctgtttttattataaaaaa

SEQ ID NO: 152229 - DNA, 104 bp, Zea Mays
gaacaagctgccgatgcacaatattttttggcgtgttcaatgatattcatagtaaatacctcatctcaaattaaaggctattttcgcatttctaggtacaatag

SEQ ID NO: 152230 - DNA, 2879 bp, Zea Mays
gtgttgtgctgtgttatttaacgcctcatcgcctctacctcgcccgtccgcaaacccctctctcgatcgacacacgcagccgcgacctgacccgaccctcccgaggccgccagccttatcctctccgcctcccgccgtcccccgcgacccatccgcaagcgcgaggtgagtccgcagcccgtgctcccgcgctccttcctcgcctccccctctaattagaggctcctccgcgctctcggcaggggtttagctgccgtggtctgaggattgggtgagtgtggaactggatgccagcgccgcacagctccagttcggtggccggtgggtgtgggtcttgggtttcggggcgaggtggtttgggttcgtccgtgtagatagcgtatagagagtggtggcgagtgggtttggtcatctgctgcgttagtgagtgtccttttcctctccatttgcaccagagctagcgtatgtccgaccgtagcaggtgttcaattgttcggtaaaaaaaatgtgctttccatttgcatcagagatagcgttactcccttttgcttgagagatggttaggaggctggctatggattatgtgtctgcttcgatcgttttctcatgctaatgtgactcctgccgcacatgcagtagaagacatggcctcgacgttcggtgccacttctacagttggccttatggctgctccaacggggaagaatgtgcgccttcagaggagggctaacttcagagtaaaagcggctaaggagctgtacttcaacaaggatgggtcagctatcaagaagctccagactggagtcaataagcttgcagacctagttggagttacactcggaccgaagggaaggaatgtcgttttggagagcaagtacggctctcccaagattgttaacgatggcgttacagttgcaagagaggttgagctggaggaccctgtggaaaacattggagctaaattggtcaggcaagctgcagctaagaccaacgatcttgctggagatgggacaaccacctctgtggtccttgctcaggggctgattgctgagggtgttaaggtcgtggcagctggtgctaatcctgttcagattactcgtggtattgagaaaacagctaaagcactagttgaagaactaaggaagttgtctaaggaggttgaagatagtgagcttgcagatgttgctgcagttagtgctggcaacaactatgaaattggtaacatgatagcagaggccatgagcaaggtcggtcggaagggcgttgtcacccttgaagaggggaagagttctgagaactttctctatgttgtggagggaatgcaatttgaccgtggttacatctctccgtactttgtaacagacagtgagaaaatgactgcagagtacgagaactgcaagctgcttttggttgataagaaaatcaccaacgcaagggatcttatcaacgttttggaagaagccatcagaggtgcatacccaatcctgataattgcagaggatattgagcaggaggctcttgctacccttgtcgtcaacaagctcagaggatcactgaagatcgctgccatcaaagcccctggttttggagagcgcaagactcagtacttggatgatattgccatccttactggagcaactgtaatcagagatgaagttgggctgtcacttgacaaggccgacaaatcagttcttggaacagctgcaaaggttgtccttacgaaagagtcgacaacaattgttggtgatggcagcacccaggaagaagttactaagagggttgcacagattaaaaatctcattgaggcagcagaacaagaatatgaaaaggaaaagctcaatgagaggatagcgaagcttgctggcggtgttgctgtcattcaggtgggagcacaaacagaaactgaactaaaagagaagaagttgagagttgaggatgccctaaatgcaactaaggctgccgttgaggaaggtattgttgttggtggagggtgcactcttttgcggcttgcagctaaagtcgacgccatcaaggatacactggagaacgacgagcagaaggttggagctgaaatagtaaggagggccctgagctacccacttaaattgattgctaaaaacgccggtgtcaatggcagtgttgtcactgagaaggtcctttctaatgataacttcaagtatggttacaatgctgctactggacagtacgaggacctgatggctgctggtatcattgaccccaccaaggtggtgagatgctgcttggagcacgccgcgtcggtggccaagaccttcctgacatcagatgttgtggtcgtcgatatcaaggagccggaggctgcacctgtcgcaaacccgatggacaactctggctatggatactgatgagatgctatggccatgccccatgggacgaaggtgatcaccatattaattttttggtaggcgaggagtcgggtcgaggtagctttttagacgaccgaaaggcgaaaataagttgaggatctgcatcccaaatttgtgatgtaaactgagacagaacagcagccaaatgaagcagagatttgctgaaagattctgtaactggttgcagctaatgttgaatgcagtttgcacacgaccaattcaaatggctccggcaacgtcagattatgctgcgtcgaaactgatttgaaactgatacaccggagcggtctcctctctgggagcgatccatatttttgtgtactttctgatttgatgaacgactccatctgtttgtttctagaagataatgtatttgagggcgtctgtttttaaaagaaaagtttgcatgagtacccagttgctacagttctcggggatgtgggcagaacacgtataattttgaaataattgcta

SEQ ID NO: 152231 - DNA, 2408 bp, Zea Mays
gtgttgtgctgtgttatttaacgcctcatcgcctctacctcgcccgtccgcaaacccctctctcgatcgacacacgcagccgcgacctgacccgaccctcccgaggccgccagccttatcctctccgcctcccgccgtcccccgcgacccatccgcaagcgcgagtagaagacatggcctcgacgttcggtgccacttctacagttggccttatggctgctccaacggggaagaatgtgcgccttcagaggagggctaacttcagagtaaaagcggctaaggagctgtacttcaacaaggatgggtcagctatcaagaagctccagactggagtcaataagcttgcagacctagttggagttacactcggaccgaagggaaggaatgtcgttttggagagcaagtacggctctcccaagattgttaacgatggcgttacagttgcaagagaggttgagctggaggaccctgtggaaaacattggagctaaattggtcaggcaagctgcagctaagaccaacgatcttgctggagatgggacaaccacctctgtggtccttgctcaggggctgattgctgagggtgttaaggtcgtggcagctggtgctaatcctgttcagattactcgtggtattgagaaaacagctaaagcactagttgaagaactaaggaagttgtctaaggaggttgaagatagtgagcttgcagatgttgctgcagttagtgctggcaacaactatgaaattggtaacatgatagcagaggccatgagcaaggtcggtcggaagggcgttgtcacccttgaagaggggaagagttctgagaactttctctatgttgtggagggaatgcaatttgaccgtggttacatctctccgtactttgtaacagacagtgagaaaatgactgcagagtacgagaactgcaagctgcttttggttgataagaaaatcaccaacgcaagggatcttatcaacgttttggaagaagccatcagaggtgcatacccaatcctgataattgcagaggatattgagcaggaggctcttgctacccttgtcgtcaacaagctcagaggatcactgaagatcgctgccatcaaagcccctggttttggagagcgcaagactcagtacttggatgatattgccatccttactggagcaactgtaatcagagatgaagttgggctgtcacttgacaaggccgacaaatcagttcttggaacagctgcaaaggttgtccttacgaaagagtcgacaacaattgttggtgatggcagcacccaggaagaagttactaagagggttgcacagattaaaaatctcattgaggcagcagaacaagaatatgaaaaggaaaagctcaatgagaggatagcgaagcttgctggcggtgttgctgtcattcaggtgggagcacaaacagaaactgaactaaaagagaagaagttgagagttgaggatgccctaaatgcaactaaggctgccgttgaggaaggtattgttgttggtggagggtgcactcttttgcggcttgcagctaaagtcgacgccatcaaggatacactggagaacgacgagcagaaggttggagctgaaatagtaaggagggccctgagctacccacttaaattgattgctaaaaacgccggtgtcaatggcagtgttgtcactgagaaggtcctttctaatgataacttcaagtatggttacaatgctgctactggacagtacgaggacctgatggctgctggtatcattgaccccaccaaggtggtgagatgctgcttggagcacgccgcgtcggtggccaagaccttcctgacatcagatgttgtggtcgtcgatatcaaggagccggaggctgcacctgtcgcaaacccgatggacaactctggctatggatactgatgagatgctatggccatgccccatgggacgaaggtgatcaccatattaattttttggtaggcgaggagtcgggtcgaggtagctttttagacgaccgaaaggcgaaaataagttgaggatctgcatcccaaatttgtgatgtaaactgagacagaacagcagccaaatgaagcagagatttgctgaaagattctgtaactggttgcagctaatgttgaatgcagtttgcacacgaccaattcaaatggctccggcaacgtcagattatgctgcgtcgaaactgatttgaaactgatacaccggagcggtctcctctctgggagcgatccatatttttgtgtactttctgatttgatgaacgactccatctgtttgtttctagaagataatgtatttgagggcgtctgtttttaaaagaaaagtttgcatgagtacccagttgctacagttctcggggatgtgggcagaacacgtataattttgaaataattgcta

SEQ ID NO: 152232 - DNA, 2405 bp, Zea Mays
gtgttgtgctgtgttatttaacgcctcatcgcctctacctcgcccgtccgcaaacccctctctcgatcgacacacgcagccgcgacctgacccgaccctcccgaggccgccagccttatcctctccgcctcccgccgtcccccgcgacccatccgcaagcgcgagaagacatggcctcgacgttcggtgccacttctacagttggccttatggctgctccaacggggaagaatgtgcgccttcagaggagggctaacttcagagtaaaagcggctaaggagctgtacttcaacaaggatgggtcagctatcaagaagctccagactggagtcaataagcttgcagacctagttggagttacactcggaccgaagggaaggaatgtcgttttggagagcaagtacggctctcccaagattgttaacgatggcgttacagttgcaagagaggttgagctggaggaccctgtggaaaacattggagctaaattggtcaggcaagctgcagctaagaccaacgatcttgctggagatgggacaaccacctctgtggtccttgctcaggggctgattgctgagggtgttaaggtcgtggcagctggtgctaatcctgttcagattactcgtggtattgagaaaacagctaaagcactagttgaagaactaaggaagttgtctaaggaggttgaagatagtgagcttgcagatgttgctgcagttagtgctggcaacaactatgaaattggtaacatgatagcagaggccatgagcaaggtcggtcggaagggcgttgtcacccttgaagaggggaagagttctgagaactttctctatgttgtggagggaatgcaatttgaccgtggttacatctctccgtactttgtaacagacagtgagaaaatgactgcagagtacgagaactgcaagctgcttttggttgataagaaaatcaccaacgcaagggatcttatcaacgttttggaagaagccatcagaggtgcatacccaatcctgataattgcagaggatattgagcaggaggctcttgctacccttgtcgtcaacaagctcagaggatcactgaagatcgctgccatcaaagcccctggttttggagagcgcaagactcagtacttggatgatattgccatccttactggagcaactgtaatcagagatgaagttgggctgtcacttgacaaggccgacaaatcagttcttggaacagctgcaaaggttgtccttacgaaagagtcgacaacaattgttggtgatggcagcacccaggaagaagttactaagagggttgcacagattaaaaatctcattgaggcagcagaacaagaatatgaaaaggaaaagctcaatgagaggatagcgaagcttgctggcggtgttgctgtcattcaggtgggagcacaaacagaaactgaactaaaagagaagaagttgagagttgaggatgccctaaatgcaactaaggctgccgttgaggaaggtattgttgttggtggagggtgcactcttttgcggcttgcagctaaagtcgacgccatcaaggatacactggagaacgacgagcagaaggttggagctgaaatagtaaggagggccctgagctacccacttaaattgattgctaaaaacgccggtgtcaatggcagtgttgtcactgagaaggtcctttctaatgataacttcaagtatggttacaatgctgctactggacagtacgaggacctgatggctgctggtatcattgaccccaccaaggtggtgagatgctgcttggagcacgccgcgtcggtggccaagaccttcctgacatcagatgttgtggtcgtcgatatcaaggagccggaggctgcacctgtcgcaaacccgatggacaactctggctatggatactgatgagatgctatggccatgccccatgggacgaaggtgatcaccatattaattttttggtaggcgaggagtcgggtcgaggtagctttttagacgaccgaaaggcgaaaataagttgaggatctgcatcccaaatttgtgatgtaaactgagacagaacagcagccaaatgaagcagagatttgctgaaagattctgtaactggttgcagctaatgttgaatgcagtttgcacacgaccaattcaaatggctccggcaacgtcagattatgctgcgtcgaaactgatttgaaactgatacaccggagcggtctcctctctgggagcgatccatatttttgtgtactttctgatttgatgaacgactccatctgtttgtttctagaagataatgtatttgagggcgtctgtttttaaaagaaaagtttgcatgagtacccagttgctacagttctcggggatgtgggcagaacacgtataattttgaaataattgcta

SEQ ID NO: 152233 - DNA, 2302 bp, Zea Mays
tcgcctctacctcgcccgtccgcaaacccctctctcgatcgacacacgcagccgcgacctgacccgaccctcccgaggccgccagccttatcctctccgcctcccgccgtcccccgcgacccatccgcaagcaagacatggcctcgacgttcggtgccacttctacagttggccttatggctgctccaacggggaagaatgtgcgccttcagaggagggctaacttcagagtaaaagcggctaaggagctgtacttcaacaaggatgggtcagctatcaagaagctccagactggagtcaataagcttgcagacctagttggagttacactcggaccgaagggaaggaatgtcgttttggagagcaagtacggctctcccaagattgttaacgatggcgttacagttgcaagagaggttgagctggaggaccctgtggaaaacattggagctaaattggtcaggcaagctgcagctaagaccaacgatcttgctggagatgggacaaccacctctgtggtccttgctcaggggctgattgctgagggtgttaaggtcgtggcagctggtgctaatcctgttcagattactcgtggtattgagaaaacagctaaagcactagttgaagaactaaggaagttgtctaaggaggttgaagatagtgagcttgcagatgttgctgcagttagtgctggcaacaactatgaaattggtaacatgatagcagaggccatgagcaaggtcggtcggaagggcgttgtcacccttgaagaggggaagagttctgagaactttctctatgttgtggagggaatgcaatttgaccgtggttacatctctccgtactttgtaacagacagtgagaaaatgactgcagagtacgagaactgcaagctgcttttggttgataagaaaatcaccaacgcaagggatcttatcaacgttttggaagaagccatcagaggtgcatacccaatcctgataattgcagaggatattgagcaggaggctcttgctacccttgtcgtcaacaagctcagaggatcactgaagatcgctgccatcaaagcccctggttttggagagcgcaagactcagtacttggatgatattgccatccttactggagcaactgtaatcagagatgaagttgggctgtcacttgacaaggccgacaaatcagttcttggaacagctgcaaaggttgtccttacgaaagagtcgacaacaattgttggtgatggcagcacccaggaagaagttactaagagggttgcacagattaaaaatctcattgaggtctgaccttttcctgttctatttgctcacttgactttactgctcaggtgaaagtctgaagctctgtttttatgaacctaatttgcaggcagcagaacaagaatatgaaaaggaaaagctcaatgagaggatagcgaagcttgctggcggtgttgctgtcattcaggtgggagcacaaacagaaactgaactaaaagagaagaagttgagagttgaggatgccctaaatgcaactaaggctgccgttgaggaaggtattgttgttggtggagggtgcactcttttgcggcttgcagctaaagtcgacgccatcaaggatacactggagaacgacgagcagaaggttggagctgaaatagtaaggagggccctgagctacccacttaaattgattgctaaaaacgccggtgtcaatggcagtgttgtcactgagaaggtcctttctaatgataacttcaagtatggttacaatgctgctactggacagtacgaggacctgatggctgctggtatcattgaccccaccaaggtggtgagatgctgcttggagcacgccgcgtcggtggccaagaccttcctgacatcagatgttgtggtcgtcgatatcaaggagccggaggctgcacctgtcgcaaacccgatggacaactctggctatggatactgatgagatgctatggccatgccccatgggacgaaggtgatcaccatattaattttttggtaggcgaggagtcgggtcgaggtagctttttagacgaccgaaaggcgaaaataagttgaggatctgcatcccaaatttgtgatgtaaactgagacagaacagcagccaaatgaagcagagatttgctgaaagattctgtaactggttgcagctaatgttgaatgcagtttgcacacgaccaattcaaatggctccggcaacgtcagattatgctgcgtcgaaactgatttgaaactgatacaccggagcggtctcctctctgggagcgatccatattttt

SEQ ID NO: 152234 - DNA, 2291 bp, Zea Mays
tcgcctctacctcgcccgtccgcaaacccctctctcgatcgacacacgcagccgcgacctgacccgaccctcccgaggccgccagccttatcctctccgcctcccgccgtcccccgcgacccatccgcaagcaagacatggcctcgacgttcggtgccacttctacagttggccttatggctgctccaacggggaagaatgtgcgccttcagaggagggctaacttcagagtaaaagcggctaaggagctgtacttcaacaaggatgggtcagctatcaagaagctccagactggagtcaataagcttgcagacctagttggagttacactcggaccgaagggaaggaatgtcgttttggagagcaagtacggctctcccaagattgttaacgatggcgttacagttgcaagagaggttgagctggaggaccctgtggaaaacattggagctaaattggtcaggcaagctgcagctaagaccaacgatcttgctggagatgggacaaccacctctgtggtccttgctcaggggctgattgctgagggtgttaaggtcgtggcagctggtgctaatcctgttcagattactcgtggtattgagaaaacagctaaagcactagttgaagaactaaggaagttgtctaaggaggttgaagatagtgagcttgcagatgttgctgcagttagtgctggcaacaactatgaaattggtaacatgatagcagaggccatgagcaaggtcggtcggaagggcgttgtcacccttgaagaggggaagagttctgagaactttctctatgttgtggagggaatgcaatttgaccgtggttacatctctccgtactttgtaacagacagtgagaaaatgactgcagagtacgagaactgcaagctgcttttggttgataagaaaatcaccaacgcaagggatcttatcaacgttttggaagaagccatcagaggtgcatacccaatcctgataattgcagaggatattgagcaggaggctcttgctacccttgtcgtcaacaagctcagaggatcactgaagatcgctgccatcaaagcccctggttttggagagcgcaagactcagtacttggatgatattgccatccttactggagcaactgtaatcagagatgaagttgggctgtcacttgacaaggccgacaaatcagttcttggaacagctgcaaaggttgtccttacgaaagagtcgacaacaattgttggtgatggcagcacccaggaagaagttactaagagggttgcacagattaaaaatctcattgaggcagcagaacaagaatatgaaaaggaaaagctcaatgagaggatagcgaagcttgctggcggtgttgctgtcattcaggtgggagcacaaacagaaactgaactaaaagagaagaagttgagagttgaggatgccctaaatgcaactaaggctgccgttgaggaaggtattgttgttggtggagggtgcactcttttgcggcttgcagctaaagtcgacgccatcaaggatacactggagaacgacgagcagaaggttggagctgaaatagtaaggagggccctgagctacccacttaaattgattgctaaaaacgccggtgtcaatggcagtgttgtcactgagaaggtcctttctaatgataacttcaagtatggttacaatgctgctactggacagtacgaggacctgatggctgctggtatcattgaccccaccaaggtggtgagatgctgcttggagcacgccgcgtcggtggccaagaccttcctgacatcagatgttgtggtcgtcgatatcaaggagccggaggctgcacctgtcgcaaacccgatggacaactctggctatggatactgatgagatgctatggccatgccccatgggacgaaggtgatcaccatattaattttttggtaggcgaggagtcgggtcgaggtagctttttagacgaccgaaaggcgaaaataagttgaggatctgcatcccaaatttgtgatgtaaactgagacagaacagcagccaaatgaagcagagatttgctgaaagattctgtaactggttgcagctaatgttgaatgcagtttgcacacgaccaattcaaatggctccggcaacgtcagattatgctgcgtcgaaactgatttgaaactgatacaccggagcggtctcctctctgggagcgatccatatttttgtgtactttctgatttgatgaacgactccatctgtttgtttctagaagataatgtatttgagggcgtctgtttttaa

SEQ ID NO: 152235 - DNA, 237 bp, Zea Mays
atggcgtccccggcggcatgggcgagccccagccaagcgcgacaatggcgtggtgtcgtggacgcggcccggcttgggtgcataccccggcggcacgggcgctgcctggcgtggtcgatacccggcgacgcgggcatgactccggcctggcacccctcgcgcgggcacgaccacgttgcacaggcacgggcgcagcaaaagccagaggcgctacggcgcggacgtgacccggcatga

SEQ ID NO: 152236 - DNA, 2930 bp, Zea Mays
gcgctggtgggtcgctgcggcgagcagtacgcacgcgagcacacttcccccttcgacggatccgcgcctccttcttccatcgtcaacacacagtaccgcgacgaggcaatccttccgcctctcgtccacgacgacgctgcgaaggtggcgtccttggattcgggaaacgactttggcctgcagcagaccgccacggtgcttgcgtccctggggtccgacgagatgtcttcatcgaccatgctcctcgccggctccatatccgaccgctacattccgccgctctacgacgacgactgctacaccatgccacaaccatttgtcgatactctcgccaaccccgacgatgacctcctccaggagctcgacgtgttggacgaggatgccgcgagcgccaacgcggctgacgacgattcaggcgctgtcctcgtctatgcgccgctcgactcgaacatcgacagcagcggatcaccgcgctacccgtgcctccccgagggcgcggtgttgttccatcgggacccggacgagaaggtcctcatcggcgggacggagttgtccggcgaagtccgccgcctccgtttctccttgtcgtcaccagaccaggcgatgaaccccgcgctcgtccccaacaccgacgcagaggaggaggaggttctcaccatcacgcccaccaagtgttcgacaatatacctcaaccgcggcatttactccgtccccaacccggtcctccatcgtcagcacctactccgggactgcgacggcaaccacgtcggagtcgacgtcgacatccttcctacctccgagttcgacgagggtcccatcttcgacgaggagccctgcttccaccgcagcctcctggattcagatccagactctccctacgactgggtcatccccgtcatcgccgtccacggcagcggcgacactgagctgtcccacagcgaagccgacaaggtccccgcgaccgccgcgctacccaacctgcgcgagaagatctgctgtcggttcgtcgataggacgaagctgtcccgccacgtccgcctcatccacttctccctaccgtcgccggaccaggtgctcggcatccccaccggcacgcatgtcttcgactgcaccagcgttgacgggaagccgtgtatgcgatcgtacacgccgacgagcaaggaggacgaagttctcgccactacgcccaacaggtgtttgatgaattgcttcatcctcacacagagttgtttctcgcctccggtcagttgcagctgggatgcagtgatgcagagacaaccatggccaccacctatgcaatccaaccgtgttgtgagcatcaccgaccgccacaccgaggaggccagccccgtgcgcaaactggttgccgagatcattggtgtgcttgggtcaaaacacatgagaactgtcacgccgcttcctgacaccggtcaatggctgcttctatcattgatcgagaagctccctcaaagcgtggttgatctactgagagctcatgttatcaatctccatcattatctgatgttgtttagcttgctgggattttcagttctgttcgactgtatcaaagcacctgactcgaatgctatctgtagaggcataacacaggatatgacatatgctgctgttcaagcttacacagatgcatatcagcctgattgggaacgtatcaacttcattgtagacattttgagatcgactcctggagaagggccttcgtggtaccatcttttgaagaaagttagtggcggctgcaatgatcttaagaacaacgaacacatgcttgttgttgtccttaccaaacagcaagctattaagacaggaggcaacttccagatcgtggagtatttcctggttgaggcaatccaaatccagtcatatggagcagagggcaataccgagctcaacctttcaactggtgactacatagtggtaggggtgtcagatgtccaggtctggtgtggctgcgatctgctattccgcattacagactggcacattccatggcatatcatcttggcggtatcaaaattttccatcagcttgggagccagccgaagctcaagaatggagaaatgtcagccatatgtccagtcgtcagtcacttcccgtgacaagcaaaagttgtttgtccgattctttggtgtgctctacagagtgttcaacaagatgaacttcatgctgctgttggacgacgattgggagccactgatggataattaccggcctttgggaataaaatctctgaggttcagcacattttctcttggaaatatgtcaccaaagatagaagagcaaaaaattcagtacaccattcataccattggaggaagcgtaactgcagttcatggattttttgtccaacttggtgtcaatgtggatacgagtgactgggagcttcaaactctgggaagactttcggttactgtggcaaagcaagccaagctcgaccgcttccccatcatcattagtgatccaatatcagctacgttcggtgaaccatttgagaaagccaacccaagccattcctccacagcaatcgtttgtcgagctggttcaggaattggtatggctgttggccttgtttcttctagtctaggtgctgttgctagtggccaaggcaatttcatagtcttagtttgggatcctggtggttatgcatatcacagcttggggacaagctagcttggggacaagctgtatttcaagcggtggggaatgtcagcatctcagacaggagcaatgagcagacaacgagaacaagccacggcacgtgagagtctatcgtccaaacgccaaggttactgagccaatatggtccaagtagtgtgtcagctatctatggatcgcttgatgttcgagtagtactatataaaagacaaacacttgtgtaatagggtcatgaacaatttagctatcaaatatcagac

SEQ ID NO: 152237 - DNA, 354 bp, Zea Mays
atgggaaagcaggggcgcgccagggaagaagttgcgcgcgggtggggaagaatcaggggcgagcttgtcgcggccaacaggaagcagtgtgcgcggcgatgggagcggcttcatgacgagggcgtacagagcacagggagatgggcgccatccgagccaggggcgagctcggggcagggaggaccgccgcgatggggaggaagaaaagcgcggtgtggaggcgagctgccgtgggctgctcagcgtggagatgacggcctgtgttttgtattcccagccgaacgtgagcagaaaaatctgagcagaggaaaaaaaagatccacgatggatgaagactacggcggcagaggataa

SEQ ID NO: 152238 - DNA, 666 bp, Zea Mays
gtgttgtacagaacatgagtaccacaactgccaagggaaaaggagaacctcaaaatgcaaatgatgcaccactcgatgttcagcccttaacaatagcgtatccgggggaaccagtggtctgcacaccaagacccatcgtgtcgcatcctgcatataatggtggatggaaggttctccgccacatcaggccaaatggaagatctgatttcacattcattcatcaaacccatggcaaattccgctccaaaaaacaagttcttaatcatctgaattgtctgttgaggggaaaggggaaggattcagcagatgaggctaagcagggttgtggcgctaatcagcaagctcaaggaatgggtggtgctccatcaagtgctagtcttctattggctgaaggaaaacctcctacagtgacgatgatgaatcaaccagctgaataaagttgcgctacatctgctagtaattcagtcagcggaatgagcaatgaatcatgctgaaggaagttgtgctagctgtatcttctagctattcaatcagtggaattggtggtacctagactattaaaaaacaatgttaactcatttaattttaaggacccaacagtaagatttgttatgttgatgtgtgtactagcatatatattcccagtattgttgctgcttctcacaa

SEQ ID NO: 152239 - DNA, 837 bp, Zea Mays
ggctccccaacccaatcctccagctgcggaatggcggcggcggagccgtgctgcatctcgcacgcgttcgagcgcgccactcgccaggaacccggccgcctcgccgtcatccacgcagcggcctcgggcgccgacagcgaggagcgccgcttcacttgcggcgacctcctcgccgccgtcggctccctctcccgccgcatcgccgccgcgctcggcagcaccgccaccgatacccgccgcgaccgcgagcaaggctcaggtgcgtcaacgccaatcaaccgctcggctgttcgcgcttgcttgccccccctcccctgtcgtagtctcgtgtctgactgacggagactaattcggaaccgacgcaagggtttcgggccgccggcgccgtagtgccgagggttgtcggggtatacgcctcgccatcgttggagtacgtcgccgccgtcctcgcggtgctcaggtgcggcgcggcgttcctcccgctcgacccgtcgtggccggaggagagggtctcgtgggctatctcggcgtccaacgcggcgctcgtcgtgtcttcagttgggtcgcgaggagccacgctgtttgagagcagcgcctgccctgttctgcgcttttatggtggcatccggcggcgatttcgggatggaaatggcggggatgacggggaggagcttgtctggccgtgcgagcacgagtggcaccgcaagttctgctacgtgatgttcacctctggttctaccggaaaaccgaagggtgtttgcggcactgagaaaggagttcctttctgcggtcttgacttgctcaacacttgtcattcctcccagtgagtggagagct

SEQ ID NO: 152240 - DNA, 3025 bp, Zea Mays
atggcggcggcggagccgtgctgcatctcgcacgcgttcgagcgcgccactcgccaggaacccggccgcctcgccgtcatccacgcagcggcctcgggcgccgacagcgaggagcgccgcttcacttgcggcgacctcctcgccgccgtcggctccctctcccgccgcatcgccgccgcgctcggcagcaccgccaccgatacccgccgcgaccgcgagcaaggctcagggtttcgggccgccggcgccgtagtgccgagggttgtcggggtatacgcctcgccatcgttggagtacgtcgccgccgtcctcgcggtgctcaggtgcggcgcggcgttcctcccgctcgacccgtcgtggccggaggagagggtctcgtgggctatctcggcgtccaacgcggcgctcgtcgtgtcttcagttgggtcgcgaggagccacgctgtttgagagcagcgcctgccctgttctgcgcttttatggtggcatccggcggcgatttcgggatggaaatggcggggatgacggggaggagcttgtctggccgtgcgagcacgagtggcaccgcaagttctgctacgtgatgttcacctctggttctaccggaaaaccgaagggtgtttgcggcactgagaaagatgatgttttgttgtttaagacatctgtcagctttgttgaccatctacaggagttcctttctgcggtcttgacttgctcaacacttgtcattcctcccagtgagtggagagctaatccagcatccttggccaacttaattaaggtttatcggatatcaaggatgacattggttccatcacttatggagataatactacctaccctggcggaaaaactttctgatggctgtaacccacttaagatcctaatatttagtggggaagttctgtctgtatcgctgtggaagagagtctatgaatttctgccagaggctactatcataaatctgtatggaacaacagaggtttccggtgactgtgcattctttgattgcaaaaaattgcctacaattttggagcaagaagaactaaacagtgtaccaattgggtttcctatttcaaattgtgaggtttctcttgtcaccaatgatggactatcagatgaaggtgaaatctctgtcagtggagcatgcttgtttactggatatttagctgatcccatgacaagtaactgccctgaaggcagtgaagttttagcatactacagaacaggtgactttgcccggcgcctaaagacaggcgaacttattttccttggaagaaaggaccgaattgttaaaatttatgggcaccgtttctcacttgaggaggtagaatccacattgagggatcatcctgatgtcagtgacgctgctgttacttttcaaagtaatggatctctggattttaaggcatacttggtgctgaggagtaataataaatttcttaaatgtactcagggttatagtggattacattcttcccgagatatcattgcaccacttcgaaactggctcatcatgaagtttccactagctatggtcccaaggctttttatccccatgaaatcattacctttgactttgtcaggaaagattgactatgtcaagttatctagcttggtttgtgcatttgagccttgtgaaattcatccagaaagcagtccagctgatcctcatatgcaagttatcaaaaaggcattttctgatgccctactggttcatgaagtgtctgagtatgatgatttcttctccttgggtggtaactcaattactgcagcacatgtggcccacaaattggagattgacatgagattactttatatttataccaccccttctaaactttttcatggtttacttggggaacacagtcatgtaattcctccaactcctgaatttcacaacagaaagaagttgagaaaatatgcaagcatatcagattcctttggcccagtttctgaatatttggacagtaactttcatgaccaagggcagataagtaaagagggtgcatacgatcactttgcagggaatcatgtaagtgatatagatggccagcttagcaaaagtaggacttacaatacataccaagcaaaaaacctgtgccctgatacatgctcaaatgatgaaattttcagtggcagaccatggatactaaattttcacttacaaaaggtgtggtctattggccgttgcaatagatttatgcatggttctgaagggatggtacaccttgaagatatttgttcatatgttccatataacaaaaagggttacctcgtgaaaatttggagcattcttctagattcatgtgttgatgcctcacctttgcttgtcataaacaatggaatgatgtccatctttattggttctcattcatatttgtttctttgcattgatggttatagtggttcagtgaggtggagtgtcaaattggaaggccgtatcgagtgttctgccgctataactggtgatttctcagaggttgttgttggatgctataaagggaaaatttacttccttgatatgtctacgggaaaattatcctggacctttcaaactgatggggaggtaaaaatgcaaccagttgtggacaagatgaggaatttaatatggtgtggctcgtatgaccattacttgtatgcgttaaattacaaagatcgctgctgcacatacaaagttttttgtggtggaagcatttatggatctcctgctattgacatggcacaaaatgtaatctatgtcgcatctacgagtggccttgtgactgcagtatcatttaaggaaccatccttcagagttctttggcaatatgaagctggtgcgccaatttttggttctctcgccatagatcatcaaagtggaacagttatttgttgtttagtgaatggcctagttatgacattgaactcacaaggttctgttgtttggaaggtaatttttctgatgcaccttgtttttatagccagaggtaatgtgtatgcatagttgagtaagaaagaaagagctattgatgcttagaatctac

SEQ ID NO: 152241 - DNA, 4462 bp, Zea Mays
atggcggcggcggagccgtgctgcatctcgcacgcgttcgagcgcgccactcgccaggaacccggccgcctcgccgtcatccacgcagcggcctcgggcgccgacagcgaggagcgccgcttcacttgcggcgacctcctcgccgccgtcggctccctctcccgccgcatcgccgccgcgctcggcagcaccgccaccgatacccgccgcgaccgcgagcaaggctcagggtttcgggccgccggcgccgtagtgccgagggttgtcggggtatacgcctcgccatcgttggagtacgtcgccgccgtcctcgcggtgctcaggtgcggcgcggcgttcctcccgctcgacccgtcgtggccggaggagagggtctcgtgggctatctcggcgtccaacgcggcgctcgtcgtgtcttcagttgggtcgcgaggagccacgctgtttgagagcagcgcctgccctgttctgcgcttttatggtggcatccggcggcgatttcgggatggaaatggcggggatgacggggaggagcttgtctggccgtgcgagcacgagtggcaccgcaagttctgctacgtgatgttcacctctggttctaccggaaaaccgaagggtgtttgcggcactgagaaagatgatgttttgttgtttaagacatctgtcagctttgttgaccatctacaggagttcctttctgcggtcttgacttgctcaacacttgtcattcctcccagtgagtggagagctaatccagcatccttggccaacttaattaaggtttatcggatatcaaggatgacattggttccatcacttatggagataatactacctaccctggcggaaaaactttctgatggctgtaacccacttaagatcctaatatttagtggggaagttctgtctgtatcgctgtggaagagagtctatgaatttctgccagaggctactatcataaatctgtatggaacaacagaggtttccggtgactgtgcattctttgattgcaaaaaattgcctacaattttggagcaagaagaactaaacagtgtaccaattgggtttcctatttcaaattgtgaggtttctcttgtcaccaatgatggactatcagatgaaggtgaaatctctgtcagtggagcatgcttgtttactggatatttagctgatcccatgacaagtaactgccctgaaggcagtgaagttttagcatactacagaacaggtgactttgcccggcgcctaaagacaggcgaacttattttccttggaagaaaggaccgaattgttaaaatttatgggcaccgtttctcacttgaggaggtagaatccacattgagggatcatcctgatgtcagtgacgctgctgttacttttcaaagtaatggatctctggattttaaggcatacttggtgctgaggagtaataataaatttcttaaatgtactcagggttatagtggattacattcttcccgagatatcattgcaccacttcgaaactggctcatcatgaagtttccactagctatggtcccaaggctttttatccccatgaaatcattacctttgactttgtcaggaaagattgactatgtcaagttatctagcttggtttgtgcatttgagccttgtgaaattcatccagaaagcagtccagctgatcctcatatgcaagttatcaaaaaggcattttctgatgccctactggttcatgaagtgtctgagtatgatgatttcttctccttgggtggtaactcaattactgcagcacatgtggcccacaaattggagattgacatgagattactttatatttataccaccccttctaaactttttcatggtttacttggggaacacagtcatgtaattcctccaactcctgaatttcacaacagaaagaagttgagaaaatatgcaagcatatcagattcctttggcccagtttctgaatatttggacagtaactttcatgaccaagggcagataagtaaagagggtgcatacgatcactttgcagggaatcatgtaagtgatatagatggccagcttagcaaaagtaggacttacaatacataccaagcaaaaaacctgtgccctgatacatgctcaaatgatgaaattttcagtggcagaccatggatactaaattttcacttacaaaaggtgtggtctattggccgttgcaatagatttatgcatggttctgaagggatggtacaccttgaagatatttgttcatatgttccatataacaaaaagggttacctcgtgaaaatttggagcattcttctagattcatgtgttgatgcctcacctttgcttgtcataaacaatggaatgatgtccatctttattggttctcattcatatttgtttctttgcattgatggttatagtggttcagtgaggtggagtgtcaaattggaaggccgtatcgagtgttctgccgctataactggtgatttctcagaggttgttgttggatgctataaagggaaaatttacttccttgatatgtctacgggaaaattatcctggacctttcaaactgatggggaggtaaaaatgcaaccagttgtggacaagatgaggaatttaatatggtgtggctcgtatgaccattacttgtatgcgttaaattacaaagatcgctgctgcacatacaaagttttttgtggtggaagcatttatggatctcctgctattgacatggtatcatcaccggttcacaaaaaaacattttattagatgatatatacatataggctctaccgctctattagttttgtgtcatctatattacccctttgcaggcacaaaatgtaatctatgtcgcatctacgagtggccttgtgactgcagtatcatttaaggaaccatccttcagagttctttggcaatatgaagctggtgcgccaatttttggttctctcgccatagatcatcaaagtggaacagttatttgttgtttagtgaatggcctagttatgacattgaactcacaaggttctgttgtttggaaggcaactgttggtggtcctatttttgctggtgcatgtttgtcacccaccctccctcatcaggtgcttataccttcccgtgatggcaacttgtactcttttgatactgtgtctggtgcccttctttgggtatacaaggctggggatccaattactgcatccacttttgttgatgagctgttaacatcagtgtcatttggaccatctgagagatttgcttgtatctgcacgagttccgggaaggtccatgtcatcagaattagagtagacatcagaactagagtagatgctaagtacaatcaggagcaaggtggtgacggtgttaaatctgaggagttagttcaaggactggatgctaagtacaatcaggagcaagctggtgaaggtgctaaatctgaggagttagttcaaggactggcatccattgatcttccgggggacatattttcgtctcccttgatggttggtggacgcatctttgttggatgccgagatgatcgattacattgtctcaccgtcaccacatagtttcaagtgattttgctggaggtgatatagttttgcccatgcctgctgcccgacaacctctcttccgcgacaagggcctttggcctttcctattggtaaggtgcgtggcaggctggcagcacaacacaggccacgaatgagtttggttgaagctcctgattgcatttggtgatttgggtctccaatgattgctttccatgtctacacaagaagctttccacagcctgctctcgcctaagcaagtgctacttgatgtcttgatcaaagtgagtggaaacctctcaacctcacattctccttgcagcatctgtattcagcccatgtggaacctttgccactgtcctgcaaggctggtcagtcatgccgctgttcccttcagtggaaattaactgataggaagaccagtgatttgcggagactgtaaaaattgttccacatagatctatactatttcctaaaaggagtttatgacagggacaatattctccaagaaatggttcgagtcgatccagcttcctgcaccagaaatgtactagtctctaggagtagaagttttttctttgcattaggtttcatgtttttttacttaccttgcatgcttccagaactctcgctgggaatgcacacatttttcatttcctttggctattagtagggatgccaatggagaattccccgtcgggttttggctccactatagaaaacgatccccgcggggatccctacgaactcttcctaattccccgttctctcgcggggataaattcccgtcggggatctctgtccccgtttaaattataatcatgatatacttttttttgttatgaatacaaaatattgtcacttgtatatattgtcagatgttagaaatcattatgtatacatcaaaataaatatatttgtat

SEQ ID NO: 152242 - DNA, 1799 bp, Zea Mays
gaaaagcccattccgctcatcactgaacaacccccggcggcaaccctccccacagatggccggcgaacccagcgccgccgtggcatcggggcccgaatccgcggccgaggccgaccgcctcctggcgctggccgagtcggagctctccgcgggcaggctccgagccgcgcgcaggcacgccctccgcgccgcccgcctgtacccgacctccccgcgcgccccggtggtggccaccgccgccaacgtgctcctcgccgacgcctcctcccaccacgccgcgctgctgctgcccgaacccgacgaccccgacgcctcgccgctctccgcctccgagctccgccgccactttaagtcgctcgtcaagtccctccgcgtaggcctcgacgccgccaccgcagccgcctacccctccgtcgccgccgccgctgaggaggcactcggccgcgccaccgaggcctacgaggcgctcaccgcccctgcccctgggaccttctggaccgcctgcgccgggtgccgcctcctccacgagttcgagcgcaagtatgtgggataccgcctcgcctgcccatcctgccgccgtaccttcatcgccgtggaggtcacacctccgccggaggacgaacccgttgcccgtaggcctgcgcctcagcggctgccaccggccaagaggccggagaagatggagatgacgctcgccgagatgcagctccagctcgtcaagaagcggaggggcgcagaggttccggagacctcttcccgagacttggtggtggcggaggaggaggaggacgccgccgccgaggaggctgaggcggagaacaaccatttagacctgatgcccgtggaggactccgacttctacaacttcgacgccgaccgtggcgagaggtgcttcaagagaggccagctgtgggctctgtacgtcgacgccgatggcatgccgcggcactatgcgctggtggatgaggtgcagcgaggcacccagttcagggtgcagatacggtggctcgatggcgaggaggggaagccggggaagccatgcggtcagttcaatgttgggagagcagacaccgtggattcggtgaacgtcttctcccaccttctggcctgcgagagggcagcgagcgaggtgtaccgggtttatcccaggaaggcctcggtttgggcgctccatggtggcgacagggcgaagataaagtatgacatcgtggtgatcctcagtggttacgatgatcggtatggtgccagcttcgggtacctggagaaggtggagggcttcaggagcatcttcacacgccgggacatcggaagccatgctgtccacttccttcagaagggtgatcttggggcgctttcgcatcagataccagccaggaaagtgcccaagggcgagggatcggtcctgcctcccggggattgctgggaacttgatcctgcatcgttgcctcccgagttgctgtgcctgtgcatcgaaccaccgaaatgacctgcttatggtgtcaaaggttgttgcaggtgttttagttgttaggatcggctgtgtatatggcacataaatcgcagaggaaggctgctggtttgttctgccatgtcaaatagtatgaggatccgtctgatttgccaactctagctgggcactgctcatgtttatgatccttcttcatgtagtttctcaggtagcatgattaaacttgtagctatttgagtgttaattcctggtacccatggtgtatgacatgaatggttttttggtactgatggcagactaacactgctctggtatatggatgattcttatg

SEQ ID NO: 152243 - DNA, 3088 bp, Zea Mays
tccgctcctcggatctcttcatctattccccctcctcttctctctccgccggagaaattcaaaaccatactcctcggtactgtctctctccctccccccgtctttccgtctcatcgtttccttgcgcggcggttgctgctcgcccgatctgccgccgtcagccggcgcccgatctgctcctatactgtggcgcggaggcgcggagcagcagattgtaaagctaggaatacaaatacaagatgggcgcgtcaagacccccaagcacccctgcatcgaagggtgagcacacaccgatgtcgactcctggtggcagctcaagggccaaggaggagaagatttttgttacggtgagggtgaggccactaagcaagaaggagctggctgcgaaggatgacgtggcatgggaatgcgctgatacccagacaatcttgtacaagggccccgcgcaggaccgagctgcacccatgtcttacacttttgataaagtgtttgggccagcttgccaaacagacgtcgtctatgaagagggagctaaggatgttgcaatgtctgcactgacaggcattaatgccaccatttttgcatatgggcaaaccagcagtggtaaaacattcacgatgaggggcgttacagagagtgctgttagtgatatttatagacacatagatagtactcctgagagggaatttgtgataaaaatatctgctatggaaatttacaatgagattgtcaaggatcttctgcggcctgactctgttccccttcggttgttagatgatcctgagaaaggaaccattgtggagaagttgcaagaagaaattgcgaaggatagccaacatctgaggcatctaatcagcatttgtgaagaacaaagacaggttggggagacggcactaaatgacactagttcacgttcccaccaaatcattaggctgacacttgagagcaggctccgtgaagtttcaggatgtgttaaatctttcgttgctaacctgaattttgttgaccttgctggaagtgaacgagctgcacaaacacatgccataggtgcaaggttgaaagagggttgccatataaatcgcagtttattgactttgactactgtcatcagaaagctaagttcggggaaaagaagtggacacattccctaccgggactcaaagctgacacgcattctacagctttctttgggtggaaatgcaagaacagcaatcatctgtaccatgagcccagccctgacacatgtagaacaatctagaaatactctattcttcgcaacctgtgcaaaggaagtcacaaatactgcgaaagttaatatggttatatcagataagcaattggtgaagcaccttcagacagaacttgctagactagaatcagagctgaggacccctgaccgtggctcctcttctgatatcctcataatggaaaaggacaggaagattagacagatggaaattgaaatagaggaactcaggaaacagcgagataatgcacagtcagagctcgaagaactgaggaagaagaaggttgatcaccagccagggtggaatccctttgactcgccacaaaaggcgcgaaagtgccttacattttcaggatcgctagagccaagtaacaaaaataagatgatgatgagctcgattaggcaatcatctactgctccatttatgttaaagcatgaaatccgcaagctggagcagctacaacaacagcttgaggttgaagcaaaccgcgccattgaagtacttcacaaagaagttgaatgccacaagcatggcaaccaggatgctgcggaaaccatcgctaaacttcaggcagaaatcagggagatgcaaactgttaggtctgagaacagagacatggagatgattacagatgaaggaaatggatccgatttgaaagatgagatttctagacttcatatgcaagacaatgatattgccaaacttgaggcgaagctggaaaatgtgcaacggtctattgacagattggtgatgtcacttccaaacgttgccatgccgtgtaatgagactaccccaaagtcaaacagatcaaagaagaagaagaggctgcttcttcctctgggtgtgagcaacaacatcaacagagcaaatcttctcagagcaccctgttctccccattcttctagtaggccttcggaatcagaagttgagaacagggcgccagagggtgacactatgtctgttgagggttcagaaaaggctactcccaccaagagtgaagatggagatatgtcatctcgtgatgaaacgccacgctacaggcgctccagttcagtcaatatgaaaaagatgcagaggatgttccaaaatgctgcggaagaaaacgttaggagcatcagggcttacgtgactgaactgaaggagcgagttgcaaaacttcagtaccagaagcagctgctagtctgccaggtcctggagctggaatctaacgagggcaagccgaatggagaggataattctgggcctctacaggatggtcctgattcatgggacagattattcaaagagcagatgcagtgcatcattcatctgtgggatcagtgtcaagtatcgatcatacacaggacccagttctacctgttattcaggggggacaaggctgatcagatatacatcgaggtcgaagtaagaagactcgtatggttgcagcagcactttgccgaggtcggtgatgcaagccctggtgctgttgaagaccctgcagtttcacttgtctccagtatgaaggcgctgaggaacgagcgagagttcctcgcgagaaggatgggatcaaggctgacggacgaagagcgtgagcggctcttcatcaagtggcaggtgcccctggacgcgaagcagcggaagctgcagctggtgaacaagctgtggacggaccccaacgaccaggcgcacatcgacgagagcgcggggctggtggcccggctggtgggcttctgcgagggcggcaacatcagcaaggagatgttcgagctcaacttcgccgtccccacgagcaggaggccgtggctggtgggctggcaacccatctcgaacatgatcagggagaagacccagcagctctg

SEQ ID NO: 152244 - DNA, 3543 bp, Zea Mays
tccgctcctcggatctcttcatctattccccctcctcttctctctccgccggagaaattcaaaaccatactcctcggtactgtctctctccctccccccgtctttccgtctcatcgtttccttgcgcggcggttgctgctcgcccgatctgccgccgtcagccggcgcccgatctgctcctatactgtggcgcggaggcgcggagcagcagattgtaaagctaggaatacaaatacaagatgggcgcgtcaagacccccaagcacccctgcatcgaagggtgagcacacaccgatgtcgactcctggtggcagctcaagggccaaggaggagaagatttttgttacggtgagggtgaggccactaagcaagaaggagctggctgcgaaggatgacgtggcatgggaatgcgctgatacccagacaatcttgtacaagggccccgcgcaggaccgagctgcacccatgtcttacacttttgataaagtgtttgggccagcttgccaaacagacgtcgtctatgaagagggagctaaggatgttgcaatgtctgcactgacaggcattaatgccaccatttttgcatatgggcaaaccagcagtggtaaaacattcacgatgaggggcgttacagagagtgctgttagtgatatttatagacacatagatagtactcctgagagggaatttgtgataaaaatatctgctatggaaatttacaatgagattgtcaaggatcttctgcggcctgactctgttccccttcggttgttagatgatcctgagaaaggaaccattgtggagaagttgcaagaagaaattgcgaaggatagccaacatctgaggcatctaatcagcatttgtgaagaacaaagacaggttggggagacggcactaaatgacactagttcacgttcccaccaaatcattaggctgacacttgagagcaggctccgtgaagtttcaggatgtgttaaatctttcgttgctaacctgaattttgttgaccttgctggaagtgaacgagctgcacaaacacatgccataggtgcaaggttgaaagagggttgccatataaatcgcagtttattgactttgactactgtcatcagaaagctaagttcggggaaaagaagtggacacattccctaccgggactcaaagctgacacgcattctacagctttctttgggtggaaatgcaagaacagcaatcatctgtaccatgagcccagccctgacacatgtagaacaatctagaaatactctattcttcgcaacctgtgcaaaggaagtcacaaatactgcgaaagttaatatggttatatcagataagcaattggtgaagcaccttcagacagaacttgctagactagaatcagagctgaggacccctgaccgtggctcctcttctgatatcctcataatggaaaaggacaggaagattagacagatggaaattgaaatagaggaactcaggaaacagcgagataatgcacagtcagagctcgaagaactgaggaagaagaaggttgatcaccagccagggtggaatccctttgactcgccacaaaaggcgcgaaagtgccttacattttcaggatcgctagagccaagtaacaaaaataagatgatgatgagctcgattaggcaatcatctactgctccatttatgttaaagcatgaaatccgcaagctggagcagctacaacaacagcttgaggttgaagcaaaccgcgccattgaagtacttcacaaagaagttgaatgccacaagcatggcaaccaggatgctgcggaaaccatcgctaaacttcaggcagaaatcagggagatgcaaactgttaggtctgagaacagagacatggagatgattacagatgaaggaaatggatccgatttgaaagatgagatttctagacttcatatgcaagacaatgatattgccaaacttgaggcgaagctggaaaatgtgcaacggtctattgacagattggtgatgtcacttccaaacgttgccatgccgtgtaatgagactaccccaaagtcaaacagatcaaagaagaagaagaggctgcttcttcctctgggtgtgagcaacaacatcaacagagcaaatcttctcagagcaccctgttctccccattcttctagtaggccttcggaatcagaagttgagaacagggcgccagagggtgacactatgtctgttgagggttcagaaaaggctactcccaccaagagtgaagatggagatatgtcatctcgtgatgaaacgccacgctacaggcgctccagttcagtcaatatgaaaaagatgcagaggatgttccaaaatgctgcggaagaaaacgttaggagcatcagggcttacgtgactgaactgaaggagcgagttgcaaaacttcagtaccagaagcagctgctagtctgccaggtcctggagctggaatctaacgagggcaagccgaatggagaggataattctgggcctctacaggatggtcctgattcatgggacagattattcaaagagcagatgcagtgcatcattcatctgtgggatcagtgtcaagtatcgatcatacacaggacccagttctacctgttattcaggggggacaaggctgatcagatatacatcgaggtcgaagtaagaagactcgtatggttgcagcagcactttgccgaggtcggtgatgcaagccctggtgctgttgaagaccctgcagtttcacttgtctccagtatgaaggcgctgaggaacgagcgagagttcctcgcgagaaggatgggatcaaggctgacggacgaagagcgtgagcggctcttcatcaagtggcaggtgcccctggacgcgaagcagcggaagctgcagctggtgaacaagctgtggacggaccccaacgaccaggcgcacatcgacgagagcgcggggctggtggcccggctggtgggcttctgcgagggcggcaacatcagcaaggagatgttcgagctcaacttcgccgtccccacgagcaggaggccgtggctggtgggctggcaacccatctcgaacatgatcagggagaagacccagcagctctggtgagaactgaacgcatcatggcgcagcgccgtgttgtacagatggaatggaacaagagacagacagtgcatttcggtttcagctctggaaattgctgatcaattaattgtggggggaagcgtctctacttccttcccggttgatcaaggcggacaagcggtcgtcggtctggtatccccttcctgtgtccctaaatgtagatggcgaattcgtggagtccgaagaatctgaatgatctcgcattctttacgtaatcccttgccaattttatggcaagttttgtttgctccatttgttttatggtatgatgatctggatctgatgagcccattcaaattcttttgccgagcccccctccctctttttctgctgtctgtctgtgcatcggaattgctggatctatcacgatcttgtttgtcaatcacatcgcaaatacacccaacttttgtttggc

SEQ ID NO: 152245 - DNA, 501 bp, Zea Mays
atgcgctggcctgaactgattattacttggaggttttcttatttatactaccttccatgtccaggcacccgtgtaggcgacgagcctggggacactgacgtcgccgaaggagatggagtcgttgcagctccctgccgtgccgtagtgaacaatgccggacacgctgaagacgtcgatgagcgtctgtactgtgacggcggcgttcagcctgcgttgccctgtcagtgcgtatatcacgttcacgccccgaatgctgccgatgtgataccgccgtccgtagaggtcaacgaaagggagggcacgccaaggctggaagtagccggaggcctgcagcgcggtggcctcgtcgacgtaggacatgacgaggccgagggaagggcctcgccggttgaccctgtcgatggccgcccgctccggcaagcccgccgccgagcccacgagcagaagcgagaagagcaggcgggtcgtcgccgggtggccggaggaggacagcgccattga

SEQ ID NO: 152246 - DNA, 1267 bp, Zea Mays
cgttctttgccgtttctgcacacaagtactagtcgtctcctagtcctctcctctgtactagtcgtcgagtctgcttccattctgttcaagttagcgccgctaatccgctccctattcaccatccaatccaatcggcttcccccaggcacccatggcgacggcggtggaggttcccgtggaggcgccggtgaggacagtgaaggtcaccaatgtctctcttagtgcaactgtgcaagacattaaggagttcttttccttttcaggagatattgatcatgtggagatgcagagtggtgatgagtggtcccaagttgcatatgtcactttcaaagatgcacaaggcgcagaaacagcacttcttctttcgggtgccacaatagttgatctttctgtcatcattgcacctgctccagagtatcagccacctcctactgcctctgctccaccaatgagtggaaccagagttccagttggtggtggagacaacaacgttgttcacaaagccgaggacgttgtgagcactatgcttgccaagggtttcgtgctaggcaaagacgcggttggcaaggccaaagcattcgatgagaagcatggcttcacatccacagccggtgctacagtggcctcaattgacaagaagattgggctgactgataagatcacgacaggcacttccttggttagcgggaaggtgaaggagatggaccagaagttccaggtctccgacaagaccaagtctgcactcgctgccgccgagcagaaggtgagcagtgccgggtctgccatcatgaagaacaggtacgtcttcaccggcgcgtcatgggtcaccagcgcgttcaacaaggtcgccaagaccgccacggacgtcgggacgatgaccaaggagaagatggccgccgaggagcatcacaagggctctggcccgtcttctggcggccactcgtacacgcccatccgatgattcatgcattggcttgctgttacgtgcctcactcaaacggtgttgtactgcatattggtggatgtaaaacatggtcttttagtcccaactcttattatgttgtggttagctagagttgaaacctaatagaaaccacaagttaaggttcaagcacatgaatacctattttccatacacatatatttaaagttaaattttgtactcttatcattttaagtcttctttatcgtctttccacatattaaagttggtatttctctatatctctttccatagctgtcgcgctttaggatactactatgtacg

SEQ ID NO: 152247 - DNA, 95 bp, Zea Mays
cgttttctgattacgtttgcaattccgttgacatttcccaaccaagcaccttcattgttcatcggatgcaggtcagtcaatgtctccattgtata

SEQ ID NO: 152248 - DNA, 117 bp, Zea Mays
ctatactatacttaaagcatcggtttcaacggtcgtcccgcgttatatttttacaaataacctctcacagctatttcaaattaatttattgcacgcctatagatggccaaacggcgg

SEQ ID NO: 152249 - DNA, 1402 bp, Zea Mays
acctatgcaccatgcagcttcctcgctcacagcagcccgtgcaggcatgcttttgccgccatgcacgtcacctccgtaccctagctgataaacctctataaaaccccccactccctagctgccatccacccaacgaaccccaccttcttcgttgcctctcttcctccctctcctctcttccttcctctcgatcgatcgtcatagcaatccaagctagcaagcccgtccgtcgtctctcgtccaagaagcatacaactactaatggggaggtcaccgtgctgcgaccaggacgcgggcgtcaagaaaggcccgtggacgccggaggaggacaagctgctggtggactacatcaacggcaacggccacgggagctggcgccgcctgcccaagcacgccggcctcaaccgctgcggcaagagctgccgcctccgctggaccaactacctccgcccggacatcaagcgcggccgcttcaccgacgacgaggagaagctcatcatccacctccactccctcctcggcaacaagtggtccgccatcgccaccaagctgcccggccggaccgacaacgagatcaagaactactggaacacgcacctccgcaagaagctgctcgccatggggatcgaccccgtcacgcaccagcgccgcaccgacctcaacctcctcgcggccggcggcttcaccaacctcctcgccgccgccaacctcgcggccgccgccgctggtggcggccaagcagctggacctggaggaccgctcgccgccgcgcatgctagctcctgctgggacatcaacgctctcaggctccaggccgacgccgccaagtaccagctcctcgagggcctcgtccgcgtgctcaccgcccccgccgcgcccaccgtcgacctcatgtccctcctcgccgccgccaataatggaggcgcgcccagcggcggcggcggccaccagcagctgctcgccggagtggaccaaagcaccgccagcagggtcgtgcagcagtacgacggcatgctcagccttccagcgctgaccagcgccgtgccggcggtgacgcagggcatgccgtcctcctccgcctactccctctctgggctcctcaacggcttctccggcggtgccgggactacggccgctttcgccggggacgggctcagctccacggagctcggccacagcggggccaccaccgggagcaacgtgactgccgccgcgatgccgccacctttggcagcggcggccaaggggtgcagtgcaggcaacggcggcgccacgtcgtcgaccccatccccgtacgaggagacgccggcgtcgagcccgttcgacggcctggacagcctcacgctggattttgaccccaacaacgacagttggagagaattgctagagtgagtataccacc

SEQ ID NO: 152250 - DNA, 105 bp, Zea Mays
gaactcattgcacagaccacgctccacaccgtgcgcaagctgtgctcgcagcaacttttttttttcttcttctttttggccccttttgcaaccatttcatttcag

SEQ ID NO: 152251 - DNA, 2136 bp, Zea Mays
gccggccacttacttgcgtctgcataatactacaaggcatccggcctatatgccgggtgatcgatgatgatgatgatataaaactccgaggaccaaaaaagaaaaaaccgtacgttaccaattaagagcttttgctttcaagaagaatttctctatacaggcgtgcatggtgggtgtttgatttcatttttggaacgtaatggtgtttgatttctagcacagacagagacagagggtgtggcgttacacatctctgcctatatataaacaggaggcgttgcgtgcagagctgccggctggcggttgcctctcctcccctcccctgccctcgcaaacgcacgcaccacagcatcgtccttcgttccattccggcattcccatccatataccccctcgatcggccgggatgctgggtgtggggatggccgcggcggtgctgctcggggccgtggcgttgctgctcgcggacgccgctgcgaggagagcgcactggtggtacagggaggcggctgaggcggtgctggtcggcgccgtggctttggtggtggtggacgccgcggcgcggagggcgcacgggtggtacagggaagcggcgctgggcgcggcgcggcgggcgcggctgccgccgggggagatggggtggcccttggtcggcggcatgtgggccttcctccgcgccttcaagtccggcaagcccgacgccttcatcgcctccttcgtccggcggttcggtcgcacgggcgtgtaccgaagcttcatgttcagcagcccgactgtgctggtgacgacggcggaggggtgcaagcaggtgctgatggacgacgacgcgttcgtgacggggtggcccaaggcgacggttgcgctggtcgggccgcggtcgttcgtggcgatgccgtacgacgagcaccggcgcatccgcaagctgactgccgcgcccatcaacggcttcgacgcgctgacggggtacctgcccttcatcgaccgcaccgtcacgtcgtcgctgcgcgcgtgggcggaccacggcggcagcgtcgagttcctgacggagctgcggcgcatgacgttcaagatcatcgtgcagatcttcctgggcggcgcggaccaggccaccacgcgcgcgctggagcgcagctacacggagctcaactacggcatgcgcgccatggccatcaacctgcccggcttcgcgtaccgcggggcgctgcgcgcgcgccgccgcctcgtggccgtgctgcagggcgtgctggacgagcgccgcgccgccagggccaagggggtctcgggcggaggagtggacatgatggaccggctgatcgaggcccaggacgagcgcgggcggcacctggacgacgacgagatcatcgacgtgctcgtcatgtacctcaacgccggccacgagtcgtccggccacatcaccatgtgggccaccgtgttcctgcaggagaacccggacatgttcgcgagagcaaaggcggagcaggaggcgatcatgaggagcatcccgtcgtcgcagcgggggctgacgctcagggacttcaggaagatggagtacctgtcgcaggtgatcgacgagacgctgcggctcgtcaacatctccttcgtctccttccgtcaggccaccagagacgtcttcgtgaacggatacctcatccccaaggggtggaaggttcagctctggtaccggagcgtgcacatggacccacaggtgtaccctgaccccaccaagttcgacccgtcgagatgggagggccactcgccgagagccggcacgttcctggcgttcgggctgggcgccaggctctgccccggcaacgacctcgccaagctggagatttccgtcttcctccaccacttcctcctcggctacaagctggcgaggacgaaccctaggtgccgggtgaggtacctgccgcacccgaggccggtggacaactgcttggccaagatcaccagagtcggtagctagctgctagattgtgatggaagtacgaatgaaaaaaaagcccagcagaaactctagcggctgggccggctggaaattatgggccgggccattgtggttgccccccctgtctgtgcaaaaataaaacaagcagaaaggaataaaaaaaaggaaaagtattacttcgaacgctg

SEQ ID NO: 152252 - DNA, 1413 bp, Zea Mays
ccgtaccacaaaaaaaaacacacacacaggggagggagacgagacgagatccaaaattccctggcggtgggctgtgggctgtggctggtaataaagctcgcgccacgggagccacgcacgcggacgccggcatattcgccaaacgcatcgcatcggcctcagccaccggcgcggctgccctcctcttctccgtcgatccggagaggactttctctcgcctgctcgtctctcccgcccccgccggccggccggtcctcttcccggcccactccattccgatcgaccatggcggctaccgcccccaacggcaatcccactgtcagctccctcgcggcaaccgttccggtccaggcggttctgttcgacatcgacgggaccctgtgcgactcggatcccctccaccacgtcgctttccaagagatgcttctcgagatcgggtacaacaatggcgtgccgatagacgaggagttcttcatcaagaacatcgctgggaggagtgacgtcgaagctgcccagaacctgttcccggactgggagcttgagaaggggctcaaattcctagaggacaaggaagccaaatacaggagtctggcaaaagagcgcttggtgcctgtgaaaggcctcgcgaaggtggtccagtgggtgaaagaccacgggtacaagcgcgcggcggtgaccaacgcccccaggatcaacgcggagctgatgatctcgctcctgggcctctcggacttcttccaggccgtcatcgtcggaggcgagtgcgagcagccaaagcccgcgccgtacccttacctcagggccctcaaggagctccaggtgtccgcagagcacagcttcgtcttcgaggattctcctgctggtatccgggctggcgtcgcggcggggatgcctgtcgtcggtgtggcgacgaggaacccggagaagtccttggtggaagcaggagccgcgttgctcgtcaaggactacgaagatcctaagctctgggcagcgcttgaggagatggacggagaggaagctaagctgaagaaggccagcgaatgatctgatatgacgatgagccattgattagatttattgcagattaaatctgcctccagcatgattctgttcctagttatgcgctgcggagagagctcacctcatcagggtatttatgagattctagcttcgtatattgtttttcttcttcttgattgaactgagatcaaataagacaaagctgctgtgccttgttgtgtgccatctgtgtatgaacttttcggttcagcctccagcagtctttaatctgaaagaaagacgaggtaggaattctctccctcagggaagatgtgtgaagaatgcaccgtgatgcttgttgcttgtcgaatccatggacgtcatcctttttgagcttcagctctgctacgcaaa

SEQ ID NO: 152253 - DNA, 1210 bp, Zea Mays
ggtgtggaacatgagaatgtgagagactaccaccaaccgcgccaactgaaccacggaatcctcaccaactctccctgcctcttcagtcttctccttataaaatgtgcaggcagcatcagcactcgagcagtgaccacaagaccaaaagaagcctcagttttggcatccagcagcaactggccatggaaagcagtgggatcggcagagtggccccactggaggccgtcctcttcgacatcgacggcaccatggccatctccgacccgttccaccaccgggccacctcggagatgctcctcaaggtgggctacaacaacggcgtgcccatcacgcccgagttcggcatggcgaacatggccggccggagcaacgagcagatcggccgcttcctgttcccggactgggaccagcgccgcctcgacgccttcttcgccgagaaggaggcgctcttcgccaggtacgccgccgaggggctccgggagatcgccggcctcacgccgctctgccgctgggccgccggccgcgggctcaggcgcgccgccgtcaccaacgcacccagggccaacgccgagctcatgatctccatcctcggcctctccgactttttttccctcgtcgtcaccgccgaggagtgcggccgatccaagccctaccctgacccgtacctcagggcgctcgacctgctcggcgtctcgccggaccacgcgctcgtgttcgaggactccaccactggcgtgcaggccggcattgcggcagggatgccggtggttgccatcgccgaggaaagcagagaggacaagcttctcgccgtcggcgcaacgctcgtcatcagggactacgaagaccccaagctatgggcggctttggacaaactggacaccaccaggcctcaagctgctgctgctgagaccaatggaaaactcacacaactgtagctgaggaacacaagtgctagtagccaaaaacaatttcttgcaatattccacttccacgcatgattcaataacaactcattcgtgtatgtatgatgtatcttgatgagatgcatacaaaattgcctgtaggccagtctgttacagacaaatgaaaatggaaacaaaactgatcgcgataacatgcagatttctatttgtatctaaactactctaccacaggctctcacatgagattataatgtgcttcagaaatgggtaaaagctggtgacggtgc

SEQ ID NO: 152254 - DNA, 1138 bp, Zea Mays
actggcactgccctgtttgtttgctttttaatgcccggccaggccgccgcactcatctccttcctccatccgaaaccaactgacatcgccccgcagccaagaagctcggctcagctcagctcagttggttcctccattttgagtggaggactgactgtctcgcgatgctgatggggttccccgtggggtactcggagacgcccaagctgctgctgcacctcctcttcctcctcgaccacctgcgccgcctctcctcctggctgctccgcctcgcgggcgccgccgacgccgacgccgacaccgacgccggccaccctcgccacccctgcgccgccgcccagcgcctggaggagcactcccccgcggtgcgcttcgactcgctgtcgtgcggaagcggaggaggggtgacggcgccgcgcccgctgcccgagggctgctgcgtctgcctgggcgacttccacgccgccgccgaggtgcgccgcgcccggggctgccgccacgtcttccaccgcgcctgcctcgaccgctgggccgcgcacggccaccgcacctgcccgctctgccggacgccgctcctcccgccgctgccgctgcccctgcccctgcccctcccgctgccgccgtcgtagcgatccggattacctcctacctgttgggcctttgtgcaaaaaagtaaccttccactccactgggcttggcagttggctggctctcttgggtttgttatgatttttgagaaattgcagggcgctccgtgtgaaaaggggctccctagtgtgctctgttctaggaaaaggctgaagcctgaaagagggagcaaatatggtgatagacagacaataggttactacttactagggcaaagttaaaacgggggaaacaaagtacgttcttgttacatacacgtaggtaggtagaatcaatttggcaagagatgtgtctctgctcattttcttttttttctactctctataaaatatttttgttcctttttttggtatgtgtgtgtttcctctccagtgtgggtgaagatgatgtatacatacatgccctctgattttcactgtttttgtgggtcaaatttatataacaaagtattataacgtgtattttatggtaatcttaattaaatataaaa

SEQ ID NO: 152255 - DNA, 1276 bp, Zea Mays
gaactgcctcacgaacgccacgccgccatttcccgcaagcaaagccatccaaaccgttcgctactgcctactactagtagctcgatcgtcgtcgtcatcttcgtcgtttcgctctcagttggcggttagctagcttgcatactagcatcaggtgccccttgccgagccgtacgtgtcgtcgtcgacgacgatggtggcggcgcccagcaagtgccggccgtcggcggcagcgctggtggtggcaccgccgggggcccctcggcgccagctgcggtgccggtgctgcgaggacacgctgggcgtcccgcgccgccggctgcagccgcagctgcacctgaagcagcaggcacctgcggcgacgaccgcccccgccgcggcgccgccgccgaggccccggcggatcgtgctggtgcggcacggcgagagcgagggcaacgtggacgaggctgcatacacgcgcgtcccggaccccaggatcgggctcaccgccaagggctggcgcgaggccgacgactgcggccgccgcctgcgcgacctcttctcctctggatcccgcgaccaggacgactggaaggtctacttctacgcgtcgccgtaccgccgcagcctggagaccctgcgcggcatcggccacgccttcgagccccaccgcatcgccggcgtccgcgaggagccccgcctccgcgagcaggacttcggcaacttccaggaccgggagcagatgcgggtggagaaggagatccggcaacgctacggccgcttcttctaccgcttccccaacggcgagtcggcggcggacgtgtacgaccgcatcaccggcttccgggagaccctgctctccgacatcgtcctcggccgcttccagcccccgggccaccgcagcaccagcggagacatgaacatcgtgctcgtctcccacggcctcaccctccgcgtcttcctcatgcgctggtacaagtggaccgtccgccagttcgagggcctcgagaacctcgccaacggcggcgagctcgtcatgcagactggagaaggcggcaggtacagcctcctagtgcaccacacgcccgacgagctcagggcgttcggcctcaccgacgagatgctgcaggaccagatgtggcagaagacggccaggcccggcgagctcaaccaccgcttcatgacaaacggacagtccttctttgatccatttactgtaatctactagttcttgacgaccgaccacatgttatgtatgtgataagtgattaaatgtttttttttatggctgtacaca

SEQ ID NO: 152256 - DNA, 1449 bp, Zea Mays
ggagcagagcagatcacctcgcccggcgccccgggcccggccatggacacgacaaagtttgaccagcaaccagctagctgcaaaacctgctgtacgtatatcgtgcgcccaacaacgaactctcgcggagacgaagacgagctgtgcatgctgtgcaggcacatccctccatcctccctcgcctcgatctcaacgtgctgtccaacacgtcgtaccgcccggccgggcaatcccgctagttaacgtgtagctgcttctttataaacgacgtcaacaacccgttcatatccatctccatccgacgaccaacaagctaagggtcgtcatcggccggccggacgtacgtacggcggcgagcttgctacctctgttctattcatacatcgatacattacattacggtgcgagtatactatatataccatggcgtcgagagctccggtgatcgtcgtcgtcgcggccgtgatcatggcggcggcacgcctcgcgagcggcagcggctattacccggtcgccgcgcccttcacgtcgtcgagctggcaagacggcagcgccacgttctacggagacggctccggcctcggcgcagacttcggcggcgcgtgcggctacggcgccaacgacatccagtcgctctactcgacgcgcacggcggcgctgagcacgccgctgttcgcgggcggcgccgggtgcgggcagtgctacgagctgcgctgcgtcaactcccggtggtgcaacccgggctcgccgtccgtcgtggtgacgggcaccaacctctgcccgcccaactggtacctcccgagcgacaacggcgggtggtgcaacccgccgcggcagcacttcgacctggcgccgccctccttcctgctgctcgcggagcgggtggccggcatcgtccccgtgcagttccgccgcgtgccgtgccagcgctcgggaggggtccggttctacgtgcagggcaactactactggctcctgctgtacgtgatgaacgtggccggcagcggcgacgtctccgacctcgccgtgaagagggccggcgagccggactgcagctacgtgcccgcgtcgcacaactggggcatcacgcaccaggtgttcgccgcgctcggcaacgcgcagggcctcgtcgtcaggatgaccagctacagcgcgccgcagaagaccatcgtcgtcggcgacgccatccccgcctggtggtccactggactctcctaccagggatccagcaacttctactgagtagtagttatttgccctcccatcctatatattcatgtatgtatcatcacagatcaattgatccacgacgatggatcatccttatcatatattctccctttctcgatttgaatacgttttttttaaaaaagaacaacctttttttttgctcgaccaagcaatgcagtgtatgttattatcaattcaatacaacaatatctctatcta

SEQ ID NO: 152257 - DNA, 1216 bp, Zea Mays
ggcttcacggctcggctggctgcacgccggagccccggcgccagatctcgccaagtgccagggccgccgcaggcccctctttgcctgcgcgagtctcagaatcccgagagggaaaaagaaaagaaaagatgatgacttcctctgcctgttactacctgtgccgctccctcgtccgggctcctccgctcaagtcgaggagtgcagtgcgctgtccaagcgccgccccgccaggagccagcggtgccacctccacctccaagcttgtcctagaggtgaaagaacggctagcaagggagcacccaggcctccccacgggcaggaacgggagggacgatgacgacatggtcctctggttcctaaaggaccgcaagttctccgtcgatgaagccgtctccaagctcaccaaggcgatcaaatggcgttaggactttggtgttgcagagttatcagaggaatcagtgaaaatcctgtaccaaactggcaaggcatatgtacatgattccttggacatttatggccgaccagtgctaattgtagtggcagccaaacattttccttcgacacaggatccagttgaaaaccagaagctatgtgcctatttggttgagaaggcagtcaatagacttccgccaggagcagagaatatacttgggatctttgatctgcgaggctttcgggttgaaaatggtgatctccagttcctaaagtttttgatggacgttttttactattactacccgaagcggcttggccaagttctttttgtcgatgctccatttgtttttcaaccaatgtggcaggttgttaaacctctgttgaaatcatatgcctccctggtaagattttgtgataccgagactgtgaggaaggaatacttcaaagaagaaactgtgcctcctgatttccgcgattaggtggtctcggaaacatgacctttaattgattgagaatcgattggcacccaggggggctggcgccttcctataccttttgattaacttctcaaaagttgctcagacgacaacaaacgattggagagtccagtaaaaaatgaccctgtagtcctgtacttgtataacttctgcgaagtagaatgctgagtttaggctgctgtctggagtgctcctgtaccatatttttctggttttggatgaagctatatggaccaaattcatctctgttgaacaattgccaattacataacttgtgtttgccc

SEQ ID NO: 152258 - DNA, 1256 bp, Zea Mays
ggcttcacggctcggctggctgcacgccggagccccggcgccagatctcgccaagtgccagggccgccgcaggcccctctttgcctgcgcgagtctcagaatcccgagagggaaaaagaaaagaaaagatgatgacttcctctgcctgttactacctgtgccgctccctcgtccgggctcctccgctcaagtcgaggagtgcagtgcgctgtccaagcgccgccccgccaggagccagcggtgccacctccacctccaagcttgtcctagaggtgaaagaacggctagcaagggagcacccaggcctccccacgggcaggaacgggagggacgatgacgacatggtcctctggttcctaaaggaccgcaagttctccgtcgatgaagccgtctccaagctcaccaaggcgatcaaatggcgttaggactttggtgttgcagagttatcagaggaatcagtgaaaatcctgtaccaaactggcaaggcatatgtacatgattccttggacatttatggccgaccagtgctaattgtagtggcagccaaacattttccttcgacacaggatccagttgaaaaccagaagctatgtgcctatttggttgagaaggcagtcaatagacttccgccaggagcagagaatatacttgggatctttgatctgcgaggctttcgggttgaaaatggtgatctccagttcctaaagtttttgatggacgttttttactattactacccgaagcggcttggccaagttctttttgtcgatgctccatttgtttttcaaccaatgtggcaggttgttaaacctctgttgaaatcatatgcctccctggtaagattttgtgataccgagactgtgaggaaggaatacttcaaagaagaaactgtgcctcctgatttccgcgattaggtgacatgattatttcttcagtaattgcaaaaatgtgcaggtggtctcggaaacatgacctttaattgattgagaatcgattggcacccaggggggctggcgccttcctataccttttgattaacttctcaaaagttgctcagacgacaacaaacgattggagagtccagtaaaaaatgaccctgtagtcctgtacttgtataacttctgcgaagtagaatgctgagtttaggctgctgtctggagtgctcctgtaccatatttttctggttttggatgaagctatatggaccaaattcatctctgttgaacaattgccaattacataacttgtgtttgccc

SEQ ID NO: 152259 - DNA, 956 bp, Zea Mays
ggcttcacggctcggctggctgcacgccggagccccggcgccagatctcgccaagtgccagggccgccgcaggcccctctttgcctgcgcgagtctcagaatcccgagagggaaaaagaaaagaaaagatgatgacttcctctgcctgttactacctgtgccgctccctcgtccgggctcctccgctcaagtcgaggagtgcagtgcgctgtccaagcgccgccccgccaggagccagcggtgccacctccacctccaagacacaggatccagttgaaaaccagaagctatgtgcctatttggttgagaaggcagtcaatagacttccgccaggagcagagaatatacttgggatctttgatctgcgaggctttcgggttgaaaatggtgatctccagttcctaaagtttttgatggacgttttttactattactacccgaagcggcttggccaagttctttttgtcgatgctccatttgtttttcaaccaatgtggcaggttgttaaacctctgttgaaatcatatgcctccctggtaagattttgtgataccgagactgtgaggaaggaatacttcaaagaagaaactgtgcctcctgatttccgcgattaggtgacatgattatttcttcagtaattgcaaaaatgtgcaggtggtctcggaaacatgacctttaattgattgagaatcgattggcacccaggggggctggcgccttcctataccttttgattaacttctcaaaagttgctcagacgacaacaaacgattggagagtccagtaaaaaatgaccctgtagtcctgtacttgtataacttctgcgaagtagaatgctgagtttaggctgctgtctggagtgctcctgtaccatatttttctggttttggatgaagctatatggaccaaattcatctctgttgaacaattgccaattacataacttgtgtttgccc

SEQ ID NO: 152260 - DNA, 1506 bp, Zea Mays
acggtttccctccacaaccacttgctcctcatctacttttctcctccgccttaaactcatccttgctcctgcctgccgtcgtgcatcatcatctccggccagggccagggcattcgtctccgcctccggtccggcctcctccactccgcgcccccccagacgcgtcgctgcgtagctgctggccgccatggccaccgtcatggccgcggccgtctagtccttcccgtcctcctcggccgtcgtcgccaaggcgtcgccggcgtccccctgtgccgccccgcacttccgcccgagggccgtgcgggccgctatccgggcgcaggcgtccgccgtcgaggcgcccgccacggccaaggccaagaaggagtccaagaagcaggaggagggcgtcgtcaccaacctatacaagcccaaggagccgtacgtcggcaggtgcctcctcaacaccaagatcaccggcgacgacgcgccgggggagacgtggcacatggtcttcagcaccgaaggcccttctttgcctgcgcgaggtctcagaatccggggggaaaaagaaaagaaaagaaaagatgatgactgtctctacctcttgctacatgtgccgcttcctcgtccgggctcctccgctcaagtccaggagtgcagtgcgctgtccaagcgccgccccaccaggtgctagcggtgccacctccacctccaagacacaggatccagttgaaaaccagaagctatgtgcctatttggttgagaaggcagtcaacagacttccgccaggagcagagaatatacttgggatctttgatctgcgaggctttcgggttgaaaatggtgatctccagttcctaaagtttttgatggacgttttttactattactacccgaagcggcttggccaagttctttttgtcgatgctccatttgtttttcaaccaatgtggcaggttgttaaacctctattgaaatcatatgcctccctggtaagattttgtgatgccgagactgtgaggaaggaatacttcaaagaagaaacggtgcctcctgatttccgcgattaggtgacatgattatttcttcagtaattgcaaggcagttctacctctgcctttgtgtaacgattgaaattctaaattgtgcagattatttttagttcttccaatccctcctaaaagctattttgcagaaatgtgcaggtggtctcggaaacatgacctttaattgattcagaatcgattggcacccaggggggctggcgccttcctataccttttgattaacttctcaaaagttgctcagacggcagcaaacgattggagagtccagtaaaaaatgaccctgtacttgtataacttctgcgaagtagaatgctgagtttaggctggtgtctggagtgctcctgtaccatatttttctggttttggatgaagctatatggaccaaattcatctctgttgaacaattgccaattacataacttgtgtttgcccaattccatggtgtagtaccataact

SEQ ID NO: 152261 - DNA, 1741 bp, Zea Mays
acggtttccctccacaaccacttgctcctcatctacttttctcctccgccttaaactcatccttgctcctgcctgccgtcgtgcatcatcatctccggccagggccagggcattcgtctccgcctccggtccggcctcctccactccgcgcccccccagacgcgtcgctgcgtagctgctggccgccatggccaccgtcatggccgcggccgtctagtccttcccgtcctcctcggccgtcgtcgccaaggcgtcgccggcgtccccctgtgccgccccgcacttccgcccgagggccgtgcgggccgctatccgggcgcaggcgtccgccgtcgaggcgcccgccacggccaaggccaagaaggagtccaagaagcaggaggagggcgtcgtcaccaacctatacaagcccaaggagccgtacgtcggcaggtgcctcctcaacaccaagatcaccggcgacgacgcgccgggggagacgtggcacatggtcttcagcaccgaaggcccttctttgcctgcgcgaggtctcagaatccggggggaaaaagaaaagaaaagaaaagatgatgactgtctctacctcttgctacatgtgccgcttcctcgtccgggctcctccgctcaagtccaggagtgcagtgcgctgtccaagcgccgccccaccaggtgctagcggtgccacctccacctccaagcttgtcctagaggtgaaagaacggctagcaagggagcacccaggcctccccacgggcaggtacgggagggacgatgacgacatggtcctctggttcctaaaggaccgcaagttctccgtcgatgaagccgtctccaagctcaccaaggcgattaaatggcgtcaggactttggtgttgcagagttatcagaggaatcagtgaaaagcctgtaccaaactggcaaggcatatgtacatgattccttggacatttatggccgacctgtgctgattgtagtggcagccaaacattttccttcgacacaggatccagttgaaaaccagaagctatgtgcctatttggttgagaaggcagtcaacagacttccgccaggagcagagaatatacttgggatctttgatctgcgaggctttcgggttgaaaatggtgatctccagttcctaaagtttttgatggacgttttttactattactacccgaagcggcttggccaagttctttttgtcgatgctccatttgtttttcaaccaatgtggcaggttgttaaacctctattgaaatcatatgcctccctggtaagattttgtgatgccgagactgtgaggaaggaatacttcaaagaagaaacggtgcctcctgatttccgcgattagaaatgtgcaggtggtctcggaaacatgacctttaattgattcagaatcgattggcacccaggggggctggcgccttcctataccttttgattaacttctcaaaagttgctcagacggcagcaaacgattggagagtccagtaaaaaatgaccctgtacttgtataacttctgcgaagtagaatgctgagtttaggctggtgtctggagtgctcctgtaccatatttttctggttttggatgaagctatatggaccaaattcatctctgttgaacaattgccaattacataacttgtgtttgcccaattccatggtgtagtaccataacttctcagtgcagtgcagacaacacatggattccattttttgattaaagtatcatctgctac

SEQ ID NO: 152262 - DNA, 2448 bp, Zea Mays
acggtttccctccacaaccacttgctcctcatctacttttctcctccgccttaaactcatccttgctcctgcctgccgtcgtgcatcatcatctccggccagggccagggcattcgtctccgcctccggtccggcctcctccactccgcgcccccccagacgcgtcgctgcgtagctgctggccgccatggccaccgtcatggccgcggccgtctagtccttcccgtcctcctcggccgtcgtcgccaaggcgtcgccggcgtccccctgtgccgccccgcacttccgcccgagggccgtgcgggccgctatccgggcgcaggcgtccgccgtcgaggcgcccgccacggccaaggccaagaaggagtccaagaagcaggaggagggcgtcgtcaccaacctatacaagcccaaggagccgtacgtcggcaggtgcctcctcaacaccaagatcaccggcgacgacgcgccgggggagacgtggcacatggtcttcagcaccgaaggcccttctttgcctgcgcgaggtctcagaatccggggggaaaaagaaaagaaaagaaaagatgatgactgtctctacctcttgctacatgtgccgcttcctcgtccgggctcctccgctcaagtccaggagtgcagtgcgctgtccaagcgccgccccaccaggtgctagcggtgccacctccacctccaagcttgtcctagaggtgaaagaacggctagcaagggagcacccaggcctccccacgggcaggtacgggagggacgatgacgacatggtcctctggttcctaaaggaccgcaagttctccgtcgatgaagccgtctccaagctcaccaaggcgattaaatggcgtcaggactttggtgttgcagagttatcagaggaatcagtgaaaagcctgtaccaaactggcaaggcatatgtacatgattccttggacatttatggccgacctgtgctgattgtagtggcagccaaacattttccttcgacacaggatccagttgaaaaccagaagctatgtgcctatttggttgagaaggcagtcaacagacttccgccaggagcagagaatatacttgggatctttgatctgcgaggctttcgggttgaaaatggtgatctccagttcctaaagtttttgatggacgttttttactattactacccgaagcggcttggccaagttctttttgtcgatgctccatttgtttttcaaccaatgtggcaggttgttaaacctctattgaaatcatatgcctccctggtaagattttgtgatgccgagactgtgaggaaggaatacttcaaagaagaaacggtgcctcctgatttccgcgattaggtgacatgattatttcttcagtaattgcaaggcagttctacctctgcctttgtgtaacgattgaaattctaaattgtgcagattatttttagttcttccaatccctcctaaaagctattttgcagaaatgtgcaggtggtctcggaaacatgacctttaattgattcagaatcgattggcacccaggggggctggcgccttcctataccttttgattaacttctcaaaagttgctcagacggcagcaaacgattggagagtccagtaaaaaatgaccctgtacttgtataacttctgcgaagtagaatgctgagtttaggctggtgtctggagtgctcctgtaccatatttttctggttttggatgaagctatatggaccaaattcatctctgttgaacaattgccaattacataacttgtgtttgcccaattccatggtgtagtaccataacttctcagtgcagtgcagacaacacatggattccattttttgattaaagtatcatctgctacaaatatgaatcatggcttagtttgtagacttcataaagaaacacacagattaatcaaaccagtcttcgaagagtctctgtggataggaacgttccaaagcaaagtaagatgcaagttgtattgcataaaaaccaggtacacatcaatcagctgcattctggaagactaaactgcaacacaactacatctgcaatcacagagaaatcaggggctcattcaagtactctactgatcgaaaatggatggcgtctgtgatggttcattcttttgcacgtcttctacacgggtacattgacggttgatggagatggatggtggtgtagctgttttgtttagcaattagcactctaggtgttggaccactgttttgttaatggatgctatgtaacagtagtatgtaactaatgtgaacttgtttaggttgctgtgaaactgttatacaacacattgttatggggttgttacacagctgatatgttatgaacatgatatggagatatcttttcctttttggtttgggttttactgttgtgccattcgtctcataagttatgccattttattatttacttttggattgat

SEQ ID NO: 152263 - DNA, 1427 bp, Zea Mays
atggccaccgtcatggccgcggccgcgtccgccgtcgaggcgcccgccacggccaaggccaagaaggagtccaagaagcaggaggagggcgtcgtcaccaacctatacaagcccaaggagccgtacgtcggcaggtgcctcctcaacaccaagatcaccggcgacgacgcgccgggggagacgtggcacatggtcttcagcaccgaagagttatcagaggaatcagtgaaaagcctgtaccaaactggcaaggcatatgtacatgattccttggacatttatggccgacctgtgctgattgtagtggcagccaaacattttccttcgacacaggatccagttgaaaaccagaagctatgtgcctatttggttgagaaggcagtcaacagacttccgccaggagcagagaatatacttgggatctttgatctgcgaggctttcgggttgaaaatggtgatctccagttcctaaagtttttggttgttaaacctctattgaaatcatatgcctccctggtacacatcaatcagctgcattctggaagactaaactgcaacacaactacatctgcaatcacagagaaatcaggtcaacaacggagagggtcaagcgatccccacgtacagatgccagcatggtcttttacatggttccaagaggaggtaaatcgagtgtagccctaaaaagatctgccttgtgccacttcaacactttaacccagatgcaataaaaaaacactttaacccagatgctgcattgtggtgtggcaaaggcttgagaatatgacaataacagctgctcaaaaactgttggtaggaacatttatagcagcaaaagaacaaaatggaatgtgtggtttcttatctgccttagatgagataagatttcggacatgtgtattcatgttttcgagtgatttggcactatgaatgcgctagatggttggttgcttttttttgttaattgctcaggtgatatatgctgtatttctagtcactagtgttgtattgtttgtgcttgtgctaagatgatctcttttgcacttgtaacaggggctcattcaagtactctactgatcgaaaatggatggcgtctgtgatggttcattcttttgcacgtcttctacacgggtacattgacggttgatggagatggatggtggtgtagctgttttgtttagcaattagcactctaggtgttggaccactgttttgttaatggatgctatgtaacagtagtatgtaactaatgtgaacttgtttaggttgctgtgaaactgttatacaacacattgttatggggttgttacacagctgatatgttatgaacatgatatggagatatcttttcctttttggtttgggttttactgttgtgccattcgtctcataagttatgccattttattatttacttttggattgat

SEQ ID NO: 152264 - DNA, 2056 bp, Zea Mays
tctccctccacaaccacttgctcctcatctacttttctcctccgccttccactcatccttgctcctgcctgccgtcgtgcatcatcatctccggccagggccagggcattcgtctccgcctccggtccggcctcctccacaccgcgccccccccccccccccagacgcgtcgctgcgtagctgctggccgccatggccaccgtcatggccgcggccgtctagtccttcccgtcctcctcggccgtcgtcgccaaggcgtcgccggcgtccccctgtgccgccccgcacttccgcccgagggccgtgcgggccgctatccgggcgcaggcgtccgccgtcgaggcgcccgccacggccaaggccaagaaggagtccaagaagcaggaggagggcgtcgtcaccaacctatacaagcccaaggagccgtacgtcggcaggtgcctcctcaacaccaagatcaccggcgacgacgcgccgggggagacgtggcacatggtcttcagcaccgaaggcccttctttgcctgcgcgaggtctcagaatccggggggaaaagaaaagaaaagaaaagatgatgactgtctctacctcttgctacatgtgccgctccctcgtccgggctcctccgctcaagtccaggagtgcagtgcgctgtccaagcgccgccccgccaggtgctagcggtgccacctccacctccaagcttgtcctagaggtgaaagaacggctagcaagggagcacccaggcctccccacgggcaggaacgggagggacgatgacgacatggtcctctggttcctaaaggaccgcaagttctccgtcgatgaagccgtctccaagctcaccaaggcgattaaatggcgtcaggactttggtgttgcagagttatcagaggaatcagtgaaaagcctgtaccaaactggcaaggcatatgtacatgattccttggacatttatggccgacctgtgctgattgtagtggcagccaaacattttccttcgacacaggatccagttggaaaccagaagttgtgtgcctatttggttgagaaggcagtcagcagacttccgccaggagtagagaatatacttgggatctttgatctgcgaggctttcgggttgaaaatggtgatctccagttcctaaagtttttgatggacgttttttactattactacccgaagcggcttggccaagttctttttgtcgatgctccttttgtttttcaaccaatgtggcaggttgttaaacctctgttgaaatcatatgcctccctggtaagattttgtgatgccgagactgtgaggaaggaatacttcaaagaagaaatcgtgcctcctgatttccgcgattaggtgacatgattatttcttcagtaattgcaagtcagttttacctctgcctttgtgtaacgattgaaattctaaattgtgcagattacttttagtttttccaatctctcctaaaagctattttgcagaaatgtgcaggtggtctcggaaacatggcctttaatttattgagaatcgattggcacccagggggactggcgccttcccatacctttggattaacctctcaaaagttgctcagacggcagcaaatgattggagagtccagtaaaaaatgacccagtacttgtataactagtgcgaagtagaatgctgagtttaggctgctgtcttgagtgctcctataccatatttttctggttttggatgaagctatatggatcaaattcatctctgttgaacaattgccaattacataacttgtgtttgcccaattccatggtgtagtaccataacttctcagtgcagtgcagacaacacatggattccatttttttattaaagtaccatctgctacaaatatgaatcatggctttgtttgtagacttcataaagaaacacacagattaatcaaaccagtcttcgaagagtctgctatggataggaacgttccaaagcaaaataagatgcaagttgtattgcataaaaaccaggtacacatcaatcagctgcattctggaagactaaactgcaacacaactac

SEQ ID NO: 152265 - DNA, 2268 bp, Zea Mays
tctccctccacaaccacttgctcctcatctacttttctcctccgccttccactcatccttgctcctgcctgccgtcgtgcatcatcatctccggccagggccagggcattcgtctccgcctccggtccggcctcctccacaccgcgccccccccccccccccagacgcgtcgctgcgtagctgctggccgccatggccaccgtcatggccgcggccgtctagtccttcccgtcctcctcggccgtcgtcgccaaggcgtcgccggcgtccccctgtgccgccccgcacttccgcccgagggccgtgcgggccgctatccgggcgcaggcgtccgccgtcgaggcgcccgccacggccaaggccaagaaggagtccaagaagcaggaggagggcgtcgtcaccaacctatacaagcccaaggagccgtacgtcggcaggtgcctcctcaacaccaagatcaccggcgacgacgcgccgggggagacgtggcacatggtcttcagcaccgaaggcccttctttgcctgcgcgaggtctcagaatccggggggaaaagaaaagaaaagaaaagatgatgactgtctctacctcttgctacatgtgccgctccctcgtccgggctcctccgctcaagtccaggagtgcagtgcgctgtccaagcgccgccccgccaggtgctagcggtgccacctccacctccaagcttgtcctagaggtgaaagaacggctagcaagggagcacccaggcctccccacgggcaggaacgggagggacgatgacgacatggtcctctggttcctaaaggaccgcaagttctccgtcgatgaagccgtctccaagctcaccaaggcgattaaatggcgtcaggactttggtgttgcagagttatcagaggaatcagtgaaaagcctgtaccaaactggcaaggcatatgtacatgattccttggacatttatggccgacctgtgctgattgtagtggcagccaaacattttccttcgacacaggatccagttggaaaccagaagttgtgtgcctatttggttgagaaggcagtcagcagacttccgccaggagtagagaatatacttgggatctttgatctgcgaggctttcgggttgaaaatggtgatctccagttcctaaagtttttgatggacgttttttactattactacccgaagcggcttggccaagttctttttgtcgatgctccttttgtttttcaaccaatgtggcaggttgttaaacctctgttgaaatcatatgcctccctggtaagattttgtgatgccgagactgtgaggaaggaatacttcaaagaagaaatcgtgcctcctgatttccgcgattaggtgacatgattatttcttcagtaattgcaaaaatgtgcaggtggtctcggaaacatggcctttaatttattgagaatcgattggcacccagggggactggcgccttcccatacctttggattaacctctcaaaagttgctcagacggcagcaaatgattggagagtccagtaaaaaatgacccagtacttgtataactagtgcgaagtagaatgctgagtttaggctgctgtcttgagtgctcctataccatatttttctggttttggatgaagctatatggatcaaattcatctctgttgaacaattgccaattacataacttgtgtttgcccaattccatggtgtagtaccataacttctcagtgcagtgcagacaacacatggattccatttttttattaaagtaccatctgctacaaatatgaatcatggctttgtttgtagacttcataaagaaacacacagattaatcaaaccagtcttcgaagagtctgctatggataggaacgttccaaagcaaaataagatgcaagttgtattgcataaaaaccaggtacacatcaatcagctgcattctggaagactaaactgcaacacaactacatctgcaatcacagagaaatcaggtgctcattcaagtactctactgatcgaaaatggatggcgtctgtgatggttgattcttttgcacgtcttctacactggtacattgacggctgatggagatggatggtggtgtcgctgttttgtgttttgtttagcactctaggtgacacattgttatgggattgttacacagctgatatgttatgaacctgatatggagatctttttgcgtcctttgtttgggtgttactgttgtgccattcgtctcataagttatgccattttattacttgcttttggattg

SEQ ID NO: 152266 - DNA, 79 bp, Zea Mays
ttaccgtgttcacgcttccgcatctcacattttttttctcatcaaaagatgcatcgatgttcactgttacttttccctc

SEQ ID NO: 152267 - DNA, 1157 bp, Zea Mays
gagatgggtggaacggtttccctccacaaccacttgctcctcatctacttttctcctccgccttccactcatccttgcccctgcctgccgtcgtgcatcatcatctccggccagggccagggcatcccggtccggcctcctccactctgcgccccccagacgcgtcgctgcgtagctgctggccgccatggccaccgtcatggccgcggccgtctcgtccttcccgtcctcctcggccgtcgtcgccaaggcgtcgccggcgtccccctgtgccgccccgcacttccgcccgagggccgtgcgggccgctatccgggcgcaggcgtccgccgtcgaggcgcccgccacggccaaggcgaagaaggagtccaagaagcaggaggagggcgtcgtcaccaacctatacaagcccaaggagccgtacgtcggcaggtgcctcctcaacaccaagatcaccggcgacgacgcgccgggggagacgtggcacatggtcttcagcaccgaaggcaagatcccgtacagagaaggccagtccatcggcgtcatcgccgatggcgtcgacaagaacggcaagccgcacaaggtcaggctctactccatcgccagcagcgcgatcggcgacttcggcgactccaagacagtctcgctgtgtgtcaagaggctcatctacaccaacgatgccggagagatcgtcaaaggagtctgctccaacttcttatgtacgtctacgtctcttcacatcccgcgctgcaccagagcaccacactgcattcttcttctacaaatcctgatctgacttgattggcacccgaatgtctgatccagcttgttccccctgtgcgtgctcataccataatgcaggtgatcttcagccaggtgataacgtccagataacaggaccagtcggcaaagaaatgctgatgcccaaagacccaaacgctaccattataatgcttgccaccggtacaggtatcgctccgttccgatcgttcctgtggaagatgttctttgagaagcatgacgactacaaggtacaggcaggcagcggtgttgtaaagttcacacactggacagagaatggcaaataatgtgtgagccgctcttgtgcagttcaacggtctgggctggctcttcctgggtgttccaacgagcagctc

SEQ ID NO: 152268 - DNA, 1687 bp, Zea Mays
gagatgggtggaacggtttccctccacaaccacttgctcctcatctacttttctcctccgccttccactcatccttgcccctgcctgccgtcgtgcatcatcatctccggccagggccagggcatcccggtccggcctcctccactctgcgccccccagacgcgtcgctgcgtagctgctggccgccatggccaccgtcatggccgcggccgtctcgtccttcccgtcctcctcggccgtcgtcgccaaggcgtcgccggcgtccccctgtgccgccccgcacttccgcccgagggccgtgcgggccgctatccgggcgcaggcgtccgccgtcgaggcgcccgccacggccaaggcgaagaaggagtccaagaagcaggaggagggcgtcgtcaccaacctatacaagcccaaggagccgtacgtcggcaggtgcctcctcaacaccaagatcaccggcgacgacgcgccgggggagacgtggcacatggtcttcagcaccgaaggcaagatcccgtacagagaaggccagtccatcggcgtcatcgccgatggcgtcgacaagaacggcaagccgcacaaggtcaggctctactccatcgccagcagcgcgatcggcgacttcggcgactccaagacagtctcgctgtgtgtcaagaggctcatctacaccaacgatgccggagagatcgtcaaaggagtctgctccaacttcttatgtgatcttcagccaggtgataacgtccagataacaggaccagtcggcaaagaaatgctgatgcccaaagacccaaacgctaccattataatgcttgccaccggtacaggtatcgctccgttccgatcgttcctgtggaagatgttctttgagaagcatgacgactacaagttcaacggtctgggctggctcttcctgggtgttccaacgagcagctcgttgctctacaaggaggagttcgggaagatgaaggagagagcgccggagaacttccgggtcgactacgccgtcagccgggagcagacgaacgcggcgggggagaggatgtacatccagacccgtatggcggagtacaaagaggagctgtgggagctcctgaagaaggacaacacctacgtctacatgtgtgggttgaaaggcatggagaagggtatcgatgacattatggtgtcactggctgaaaaagacggaatcgactggttcgactacaagaagcagctgaagaggggagatcaatggaatgtggaggtctactaaccgctgaattttgcagctgacattttgtgttgtgcctatctgtaagtgaggccagggtgtactgcgtatataatgtagatagtgagtgtgttctgagtttttttttactattgccgtctctgtttatagatttgtataagtactcttaatgttatgcctattcgattttttatatgagtaatgtgatcaagtgcccaagaatttatgttcccacattattttttgaattgcaaagatcttgtagatatattattattttttagttttggtttatgacaatcctggagaaaattttatttttcatcgaaactgataccctacagaatgaacatttgctcctgacaaccaacagagttacacaacaagctcgtatttcttctattttcctgtgcagtaaataaatagttattatactaatgcagaagcatgcat

SEQ ID NO: 152269 - DNA, 733 bp, Zea Mays
gcaaaccctaagccaccgatccgacggcggggatcgcccgatcaaaccacagacagaaccatacccgtcaccacctcctttacataaaaggctctccctcagcgcgccgtcctcctacgcggtacgcgcacacagccaaaccatcctcctctccgccgcccgccgcagcagcacccaccgggcaagatgaagacgatcctggcgtcggagacgatggacatcccggagggcgtcatggtcacggtggccgccaagctggtcacggtggagggcccccgcggcaagctcacccgcaacttcaagcacctcaacctcgacttccagctgcaggaggccggccgcaagctcaaggtggacgcctggttcggcacccgccgcaccatggccgccatccgcaccgccatctcccacgtccagaacctcatcaagggggtcaccaagggctaccgctacaagatgaggttcgtctacgcccacttccccatcaacgcctccatcaccaacagcaacacagccatcgagattaggaacttcctcggcgagaagaaggtaggtacccatctctgtttctgtttgtttccacacgagatctgcggtgggtttatcatgtgtcgtgtatgacttaactcggtcggtgtcgttcaggtcaggaaggtggacatgcttgatggcgtgaccatcctccggtccgagaaggtcaaggatgagctcatccttgacggaaacgacgtcg

SEQ ID NO: 152270 - DNA, 1736 bp, Zea Mays
gcaaaccctaagccaccgatccgacggcggggatcgcccgatcaaaccacagacagaaccatacccgtcaccacctcctttacataaaaggctctccctcagcgcgccgtcctcctacgcggtacgcgcacacagccaaaccatcctcctctccgccgcccgccgcagcagcacccaccgggcaagatgaagacgatcctggcgtcggagacgatggacatcccggagggcgtcatggtcacggtggccgccaagctggtcacggtggagggcccccgcggcaagctcacccgcaacttcaagcacctcaacctcgacttccagctgcaggaggccggccgcaagctcaaggtggacgcctggttcggcacccgccgcaccatggccgccatccgcaccgccatctcccacgtccagaacctcatcaagggggtcaccaagggctaccgctacaagatgaggttcgtctacgcccacttccccatcaacgcctccatcaccaacagcaacacagccatcgagattaggaacttcctcggcgagaagaaggtcaggaaggtggacatgcttgatggcgtgaccatcctccggtccgagaaggtcaaggatgagctcatccttgacggaaacgacgtcgagctcgtatctcgctccgccgccctcatcaaccaggtgaatacttacctacctacttacgagtgcctgctatatgcagtgtcagatgtgctttgatgtggtagatcatgatccttacatttattccttgttattgctgaattatactgatctgaatccgatattgaatggtaaagtcgtagcgcataggctgtgcttgaattatagtgtgtccaggtggttttggcttgaaatgtgtaggcagatcacacttttaactactgcccggcagtgtctagatgtgcaagtgtccatcatccatgtgttagcaattttagtttatgattgtgctctcaacaactaagtgcagcgcttttatgttaggtgtatttaataacagcaaacacctaacaccctgtgaatcctatggttggtcatggtcctaacttgggtggaaatgctcatgctgtagaataccgacgtgatcaatctattgttgccctgtttaattttgtacctgttgcttactgcatgatcagggtatattattgccttttgtctagtacgattattgtgtcttcagttcctgcgtgtatttagatattcacatcactattggtggattgatgtgctacgatttgtgtgactgccatcatgaatctctattagttttgctgattgctgttatataacgtctactggtggatcgctgtactattgatttgtgtgactgaacaagttttctccgttcgtctacagaaatgtcatgtgaagaagaaggatatccgaaagtttttggacggtatctatgtgagcgacaagggcgtcatcgaagaggagcagtgagcgacagagtagccgaaatgccaggagatgaatatgaatgtcgtttgagttgcaattttgtgagattggatgtgaacctttttctcattccttaaatagttgactgccagtgttcgtggtttcaaacgaaatttagtcttattaactgaatttgcgtattcaaatggattgcgtggctgcctggttatgttttgaattttgcgtcgcggtccaataattcgatggactggacccaaggaaatttgaatccgaatggactgatacgttgtatttta

SEQ ID NO: 152271 - DNA, 1642 bp, Zea Mays
gcaaaccctaagccaccgatccgacggcggggatcgcccgatcaaaccacagacagaaccatacccgtcaccacctcctttacataaaaggctctccctcagcgcgccgtcctcctacgcggtacgcgcacacagccaaaccatcctcctctccgccgcccgccgcagcagcacccaccgggcaagatgaagacgatcctggcgtcggagacgatggacatcccggagggcgtcatggtcacggtggccgccaagctggtcacggtggagggcccccgcggcaagctcacccgcaacttcaagcacctcaacctcgacttccagctgcaggaggccggccgcaagctcaaggtggacgcctggttcggcacccgccgcaccatggccgccatccgcaccgccatctcccacgtccagaacctcatcaagggggtcaccaagggctaccgctacaagatgaggttcgtctacgcccacttccccatcaacgcctccatcaccaacagcaacacagccatcgagattaggaacttcctcggcgagaagaaggtcaggaaggtggacatgcttgatggcgtgaccatcctccggtccgagaaggtcaaggatgagctcatccttgacggaaacgacgtcgagctcgtatctcgctccgccgccctcatcaaccagaaatgtcatgtgaagaagaaggatatccgaaagtttttggacggtatctatgtgagcgacaagggcgtcatcgaagaggagcagtgagcgacagagtagccgaaatgccaggagatgaatatgaatgtcgtttgagttgcaattttgtgagattggatgtgaacctttttctcattccttaaatagttgactgccagtgttcgtggtttcaaacgaaatttagtcttattaactgaatttgcgtattcaaatggattgcgtggctgcctggttatgttttgaattttgcgtcgcggtccaataattcgatggactggacccaaggaaatttgaatccgaatggactgatacgttgtattttacggttcctttcaaatttcaaattcacatcgaatgttttaacttatcgttagcagtcaggactaagtttaaatatcttttcaaaacccccacaagctgaactctagcgaaacctctttaattcagcagctctataaagcaagcattgttctatggtctagctagcgcgcgacagccacttaaggtcacatctcggaatcaagaagaaattgttcagccgcggatccttctgagcacgaacatgccatatccgatgccaagaaacgtggcaatggagatcccgaagatgccgacgaggatcccgggcacgacgagcgaggtccagcctttggccgtggccatggcggctgcggtggtggggccgcctatgttggcgttggaggcgatgagcagcggcttcctgtcgatcccaataaccctgccggcggcgagcaccacggccatgtggacggacacctgcacgagcgcgaaggcgaagacgctgggcgcccgggtgacggcgtccacgacgttgccgttggcaccgacgacggcgaagaagagctgcatgaggatgagcgccagggtctcgccggcaggcgccagcctgctgagcggcgccgggaacgcc

SEQ ID NO: 152272 - DNA, 1383 bp, Zea Mays
cagcacgcagcacgcagcaccagccaccacaccacccgtcacgtcactactgctccttcctttgtcctctcctgcctcacgtctcacgccagcagaagcgccaaacaccagcagcggacgaccacgccaactctaggtctacgaggaaggggggggggagggaggagcagcgcagcggcagccgatggtgtcgacgagctcgacgccgcaccctctggatccgtccgtcccggccgtcgtggggggcggcaaggaggaggaggaggaggcggtggagtcttgtgccgccgccgccgccacgcccttgccgccggttgggatcgacgacgaggaggagggcccccggagagtgcgcaagccctacaccatcaccaagtcgcgcgagagctggaccgaccccgagcacgacaagttcctcgaggcactgcagctctttgaccgtgactggaaaaagattgaagcatatgttggctccaagacagtaatacagattaggagtcacgcacagaagtactttttgaaggttcaaaagaatggaacaggtgagcatttgcccccacctaggccaaagcgaaaggctgcccatccatatccacacaagtcctcaaaaaaggcccttcaagttgtcttaccacaacaagtttcacacataatggagcaaggctgtggtacacctatggatgtagctactgttgctacagactctagtgtaaataatgcttttcctgttcaacatttcagtccgaggcatacacaagccatgccagactttgctcgtgtatacaacttcctgggaagcatatttgatccagagacaaatgggcatttgcagaagttgaaggaaatggatcccattgatgctgaaacggtactgttgctgatgaaaaatctgtcaatcaacctaactagtccaaactttgaggagcataggaggttgctctcttcggatgcctcaagcatggatcaaaagtcgggctcttcccgggttcatctcccgttcatgataacgagcaagtgagagaagcagctggctggcctgaaggcaagaaggtcgtttggagtcgtcacactcaggagcaaggcgatgcgtatgtacatatatcttaataagcagctttaggatagcttggtttgctcgaccgacatgttgcaagtttatgcgcctttttctttattctccgcccctccagttttgcccgttgtagtatggaacttataacatgcgtgttttatgccgcatcttacaaaatatttttgtcccatcacaaggatgaacgggtgggggcatgtgtgtgttttttttgccgtgtgtgtatgtatacagcatgcggctgtatgtgtagatcaggctatatatataacagactgtgtgctgttctatta

SEQ ID NO: 152273 - DNA, 1487 bp, Zea Mays
aataactatattgtacgccctttgagttggaggagtcccctctctctctctatacctttcttgcccaagcagtcaatcaagctgggaaacttaaacagaaagcgaagcaattaaaggccaccaccgccttcacttgttccttttggttattttcctcttgctgtggcttaacttgacaagaagaagatgctacgtcggcaaggccgaggtggaaaatttctggaggaggtgctcatcgtcggcgggctcctgctggtgcagtgcgtgctctccggctacgtggtcttcaccgaccacctgctcgccctcggcgccgacccgctggccgtcgtcgtcgtcgccggagccgcctacgccgccttctgctttcccttcgccgtcgccctcgagaggaagcgatggccttccacggtttcggggactctggtggcgcaatacctgctcattgctcttggagggacaaccgcgttccaagcgctgatgctgctggggatcaagaagaccacgccggccatcgcatccgccatgcccaacctcagccccggcctcatcttcatcgtcgcagcctgtttcaggctggagaggttcgacagggcgtgcaagtacacgcaggcgaagatggcggggacggtggtgtgcctggcgggagcgctggccatgggcttcctgcacagcccaacttctacgtcctcctctctgcaggcagcagcagcaggaggtggcgactactactacgactggatcctcggctgctgctgcctcgtcgccgccgtcaccgtcttcgcgctcgtcaccgtcctgcaggccgccacgctcgccgccttccccgcgccgctcaccatgtgctgcgccacctccgcgacgggcgccgctctcaccgccgtcctgcggctcgtcctggaagggaggttcctcggcatggggtcgcccaggatcgacgccacgctcgtcgcggggatcgtcgtcctcggcggggccgcggtgggcgcgtgcatggcgttccaggcgtggtgcctgggcaggaagggcccgctgttcgtctccgtcttcgggcccgtccagaccgtctgcaccgccatcctctccgcggctctcctccgccaagtcctcagcctgggaagcctcgcagggatcgtgctcatgttcactgggctctacattgtcctatgggccaagagcaacgagatctcggctgacgacgaggaacagtcgttgcagggtggcgacgacgccgagaaggcactcctagcctagcaaaatccagagcgaatatcactgcacgctctgtatttgtaaaaatggaatggtgttggtgtctacgtacatactcgagaggaggatttagagaaaaaaaaggacatggctacgtttgttcataaaaaaaggaaacaagaaaagcacgtctcaactatgcacttcttttatatgtggactttcaagcacgtctgtgcctaaaaaaagaaacaagaaaagcaccttttgtgaga

SEQ ID NO: 152274 - DNA, 1511 bp, Zea Mays
aataactatattgtacgccctttgagttggaggagtcccctctctctctctatacctttcttgcccaagcagtcaatcaagctgggaaacttaaacagaaagcgaagcaattaaaggccaccaccgccttcacttgttccttttggttattttcctcttgctgtggcttaacttgacaagaagaagatgctacgtcggcaaggccgaggtggaaaatttctggaggaggtgctcatcgtcggcgggctcctgctggtgcagtgcgtgctctccggctacgtggtcttcaccgaccacctgctcgccctcggcgccgacccgctggccgtcgtcgtcgtcgccggagccgcctacgccgccttctgctttcccttcgccgtcgccctcgagaggaagcgatggccttccacggtttcggggactctggtggcgcaatacctgctcattgctcttggagggacaaccgcgttccaagcgctgatgctgctggggatcaagaagaccacgccggccatcgcatccgccatgcccaacctcagccccggcctcatcttcatcgtcgcagcctgtttcaggctggagaggttcgacagggcgtgcaagtacacgcaggcgaagatggcggggacggtggtgtgcctggcgggagcgctggccatgggcttcctgcacagcccaacttctacgtcctcctctctgcaggcagcagcagcaggaggtggcgactactactacgactggatcctcggctgctgctgcctcgtcgccgccgtcaccgtcttcgcgctcgtcaccgtcctgcaggccgccacgctcgccgccttccccgcgccgctcaccatgtgctgcgccacctccgcgacgggcgccgctctcaccgccgtcctgcggctcgtcctggaagggaggttcctcggcatggggtcgcccaggatcgacgccacgctcgtcgcggggatcgtcgtcctcggcggggccgcggtgggcgcgtgcatggcgttccaggcgtggtgcctgggcaggaagggcccgctgttcgtctccgtcttcgggcccgtccagaccgtctgcaccgccatcctctccgcggctctcctccgccaagtcctcagcctgggaaggcaatcgtggaaatggaaatgcagcctcgcagggatcgtgctcatgttcactgggctctacattgtcctatgggccaagagcaacgagatctcggctgacgacgaggaacagtcgttgcagggtggcgacgacgccgagaaggcactcctagcctagcaaaatccagagcgaatatcactgcacgctctgtatttgtaaaaatggaatggtgttggtgtctacgtacatactcgagaggaggatttagagaaaaaaaaggacatggctacgtttgttcataaaaaaaggaaacaagaaaagcacgtctcaactatgcacttcttttatatgtggactttcaagcacgtctgtgcctaaaaaaagaaacaagaaaagcaccttttgtgaga

SEQ ID NO: 152275 - DNA, 1682 bp, Zea Mays
caacgcggtgcatgcactgcgcattttatactttattataggctaactaactaactagccagcttctccaagcaattttaatttatatatatgcatgcggcatgcctcagccaaagcatcggcaccaggccaccagtacgtcgtcttccctagctaagctagcttcctggcagcagcaaattaatggcgaccatcaatttcacggtgcacagacgaccggcggtgctggtggctccggcatcccccacgcctcgtgagctgaagcggctctcggatttcgacgaccaagagagcttgcgtttccggatccctgtcatccatttctaccagaggaaggagtccatggccatgggctgcagcggcgaccctgcggtggtcatccgggatgccgtcgcgagggctcttgtgccctactacccgttcgccggacggctcagggagcacgacggaggcaagctcgccgttgactgcaccggcgagggtgtgctgttcgtcgaggccgacgctgatgtttgcctggagcagtttggtgacgtcctgctgccgccattcccatgcctggaggagctcatctttgacgacgccccccctgctgctgctggtgctgccatccttcacacgcctctcctgcttatccaggtgacgcgactcgcctgcggaggattcgtcctggcgttgcggctgaaccacaccatggcggacgcactgggtctgacgcagttcctgggcgccgtggcggagctggcgcggggtgttgcgcaggctcccaccgtgcggccggtgtgggaacgccacctgctggaggggcagcgcaacccgccgcgaataataagcgacgggttggacttgtggtacgaggctgaaatggctgatgatgatggtgacaacatcattccatcgtctctaaacctaaaggacgacgacatggcgctccgctccttcttcttcgggcccggggagatcgcggccatccgcgaccagctctcgccggaccttcggaagcgggcgtcgaggttcgacgtcatcgcaggatggctgtggaagcaccggaccatggcgctggccccggactactccgccgacgagccgatgctgatgctcgtcgtcgtcaacgcccgcggccgcgaccgcgaggccaccggttgcgccggcatccccaccggctactacggcaacgcgttcgcgatcccggtcgccgtgtcgacgtccggaaagctgtgcgcgaaccccgtcagctacgccgtagggctggtgaaggaggccaaggacaaggtggacatggagtacatgcggtcggcggcaaacctcatcgtgcaccgcgggcggcggagcccgcgcttcaccgtcggcatgtacagtctgacggacgagaccaaggccaggttccacgacctcgacttcggatggggcaggccggtgtacgggggaccggcagaagccgtcggtaccccggccttgccctggctgtcaagcttcatcttacccttcaagaacgctagtggagaggacggcgccgtcgtgccggtgtgcctgcctcgcctggccatggacaggttggtcgacgagatgggcaagatgcggcggcggcgctcaccggccgaggtgcagcagcctcgccatgggtttcccgtcatcgtcaagaggtctgcactctgaagtaattgtccaataatgcatggccg

SEQ ID NO: 152276 - DNA, 1381 bp, Zea Mays
acctctctcacgcctgtctccggccacctcacttccccccttcgcgctcggcctcgcgtcgacccatctgggctggggcacgcggcgacattcactcgtcggcttagggacccccccggtctcgaaacgccgacaatattaaaaagaccaataattggaccaagcaacagaaccatagatatgatcacagggccatacaaactcattcgacggtgtgaagtgactgcaattcttatattgtacgggctgtcaaggctgctaactggctcgattctagctcatgagatggtgcatgcttacctccgacttataggatactgaaccctgagtccagaggttgaagaaggtatctgttaggttccagctcatctttggcttgagtcagaaatcacattaggttcgggtagcatggcaacaacctcagatgcgtcatcgtcataatctacatcttcctcaatgaaaaagggtgcaaagacgaaattcgaaaaaagacttggcaagttcttcaagcaccaaatcgaaacagattcttctgtggcttatggagatgggtttcgagcactacacgttgcattagatatccttgggagtactaaatggagggtgaatagaagagttcacgatgttgttgagactatctggagtcaaggtggaggcattgcagggctggtggacaaggcaaatatttctttgcctgaacgactagaatcagaggaccctgatgaaatgcagaaatggaagtggagtttaaagaaggcaaagaaaactaaccgtgagctgcatgctgagagatgtgacaatgagctcaaactctcggttgctcataaaatgagagaggaggatggattttattaccctcacaatttagatttccgtgggcgtgcataccctatgcatcctcatttgagtcacctaggttcagatcattgtcggggtgttctagagtatgctgaagggctgtcactaggaaagtatgggttgtgctggttgaagatacacttggctaacaaatatggtggtggcattgaaaagctttctcacgagggcaagctagcttttgtggagaaccaactgtttgatatatttgattcagcagcaaatcctgttgatgggaactgctggtggacgaatgttgaggatccctttcagtgtttagctgcatgcatggacctttctgatgccttaagaagtccatcaccttaccatgctgtctctcacctgcctattcatcaagatggttcatgcaatggtttacaacattatgccgctcttggaagggactatatgggcgcggttgctgtcaaccttgttcccggagagaaacctgcagatatctactcagaaatagcttctaggtgagtttcttcctgctagttccctt

SEQ ID NO: 152277 - DNA, 1811 bp, Zea Mays
tgccggctgccgcgtcacgtcacgtgcagcgcacacaccatccgccgccagggcggggcccatcgcggcatcgccgtcgagtcgcctctgcattccttttccttcccagttcactcccacttcccacttcactcccagtcccagctcccaaaccatctgatctgctctgctcccaccaatctccgtcgccgtcgctttcgccatggcttcccatcgccacttcctacgcctcctcgaagaccccttctcccccttcccaccgccgccaccttcctcctcctcctgcccgttcctccttgacggcgtctcagattacccgtccccgttccccgccgcctccccattccccgacctagatgatctcctcctgccccccgcgccggcgctcgaccccttcttggccttcacccccaccccgctcattctccgagacctcaccaaccgtgtcgccgcactcgaggtcgccgtcgccaccgcgcgccgccgccccggaccccccgccacccggaagcgcacctatgtcactgaggccggcggccgcaaggtcaagtggacttccgtcgagaagccgcgcgccggggagcggacgctcaagtgggaggccgagatcaagtcccccgacgacgacggcttcgaccgcaagtggaagtgggaggccaagggcggatcctccgcagccagcgccaggaagctcaagtggggtgccgcggtcaagggcaagggatgtctcgagccctggtcccaggcctacacctgggaggaggacttcaccgccagcgacagcgacaaagaagaggaggagcgcgcggccgacaagaacaaggccaagaagatcaccatgaacaagaatgagaagaaggaggtgaaggctgtcaagaaggagaagaaatgccccttcgccaccgtcaagatcgaggagatctcggaagacaatgatgctggatgcgtcgccatcaaaaaggcatttgctaagggcaacggcaagggaaagaggaaggagctctcaccgcaggacgctgcattgctcatccagatgacctacagggctcaccttgctcatcgctcccaggtgcttcgctgcctgcgtgacctagctgtggctaaagccaagctcaaggagctcaggtccctgttctataacatctcctacaggcaccgcattgcgcatgaccacgaagagcgccagaggttctctgagaagatcatcgtgctgctcatcaccgtagatgcactcgagggacctgactacatggtgaggaccgcgaagaaatctatgctagaggagctcgaagcaatgctggaggttgtggaccctcagcccccagggaagcagcgatcactgagccgcaggaaatttgatctcccagagggtggagccatccccgatgagaaaaccgctgctgtgaacaaagccatcaggatcatcgaggaaggcaagtgaagtgatgcaccaccaccttgttactggcaggattgaatcctgatgaaagctccatatctatccgtgtatcgtctaggagaagtttatatccgtgtgctttgctgacactcgagggaggagaactaatatctgcactttattgtaccttaaatgatagccatgtttttattgtgaacctgtagtatgttgctaggcagtcagtttgaacattacaaatagcgtaagggcctctagccgggttggttaggtagtctgagtagcacttcctcatgtcctggttgtgggagcgaatgtcagactgtggttaaaaaaatatcccatcgtttgtcccacgccaaagtacaggtctaaagcttagtctcagtcgcgg

SEQ ID NO: 152278 - DNA, 1297 bp, Zea Mays
cagctcccaaaccatctgatctgctctgctcccaccaatctccgtcgccgtcgctttcgccatggcttcccatcgccacttcctacgcctcctcgaagaccccttctcccccttcccaccgccgccaccttcctcctcctcctgcccgttcctccttgacggcgtctcagattacccgtccccgttccccgccgcctccccattccccgacctagatgatctcctcctgccccccgcgccggcgctcgaccccttcttggccttcacccccaccccgctcattctccgacaagaacaaggccaagaagatcaccatgaacaagaatgagaagaaggaggtgaaggctgtcaagaaggagaagaaatgccccttcgccaccgtcaagatcgaggagatctcggaagacaatgatgctggatgcgtcgccatcaaaaaggcatttgctaagggcaacggcaagggaaagaggaaggagctctcaccgcaggacgctgcattgctcatccagatgacctacagggctcaccttgctcatcgctcccaggtgcttcgctgcctgcgtgacctagctgtggctaaagccaagctcaaggagctcaggtccctgttctataacatctcctacaggcaccgcattgcgcatgaccacgaagagcgccagaggttctctgagaagatcatcgtgctgctcatcaccgtagatgcactcgagggacctgactacatggtgaggaccgcgaagaaatctatgctagaggagctcgaagcaatgctggaggttgtggaccctcagcccccagggaagcagcgatcactgagccgcaggaaatttgatctcccagagggtggagccatccccgatgagaaaaccgctgctgtgaacaaagccatcaggatcatcgaggaaggcaagtgaagtgatgcaccaccaccttgttactggcaggattgaatcctgatgaaagctccatatctatccgtgtatcgtctaggagaagtttatatccgtgtgctttgctgacactcgagggaggagaactaatatctgcactttattgtaccttaaatgatagccatgtttttattgtgaacctgtagtatgttgctaggcagtcagtttgaacattacaaatagcgtaagggcctctagccgggttggttaggtagtctgagtagcacttcctcatgtcctggttgtgggagcgaatgtcagactgtggttaaaaaaatatcccatcgtttgtcccacgccaaagtacaggtctaaagcttagtctcagtcgcggtcattctcat

SEQ ID NO: 152279 - DNA, 2561 bp, Zea Mays
gcgcataagctacacattattaaaacatctaggctagtttgcgtacacaccggaagaacctcgggtacctaccaactgttttgaagcttgctgggaagctttgctatcaagtaccagctgttgtcaagatcagtgggttgtatatataagtaatggacaggtcggcggaggtacttgtgcttgtcagcttctttcttcagctgtttctgttcttcactggtgggcttcggcaacgcacaagaaaccctttgcttcgatgcagcatatgggtagcgtatgcgggagctgacctggtagcaatctacgctctcggtgtcctgtcacgagatgcgaatgcgatggaaaacggaacagcgtccctttgggcacctttcctcctcatccatctcggtggccaggacaccatcaccgccttctccatggaggacagcagcctgtggaagcggcatgtgctgaacctgttagtccaggtgaccctagcgctgtacgccttcttcttcttctggaagcccagcagcacgcaggttcttttccccggcgtcctgctgtttgccgctgggatcatcaagtacggagagaggacagcagccctgatgcagggggacctgagcagcagcatggtggtggaggagctggtcacctccgacaacagcagatcagagcagcagcagcagcagaaaccagcacccgatctcgcgaacatctgtgctgacgcgttgcgttcggcgccggggatccggatgctgttcgcaggccacacgacggcaaaagtggccggcgatcttaggagcatcgtcgactcctatccctcgccctcctcgtttgataggcatacttccctgttcacgttgatggatgtggagcttgccatggtgtacagtgatctctacactaaggccgcagtgctccgtacgagggcaggcatcgtattccggtgcatctcgctggcgtgtaccgttgccgctctcaccctcttcttcttcttctcgtcttcgtcctcctcatcctacagcagcagcgatggtgccatcgtcatcacctacacgctgttcataggagggcttgccgtggacgtctgctccctgcttaaggtgtacatggcgtcaccttgggcatgggcgtgggcgtggctgcgtcaccctcggactcgggctgcttctcgcgtctctcggtgccttctctcctggtgggacatgacaagcaggccgctgtggtcaaacaccatggggcagtacaggttcgtatactacgacgacgaatccaggtcgtggtcgccgccgccgtctaggctctccgaggtagtgatgtgcatcgtggggaagctggtcggcgtcgggagggacaaggggggttcgttctgtctcaacaggctgctgaagaccaagcaggtggtggtggacgacaatgtcaccctgtgcctggtgaaggagatagacgacatagccaccgccgctcgccagccgcgcgatgagcagaagcagcagcagtggtggtgcctcgggcagctgctactggaggcaacgcagcggcggcaggagctggccaacgattttgtccgccttgtatcctggctgcacgcatgcacggagaccctcctgtgtcaggctgcggatgcggcggcggccaacaaggaaatcagcatcgccaccggcaccgcaggcgccgccgcttcggccgacgtctgccggaagctatccaggtacatgatgtacctggtggctgcaaacccaggaggtgctgcttcctcgcttttgcaggaaggcaaccctgaagcggagtttcggcgctgtgatgggtaccgtagctgtcgcacggttgacgagcagcgggatgcttgcatgcgccttctgtgtgacggcggcggccctgcagcagcggaggccatgtcgacgacgctgtggccctgctcggcgacgtgggatgagacactggaggagctgaagcacatgtgggcaaggctgctcgtgtacgccgcctccaggtccaggcccgaggcgcacgcggcggcgctggcgagaggcggggagctcttcaccttcgtgtggcttctcttgtcccaccacgggctcggtgcttcctccactgccttccgggtggaggtagatctggtgaaagctcatcgcaaacatgtcgacgacgactcatcaaagagggaaagaagatactacgtcttcgacaatctcccagtgcacatgcagatggttaaccgcccacaactgcagagcaagctagcttcgtcaacacccacaggatccgagtcccactatttggctgactccacggtggacccctagacaattactggaggaacaagcttcagctcttgtggttgctatacaatatattaattgtttccacttttacatcttttatcaataaaaataaaatcatgacgttatcgctgaaaattgcaatacacataccttattaaatatataatatatggagattattgcaatagagaacatatagcagttgatttcattgtctgttatactattattcatgttgttgtgactgctactactgtattaatcttttatatattatgtattgaattt

SEQ ID NO: 152280 - DNA, 2516 bp, Zea Mays
ctctcctctcctctttggcgctcccaacacacaagaagaaactgacggaggagcggagcggagccgagccacggccagtgccaggagcgaaaataaaaaggggtaggagttcctcctccccaacctcacaagtaaagcagcagcagcagaccttcttgacctagcaagcaatggggccgccgttcctcgccgtcgccgtcatcgtcgccttcctggccgccgccgcgcaggccgccgaccccttcgccttcttcgactgggacgtctcctacatcaccgcctcccctctcggcgtcccgcagcaggtcatcgcagtcaacaagcagttcccaggccctatcatgaacgtcactaccaactacaatgtggtcgtcaatgtgctcaacagcttagacgagcccctgctcatcacttgggatgggatccagcagcgcaagaattgctggcaggatggggttctcggcaccacctgccccataccgccaggttggaactggacctacaacttccaggtcaaggaccagattggcagcttcttctacttcccaccccttggtatgcagcgtgccgcgggggggttcggaggtatcactgtcaacaaccgcgcggtcatctcggtcccattcgacacgcccgatggggacatcacgctcttcatcggggactggtacaagatgaaccacacgcacctgaggaagatgctcgacgacggcaaggaactggggatgccagacggtgttttgatgaatggcaaggggccatataggtataatgactcgctagtgccagatggcattgagcacgagactatcaaagttgagccaggaaaaacataccgtttccgtgtccacaatgttggtgtctccacaagcttgaacttacggattcagaatcacaacatggcccttgttgaaacagaaggttcatacacgatgaagcagaattttactaatctcgacatccacgtgggccagtcttactcatttctggtcactatggatcagaacgcaagcagtgattattacatcgtggccagtgctaggtttgtgaacgaatcgctttggaccagagtcaccggtgttgcaattttgcaatattcaaattcaaagggaaaagcatctggtcctcttcctgatccaccaaatgatgagtatgacaaaactttttcaatgaaccaggcacgttccatcaggatgaacgtgagcactggtgctgctcgtccgaatcctcaaggatcatttcactatgggtctatcaatgtgagccaagtttacaagctgaggaatgaaccacctgttatcatcaatgggaagaaacggactacactgagtggtatctcttattccccacccgacactcctctaaggttggcagatctgtacgacaagaaggatgtctacacacttgacttccctacaatgccaattgatggaccgccagtgatcagaacatctgtcattaactccacatacaagaactttttggaaattgtatttcagaacaatgactcaactgtccagacctaccacattgatggatatgcattctgggttgtaggaatggactatggcgagtggactgagaatagccgtgggacttacaacaagtgggatggtgtttctcgttgcacgactcaggtgtttccgggagcatggactgctgtgatgctgtcacttgacagcccaggattttggaatgtacggacagaaaacctggacacgtggtatctgggtcaggagacttacatcagggtggtggatccaaatggaggctataatgttactgagatggtggctccagacaacatgctctactgtggcctcctcaaggataaacagaaggctcagaagcctcatggttcgaggtcatcagcctctgcagcaaaactgaactatcatgtgctcgcggctttggtctctttggtggtagccttggtgttgggccattgacaagaactgcctccagcttgtggtcagctgctgtttgcaggttgattaggcgtttgacagaaatactgttgagtaggtcagtcgaattcgtaggttccattcatgatttgtctggcaattgagaaaaaaaaatgctgtgccattgcgcatcttcgtccatcggaattgattaacatgctgaagaactgtgcagtagcttgagattgagcacaaatttgaagttgtcggcagctggcacccacaagcaaggcgtgtgctgtgctgcctgagtgtgttttcttgatcagtgaatttgtcgagagttggatattgttggttgtatcccatgcatcccattgcaattagtctctttatattcagtgttgtaggcaagtctttccttcgcaagtacggagagattgtttgagctcgtgacctgctcctctaactaatctgtgaattggacacttgcagtagtttcagccaaaccatggacaatcaaaggcactactgtacacaacagttggtgttactgtgtatctcatcagtttgagcctgttggattcaaaagccaattgttagctggct

SEQ ID NO: 152281 - DNA, 2273 bp, Zea Mays
ccagtgccaggagcgaaaataaaaaggggtaggagttcctcctccccaacctcacaagtaaagcagcagcagcagaccttcttgacctagcaagcaatggggccgccgttcctcgccgtcgccgtcatcgtcgccttcctggccgccgccgcgcaggccgccgaccccttcgccttcttcgactgggacgtctcctacatcaccgcctcccctctcggcgtcccgcagcaggtcatcgcagtcaacaagcagttcccaggccctatcatgaacgtcactaccaactacaatgtggtcgtcaatgtgctcaacagcttagacgagcccctgctcatcacttgggatgggatccagcagcgcaagaattgctggcaggatggggttctcggcaccacctgccccataccgccaggttggaactggacctacaacttccaggtcaaggaccagattggcagcttcttctacttcccaccccttggtatgcagcgtgccgcgggggggttcggaggtatcactgtcaacaaccgcgcggtcatctcggtcccattcgacacgcccgatggggacatcacgctcttcatcggggactggtacaagatgaaccacacgcacctgaggaagatgctcgacgacggcaaggaactggggatgccagacggtgttttgatgaatggcaaggggccatataggtataatgactcgctagtgccagatggcattgagcacgagactatcaaagttgagccaggaaaaacataccgtttccgtgtccacaatgttggtgtctccacaagcttgaacttacggattcagaatcacaacatggcccttgttgaaacagaaggttcatacacgatgaagcagaattttactaatctcgacatccacgtgggccagtcttactcatttctggtcactatggatcagaacgcaagcagtgattattacatcgtggccagtgctaggtttgtgaacgaatcgctttggaccagagtcaccggtgttgcaattttgcaatattcaaattcaaagggaaaagcatctggtcctcttcctgatccaccaaatgatgagtatgacaaaactttttcaatgaaccaggcacgttccatcaggatgaacgtgagcactggtgctgctcgtccgaatcctcaaggatcatttcactatgggtctatcaatgtgagccaagtttacaagctgaggaatgaaccacctgttatcatcaatgggaagaaacggactacactgagtggtatctcttattccccacccgacactcctctaaggttggcagatctgtacgacaagaaggatgtctacacacttgacttccctacaatgccaattgatggaccgccagtgatcagaacatctgtcattaactccacatacaagaactttttggaaattgtatttcagaacaatgactcaactgtccagacctaccacattgatggatatgcattctgggttgtaggaatggactatggcgagtggactgagaatagccgtgggacttacaacaagtgggatggtgtttctcgttgcacgactcaggtgtttccgggagcatggactgctgtgatgctgtcacttgacagcccaggattttggaatgtacggacagaaaacctggacacgtggtatctgggtcaggagacttacatcagggtggtggatccaaatggaggctataatgttactgagatggtggctccagacaacatgctctactgtggcctcctcaaggataaacagaaggctcagaagcctcatggttcgaggtcatcagcctctgcagcaaaactgaactatcatgtgctcgcggctttggtctctttggtggtagccttggtgttgggccattgacaagaactgcctccagcttgtggtcagctgctgtttgcaggttgattaggcgtttgacagaaatactgttgagtaggtcagtcgaattcgtaggttccattcatgatttgtctggcaattgagaaaaaaaaatgctgtgccattgcgcatcttcgtccatcggaattgattaacatgctgaagaactgtgcagtagcttgagattgagcacaaatttgaagttgtcggcagctggcacccacaagcaaggcgtgtgctgtgctgcctgagtgtgttttcttgatcagtgaatttgtcgagagttggatattgttggttgtatcccatgcatcccattgcaattaccaaaccatggacaatcaaaggcactactgtacacaacagttggtgttactgtg

SEQ ID NO: 152282 - DNA, 2093 bp, Zea Mays
gcgagcgagcctgcaagctgcaccgtaccctagctactctcttcttcctcacctccatctctttcactgttgccgcctttgcctaatattctcaccgccgccatagattgcaaatcgagctccgatccatctgtttctaactccagctagctagctcactcttctcggcggctcttgctttgttttccccatatacatacaagaggtagatcaattaatccggtcagttcatttattagttggattggatcggcagcgcgcaaccccgttcgtctccgttcccgtttgcacggcagtcgtcctagcttcattcgctggcctccctttgatcttcctcggtccctccctctttctcctccgatcccatagcttctctctctgtgtgtgctaaaaacagctagctaggttaggggagaggcagcagagacagggacaatctagagattaacagacaagatcgatcggtcgagcttgcgcgcatgcactgaattgattctcaagcgcgcagagatccatgaactctcatgcatgcatgcatgtcatagcaagagataatgacctagctagctagctggggagagaatacccacacatagatcagcaagagacagggagaccaaagataaaaatagaggtccattcctgtctccacctgcacctctacgtactattgctgcagctactactagtagagatctctgcaaggttttcgtcacatatatctctctgatttgggaaagcaggttgatctagctagctagatgggcatgagcagcacacaagcagcagcgcagacacagcagcagcagcagcagctggttcctccaggctttcggttccatcccacagacgaagagctggtggactactacctcaggaagaaggtggcctcaagaaggatcgacctcaatgtcatcaaagatgtcgatctttacaagatagagccatgggatctccaagacaagtgcagactgggaggccctggtgaggaggagcagaacgagtggtacttcttcagccacaaggacaagaagtacccgacgggcacccggaccaaccgcgccactgccgccgggttctggaaggcaaccggcagagacaagcccatctacgccaacaagcagcggcagctggtgggcatgaggaagacgctggtgtactacaagggcagagctcccaatggccacaagtccgactggatcatgcacgagtaccgccttgaaaccaatgagaatggccctccacaggaggaaggatgggtagtatgcagggtgttcaaaaagcgactaccaacaacaagaagagaatctgaccatgatgcaccatgctggtatgtcgatgaagatggaaccttcatgcatgaccttaactcccccatgggtggactgccaccacaccacagcatcgcacagctgcacgaacaacacctccagatgctcaacaacagctacaagaggcgggaactcaagctgcaattccagatgccaagccatcatatcctcaatgccgccgccgccattcctcacgagctagagcccccatccttccattctcttttggtctcaccagaccatcatcaagctgctaaagcgcaccaccgtgctgttcagctcatggacgagcatgcagccgaccaggtcactgattggagagttctggacaagtttgttgcatctcagcttagtcacgacgatgcggccaagggtgtcgattatactgatgaaggagatatccttcagatcaatgagaagcaagctaccgagtatgcatcaacctcaacatccagcagccaagttgatccatggaagtgacggtgatcatgaaattaatcaaaaatactgcctcctcgtataaaatattatattaagagctacaataacgatgatcggatcaattgggacatataagtaatttgatctctacatagtacgtggcgtgtaaatgagactacatacatattgagttgtgtattggtgtactacttattattatatcccttcaggatgttgtactaataatatacttagcatatgcatgcacaccgcgtttctatatgaataataaagtcatggacaacttggaaacttcatgaa

SEQ ID NO: 152283 - DNA, 168 bp, Zea Mays
ttggacttcatgcataaaatctttgtagatcgagccagaattgaaatgactaatactatatatgtgatcagaaagatgagccatcgttctctgtatgcagggatcagctagctcattaagtagtaatcttctttccttctacgttactctcggaaaaagaaacaaaaa

SEQ ID NO: 152284 - DNA, 1668 bp, Zea Mays
cgtttctttacccagcgaaggcactgcatctcccatcttcgtcttccacgcagcgccggcgctccatcttccgcaggcgacggcggcggtgctcaggcgcgggctcttagccgcggcggcggtgctcaggctcgggctcgtagaggcggcgtcagcgtcttcccctcccgcctctcatcagtcacctcgcgccttcgcctccggtcctccgcacaccggccggtgttctgcgtgcgtgcttctctctctcctcccgcctccggtggatcgtcaacggcgcccgacccctcaggctgcgccgcgcgcggcctgagggcagcgggagccagcagccgctgctccaacaaaggggttgcgccgctttgggagcgcttatgccccaaagcgaagcgttacacgtcctcttagcgcttcagcttgctgaagcgtgcgcttagtgccgctttttggaacctggcagtaactatgtggacgaacattttcaaaataggggagctccaaacagtttcttggtttcagtttcttcctatcgaacccgatgcaagtgcagcgtctgagaaaagttcaaaggtcgagcagaaagatgctcttaatagcattgtgctttcggcttatcttcacttacaaagtgaaggttttctaagtacttggactaattcctttgttggtccatgggatccatctcaaggagagcataaccctgatgagaagatcaagctctggctgtttcttcctggctgccactcatcggtatctgaaatcgcccaacctgctgtaaacaagctgagagttgcttcaaatggtttatgggtagccccaggcaactcggaagaggtagcagctgcactatcacaggctttaagaaattctttagaaagatcactgaaagggctttcatatgcaaggtttggtgatgtttttacaaaatacaacccccctacaagaaatcaaaacagctttaggagagcacagcctacagtcgagtttgtctttgctgccaccgaggaagcaatatttgttcacgttgtaatatctgctaggtatgttcggaacctttgtagtgatgacatagagaaagttctcgctcattctcctccctccatcggtgaaggtcttccagttgttgttgctcctagtgggatgctgggtaggcttgtcggttgttgtccaagtgatcttgtacgacaagtttattcaagcaaatcattgacgcctaatttaccaggttttagtcaacctactgtatgccagctgagaggccaaagttactatgttgaagttgcgcttggctttccagctgcttcagccaaaaaagtttctgagtttgagcatattcatataaaaaaagaattggatccagtgaaggatgctatggtcggttctgatggacagcgtaaggtagaatcacctgatggccttccaattcttgagaggacatttatttacccacctgaagctgttttggtacctatggtccatcaagcatttgttcgcttttcgagcaaacgaatgtgtttacagggctcgctgggaagttcatcatgggaggcatggccattctggaattttgctccgtcttcttactttcagaacaggtcagtctcaaattatttgtttctttggcatgctgtatcaacaatactaccaagaattgattattcgttgtaa

SEQ ID NO: 152285 - DNA, 4527 bp, Zea Mays
ttcttttttaggaaccggccttataagcaatattgtgatactctttacatgaatgtaggggtgtcagtataatcatgatgctttgtgtaattaggtatccaagcggcctcgttctgaattaacagaagtctcttctcatactggcaaagatgtttgtgaaaacatacaagacccgaatggtcaggttggacactcttggggctgggacgatgagggtgtcgttatggacatcaatatacttctgtcagagtttggagattttagtgacttctttcaacaagaggagttagattttggtgagcctccaggtactgctgaatcacatgctctagtaattcctgcttcagactgtggagatgtcacattcacagatagtccatcaacagcaatggatatccctgaacaaagactttctcctgttggtttcacaactttggatgcatttgaccatcaaattatggccccagctcaagatgttgttgctaaagttcaagaacctcataatgatactgcaacacctgcacagtcccactcgcaagttttatcatctggaagatttgattatcttaccaaagctgaagcaaagctcacatttgctccagaatatgcagctgttgaaattttgattgctgaggccccaacaccattgtttacaaatccatactttcctagatcaaagaaaccaggcagttctagttttagtgcaagagtttattcatatgatgttgcacaaagctctcaaattgaatccacaggagacaagccagataagacttctaaactaatatctggtaatcatttacatgatattagttcatcaaacttgtacacacttgtccaaggtgggaataaagggagtgataagatcttaaagagtactgatacacagccctctaagggagaattgtcaccacctatttctggtgtgacttcatttaatttttctcttgtttcacaaaagaagagtggcaacatgttcaatgctggctattttctgctgtctatgaagactgctttggcaactgaaattgaatgcatcacgttccaggctgccatgtgcagaattaggcatacactattgtctctgagaagcaaagcatctgccgagtttaacagtgcaacatccagcttcatacagacaaatgtcagcaacaaatcagatctcacccccaggtatgacatgagaaaaaaagaaattatgactgtaaggttatctagtgatattgatcatgaaatgtttgacagatccttaatggacaatgtgggagtttggaggcctgttgttacacctaaagggcctaaatctcttgagtctttgtctgctaacacattaactggtgcaagcccaagtctgtctatacaaagacaacctgttgtagatcttctctgtgccatgactctgcttgttcaacaatctacttcgtttgttgatatgtcacttgatatggatgacggggacggttcttttttctggctttccctggatgagcaaaagagacgtggattttcttgtgatccttctatggttcatgctggctgtggtggcctattaggaacatgccattcaaaggattgcgctggtgttgatttagtcgatccactttctgcagaggtttcagagccatccatgattagcttgttgcagtcagatataagagtagctcttaaagctgcctttgcaaacatggatggcccgttatcagtaattgattggtgcaggggtcgaggcaatgctgctgagtctgcaggtacgggagatgcatactcttttcagtactccagtggtgatatcctggagccgtcaagttcgttgtccattggtggagattcaatgagcccaccccagccaaccagtagcaatcgaggcatttcagaattagagttccaaaagggatatcaccgtgtcagaccaaccattgctgtcctcccttcaccttctatgctagtcggttaccaggatgattggttgaaggcctcggtgaatagtcttaaaacatgggagaaagctccttttgaaccttatgccttgccgaagcctgttacttactatgcactttgccctgatattgatatgttgacttcggcggtagctgattttttcatgcagcttggaacagtttatgaagtttgcaaactgggaactcattcgccccaaaacaatggaggacaaatggaactatctcctggaaaatatttgccttcaggacttgttctagttgattgtcctgagcagttgaagaaggttcgctgtggccacttaggtcccatcagttcaacaagtgactgtcttcaagctttttcaaaacattggagcgtgaaaagttttgtaacatctatttcaaggatacttaaggatataaagctgacttcaaacatatctacaaatcagaaagagagcagtagtggaccttgcacagtaatttatgtagtttgcccatttccagaaccttgtgcaattctacagacgctagtagaatgttctgttgctcttgggtatgttatttcatccccggaaagggaaagaaagttactatattcacaggttgccaaagccctaaacagcagtgcttctgtagatgaagcatcagcatcaaatgtcgttatgctatccgggttcagtatacccaagctcgtcttgcagattgttactattgaaactgtactgagaatggataagccaaacaaggagcttgctgttttgaaggacatagcattcacagtgtacaacaaggcacgacgaatcccacgggctgtctccacaagcgatatgttccagtcaccaacttatttgggtagatctcagtccacaatgatgcatgttacatctcctgctcctactctttggaaggaatgtttagttcctcgaatgtctgggccaactctctctcgagaaaccgattttgatgcatccatgaggtcggcaacatgggataactcatggcagcctgctcgttcgggaggacttctggacccaagtaagctgcctgatttatgtgctcaggatgataggaaatatgcctttgagccacttttcatactagcagaccctgggtctgccgatcttaatgctttaatggaaccatcaaaatctggagcagatgcatctggcagcagggtatatggctcaatttcaggaagtaactctgatagtggagtgagccctctactcgacgtatctgagagtgacagtgcagcaagtcttcattgctgttatggttggactgaggactggcgatggctagtgtgcatttggacagatgctagaggagaattattggacagcttaatatttccttttggtggtattagtagccgccaagacactaaagttctccaaagccttttcatccaaattctacagcaaggctgtcaaataatgtcgtcttcacctgaggctagcaatatgagaccacgagatgtcataataactcgtatcggaggtttccttgagcttgaaatccaagaatggcagaaggcaatatactcttatggtggcaatgaagtgaagaagtggcctgtgcagttacggcgatccatacctgagggtattccacctagttcaaatggtcctacgctccagcagcagcagcagcaagacatggccttaattcaagatagaaacatgccttcctcaccaaaccctctgtatagccctcatccaaaatcaagcttcatgaaaggtgcacttggacaatctggcaacaaaaaacagatccttgtggaacaaagtggaatggacacttcaaggggatcactgcacttagttcgtagcatcagtttggttgcagtttcccaagatcattcgttgcatctcacatgccaagcagatctactgagcagacctgcttcagctggcgaagggagtcaaggcagcagtggcccttggagttacctggaaggtttcactccagtgaagtccattgggtcaatgtcagcgtcacactcgtaccttctagttccttcgccaagtatgagatacctctctcctgcaacattacagctcccgacatgcctcacatcggagtcaccgccgcttgcccatctactgcacagcaaagggactgcgattcctttagcgatgggctatgtcgtctcgaaagccgtcccacctgttaggagggactctgcacaactcaccaaggatgaacagccctctgttctctcagtcagcatcatcgatcactatggaggcagcagtgggactgttcaagagaagatgagccgaggcggcggcggcggcagcaaacaggcaaggaacttgagtcaggagacaacaggtcgtgagtgtgagatggagatgcatagtgtgctggaagctgtggccgcggagcttcactctctgtcttggttgacagtaagcccggtgtacacagaaaggcgcacagcactgccctttcactgtgacatggtcctaaggatgcggcggcttctacactacgcagataagtatctatctgaacctaagggagagacaactcactaattgtcatgtacaattaatatctagctaggtaggtatgtgagggc

SEQ ID NO: 152286 - DNA, 3283 bp, Zea Mays
tttttttttattatcactggtacttgtgtggtacattgtttctccatattccagtattcatgttcagtcccctttgtacaggtttcagagccatccatgattagcttgttgcagtcagatataagagtagctcttaaagctgcctttgcaaacatggatggcccgttatcagtaattgattggtgcaggggtcgaggcaatgctgctgagtctgcaggtacgggagatgcatactcttttcagtactccagtggtgatatcctggagccgtcaagttcgttgtccattggtggagattcaatgagcccaccccagccaaccagtagcaatcgaggcatttcagaattagagttccaaaagggatatcaccgtgtcagaccaaccattgctgtcctcccttcaccttctatgctagtcggttaccaggatgattggttgaaggcctcggtgaatagtcttaaaacatgggagaaagctccttttgaaccttatgccttgccgaagcctgttacttactatgcactttgccctgatattgatatgttgacttcggcggtagctgattttttcatgcagcttggaacagtttatgaagtttgcaaactgggaactcattcgccccaaaacaatggaggacaaatggaactatctcctggaaaatatttgccttcaggacttgttctagttgattgtcctgagcagttgaagaaggttcgctgtggccacttaggtcccatcagttcaacaagtgactgtcttcaagctttttcaaaacattggagcgtgaaaagttttgtaacatctatttcaaggatacttaaggatataaagctgacttcaaacatatctacaaatcagaaagagagcagtagtggaccttgcacagtaatttatgtagtttgcccatttccagaaccttgtgcaattctacagacgctagtagaatgttctgttgctcttgggtatgttatttcatccccggaaagggaaagaaagttactatattcacaggttgccaaagccctaaacagcagtgcttctgtagatgaagcatcagcatcaaatgtcgttatgctatccgggttcagtatacccaagctcgtcttgcagattgttactattgaaactgtactgagaatggataagccaaacaaggagcttgctgttttgaaggacatagcattcacagtgtacaacaaggcacgacgaatcccacgggctgtctccacaagcgatatgttccagtcaccaacttatttgggtagatctcagtccacaatgatgcatgttacatctcctgctcctactctttggaaggaatgtttagttcctcgaatgtctgggccaactctctctcgagaaaccgattttgatgcatccatgaggtcggcaacatgggataactcatggcagcctgctcgttcgggaggacttctggacccaagtaagctgcctgatttatgtgctcaggatgataggaaatatgcctttgagccacttttcatactagcagaccctgggtctgccgatcttaatgctttaatggaaccatcaaaatctggagcagatgcatctggcagcagggtatatggctcaatttcaggaagtaactctgatagtggagtgagccctctactcgacgtatctgagagtgacagtgcagcaagtcttcattgctgttatggttggactgaggactggcgatggctagtgtgcatttggacagatgctagaggagaattattggacagcttaatatttccttttggtggtattagtagccgccaagacactaaagttctccaaagccttttcatccaaattctacagcaaggctgtcaaataatgtcgtcttcacctgaggctagcaatatgagaccacgagatgtcataataactcgtatcggaggtttccttgagcttgaaatccaagaatggcagaaggcaatatactcttatggtggcaatgaagtgaagaagtggcctgtgcagttacggcgatccatacctgagggtattccacctagttcaaatggtcctacgctccagcagcagcagcagcaagacatggccttaattcaagatagaaacatgccttcctcaccaaaccctctgtatagccctcatccaaaatcaagcttcatgaaaggtgcacttggacaatctggcaacaaaaaacagatccttgtggaacaaagtggaatggacacttcaaggggatcactgcacttagttcgtagcatcagtttggttgcagtttcccaagatcattcgttgcatctcacatgccaagcagatctactgagcagacctgcttcagctggcgaagggagtcaaggcagcagtggcccttggagttacctggaaggtttcactccagtgaagtccattgggtcaatgtcagcgtcacactcgtaccttctagttccttcgccaagtatgagatacctctctcctgcaacattacagctcccgacatgcctcacatcggagtcaccgccgcttgcccatctactgcacagcaaagggactgcgattcctttagcgatgggctatgtcgtctcgaaagccgtcccacctgttaggagggactctgcacaactcaccaaggatgaacagccctctgttctctcagtcagcatcatcgatcactatggaggcagcagtgggactgttcaagagaagatgagccgaggcggcggcggcggcagcaaacaggcaaggaacttgagtcaggagacaacaggtcgtgagtgtgagatggagatgcatagtgtgctggaagctgtggccgcggagcttcactctctgtcttggttgacagtaagcccggtgtacacagaaaggcgcacagcactgccctttcactgtgacatggtcctaaggatgcggcggcttctacactacgcagataagtatctatctgaacctaagggagagacaactcactaattgtcatgtacaattaatatctagctaggtaggtatgtgagggcacatttgacgagctttgtagactgattttgcaataaccctgataacttacaggtggatgctgtaacctttttctctttttttaggtctgtattgtttgtcgacacaagatttgagatatgattccgtttgttgactgtattaatcagaattacaagtacagcgtttactgggattgccgtgccctactgcgacgacgtttttttttcctttaatcagaaatacttgtaaaatcaaaatcatctctccgctacggctattgctcacaccccctggctggaataggcag

SEQ ID NO: 152287 - DNA, 435 bp, Zea Mays
atggcctgctggaaggtgaggacggaggaagcggaagagccccgttggttggcagcggacacggtggaggaggtggaggcgtcgccgtctgcggcggatagggggaggcgagggcgtcggcatgggcggtggcgaggagcacagaagcggatggaggctggaggaagcaaagcggagggcgccgttagtagcggggtgtgccgggaggcggcggtgggggagaggaggggaggcggaggagccatcatcaaggtggggagtgcctgccaggtggaggtagaagaggataagggaggaggagacggacaggctgttgcagcagcagaggcgggaaagaagaagatggtacacgaggataggatgagaaacattttctatctctgttttccacgaggacccgctaaatttatatgtgacgacgttttcatcgtataa

SEQ ID NO: 152288 - DNA, 635 bp, Zea Mays
agaatctccgttcctggagagccagacttccctcgttccgtcctctcgcagctctatcctcgcgtggagctcacactaaggttgtcgctgcctcgcctggagctcgcgctagggccagggtcctctcacagcagcctctgtcctcacctggagctcacgctagggttcctctcgcagtcgtcgctgctgaggtcagactctgccttctcctctcaccctccagctctctccctttcccatctcctctcgccctccagctctccctctcctgtttcctctcctcgctccgaacactggctcgggccgtcccgatctgcccatgctggcgccgccgcctcatgcctggttcgctttctggttagagacgtcgcgacgtgatgtttggaggaagggggatccggcggcggggcatttagttttgggtggtctgatttggctataacatgtgattgtctgcttcagagctcattgttatgggctaggtactagttatggatctgaatgggctcatagatccatagcgaattaggaatgcccagttcttgcctagcaggatgcgtcgattggctcacatttgaggctcgggatcctctgattggttcatgtagcttcacttttgagctcgatgaaagcat

SEQ ID NO: 152289 - DNA, 964 bp, Zea Mays
ctagtactttaaaaacccagctggcagttgcccactcgcaaggcgcaacaacaactttgcgtcttcccgaatcggggcctccaccatctccaactgcaaccccaccccataccgccgccgcctccgctagggttttggagtgaggatcgccgatgtcgacggctcccaggcgccccttccgaggccgcggcgccccgccccctggcaccggctacgtccgccgcggccccgcccctgccccaggccccgccgacggcgccaagaccctgcgcaagcccgtcttcaccaccgtcgaccagctgcgcccccagacgcacggccacaccctcaccgcccgcgtcatctccgcccgcaccgtcctcgacaagccctccacgcacatcggccgcacccgcgtcgcagagtgcctcgtcggagacagcaccggcaccgtcctcgtcaccgcccgcaacgaacaggttgaccttctgaagccagatacaacagtgatcttccgcaacgctaagattgacatgttcaagggtaccatgaggctggtggtggacaagtgggggcggattgaggtgactcagcctgctgatttcaaggtgaaccaagacaacaacatgtcgctggtggagtacgagctggtggatgtggacgaagaggagtgaccagaaacgaagtcgggctgtggacatatattttggttatggaggcggtagcgttaggctcctatctagctattgttatcctggaccgctggcgattgggactttgttttaagtttatcttgaagaagcatgtcgaattatgtacagcagcagcaggtctctgtctgactgatgctttacgtttccgtgacgctttgactcttaatgctagtactacctttttttttctatctcacgatgggtgtatttgcgaatccatttgagctggcagcgcctgtttgggtttcgtggtatggtatggtgaaaaaatg

SEQ ID NO: 152290 - DNA, 964 bp, Zea Mays
aggaggcaagtcgtgccgtgccgtctgctccttgcctgctctgctggtctcgccgttgccggcttgccccgtccgtgcgtccatctgtttcctccttggatcctcgacaagcaatggccatggaggaggagcagacaccacccgagctgcgctacctctcgggcctgggcaacaccttcacgtcggaggcggtgccggggtcgctccccgtggggcagaacaacccgctagtgtgcccgctgggactctacgccgagcagctctccggcacctccttcaccaccccgcgcgcccggaacctgcgcacgtggctgtaccggatcaagccgtcggtgacccacgaacccttctatccgcggaaccccaccaacgagcgcctcgtcggcgagttcgaccgcaccaccaccgtcgccacgcccacgcagctgcgctggaggcccgccgacgtgcccctccacccgggcctcgacttcatcgacggactctacaccgtctgcggcgccggcagctcatgcctccgacacggatacgccatccacatgtatgctgctaacaagcccatggatggatgctccttgtgcaatgcggacggtgacttcctcattgttccccagcaaggaaggttatttatcacaaccgagtgcggaaggctgctggtttcacccggcgagatcgtcgtgatccctcaaggtctccgatttgctgtcgacttgccggatggcccctcgcgtggctatgtctctgagatcttcggcgcccattttcagctccctgatcttggcccaattggtgccaatggcttggcttcgccgagggatttcctttccccgacagcatggtttgagcaggagcaccaccctggatacacaatagtgcacaagtatggtggcgagctgttcagcgccacgcaggatttctctccattcaacgtggtcgcgtggcatgggaattatgtcccttacaa

SEQ ID NO: 152291 - DNA, 1757 bp, Zea Mays
aggaggcaagtcgtgccgtgccgtctgctccttgcctgctctgctggtctcgccgttgccggcttgccccgtccgtgcgtccatctgtttcctccttggatcctcgacaagcaatggccatggaggaggagcagacaccacccgagctgcgctacctctcgggcctgggcaacaccttcacgtcggaggcggtgccggggtcgctccccgtggggcagaacaacccgctagtgtgcccgctgggactctacgccgagcagctctccggcacctccttcaccaccccgcgcgcccggaacctgcgcacgtggctgtaccggatcaagccgtcggtgacccacgaacccttctatccgcggaaccccaccaacgagcgcctcgtcggcgagttcgaccgcaccaccaccgtcgccacgcccacgcagctgcgctggaggcccgccgacgtgcccctccacccgggcctcgacttcatcgacggactctacaccgtctgcggcgccggcagctcatgcctccgacacggatacgccatccacatgtatgctgctaacaagcccatggatggatgctccttgtgcaatgcggacggtgacttcctcattgttccccagcaaggaaggttatttatcacaaccgagtgcggaaggctgctggtttcacccggcgagatcgtcgtgatccctcaaggtctccgatttgctgtcgacttgccggatggcccctcgcgtggctatgtctctgagatcttcggcgcccattttcagctccctgatcttggcccaattggtgccaatggcttggcttcgccgagggatttcctttccccgacagcatggtttgagcaggagcaccaccctggatacacaatagtgcacaagtatggtggcgagctgttcagcgccacgcaggatttctctccattcaacgtggtcgcgtggcatgggaattatgtcccttacaagtatgatctgagtaagttctgtccattcaacaccgtcctcttggatcatggcgacccgtcagtgaacacagttctaactgcgccaactgataagcctggcgtcgcgttgcttgattttgtaatattcccacccagatggctggttgctgagaatacattccgcccaccctactaccaccgcaactgcatgagcgaattcatgggcctcatctatgggattggcagcagtcatgtgaagagatgtaaagacgatgcacatctgcaggctaaggccgatggttttcttcctggtggcgccagccttcacagctgcatgacaccgcatgggccagacaccaagacgtacgaggcaacgatcagccgtgctgctgccaacgagccatccaggctcagtggtacgttggcgttcatgtttgagtcttggcttatccctcgcgtgtgcccatgggctctggattccccgtgtcgggacctcgactactaccagtgctggatcggattgaagtcacacttttcacctcctgctgctgctgttgatgatgagaacgagtagctgcttacagcagcagtcttggaacggacaggcagcgaactgaaactggggtggatatgctgtacgtcgtgtcctgcttgctgtcggtttctgaagcttttagctggcagggacaggcggctgttggctttgctgattgcccaaccctctcctgtaatattaatcctaccagagaaacttaaacttgactcaaccgatatgctattaaataaataaagcaagcaagttaggatacgagtt

SEQ ID NO: 152292 - DNA, 1718 bp, Zea Mays
aggaggcaagtcgtgccgtgccgtctgctccttgcctgctctgctggtctcgccgttgccggcttgccccgtccgtgcgtccatctgtttcctccttggatcctcgacaagcaatggccatggaggaggagcagacaccacccgagctgcgctacctctcgggcctgggcaacaccttcacgtcggaggcggtgccggggtcgctccccgtggggcagaacaacccgctagtgtgcccgctgggactctacgccgagcagctctccggcacctccttcaccaccccgcgcgcccggaacctgcgcacgtggctgtaccggatcaagccgtcggtgacccacgaacccttctatccgcggaaccccaccaacgagcgcctcgtcggcgagttcgaccgcaccaccaccgtcgccacgcccacgcagctgcgctggaggcccgccgacgtgcccctccacccgggcctcgacttcatcgacggactctacaccgtctgcggcgccggcagctcatgcctccgacacggatacgccatccacatgtatgctgctaacaagcccatggatggatgctccttgtgcaatgcggacggtgacttcctcattgttccccagcaaggaaggttatttatcacaaccgagtgcggaaggctgctggtttcacccggcgagatcgtcgtgatccctcaaggtctccgatttgctgtcgacttgccggatggcccctcgcgtggctatgtctctgagatcttcggcgcccattttcagctccctgatcttggcccaattggtgccaatggcttggcttcgccgagggatttcctttccccgacagcatggtttgagcaggagcaccaccctggatacacaatagtgcacaagtatggtggcgagctgttcagcgccacgcaggatttctctccattcaacgtggtcgcgtggcatgggaattatgtcccttacaagtatgatctgagtaagttctgtccattcaacaccgtcctcttggatcatggcgacccgtcagtgaacacagttctaactgcgccaactgataagcctggcgtcgcgttgcttgattttgtaatattcccacccagatggctggttgctgagaatacattccgcccaccctactaccaccgcaactgcatgagcgaattcatgggcctcatctatgggatgtacgaggctaaggccgatggttttcttcctggtggcgccagccttcacagctgcatgacaccgcatgggccagacaccaagacgtacgaggcaacgatcagccgtgctgctgccaacgagccatccaggctcagtggtacgttggcgttcatgtttgagtcttggcttatccctcgcgtgtgcccatgggctctggattccccgtgtcgggacctcgactactaccagtgctggatcggattgaagtcacacttttcacctcctgctgctgctgttgatgatgagaacgagtagctgcttacagcagcagtcttggaacggacaggcagcgaactgaaactggggtggatatgctgtacgtcgtgtcctgcttgctgtcggtttctgaagcttttagctggcagggacaggcggctgttggctttgctgattgcccaaccctctcctgtaatattaatcctaccagagaaacttaaacttgactcaaccgatatgctattaaataaataaagcaagcaagttaggatacgagtt

SEQ ID NO: 152293 - DNA, 1510 bp, Zea Mays
gacaagcaatggccatggaggaggagcagacaccacccgagctgcgctacctctcgggcctgggcaacacctccttcaccaccccgcgcgcccggaacctgcgcacgtggctgtaccggatcaagccgtcggtgacccacgaacccttctatccgcggaaccccaccaacgagcgcctcgtcggcgagttcgaccgcaccaccaccgtcgccacgcccacgcagctgcgctggaggcccgccgacgtgcccctccacccgggcctcgacttcatcgacggactctacaccgtctgcggcgccggcagctcatgcctccgacacggatacgccatccacatgtatgctgctaacaagcccatggatggatgctccttgtgcaatgcggacggtgacttcctcattgttccccagcaaggaaggttatttatcacaaccgagtgcggaaggctgctggtttcacccggcgagatcgtcgtgatccctcaaggtctccgatttgctgtcgacttgccggatggcccctcgcgtggctatgtctctgagatcttcggcgcccattttcagctccctgatcttggcccaattggtgccaatggcttggcttcgccgagggatttcctttccccgacagcatggtttgagcaggagcaccaccctggatacacaatagtgcacaagtatggtggcgagctgttcagcgccacgcaggatttctctccattcaacgtggtcgcgtggcatgggaattatgtcccttacaagtatgatctgagtaagttctgtccattcaacaccgtcctcttggatcatggcgacccgtcagtgaacacagttctaactgcgccaactgataagcctggcgtcgcgttgcttgattttgtaatattcccacccagatggctggttgctgagaatacattccgcccaccctactaccaccgcaactgcatgagcgaattcatgggcctcatctatgggatgtacgaggctaaggccgatggttttcttcctggtggcgccagccttcacagctgcatgacaccgcatgggccagacaccaagacgtacgaggcaacgatcagccgtgctgctgccaacgagccatccaggctcagtggtacgttggcgttcatgtttgagtcttggcttatccctcgcgtgtgcccatgggctctggattccccgtgtcgggacctcgactactaccagtgctggatcggattgaagtcacacttttcacctcctgctgctgctgttgatgatgagaacgagtagctgcttacagcagcagtcttggaacggacaggcagcgaactgaaactggggtggatatgctgtacgtcgtgtcctgcttgctgtcggtttctgaagcttttagctggcagggacaggcggctgttggctttgctgattgcccaaccctctcctgtaatattaatcctaccagagaaacttaaacttgactcaaccgatatgctattaaataaataaagcaagcaagttaggat

SEQ ID NO: 152294 - DNA, 2735 bp, Zea Mays
aacgaaaggaaaggaaaggaaaggaatgcaaggaaggagagacacaatcggcggcaacagcgattgatttcgtccgccgcacctctcctctctctccgccgccgtcgccgccgccaacaagggcgaaaccttccgatttcttccacttctgctgttagggttccgcctccacctgctctgctctggtatcttctgcgcaatgccaatgctgtaatggatcgatcgtcagattcttccaatccaccaggtcttgccgtgcctgccgcctcaaagccaccacagatggccgcaaataacaacccttggagggcccctctgccaccgctgctcaatgctcgcgctggttttggtggcgatacaagcctcttctcaacctcgctgccggttcttcctcatgaaaagttgatctttgctgattcttctcatggtaccccaccaatggatgacactttgaccaaaatgaaagtcctggctaatgatcctgatgagaaggactacaaatttgattttgatcttcggcagatagatgacttgttgccagatgaagatgagtttttcgcggggatcactgatgagactgagcccgttgcgcagacaaataccacggaggaattggaggagtttgatgtgtttggcaatggagggggcatggagctggacattgaccctgtggagagcatcacagttggttttgcaaattcaagtattgtcgacggggctagatgcaatagcatcaacccttttggtgtcccaagcactgtaggaactgtggctggggagcacccgtttggagagcacccttcgaggaccttgtttgtaaggaacatcaatagcaatgtcgaggactctgaactgcgatctttgtttgagcaatatggggacatccggaccctttacactgcaacaaagcacaggggctttgtaatgatatcttattttgatatcagagctgcacggaatgcaatgcgcgcattgcagaacaaacctctgaggaggagaaagctggacattcatttttccatcccaaaggagaatccatctgacaaagatttgaaccagggaactcttgttatttttaacttggatccgtcggtttctaatgaagaggttcgccagatttttggggcatatggtgaagtaaaggagataagagagacaccaaacaagaaacaccataagtttattgagttctatgatgtaagagcagcagaggctgctcttcggtcactgaataaaagtgagatagctggaaaacgaatcaagttggaaccaagtcgtcctggtggaacacgcagaaacttgatgcagcaacttggtcacgatttggaccaagaagagccaagaacctacagacattctcatgttggttcacctattgctaactctcctccaggggcatgggctcagtacagtagtccaacagatagcaatatgctgcaagctttcaccagatctccaactggaaatggaatgagtcctatcggaattccttccctgatttcaaatgctccaaagattgctcctattggcaaggatagcaaccggtctaagtatgatcaagtgttttcaaatggtaaccagtccgtgggagctgcatttcagcactcccactcataccaagatcacaacagtgaacacatgagttctagtcctgggactttatcagggccccagtttctctggggcagtccaaagccatattcagaacattcaaaatcccctatttggcatccaccaggaatcggatctgcattgtcatccagcagtcgcactcagggccaaggattcttgtacagtagccgtcaggcttcattatttggttcttcggatcagcaccatcatcatgttggctctgccccttcaggtgctccatttgagagccattttggcttcttacctgaatcgccagagacatcttttatgaagcaagccaggtttgggaacatgggtaattttggtactggccgaaacgggggaggtctcctgctgggcatggctaatcgtgcttctgtgaatcctggttcttctctaattggaagtctgacagataacagctctactaacttcagaccgatgttgtcgcctagattgggacagacattttacactaatcctccataccatgggattggtacattcggacttgacagctccattgaccgtgtccgcaaccgccgggttgacagcagtgtgttgcaggctgatagcaagaggcagtatcagcttgacttggagaagattcacagaggtgatgatactcggacaacattgatgattaagaacatcccaaacaagtatacatctaagatgctcctggctgcaattgatgagcttcacagaggaacttatgactttttctacctgccaattgatttcaagaacaaatgcaatgttggatacgcgttcgttaacatgatatcgccggtgcatattatatccttctaccaggtgctttcctttcttggcctttgtcctgtgtttgcaatagttacctgcagagttaagaacttgttccctgtccagctgagttaatcagcaatacggattagcaatagtataattactctgaacagcttgtaatatttatgtactgatgtacatctataacctgcaggcttttaatggtaagaaatgggaaaagttcaacagcgagaaggtagcctcgttggcttatgctagaattcaaggacggtctgcactgatatcacattttcaaaattcaagtttgatgaatg

SEQ ID NO: 152295 - DNA, 3420 bp, Zea Mays
aacgaaaggaaaggaaaggaaaggaatgcaaggaaggagagacacaatcggcggcaacagcgattgatttcgtccgccgcacctctcctctctctccgccgccgtcgccgccgccaacaagggcgaaaccttccgatttcttccacttctgctgttagggttccgcctccacctgctctgctctggtatcttctgcgcaatgccaatgctgtaatggatcgatcgtcagattcttccaatccaccaggtcttgccgtgcctgccgcctcaaagccaccacagatggccgcaaataacaacccttggagggcccctctgccaccgctgctcaatgctcgcgctggttttggtggcgatacaagcctcttctcaacctcgctgccggttcttcctcatgaaaagttgatctttgctgattcttctcatggtaccccaccaatggatgacactttgaccaaaatgaaagtcctggctaatgatcctgatgagaaggactacaaatttgattttgatcttcggcagatagatgacttgttgccagatgaagatgagtttttcgcggggatcactgatgagactgagcccgttgcgcagacaaataccacggaggaattggaggagtttgatgtgtttggcaatggagggggcatggagctggacattgaccctgtggagagcatcacagttggttttgcaaattcaagtattgtcgacggggctagatgcaatagcatcaacccttttggtgtcccaagcactgtaggaactgtggctggggagcacccgtttggagagcacccttcgaggaccttgtttgtaaggaacatcaatagcaatgtcgaggactctgaactgcgatctttgtttgagcaatatggggacatccggaccctttacactgcaacaaagcacaggggctttgtaatgatatcttattttgatatcagagctgcacggaatgcaatgcgcgcattgcagaacaaacctctgaggaggagaaagctggacattcatttttccatcccaaaggagaatccatctgacaaagatttgaaccagggaactcttgttatttttaacttggatccgtcggtttctaatgaagaggttcgccagatttttggggcatatggtgaagtaaaggagataagagagacaccaaacaagaaacaccataagtttattgagttctatgatgtaagagcagcagaggctgctcttcggtcactgaataaaagtgagatagctggaaaacgaatcaagttggaaccaagtcgtcctggtggaacacgcagaaacttgatgcagcaacttggtcacgatttggaccaagaagagccaagaacctacagacattctcatgttggttcacctattgctaactctcctccaggggcatgggctcagtacagtagtccaacagatagcaatatgctgcaagctttcaccagatctccaactggaaatggaatgagtcctatcggaattccttccctgatttcaaatgctccaaagattgctcctattggcaaggatagcaaccggtctaagtatgatcaagtgttttcaaatggtaaccagtccgtgggagctgcatttcagcactcccactcataccaagatcacaacagtgaacacatgagttctagtcctgggactttatcagggccccagtttctctggggcagtccaaagccatattcagaacattcaaaatcccctatttggcatccaccaggaatcggatctgcattgtcatccagcagtcgcactcagggccaaggattcttgtacagtagccgtcaggcttcattatttggttcttcggatcagcaccatcatcatgttggctctgccccttcaggtgctccatttgagagccattttggcttcttacctgaatcgccagagacatcttttatgaagcaagccaggtttgggaacatgggtaattttggtactggccgaaacgggggaggtctcctgctgggcatggctaatcgtgcttctgtgaatcctggttcttctctaattggaagtctgacagataacagctctactaacttcagaccgatgttgtcgcctagattgggacagacattttacactaatcctccataccatgggattggtacattcggacttgacagctccattgaccgtgtccgcaaccgccgggttgacagcagtgtgttgcaggctgatagcaagaggcagtatcagcttgacttggagaagattcacagaggtgatgatactcggacaacattgatgattaagaacatcccaaacaagtatacatctaagatgctcctggctgcaattgatgagcttcacagaggaacttatgactttttctacctgccaattgatttcaagaacaaatgcaatgttggatacgcgttcgttaacatgatatcgccggtgcatattatatccttctaccaggcttttaatggtaagaaatgggaaaagttcaacagcgagaaggtagcctcgttggcttatgctagaattcaaggacggtctgcactgatatcacattttcaaaattcaagtttgatgaatgaggataagaggtgccgccccattctttttaatcccaatggtcaggagtctgtgcaccaggaagcatttccaatcaatggcatatgcatccacatgcttccggaagatgattaccttgacaatgaagatggcaagagtctgaacgagaagactggagagagctcgaccgatatggccgggagtttgtgacgtctgcgatgatagcagacaggatcagaatggccatacatataaatctaactgtctagagagagtatccaccccccaaattgtataaaaagcgaggaaggttgatggttagcgctgaattttgtggtctggtgtggcatggcacgtcttttggtttcagatgtcgccccggcagtggaaatgggagctgaagctcaagcgatcgagcttcgaactggagccgggagcttgcttgtagaatcccccccctctgtagatagagatgtgggggtggaaccgcccaaaccgctgcttctcatagtcgtgcttgtttttgattgcttgctgtaaaaaggtgaactgaactgaagaaaaaaaaagccaaactgtacagtttagaacttttgtgcatattttgcattctggcatcttaatgtgcagtgctgaagttggggcattgatcatgcaaagttatttgcatgattgtatccatggaatctgaccaaaatatagaaagctgcttgcgtgctttctctgttctgttcacaaggaaaagggatgtaaatccgacgttaattacagttttctcgtctagcagttgccccaattgcaatattggaacaatttgatgcaaactgtgccaatgcccaatggtcatcatgatttttcaaaacaatcattgtg

SEQ ID NO: 152296 - DNA, 1494 bp, Zea Mays
atgcgcaagctcgcggccggcaaggtccggaagttctcgctcgccgccaagtggtgcccgtcgctggactcctcctacgaccactccacgctcatctgtgaggccgtcgcgcgccgcctcttccccaagggctccgctcccgagctcgccgcggacctcgcagacgaggtggcgctcgtgccgctccgccgcgcgctcaagctccccgaggtcttcatctcggcgcgcgcgtgggagtcagttaggtacacccgcgtcgcctctgtggccatgaagaactacacggacctcttcctcaagcacgacggaggcagtccagcgatgggagagccaacggaggcagcgccgggaaacagggcaggacgaggcggtggaggacgagcaccgcggcgagatcgagcggccagccggcgagaaaatggtggcgtcgagtggtggcgcgtgaggggtgctaccacttccggatccgaatctcgccatcaagtccgctttcttgcctccaggtctgggcgccgtcaggaggagagaatggcctccaggacgtcgccgctggtgttcaagagggtggccgggatccgaaccatcgctgagtccggccgcttcaaggcaagctccttccacttcccaataatcaagctattacctgctttaatcacaatcgctctgcccctcctggtgctttgctggccttcgcgggtcactgtccacagtagtagctgcaaatgcttgggattcgccttgcgactagccgcggaatgcacgattctgatcactagaacgcaaattccgatcaccagaggctactccgttcggagcaagattctactcttaggaaaattcattgtctatgcttcagactataccactcctgctgattctgtcgccacctcggagcaaacaggtggtgaagctgaggccaccttagaaacaggtggtgaagctgcagccaccttggagcaaacaggtggcgaaaccgaagagccgaccattgtagcacctgctaatgaatatacagagcaggaggctgctcctcagcagaagtgtgcaaagatacacgacttttgcctagggataccttttggtggacttttactctccatgggccttattggatttctcttctggaggagccctgcgagtcttacctttggcgttgcacctggccttgccatattggccctggctgtacttagcctcaaggtctggaggagcgggaagtccagcttactgttcatactggcgcaagcaggcattgccgctgcggtagcatggaagcacggccaggcgtacaccactacgaggaagctgcttccgtggggcttctacgtcgcgctgagtctactttgccactcagagagtcaaatgaaggctgcaccatgcaggcttagaaggcagaaatcagagatccttcgtgcccagatctgtgtaggaacatggaacattgaggcgtatgtcaacccaatgaattggatattgaagaatggctggatatag

SEQ ID NO: 152297 - DNA, 2494 bp, Zea Mays
agaaccagctgcaagaacagagtattctgaggaacctttgttgaagtaaatgtcatcgagtttcctagcaatcttatttttgctggtatcatatttctttgagctaatcttgttcattagctttatatggcttttgctatgaacagaagctatgtacttgtctggattttgtatattataatgatgtttgcactcaccatccgttttcagttctattgttactttcgtcgcaacgcacgggcactcacctagtatatatatatatatatatatatatatatatatatatattcggacttcggagtacaagatcggtgttataatggcaaataattcgtgataagctaaacccaaggcggaccatggtcatggtcatgccttttactcctttctcgtctgccagcgcgcgggggaaggagggacgaaagtgatgcagccgccgccgcagctgccggcggctttgccggtagggttccgcttccgccctacggacgaggagctggtgctacactacctcaagcctaagatcgcgggtcgcgcgcacgcggatttgctcctcatccccgatgtcgacctctcggcgtgcgagccttgggagctgcccgctaaggccctcatcaggtccgacgatcccgagtggttcttcttcgcgcccctagaccgcaagtaccctggaggccaccgctccaaccgctccaccgcagccgggtactggaaggccacgggcaaggaccgcctcatccgctcgcgcccagcaggcaccctcatcggcgtcaagaagacgctcgtcttccacagaggcagggcaccccgaggacaccgcaccgcctggatcatgcacgagtaccgtacggccgagccccagctcccacaaggccaaaacggtagcttcgtgctctaccgcctattcaacaagaacgaggaggaatccgaagcctcagacgctgccgattcaccgtccacgtcgtctccgcccatcgcgccggaggtgaaaactgagaatttgagccaaccgacttctgccaaaatgtctccccatattgcaactgtcagtagcaatgagccaacgtctaatcagcagggagacgttaatcttctggatgtgttaacccagcttccagacctacatcctgagcaagcattcgatggattccctaccatcacctctcctatgcgcccttacactgatcatccattttttggcaatgctggcgaccaagatctttcagcgtatatagacagtatcatctctcatcaggatctggaaggcttgttggccagcccttctttggctgacatggttgagcaggctactgtaaatgttgagccccaccctattaatgtacccgttctagacaacagctcaaacagcaacagattggctgaaaacagccgtggaaaagttggttctgaaacgttgctcctaatcaagggtacagatggcacaggtgctgctgcttgctcttcttctgcaaccaaaatactccaagacaatactgatgatcacacaggagctcaaagtaacttggcttccagtgcatcagctcaagtgtctcacttttacaaccaatatgaactccaatcggcattcgtccctgaaatggaaccaccaaatagtggaaccttgtgctctgcagcctccccgactccccatccccagcacttgttcaacggtgtggtagcttcagatgtcttcaatggaatccaaggatggccagcggaacctttgacggatccacaccaagggaatgcaccaagaaggatccgccttgcgcactctattcagagggcatcagtcactgagcctgtactaacttctgatgtggaggatgaagatgaaccgggaatatgttatagcgcagacagttcatccgccagcaataccgaggattatgccaatgtgttctcccaaactatggctggagaaacaatgcgtattcaacgtggaggggtgatatctactcaagtagtttcgtcaacagaaaagctacaagatttcacatttgatgaaggtacactgctacatggtgagctgcatcatggaggcaatctcaggcagcggcgcacggaggagacgaggcaggatgttcgtgatggcatgcagcacagcgtccatgtgactagagtggcagtgccatccttgagaaggaaaggagaggctgcacagattggttcagtggtgcggttgctccttttggttctcctcctcgtcgtcatctttgtatttgtaggattatggaaatgtagctcgttcagattgttgcattagcagctactatttgtgattcaggggtatcagtgcattagtagctagtttgcctggttgtctgatctcgtgaaggagcaggggaaagtttatgcaggattcacaatgctcctcttgtctggcttgacatagaaatctaaaagttgtgacttgtgaggcaacctgttgccttgttcatataataatagaatgaaacttgtgttgcaaggtgtgagtgttccacatatt

SEQ ID NO: 152298 - DNA, 2491 bp, Zea Mays
agaaccagctgcaagaacagagtattctgaggaacctttgttgaagtaaatgtcatcgagtttcctagcaatcttatttttgctggtatcatatttctttgagctaatcttgttcattagctttatatggcttttgctatgaacagaagctatgtacttgtctggattttgtatattataatgatgtttgcactcaccatccgttttcagttctattgttactttcgtcgcaacgcacgggcactcacctagtatatatatatatatatatatatatatatatatatatattcggacttcggagtacaagatcggtgttataatggcaaataattcgtgataagctaaacccaaggcggaccatggtcatggtcatgccttttactcctttctcgtctgccagcgcgcgggggaaggagggacgaaagtgatgcagccgccgccgcagctgccggcggctttgccggtagggttccgcttccgccctacggacgaggagctggtgctacactacctcaagcctaagatcgcgggtcgcgcgcacgcggatttgctcctcatccccgatgtcgacctctcggcgtgcgagccttgggagctgcccgctaaggccctcatcaggtccgacgatcccgagtggttcttcttcgcgcccctagaccgcaagtaccctggaggccaccgctccaaccgctccaccgcagccgggtactggaaggccacgggcaaggaccgcctcatccgctcgcgcccagcaggcaccctcatcggcgtcaagaagacgctcgtcttccacagaggcagggcaccccgaggacaccgcaccgcctggatcatgcacgagtaccgtacggccgagccccagctcccacaaggccaaaacggtagcttcgtgctctaccgcctattcaacaagaacgaggaggaatccgaagcctcagacgctgccgattcaccgtccacgtcgtctccgcccatcgcgccggaggtgaaaactgagaatttgagccaaccgacttctgccaaaatgtctccccatattgcaactgtcagtagcaatgagccaacgtctaatcagggagacgttaatcttctggatgtgttaacccagcttccagacctacatcctgagcaagcattcgatggattccctaccatcacctctcctatgcgcccttacactgatcatccattttttggcaatgctggcgaccaagatctttcagcgtatatagacagtatcatctctcatcaggatctggaaggcttgttggccagcccttctttggctgacatggttgagcaggctactgtaaatgttgagccccaccctattaatgtacccgttctagacaacagctcaaacagcaacagattggctgaaaacagccgtggaaaagttggttctgaaacgttgctcctaatcaagggtacagatggcacaggtgctgctgcttgctcttcttctgcaaccaaaatactccaagacaatactgatgatcacacaggagctcaaagtaacttggcttccagtgcatcagctcaagtgtctcacttttacaaccaatatgaactccaatcggcattcgtccctgaaatggaaccaccaaatagtggaaccttgtgctctgcagcctccccgactccccatccccagcacttgttcaacggtgtggtagcttcagatgtcttcaatggaatccaaggatggccagcggaacctttgacggatccacaccaagggaatgcaccaagaaggatccgccttgcgcactctattcagagggcatcagtcactgagcctgtactaacttctgatgtggaggatgaagatgaaccgggaatatgttatagcgcagacagttcatccgccagcaataccgaggattatgccaatgtgttctcccaaactatggctggagaaacaatgcgtattcaacgtggaggggtgatatctactcaagtagtttcgtcaacagaaaagctacaagatttcacatttgatgaaggtacactgctacatggtgagctgcatcatggaggcaatctcaggcagcggcgcacggaggagacgaggcaggatgttcgtgatggcatgcagcacagcgtccatgtgactagagtggcagtgccatccttgagaaggaaaggagaggctgcacagattggttcagtggtgcggttgctccttttggttctcctcctcgtcgtcatctttgtatttgtaggattatggaaatgtagctcgttcagattgttgcattagcagctactatttgtgattcaggggtatcagtgcattagtagctagtttgcctggttgtctgatctcgtgaaggagcaggggaaagtttatgcaggattcacaatgctcctcttgtctggcttgacatagaaatctaaaagttgtgacttgtgaggcaacctgttgccttgttcatataataatagaatgaaacttgtgttgcaaggtgtgagtgttccacatatt

SEQ ID NO: 152299 - DNA, 4179 bp, Zea Mays
agaaccagctgcaagaacagagtattctgaggaacctttgttgaagtaaatgtcatcgagtttcctagcaatcttatttttgctggtatcatatttctttgagctaatcttgttcattagctttatatggcttttgctatgaacagaagctatgtacttgtctggattttgtatattataatgatgtttgcactcaccatccgttttcagttctattgttactttcgtcgcaacgcacgggcactcacctagtatatatatatatatatatatatatatatatatatatattcggacttcggagtacaagatcggtgttataatggcaaataattcgtgataagctaaacccaaggcggaccatggtcatggtcatgccttttactcctttctcgtctgccagcgcgcgggggaaggagggacgaaagtgatgcagccgccgccgcagctgccggcggctttgccggtagggttccgcttccgccctacggacgaggagctggtgctacactacctcaagcctaagatcgcgggtcgcgcgcacgcggatttgctcctcatccccgatgtcgacctctcggcgtgcgagccttgggagctgcccgctaaggccctcatcaggtccgacgatcccgagtggttcttcttcgcgcccctagaccgcaagtaccctggaggccaccgctccaaccgctccaccgcagccgggtactggaaggccacgggcaaggaccgcctcatccgctcgcgcccagcaggcaccctcatcggcgtcaagaagacgctcgtcttccacagaggcagggcaccccgaggacaccgcaccgcctggatcatgcacgagtaccgtacggccgagccccagctcccacaaggccaaaacggtagcttcgtgctctaccgcctattcaacaagaacgaggaggaatccgaagcctcagacgctgccgattcaccgtccacgtcgtctccgcccatcgcgccggaggtgaaaactgagaatttgagccaaccgacttctgccaaaatgtctccccatattgcaactgtcagtagcaatgagccaacgtctaatcaggtgcagtagagtatccttggattggtctaagttaacatctcatttcaatgaatgcacgctgcacattgattcatggtgtaactgtaacctatagcagggagacgttaatcttctggatgtgttaacccagcttccagacctacatcctgagcaagcattcgatggattccctaccatcacctctcctatgcgcccttacactgatcatccattttttggcaatgctggcgaccaagatctttcagcgtatatagacagtatcatctctcatcaggatctggaaggcttgttggccagcccttctttggctgacatggttgagcaggctactgtaaatgttgagccccaccctattaatgtacccgttctagacaacagctcaaacagcaacagattggctgaaaacagccgtggaaaagttggttctgaaacgttgctcctaatcaaggttaggatcattttgtcctcactttatccatcctgggattcatatttcaacataattcctagttttcttcccaatcaaagggtacagatggcacaggtgctgctgcttgctcttcttctgcaaccaaaatactccaagacaatactgatgatcacacaggagctcaaagtaacttggcttccagtgcatcagctcaagtgtctcacttttacaaccaatatgaactccaatcggcattcgtccctgaaatggaaccaccaaatagtggaaccttgtgctctgcagcctccccgactccccatccccagcacttgttcaacggtgtggtagcttcagatgtcttcaatggaatccaaggatggccagcggaacctttgacggatccacaccaagggaatgcaccaagaaggatccgccttgcgcactctattcagagggcatcagtcactgagcctgtactaacttctgatgtggaggatgaagatgaaccgggaatatgttatagcgcagacagttcatccgccagcaataccgaggattatgccaatgtgttctcccaaactatggctggagaaacaatgcgtattcaacgtggaggggtgatatctactcaagtagtttcgtcaacagaaaagctacaagatttcacatttgatgaaggtacactgctacatggtgagctgcatcatggaggcaatctcaggcagcggcgcacggaggagacgaggcaggatgttcgtgatggcatgcagcacagcgtccatgtgactagagtggcagtgccatccttgagaaggaaaggagaggctgcacagattggttcagtggtgcggttgctccttttggttctcctcctcgtcgtcatctttgtatttgtaggattatggaaatgtagctcgttcagattgttgcattagcagctactatttgtgattcaggggtatcagtgcattagtagctagtttgcctggttgtctgatctcgtgaaggagcaggggaaagtttatgcaggattcacaatgctcctcttgtctggcttgacatagaaatctaaaagttgtgacttgtgaggcaacctgttgccttgttcatataataatagaatgaaacttgtgttgcaagtagaaaatcaacacaaaaatagcagaaccaaatattcattcccagcagtcatctttcgtcttactattattattattagtacaataggataggagtacacggtactatgaagtagtgaccacaacaacatatgtcatccaattcattcagcagctaccgcttcttcctcttcttctcgtcttgggatttctcctgtgcattcttcatctgcaaaatcaaccaaggaatcaaccataccaatcatttcctgagacagcatgcccactcactcactcactcaccatgatgacaaggattcgaacaagaaccgcaacaaagtcggtgaagagagtcagcgcgtgcttgatgtagtccatgtccccacggtgcgccctctcgatgatctcctgggtgtcaaacaccatatatcccaggaaaaccaggaggccaaagtagagctgcagctagtagtcggtcagcttggttgcatgctttcttattacagcttcagatttgttcccatcacctcaaacatgaaggtcgcgctggtgtggccaaagattgaagtagcaaactgcagccagagaagaatggagaggccagatgaaagcagaccgccgaggtacaggtattccctgcgcttggcgatgatggcagcgccagagaagcatgcaaaagcaactgcggtcccgacgaacgcagtgacgagaatcctggtacatgagatgcagtttcatcaacaaagcagaccacagctcatcattcttgtgtaatgtaatggatgagtgacgacgattgacctcgaatccaagtcaataacaaggtcgacgagcggaccaacggacgcgccttgaaggagcgcggcagacatgagcagcgccaagcggttcctctcctggtcccgtgaagcgggcagggagatgaggaaggcgatggaggccacgcatcccacggtcgtgagggcgcctccgacgttgaggaggatgtggaggtacgcgccgagtgcagagaaggccagcgcggagcatagggtgaggtacacctgcagtcgggaacgggatcagctaaagccaagcgtgagaagagagccgggattggagaaggagacgaggggcttgcatgtttgaggtgggactgcacagcgggtgagatgtgacccagacgcttgagcgattcgaagccgctgccgcccgccctcctcctccgctgcgattggccgaacagagactccatcgcaggcgccaccgactgatgccgcaaactggaaagcaagcggaaagaaaccctaatttggagaattgcttgctactcagtcgggtcgggaggtggacgaagacgagcacgactatggaaaagtcgttggtcctggccacccggcccactctttgctttcaggcttggcccaacatcacactttccactacggcttatttgtatattcatatatcaatactaggtgagtgaccctacgttgcaacggaaacatataataccgtaacaactcatgtataaatgtgtgttatactgttatgagaaaatattttgtaattaa

SEQ ID NO: 152300 - DNA, 90 bp, Zea Mays
aagaaggacctaacggaggttacccacaaggtctacttcgatgtcgagattgacggcaagcccgtaggtcggattgtcatggggcttttt

SEQ ID NO: 152301 - DNA, 104 bp, Zea Mays
ccttttcgatcagcggttagtctgtgcacctatgcacatcattctccttttacctacactatattttctaatgcccagcaataagaaaaagttccacgcttaag

SEQ ID NO: 152302 - DNA, 98 bp, Zea Mays
ctaataatagtggttacctcttacagtttcactcttcggctacgatcatccatattttgaaatcgaactatgacatcatcatttggaattgcattgag

SEQ ID NO: 152303 - DNA, 309 bp, Zea Mays
ctttgatgcatattattacaattagtttgttagttaaaatttgatgcatgatttttgggtagttgttacaattgatgcataatttcttgttcattgtaaaataatcgatgttaggttcaatgtttggttaaatgttttttatgtctagtgatccttcctaatagaagaagggcttaatgatgtttatttacacttttttttatttatgtttgtatgcttaatgatgtttgtttacacattttttatttatgtttatatgcttaatgatgtttatttacacttttttatacattgggttatttagttttg

SEQ ID NO: 152304 - DNA, 375 bp, Zea Mays
atgaacatcggctctcaccggcagcaagacgggggagatcgacgctggggtttgagggctgaaaccagggggacaacgatagactccgggatcgagagggcagcatcgagcagtagctggaggggcatcagccatcagcagagaaacggttgggcgagctcggctagggaagaagaccaggcgccatggaaggggatcctgcaggggggagctctaccatggagatccagggcggccatgagaggggtagggactacttctgcgtggggagagatggagggagcagctggggagggaggagatggctgggcgagcagggagggcgcggcatgggagagggcaccggctagggagcgtccatggatcaagaggtga

SEQ ID NO: 152305 - DNA, 1422 bp, Zea Mays
aaagtaaatgctgcagcgggcgattggttatttctcggcctcatcgtcgtcttctccgatcccaccctccttccctccctcccaattcccacccccgtcaccccgtgctccaaaccctagcaagcagcaatagagcggaacccatgcaatcctaatcgttttctctgcctaatcctctccctttctcatcctcatgacctgtgcctcatcgccgccgccgccgccacgggctatgaagcgcgagctcgccttcgcgctccagtccctgtccgagatctcggcctcccccggccgcacgcgctccggccgccccatctcttcccttccgaacccattggcatcagcatctcccaagaggcgcaagagatccgcccccctcggcctcgcctccgcagccgatctcatctccccgcccacgccgcctatcgacgccgagccgcctaaccagcccctccgtgacatcatccaaccgctccatggatctaatcctcccaccgcctctgaccaccgatccgattccaatgccgatcaagagctcatcccacaaacgatgctggaagccccccaaccatcgcaccttgagactgcaatagggtgtgcaacagcaacagaggtctcggcagtgaaagtgatcgccaacccgaatctgcccgcatcagaaaatagtgcagcagatgactccgcaatggaagtgattgcaaagccgaatgtggccacagaggatggtgcatcaaagttgaatgtggccatggaggatacagcatcgaagctgactgtggctgatactgcagcagtagaaccaactttgctggaaaccaccattgcagctggatcaaccgttgtagctggaaatgaacagtgtgataactcaaactcaagtggagcaagtctacagcagcaagccgttgacaatgtattgatgtccactgctatgctagctgaggacgctgccacacctgtggctgctgccgagctcaagcctgcaaggcgcttcactcgattgctgctcaagaatcatgagccagacaaagaagagtctgcagcttgtgaaagtcaggcaacaccagatggcagcaaggatacctcatttgattttgctttgctcctggagaagcctcagagaaggttcacaaggtcgtcgctcaagacaaaggttgagagcagtttggttggatctgacgatgcgctggacagtgcatctgatgcccgtccatcagtgaagaagatggagatgaaaatgtcaaagaaagttgcctgcctcacgaagcaccctggaaacattagagagctgctcaacacaggcctgcttgaggggatgccagttatgtacatcattcctcatagcaaggttgtgagaatcagccgtaatgtttcatgaacagttttaaatctgtggttactactgtgctaatggcttgcaaa

SEQ ID NO: 152306 - DNA, 728 bp, Zea Mays
cttcttaaatcatctttaagttcttgcatttagatcttactttcttccatcctttgttttcggggctgtagtctgactccaagttcgaaggaggctttgctaaagaacatatcatcaggcaagaagggcggtagtgctggcaaagtaacaaacaaggataacagactacacaaattggtctttaatgttttgcttgatggcacagaagtagcttactatgttgatgggcagagaaaggttgacgggtatattaaggatcaaagaatctactgtaatcactgcaacaaagtggttagcccatcagcatttgaagctcatgcgggtgagggatcaaggcgcaaaccgtatgataacatattcacatcaaacggagtatcattgcatgagctggcaatgaaaatatcaaaggatatggaactgtcagaacgtgagactgatgatctgtgcagagaatgtggtcagggtggagatattttcccatgcaaaatctgtccaaggtcatttcatccagcttgtgttggactctctaaagtcccctcagaatggtactgtgataattgtcgcaatcttgtgcaaaaagaaaaggctttagcagagaacaaaaatgctaaagctgctgggaggcaagctggagttgattccattgaacagataatgaagagagctatacgaattgtccccatctctgatgatcttggaggctgtgctctatgcaagtgagtactgtt

SEQ ID NO: 152307 - DNA, 1291 bp, Zea Mays
atgacgacggctgttctaactgatgaagtttctctgtgcagacagaaagatttcaacaatgctgtgtttgatgagcgcactgtgatactctgtgaccaatgtgagaaagagtatcatgtaggatgcttgaagaatcaatggcaagtggaactaaaggaattgccagagggggagtggttctgttgcagtagttgctctgagacacgatcttcattagacaagataatctccgacggagctcaactgttggtggagccagatcttgaaatcataaagaagaaacatgtgacaagaggtttatgtatggacaccagtaaagatctcaaatggcaattactttctggtaaaaggactactgaagacggaagcatattgctctctgctgcagtgccaatttttcatcaatcttttgatccgatccgtgaagctctcactggtagagacctgattccagagatggttaacgggaggggacctaaggagggaatgcctggacaagattacagtggaatgtactgtgcactgttaactgtgggctctactgtggtgtcggcagcacttttgcgtgtgatgggaggtgatgtggccgagctgccactagttgctacaagccaggatgttcaggggctgggctactttcaagccttgttctcatgcatcgagaggatgctagtttcgctgaagatcaagcactttgtgcttccagctgcacacgaagctgaagggatctggatgaagaaatttggattctctaggaccactccggaagagctggaagcttatcttaatggggcacacctgactatattccatggaacatcatacctgtacaaggctgttccaatgtcatgatatatgggatgaaaaagatatgggtgttgcaatagctagcaggattttgtcttgtcttttctggagtcgctattgtgatgtacataaagagttgatgaggaaacaaagcattggcaagacaatgaaaggttggtatacaggagctggaagccaaggggaagaaaagagctacaagaggtctggattagttttctttctttgtttactcttgaatcgagtgtagtggcgctggggttggcaagtggtggcacacctagcaaattttggtgtaatactagatgcaatgcaattgaagcagttccgtgagtcctggtccgatagccatattttgcaattgaattttgatgtgtttgacaccgacaagtggcggggctcgtatgtgagtaatcggtggtccttttcttgctgtcctggttaaagttgcgatattgctgttttg

SEQ ID NO: 152308 - DNA, 330 bp, Zea Mays
atgtccgagctcaaccgcccacggtttggtgaagaacaacgacgttgctgtggaagtccaagacggcaaggtgtgcgctacacagctggagcgaggccgagtagtggtgcaggaaatggcaacgcagcacgacaaggtcgaccggcgcggttcatgacagggagcacgcacgcgcacagtgtgccatgtcctagagaaaactcagacgtcgagagggagatggaaggcaaagagctagaggcaagcaccaaagattggccagggaggaaacggcttggggaggataagagggaaggagacgtgagggaggaggagaacatggtggagtaa

SEQ ID NO: 152309 - DNA, 2310 bp, Zea Mays
gtcagactcagagagatggtttgatttgatttggtgtccgtccctcacctcttgcagtcttgcttgcttgtcgtctccatccgtgcatcgtcttcctcctctacctcctctcttctccttcggctgggtttgggttaacaaaggcagagggaccagcggcagcgaaggtcaattgcatcgcatcggatcagatctcgactcaattcccgcggttaatccacatatcgactcaattcccgcggttaatccaccgccaacacctaagttaaaaccacggcggcggaggcatcggccatgctggcgcgtgtggctgcggagatagccgcgctcccggagccgcgcgggcccatgcgccgcctctgcggggacctcgcgcgccgcatccgcctcctcgcgcccctactccagcacctccaagacagggacctggacgacgccttgcgtctcgcagacgcgctgggggccgcgcgcgacctcctccgcgcagttcacgacggcagcaagatctaccaggccatgcaaggggatgccgtgctccaacgctttgcaactgtcaacagccacattcacttggccttggatgccttgccgtacaagaccttcgacttgcctgaagaagtgctggagcaggtcgatcttgtgcattctcagttcaaaagggctgcaaccacagctgctccaccagatgcacagctgtcaaaggacatatgctttgctcttgctgacaaggcctttgaccctcgggtcctcacgaggatctctgataagctgcaactgcacagcatggccgatatcaagaaagaatccctcgccctgcatgagatggtcatctccagcggcggcgaacctgatgcctgcgtcgacgagatgtcctccttgctcaagaagcttaaagactgcgtcgtcactgaagcccccaccacagagacgcccaacgcccagtctacctccataaagcatacatctcctatcatccctgatgaattcagatgcccgatatccctcgagctcatgcaagaccctgtcatcgtttccagcgggcagacatacgagcgatctggcatccagaaatggcttgattctggacacaagacatgccctaagacgcagcagctcctctcccatacatcactgacaccaaactttgtcctaaaaagcttaatagctcagtggtgtgaggccaacggcattgagcttcctaagaacaaggcaaactcgcgagataagaaagcagcaaaaagctctgactatgaccatgctggtttagtatccctaatgaacaggctgaggagtgggagccaagatgagcaacgtgcagctgctggtgagatccgtttgcttgcaaagagaaatgtcaacaaccggatatgcattgctgatgcaggagctatccccttgctagtcaatctgctttcctctacagatccaagaacgcaggaacatgctgtcacagcgctccttaacctctccatccatgagaacaacaaggcaagcattgtaagctctcatgctatccctaagattgtggaagtgctcaaaactgggagcatggaggctagagagaatgcagcagccacactgtttagcttgtcagttgtagatgaaaacaaggttacaattggtggcgctggtgcaatacctccactcattaatctcctgtgcgatgggagcccaagaggcaagaaagatgctgcaacggcaatttttaatctgtgcatataccagggaaataagattcgagcagtgaaagctggaatcgtcatccatctgatgaacttcttggtggatcctactggcggaatgatcgatgaggcactcactcttttggctattcttgcgggtaaccctgaagccaaggctgtaatttcgcaatcggatcccatcccaccacttgtcgaggtcattaaaactgggtctcctcgcaacagagagaatgctgcagccattctatggtcactttgttgcactgatattgaccaaacgagggctgcaaaagctgctggagcggaggatgcactcaaggaactgtcagattctggcacagaacgtgcaaagagaaaagcttctagcattctggaactcatgcggcaagctgaagaagcatgaagctgaccgtagtagatttgcgaggttgtggttttgttatattgtactcttagacactaaatgtttctggatagtgttggtatttgagatatatctgtaggcagatgcgttaagaattttctgtaaacatataaattggatgtataataatgaaagtcagcccaaactttgtatgtgattcagcttggtggttatcattgtttc

SEQ ID NO: 152310 - DNA, 2302 bp, Zea Mays
ctcctctcttctccttcggctgggtttgggttaacaaaggcagagggaccagcggcagcgaaggtcaattgcatcgcatcggatcagatctcgactcaattcccgcggttaatccacatatcgactcaattcccgcggttaatccaccgccaacacctaagttaaaaccacggcggcggaggcatcggccatgctggcgcgtgtggctgcggagatagccgcgctcccggagccgcgcgggcccatgcgccgcctctgcggggacctcgcgcgccgcatccgcctcctcgcgcccctactccagcacctccaagacagggacctggacgacgccttgcgtctcgcagacgcgctgggggccgcgcgcgacctcctccgcgcagttcacgacggcagcaagatctaccaggtgcgcgctgtcgccttgcttgctcctcaatccaattccatccaacccatgaatgaacaccatcatgaaccaaccaaccaggccatgcaaggggatgccgtgctccaacgctttgcaactgtcaacagccacattcacttggccttggatgccttgccgtacaagaccttcgacttgcctgaagaagtgctggagcaggtcgatcttgtgcattctcagttcaaaagggctgcaaccacagctgctccaccagatgcacagctgtcaaaggacatatgctttgctcttgctgacaaggcctttgaccctcgggtcctcacgaggatctctgataagctgcaactgcacagcatggccgatatcaagaaagaatccctcgccctgcatgagatggtcatctccagcggcggcgaacctgatgcctgcgtcgacgagatgtcctccttgctcaagaagcttaaagactgcgtcgtcactgaagcccccaccacagagacgcccaacgcccagtctacctccataaagcatacatctcctatcatccctgatgaattcagatgcccgatatccctcgagctcatgcaagaccctgtcatcgtttccagcgggcagacatacgagcgatctggcatccagaaatggcttgattctggacacaagacatgccctaagacgcagcagctcctctcccatacatcactgacaccaaactttgtcctaaaaagcttaatagctcagtggtgtgaggccaacggcattgagcttcctaagaacaaggcaaactcgcgagataagaaagcagcaaaaagctctgactatgaccatgctggtttagtatccctaatgaacaggctgaggagtgggagccaagatgagcaacgtgcagctgctggtgagatccgtttgcttgcaaagagaaatgtcaacaaccggatatgcattgctgatgcaggagctatccccttgctagtcaatctgctttcctctacagatccaagaacgcaggaacatgctgtcacagcgctccttaacctctccatccatgagaacaacaaggcaagcattgtaagctctcatgctatccctaagattgtggaagtgctcaaaactgggagcatggaggctagagagaatgcagcagccacactgtttagcttgtcagttgtagatgaaaacaaggttacaattggtggcgctggtgcaatacctccactcattaatctcctgtgcgatgggagcccaagaggcaagaaagatgctgcaacggcaatttttaatctgtgcatataccagggaaataagattcgagcagtgaaagctggaatcgtcatccatctgatgaacttcttggtggatcctactggcggaatgatcgatgaggcactcactcttttggctattcttgcgggtaaccctgaagccaaggctgtaatttcgcaatcggatcccatcccaccacttgtcgaggtcattaaaactgggtctcctcgcaacagagagaatgctgcagccattctatggtcactttgttgcactgatattgaccaaacgagggctgcaaaagctgctggagcggaggatgcactcaaggaactgtcagattctggcacagaacgtgcaaagagaaaagcttctagcattctggaactcatgcggcaagctgaagaagcatgaagctgaccgtagtagatttgcgaggttgtggttttgttatattgtactcttagacactaaatgtttctggatagtgttggtatttgagatatatctgtaggcagatgcgttaagaattttctgtaaacatataaattggatgtataataatgaaagtcagcccaaactttgtatgtgattcagcttggtggttatcattgtttcaggtttcatgcttgc

SEQ ID NO: 152311 - DNA, 979 bp, Zea Mays
gaaggcctggggttgcagcaacaagcctctgccctgagctgaggatggggcacattgctgagcctaccggcactgttgtgattggctgcaaagtgctgccgatcttcaccgagcatggcattgttgacagtgcaatgaagaagatgatggcgcataggattgacggcaagaaggcagttgctcgggttaaggagcttctgaagcgggctgcccaggccaagcctcacagcgtcactgtcagtggaaagaaatggaagaaggttctgagcttccacgcaagggatagcgctgcggccacaaagggagggcggcaacagaagcagcaggaagaggcgataagctgcagctcgggcaagctgagcttcaagtgggacgtgggcagctgctcctcggcatcgtcggttgcgtattcgccgctgtcgttgatgtcggcaccggcaaagtcctcggagcagacgctgctgacgccactgaggaaagactattgcatgtcaaggctgtcgtccataagccagcagagtatgttgaagaacatggaaggagacgaggaggaggaggaagcctgctgctgcaggacggcgcagtggatcaccaccgattcagactttgtggtgttggaactgtaaactaatggtcatcaagacatcaattacactagtgtatctatggtaaggtctgtgtctgtatcagatcagataccccgacggacttcgctgcattacacttacagttgccccggcattgcttcctatgtactcgtatatgtattatatgtgtcttgaatacaatcctaaggataggaaaggtattcatataaattctagtacatcaaatgtgacaccagggtacctaaggttccggtgattgattgatcaggagagcagtgccgtagagtttgtctaccaaggcatgacacactaactcaatagataactctagagaggttcggactgcgtaaaagcagtgtacgggtttacaa

SEQ ID NO: 152312 - DNA, 6423 bp, Zea Mays
ggtgctgttttggtgcatgaagaaagtaatgcaccggaacaacccaaccaggaagcttcaaatgttgttgctagtgaggtcttgggagaggttggagctgccaccccttttctaaaatctgagattcaaacaagtcagcgttgcattcttactgagacgcgctcactaaataaggcagtggaaagcatccccatgttggaaactggagagcaagctactggtggttcaaaccagaaacctctactagaattgccaaatagcgcttgctctactgctcatcatgaagaggccagcaagtcggtggaagatggtaattctattgggattcaaggtgcatgcacttcaaggaatactgaagctatccaatgtgatgaaacatggtatgatgacaacatttgtgttgtttgcagaagtagggaaatctcagatatcctgaagtcttgtggtggaaaaggatgtaaacgacattaccatctttcgtgtatggatccttccttggacgtgtccctaggaatatggctttgcataatgtgtatgaaaaagaggattcagtttggtgtatattcagtcagcgagggaattgaatctttatgggatgtcaaggaaggagtggtgaacagcaagcaatatttcgttaagtataaaaatcttgctcatgtacataaccagtgggtttcagaaagtgatatagttgatagcaccccgcaaggttctgatcttatctccaaagttagcaagaagattcataaagaaaagacaataaggtggaagcaggaatgggctgaaccacaccgtctgttgaagagaagattgcttatgcctcaaaaagaagccgaagttttttttaattcactaggtgataaatttgtatactgtaatgtcgagtggctagtgaaatggaaggatctgggctatgaacatgctacatgggaactcgagtcctcatcctttttatgtactcctgaggccgaggagcttaaaaggagctatgaggaccgctttaaaactgcaagaaaagcatctgatccttcaaaagtagacaaggctaagggggggatatttcagcaactcgagagactgccagatggttgccctcctggtttagacgatgaccatttgagatcacttaaccagcttcgtgagttctggcacaattcttgtggtgctattttcatcgatgatcaggagcgagtaattaagaccattctttttgtggcatccatactgcctcacatctgtcaaccactcctcattgtgtctactactactactctctccttgtgggagactaaattcaatcgcttggcagcatccatcaatgttgttgtgtacaatggagagaaagatgtacgcaaatcaatacaagatctggagttttatcaggatggttctgtgatgttgcaagttctcttgtcccaccctgatgccatcttagaggacatcgaagtgattgaacgaattaactgggaagcagttatagtcgatgattgccaaaactctagagtttcaaaatggcttgaacaacttaggagacttcctaccaattttaggatggttctattgagttcctcactaaaggaaagtattgctgagcacatcagtctgctgtcttttctcaaccctgaagaaaatggtacattgagtgtttcaaatggtgtttcttttgatacagctggcactctagttgttctgaaagaaaaacttgcacgttatgttgcctttgagcggaagacagattcatcaaagcttttagagtattgggttcctgcccgcctttcaccagtgcaactagagatgtactgttacatattactatcaaactccccagcccttagatcacattctaaaacagatagtgttggtgctcttcgcaacattcttatatctcttcggaagtgttgtgatcacccttatcttgttgatcaatcgctgcaaagcacacttaccaaggatcaccctgtaactgatatccttgatattggagtgcgttcatgtggcaagttgctgcttcttgacagaatgctccaacagatcaggattcaaggtcttagagttcttattctttcgcagtctggtggtgaatctggcaagcctatgggtgacattttggatgactttgttcgtcagagatttggttatgagtcatatgaacgtgttgaacgtggattgctactgcaaaagaaacagacagcaatgaatatgttcaatgacaaaactaaggggcgatttatttttttaattgatagtcgtgcatgtggtccaagcatcaaactatcatctgttgatgccatcatcatatattgtagtgactggaatcccatgaatgacttgagagcccttcagagggtcagcatggagtcacagtctgaacctgtgcctatttttcgtttgtactcgtcttttacagtggaggaaaaagctcttattcttgcaaagcatgaccatattttggatagtaatattgtgaatataacccctagcctgagccattgtctgctcagttggggcgcatcatttctcttcaatagacttgaggagttgcagcaacatagctactcaaatgtctctggtgatgagcttttcatggataatgtagatttggagtttttgacaaaattactcagcaaggttgaactcagaactgaatcaggcaatacagccatatcacaagcttatctgtgtggatctttctattctagggctattgttgtagcgggtgagagggagggaattccatcagttgatggtgacctgccaaagttctgggcctactggttaagtttacttaatgggaggtctcctcagtggcagtatatatctgagccagtacaaagaagccgtagaaagataaataacatggaacaacaattgaaaaacacagacaaacagttgaaaataactactgaagaaactgatgaagccagagtaaagcgtagaagaattggtgaaatcatggattcatctgcaatagactcacctggcaaaaacaaggacaccatattgccaggaaacaataccccacctagttctcatcaaatatcagttgaagatacatggcaggaactagagcgaagcaatcttcatgccacacaaaaaggtctacacgttcaactcaagccagagatttcgaagttatataagttgctgcaactgccggagaaggtgaaatccttatgtgaggaatttcttgagtatattttgaagaatcaccaaatcagccaggagcctaagggcatactgcatgcattcaatttggctctgtgttggcgtgctgcttctctctcaaagcataagatcaatcacacagaatcactcgcacttgctgtaaaaaacttaaactatgagtgcaaagaagaacttgttgattttgtttatgggaagctaaagatccttaagaagaagtttgcacgtagagcaggggaagtgagcaagcaaaactatatggtttcagtgagcgacatatcaacttgtgaacaggtcacttctgttagattgagaaatgatgagttagtccctagccaggtaactttaactgatggtaactttgagaatggttcacatcacgaggctacaggtgacttttggaccgaggagatggtttcgggagagaaagaactgctacctgacccagtaactcatgaaggggaacacttattgagggatgaacttctcagcaaaataatggacaaaagaattaaattagttgacaaagttttctctctgagaggaaggagtatctatgataagcattcaaatcaggtttcatttttagacatgcataggcaaaaggtagtggataaactcagaagagcatgcagtttagttgtggagcatctacgtagtagtcaaaatcacattgctcaagaggacagagatgggaaaataaagctaataattgaatggtttactatgctgctgtatgcttttctggaacacatgaaatgccaacgtaacaggcttgatatgcagcaatcagcttccaggatcaaggagtctcaattgaaggaagaaacccttcaggcagcaagatgtggccaattagatcaaaattttgatcaacatattccttcaccagattttgaatttgctatggaagaatttaggcacttcagggaagtagttggtagctgctatgttgatccagctgctctggtaccagagtctttggatgacaattcagcaatggaaattatgttggttcaaagcgcaactgatgctgaagtcatcgaagaagtgctaaatcgacctactgaagttcttgttcaaggtccagcatcagaagttgttggtccatcagttgatgtgatttgcaattgttctgatggcatcaactcccaaagagatgcatctctggctgttcattcattggaaccttcaagtgacgaccttagaagtactgaccatgttgaggagaacacagttggctcacaaatacagggtggtacaagcaaacatttaggtgatgctgcaatggaagttgaaactggaaacaggaacactgctttggctgattcacctcactttgacaaaccagctttgactgctccatccaggcaggcaacattgctggtttctcgagaaaccgagatgctgagcaatcttgtggaccaatgtgcacaacagagtttagtgtcagcacaacctttgcaggatgagtcggaacaagcagatttgtctagtgcagcatcaactcaacccttgcaatctgagaggcaacaattaatctctgtttccaataatctgcttgaaagagcacagcttgatcagagtcaaccaaattatcagacagatgcggcacctggttgtgcgcagtctacagaactctttccagtgacgtcaatgatgtttaatcacgcacctattgattctgaaccactgaaaaatgagttgcacaaattacgattacacatggacacactcaataaagtccatgaaatgaagaaaacccaacttcagaccgcatgtagccaagaactagagaaggtaaagagaaaatatgatttgttaattaaagaacatgattccactcatcttcagcaaaagaaggcacttggtgatttttatgagaaagttcagcgcaaccaatcgctggctgaggattttcgggccaaattcatatcactgtctgcagcacaaggtgcagcaaaaggccatacccctccagttcgtcacacacctcaggctacccaagtggtgtcctccacatcatcaattgccctgtcatcagcttgtcgaccaccagtgccgaggcctagggttcaagctccacaggtggaccaaccattattgtcattgtcgcagttctcccgtccgtctttgcaagtggtccaacctcccaacctggaactaggcaatcttttcagagcaacgtcaacgactcttagtcatatgccacctcaacgtgggagctatggagttcagagtgaattggctcctcgctcacctgctcctcatcttcagttcagatcgccacgggcacattccatggcacctggaaatcagcagcaatcgccagcaattagtgtggatgcaatgtcctcaaggacacaaccagtgctggcggcaagcacatccccatcagatatacatgtgggacccctagcagcctcagccttgtcaagtttacactctgttctcccttcaacctcattaccctcaagcttgcatcctagtcacctggcacaacgtgtgccaccaactcctaacccaactttacaagccggggcaccgaaaggctcgaatgcaacaatgccttccatccctacaggcatgcagctgccagattctggttccctatcgctggatgcatggcttacagctaatcttgggttgaatgatgcgtctacagctcctgctaaggatacagccagtcttgggttgagcagtgatgcccctagggcagctcctgatacaaatacggccagtcttgggttgagcagtgatgtgcctaggggtacggctcctgctacaaatacagccagtcttgggttgagcagtgatgtgcctaggggaacgactcctgctacaactacaaccagtcttgggttgatcagtgattcacctagggtgattgctcctgccagcagtaattcgcctggggcgattgcttctgctacaaatggtggttccgagatagatgtggtatgcctgtcagatgatgaatgatgctagcacgtgtacaaggctgacagttatagatgactgcttgaaaggactaggcattattttacggctcccttgagtccgttctgacaaggtgggaatgttgtttgtgctgtgaatggctggtaacagcaatgacagttttattaagttcattgtaaatgtgtattatgacaaatgcctgccaacgtttgctgtaaatcgctaacctctggggaatgtggatattaacctctgagatggagttgggtttcaagcgct

SEQ ID NO: 152313 - DNA, 2422 bp, Zea Mays
acatatcattattgtctaggatccttagtagttgttatggcataagcttattatgcagaataactcaatatgtactggtattattatatcaggaaccttcaagtgacgaccttagaagtactgaccatgttgaggagaacacagttggctcacaaatacagggtggtacaagcaaacatttaggtgatgctgcaatggaagttgaaactggaaacaggaacactgctttggctgattcacctcactttgacaaaccagctttgactgctccatccaggcaggcaacattgctggtttctcgagaaaccgagatgctgagcaatcttgtggaccaatgtgcacaacagagtttagtgtcagcacaacctttgcaggatgagtcggaacaagcagatttgtctagtgcagcatcaactcaacccttgcaatctgagaggcaacaattaatctctgtttccaataatctgcttgaaagagcacagcttgatcagagtcaaccaaattatcagacagatgcggcacctggttgtgcgcagtctacagaactctttccagtgacgtcaatgatgtttaatcacgcacctattgattctgaaccactgaaaaatgagttgcacaaattacgattacacatggacacactcaataaagtccatgaaatgaagaaaacccaacttcagaccgcatgtagccaagaactagagaaggtaaagagaaaatatgatttgttaattaaagaacatgattccactcatcttcagcaaaagaaggcacttggtgatttttatgagaaagttcagcgcaaccaatcgctggctgaggattttcgggccaaattcatatcactgtctgcagcacaaggtgcagcaaaaggccatacccctccagttcgtcacacacctcaggctacccaagtggtgtcctccacatcatcaattgccctgtcatcagcttgtcgaccaccagtgccgaggcctagggttcaagctccacaggtggaccaaccattattgtcattgtcgcagttctcccgtccgtctttgcaagtggtccaacctcccaacctggaactaggcaatcttttcagagcaacgtcaacgactcttagtcatatgccacctcaacgtgggagctatggagttcagagtgaattggctcctcgctcacctgctcctcatcttcagttcagatcgccacgggcacattccatggcacctggaaatcagcagcaatcgccagcaattagtgtggatgcaatgtcctcaaggacacaaccagtgctggcggcaagcacatccccatcagatatacatgtgggacccctagcagcctcagccttgtcaagtttacactctgttctcccttcaacctcattaccctcaagcttgcatcctagtcacctggcacaacgtgtgccaccaactcctaacccaactttacaagccggggcaccgaaaggctcgaatgcaacaatgccttccatccctacaggcatgcagctgccagattctggttccctatcgctggatgcatggcttacagctaatcttgggttgaatgatgcgtctacagctcctgctaaggatacagccagtcttgggttgagcagtgatgcccctagggcagctcctgatacaaatacggccagtcttgggttgagcagtgatgtgcctaggggtacggctcctgctacaaatacagccagtcttgggttgagcagtgatgtgcctaggggaacgactcctgctacaactacaaccagtcttgggttgatcagtgattcacctagggtgattgctcctgccagcagtaattcgcctggggcgattgcttctgctacaaatggtggttccgagatagatgtggtatgcctgtcagatgatgaatgatgctagcacgtgtacaaggctgacagttatagatgactgcttgaaaggactaggcattattttacggctcccttgagtccgttctgacaaggtgggaatgttgtttgtgctgtgaatggctggtaacagcaatgacagttttattaagttcattgtaaatgtgtattatgacaaatgcctgccaacgtttgctgtaaatcgctaacctctggggaatgtggatattaacctctgagatggagttgggtttcaagcgctatgaggtttctgtacatgtttgtcattgattagttccctgaggtgttcgttgtaggccggagtgctagctccgtgtatcgttttggttctacgtatgtttcttttttttagtttgacttaaaaaaacagtagcaacaaaaaacagtagcaacatctccatgatagttattatgtataataaatgctgaaattttcttgtatatatttgattgaaacggcgggagtatgtaacagagcaatttagaccaaggcggtcacttcaacgttgtattgta

SEQ ID NO: 152314 - DNA, 733 bp, Zea Mays
gccatctcttgatatccagagttctctggcatatccagagttctctttgcagagttcatgggatatccagagtcacgcctccacacccatgcactctctggcatatccagagttctctttgctgtaatcccatgaacccagccatctcttgatcttttcactgcctatttaagaataaccgagggggaagaagtgggagtaaaggagagatccttacctatgtcatcaaccacggtgtgtagcttcaacatagttttgttgcctccccttacccaaactataccctggacacgcccaaattctctggtcaagtgactcaacgtgtctggtgaccacgtcgccgacgcctcaacctcatactggaggaggagcagagagcaagatggggtccggatctttcctcaaggtgctggccaagaacttcgatgtccttgccgggccagtcatatcacatgcttatcctctatatgcttctgttagagcgatagagacaaaaaatcctgtagatgatcagcagtggctcacttactgggtgttgtactcatttgtcactttgtttgagctaactttggctccaattatcgagtggtaaattacgcttttggtcatgtcccaatgtgttcatttttatggtttttgtggcctttgtgattatttgcaaacattattggtggtgcatggatatagatgtgtttggtgcatcaagttggtgaaaaggaaactagatatgctc

SEQ ID NO: 152315 - DNA, 258 bp, Zea Mays
atggcgagagggattgctgctgtgccggtgatgctcttgctggtcatagcgttcttggctgcctcaggaggagcatcacggccattggaggtcgatggcgatgcgttgttgttgtcgctgccgggaacgacggaagccgaagccgtcccgggtgatggtgttctgcagctaccccggaaaatgtacctgaagcagctccgggcggggccctcgtgcggcacgaacagctccaacggtggctgcccacactccccatga

SEQ ID NO: 152316 - DNA, 120 bp, Zea Mays
attctctatatctttttcatctccaacaacgtcccctaaattcggtcctatgtatctatagtgtaccggattttataatacacattatttttacatgtcacttataaaaaattaattaac

SEQ ID NO: 152317 - DNA, 846 bp, Zea Mays
atggctggaaaaggctctccaaggttcaacatgagcagttccccaaagttgcgaagtggggcaaaaaagagtggtggttctacaagagtagtgaaacaaagagcggattggaatcctggccatgagaggtcccttgttaacattctccatgaatttaaagatagtggctatagaggtgacaatggttggagctctgaagggtggaataggatggtcaaggagttccatgtgaggaacaagtatgtatcctttacaatggatcggattcaggataaagaaggtcagttgaagagagactataagatgctcaaagcagcaaggcaacaaagtggatcgagctggaatgagaaaagaaatgtggttgaaggaccaccaactttgtgggagaatcaaatggtgacattccctaaaatcaagaagtttaacaacaaggcaactttcccgctctttgatgctttgggagagctttatgattatgatgaagttgatgatacactcaatgaaaggaatgaagatgtgcttcaaggaagggctaatactctatcgcaagatgaagaaaatggacaacaaatacctgttgcatcaagaaacaaacaagaaaaggaattaaagaagcttagaaagagtgacaacatagaaaatatgatgggaagatacctagaaatgaggagcaagcaagtagaatatgaatctgcaagagaaaaggaggcagagaaatggaggtgcacatcagttatgaacacaatagaagaagtgaccaaactggagaaggcaacgacatattcaatcttcgtcgagagcaaagagaacatagaaactttcatatgtgcttgtgaagcagattaa

SEQ ID NO: 152318 - DNA, 2102 bp, Zea Mays
ccacatgtaaggaatcttgtgggacctacacgtcagtcgacgacaacaatcacagaaacgaagcaggtggacccaatatcgtaatgtcgtgttaactattttatgtattagttttgaaagtctgcttttcgcttggttcaaaatggtgtgttgattgtggacatgctagcattagcttatatgtgatataggcgaacctacgttatggggagtgagggcacaattttcttgttttagtggatattttattttatttattgtagctagaaaggttcagaagtcgctagaccttcatttagatccccactcatatattgggcctcactcaacctttggctgcccctaatctagatcacttatgatatcaacaagagataagcatattttcgaaatttaaattttaataaacctgaccaacatttatttgcaaacccatttgatccacgatcgtaaaagatggacgaaattcggcagtccacgaagcggcgagccaacagcactcatctcccgaaatttcccatcccagcccatcttaccaaaacgcccctcgccgccacctgtcaggcattcgaaaatgctctctctatccccaaacgaacaacgccgcctcaacctctcttgtccttcctctcccgccgctcggctcgccgccgaaacatttccgccctgaattttcaaatcccccggcaaaatcgaaaattttcccaatcttccatagcacggcgcgccccctgttttctccctctgcccacccttatccgttcttcgcgcgctcgcgcctccttcccttgcaagcccgcgcggctgcgccaactccgtcccaattcaaaatctgcactctaattcccaccattcctataaatcccccgcctccctgctctcctccctaaatcacacaactttcgcccaattccccactagcaaccgtccccacaatcctccgacgatgcctgccgcgccgacgctgttgcccccgtgcgacgcggaggagccgctgctggcggagtcctccgaccgcttctccatgttcccgatccgtttcccgcagatctgggagttctacaagaaggcggtggcctccttctggacggcggaggaggttgacctctctgccgacgcccggcactgggacgaggcgctgtcccccgacgagcggcacttcatctcccacgtgctcgccttcttcgctgcctccgacggcatcgtgctcgagaacctcgcttcccgcttcatgaccgacgtgcaggtcgccgaggcgcgggccttctacggcttccagatcgccatcgagaacatccactcggagatgtattcgctgctgctcgagacctacatccgcgaccacgtcgagaaggaccgcctgttccgcgccatcgacaccgtgcccgcggtccggcgcaaggctgactgggccatgcgctggatcgacggcggggagcgcttcgctgagcgcatcgttgccttcgcctgcgtcgagggcatattcttctcggggtccttctgcgccatcttctggctcaagaagcgcgggctcatgccgggcctcaccttctccaacgagctcatctcccgcgatgagggcctccactgtgatttcgcctgcctcctctacgagcttctccgcaacaagctcgacgaggcccgcgtacgcgagatcgtcgcagacgctgtcgacatcgagcgcgagttcgtctgcgacgccctccctgtcgcgctcgtcggcatgaacggggatctcatgagccagtacattgaattcgtggccgaccgcctgctcatggcgctcgggtgcaagaagatgtacaacgtgaccaatcccttcgactggatggagctcatctcgctgatggggaagaccaacttcttcgagaagcgcgtgggtgactaccagaaggcatccgtcatgaacagcctcaacggcggcggcgctgccgaccacgtcttcagcatcgacgaggacttctgagttggcacgcgtaatctatggtgtcggtttaatgttagtatttgcttgtagtttgtaagcgtgatacatgtactctgagccgcttgatgcaatgatgctgtttcattttctgtgttactggttctcccaatacacc

SEQ ID NO: 152319 - DNA, 705 bp, Zea Mays
aaaggccaggaggggttgtggcaggcggatgacctgatactcatctgcggcacgcatgtccagcacgccgcggccaagacgagcagcaaagcaaaccgtatttgtcccgcggcggcctcttcgtcccgcaaggtcgccccacctagatccggccacgccgcacgttccccttttccgccgcagcgatggtgtacgtggattcctgggacgagttcgtggagcggtccgtgcagctcttccgcgccgaccccaacaccacccgctacgtgatgaagtatcggcactgcgaggggaagctcgtgctcaaggtcactgatgaccgcgagtgcttgaaattcaagacagatcaagctcaggacgcaaagaagatggagaagctcaacaacatcttttttgctctgatgactcgtgggcctgatgctgatatcagtgaagtttcagagaagggacaggccgagcaacagcaaccgaagaaaggtcggggaaggagacaatgatgccggtctggttcttatttctttcagaaaattcacaactggaatggtggattgacgtttcattgattattgttgtccgctctgtaatggtactgggaaggaagttttttcagtacagaaccgagaacaaactgaatgcacactatcatgacttcatgattgagaaacgcttaagccctgaatttaaaaaaaattatattccgaattt

SEQ ID NO: 152320 - DNA, 115 bp, Zea Mays
cggttatttaagaaacaaaacagtacaatgtgacataaacaataactgctataagacatttcaaagaataagaatgattcccgttcaagtttggaaatcacttcaaaaaagaaaa

SEQ ID NO: 152321 - DNA, 279 bp, Zea Mays
ttaccatataaaccaggccacatggctttcatgacaggtacaaatgcgttgcagatacaactctgtcaaaagaaaggcaatcaataaatttgatctgagcttattcagtcggataacagtatgcaaatcagcaggtatacttgcaaaattcccactgaggagaagaatctttgcaaaaccttcaccaagaatggttgggacattatcatgattgtcaccctctagatcgaattcccagtgatctttatgaaatccagaaaataaaatatcaagaactcc

SEQ ID NO: 152322 - DNA, 125 bp, Zea Mays
tttcgggttcctacgtcaaccctttccttcccgttttcggtggaatatatgtaaaattttgcataagtgaaggtctaaacattgattgttgtatctatatttatactcaactagcaaacaaaaca

SEQ ID NO: 152323 - DNA, 933 bp, Zea Mays
tggttcatttcttcttcgtgtattgtatactagtagagtaccacagtggatctcgttaaactccgtgacatttacaagtttgtatttcaaaacgagacccccccaagaacaatgtacaggccgcgtcctggtgccacagctcgacgacgtccagatttgtctgactgaatgatggcgtgttccgtccaatccagcgagcagagcaggcggcggcagccccgcacgcgccgcgtccgtgcgcggcggccgaaaaaacgcgcgaggccgcccgcggtccgacgagaccgcggcgggaagagggaagcgatcgacggccggccgggcctagagctagagggcggaggcgaggtgcatcgtctccgccgcgaccgcgacggtgtcggagaaccgctgcagcgcctcgcgcatccacgggtgggggcagcgcgcgatggcctcggcggcggagacccactccctgcggcgcgcggccatctcgggccaccggtccagctccgcggtgacgcgcagcgggagcacgaagccctcgtacgtggcgtcgtagctgcggctgcggtagcaccagcggcccagcgcggggcccgtctcgccgagcacgccggcctcctccgcggcctcgcgccgggccgcctcgtccatggactcgtccagctcccacccgcccttggggatcagcacgccccccgcggggcccttcttctgcgagctgatcaccaggacctccacctcgccgtcgcccccgcgcacgcggtacgggacgcagcccaccaccacgcgcccgcccgtgctcgcgctgtaccgctgcagctcccggccttggcgagacaccataactgctgccatctctgtcggtctctgcctcaaattactcgctccttgtgggagaagggggattctctcaatgggagggaggaggatgagtgggcacggcac

SEQ ID NO: 152324 - DNA, 288 bp, Zea Mays
tttttttggatagatggtgttggaaggcagttgagattaacgatttggtcttttccacacactaggttttagggttttcctgtgaggttgtgaaaaactctttatgtgaggaaaaaatatttcataagtaagcatgccatgtcagctagatcgagtggatattgtgaattgtgaactttgagtctatgaacttgttatattgtgaacttgcgatctttgtacactttttatattataaatttgtgatccttgtgaactttttatattgtgaacttgttatatcatgaa

SEQ ID NO: 152325 - DNA, 345 bp, Zea Mays
cacaaaagcaccataattatatattcacaaaagcatcacaattataatatcattcacaactagatcatttacagatagctagctagatcattcacaaaagcactagagatgatcagtcacaaaagcaccacaacgacatcactccagcttgaagcagttcaaaagcccacaactacatcactaatgtttcatatcactccaactattgttcaaaagcccacaactacatcactctagctgctccagagttgcactaatgcttcaagcagttcaaaagccttcagacaaccactccagcttcttgtatcctcctgttttaaggtacaagctttctttgtccagaac

SEQ ID NO: 152326 - DNA, 180 bp, Zea Mays
ttttcttttccataattctttttttcttttctacaattcttttttctttactacaatttagctatcaatgtttaattgttttaattaatttttagtcactaacatctacatgtacgttcatgctataagatttgatagtgatccttgctctatagcgacccaccgctagtccccaaagac

SEQ ID NO: 152327 - DNA, 764 bp, Zea Mays
gaactcgaggccgctccgccacctcaccacatttcccaagcgtgcaggggacaccgcccgtcattcgcgcgctgaggatctcctaccccgccatcaacaccctcctccatcaacggaagatggtcgaggatccgccccaccctcctccccacgccgtcgtcgatggaagatacgcatagcgaagctggaagccctgctgtacaacaaagatggtccgagcagtggatccgaggcaacttcctctgccgtgaaggatctccagtcgaagctagatgtggttactgcagaatgcttgactgaaaaggagaagaacaagaagctgaccatggagaacgagaagctccagtaccgcatgacccatctgatccgtgcgataaaagaggcgtaatcgagataggagcagcccggcgaggccgattcaaagcctgatgtcgaagtgttccccacccgccttgctgatccttcacgttgttcctgcatcaacctcaagctatcattgtgatcttgagttagagcttggtcacaagtcaagactgtattatcaaactgtcgattgaaaatgatgatgtgtgcacaactttctgtcttcacctgaccccatctcgaagggcacattggaacacaaaatgttatctgaaatggcagttcatattttgaaacattttgccccacttcatttatgcataggggcatgttggtgatctactcagctgataatggagccggctggttgaacgcttggagcaaaggaaagaaaaaagaaa

SEQ ID NO: 152328 - DNA, 95 bp, Zea Mays
aaaggataggaagctgaagctggatgaaggaagcaactacatgcaaccgatggcaataatgcattgcagggttgaggctcgtcagaaatgtcaag

SEQ ID NO: 152329 - DNA, 135 bp, Zea Mays
catgagattttgagactgacaatggagaggcgattgacatctgataagctagacatatttcacaatgagtacaggcttccatgcaagttacttctttgtttggtgagaaatcatggcatcttctacatcactaac

SEQ ID NO: 152330 - DNA, 2035 bp, Zea Mays
ggcacgcagctcgcgtggcattgcgttgcgcggcctgcttctctccggtctccaccgcgccgcgatcgacagcccggccagcgagctcctctcctccgccttctcctcttctaccgctcccgatcacgcggccgcgacatggaggacgacgaggggaagaagcagcaccaacggatcatccccaacgccaacggccacgtcatgatcgtggtccccgacgacgcgcacgcgcacgcgctgcccgcctccgcctccgctcctcctcgtgacgccgacggcccagacgaggagagcggggacgaggaggagcggacgccggcgggggccacgtcctcgctgtggcgagcagcggtgctggcgctcgcggcgctggcgctggcggcggcggcctacgcctgcctgtacgcgggtggggacgacgacgccggcgcggcctggcgcctcttggaggcgcggcggcaggaggacggcggcgacgacgagcacccgggcggccgcacgtccttcctgctgccgctctacccgaagccaccacgccgcggcggcgacgactggccgcagaattccacgttattcccgcactcgctcgccggcaacctcttcccggaagggctatactacaccgctatctctttgggcagtcctccaaggccttattttcttgacgtcgacactgggagccacacaacatgggtccagtgcgacgcgccgccatgcgcgagctgtgcaaagggagctcaccctttatataggcccgcaaggacggcggatgcacttcctgccagcgacccactttgtgaaggagcccagcatgagaacccaaaccagtgcgactatgagatcagctatgccgacggaagctcctccatgggcgtttatgtaagggacagtatgcaattcgtcggcgaagatggtgaaagggagaatgcagacattgtgtttgggtgcgggtacgaccagcagggagttcttttgaacgcactagaaaccaccgacggagttctcggcctgaccaacaaggcactgagccttcctacacagctagccagcagaggtatcatttccaatgcgttcggccactgcatgtcgacagatcccagcggtgctggtggttacttgtttcttggcgacgattacattcccaggtggggaatgacttgggtccctatccgcgatggtccagcagatgatgtacgcagagcccaagtcaagcagataaaccatggggatcaacagctcaatgcgcaagggaagttgactcaagtggtctttgacactgggtccacatacacatatttcccagacgaggcgcttacaagattgatatcttcgctgaaggaggctgcatccccaaggttcgtacaagatgactcggacaaaacacttcctttctgcatgaaatctgattttccagtgaggtctgtggaggatgtgaagcattttttcaagcccttgagtctgcaattcgagaaacggtttttcttctccaggaccttcaacatccgccccgaacattacttggtcatcagtgacaagggcaatgtctgcctcggggtgctcaatgggacaacgatcggttacgattcagtagtaatagtcggagatgtttctcttcgtgggaaattggttgcttacgacaacgataagaatgaggtcgggtgggttgatttcgactgcaccaaccctcgcaaacgaagcaggattccttccttcctgcgacgagcgttgcgcaaccaacttctgtaaatactggctactgtgagactggctatgcttgttcttattacagacgtgctattccgcgtctgaattctgaaactgccatggaaccctcctataatcgtcgctgtaatcgtgtggagggatgtaactacgaggtagtaaaaaagcggttacaggacaggaaatagtggaaaggtagataagcatagatagtatatagtcaaaagaggtcatgtttgctatgttgtagagatctctcactttttaagactaaagtggggaagcataatccatagcagttcatttaaaaaaa

SEQ ID NO: 152331 - DNA, 102 bp, Zea Mays
gcgtgtctccttgcgcacgcgtcgccgccgagttctcttccgcgcgctgctcctcttccttcggccaaagatgatgaaaacgtaaactcacaaccatttata

SEQ ID NO: 152332 - DNA, 521 bp, Zea Mays
cccgatcgggcggtttagaaagttagttaatatgcttcttttcttattttagatttagacgtctagaactaatgaacctaggtctgttaatctgttgatgttaggctttaaccaaagaaggtaaagcatatgtataggttgttaattcctaatgtttattttaggtctagtcaagttaagaaaaacattaatattgtacttagtggtatattaatatccaacgttgtttgaagtgttgtaatacctcgtcactaaatatataatcctcttcggtgtagcaataattagtcgtgtgctattcctgtgtatatccgttcatgtgcattgatcacgtgatgtggaggaccagagctgagtcgaccacaagatgctgttaagcgtgggcttcttcgcaaggtgttgctgatggacgaacctaaggatggatgacctgatcaagaaccatgatgaagatgatcgccaagtgaacgttgtctaacaaacactaacgtagtgtttattccaggcaagccccggtgcat

SEQ ID NO: 152333 - DNA, 182 bp, Zea Mays
ttttttttttttttttttttttttttttttttcttttttttttttttttttttttttttttttttttttttttttttttttatgtccttccattgaattcgtttagccgaattttttttttttttatcttatttgtaattcattattctttttttggttttttttttttttttttttttttt

SEQ ID NO: 152334 - DNA, 114 bp, Zea Mays
atcaaacatggatttgaaaagagttgagaaagataattatgataatcatttaattcttttcgaattaaatggtgaggggaagataaataataataataataataataataataa

SEQ ID NO: 152335 - DNA, 256 bp, Zea Mays
gattttgcccatccctttcttattgccatgcctgtcctccaggatccgattttccgtcgttccgtggtctacatttgctaacattataccaagggtgaaatggggatcatcgtcaacatgccgctggaaaatctcaaaaatgacgggactctggaaaagctgaaatcacgccggcacacttgatgaatcctcccttcaatcaaaagaaatgctcttaggacccctaactgaaaatctttgttttatttttcatact

SEQ ID NO: 152336 - DNA, 2342 bp, Zea Mays
attcgagccctgaaatcccaaaagcccaaaccaaatccaagcgcaagagggggcaaagccgcaaagggggaggcaccaggcaccggcagccattacttactggtcctcactcccacaccaaccaaccaacctcctctgcctgccgcttctcctgctgcgggcgggcactgctgcaagtactagaggaggacatccgcttccattactgcgcctgcggaggatcggaggaaccagtagcggaggcttcgattttcggcgggcgcaataaatttcccgcatggctcggagggccgcgtcctcgctcgtctcccgctgcctcctggcgagggcccctgccggcgcgccgcccgctgccccctctgcgccgcgcaggacagtgcctgcagatgggatgcacaggctgttgccaggtgtccttcagaggttcagcactgcagcagcagtagaggagcccatcacgccgtcagtccatgtgaactacacaaagctcctcattaatgggaactttgttgattccgcatccggcaagaccttcccaactctggaccctcgtacaggggaggtgattgctcatgtggctgagggtgacgcagaggacattaaccgtgcagtagctgcggctcgcaaggcttttgatgaagggccatggccgaagatgactgcctatgagaggtcccgtatcctactgcggtttgctgatttgatagagaagcacaatgacgagcttgctgctttggagacatgggacaacgggaagccatatgagcaagcagcccagattgaagtacccatggtggcccgtcttatgcgttactatgctggttgggctgataagatccatgggctcattgtgccggctgatggcccacaccatgtacagatcttgcatgagccaattggtgttgcaggtcagatcatcccatggaactttcctcttctgatgtatgcctggaaagttggccctgctttggcatgtggaaatactctcgtgctcaagactgctgaacaaacccctctatcggctttgtatatctccaaattgttgcatgaggctggactacctgagggtgttgtgaatgtcgtttctggttttggccctactgctggtgctgctcttgctagtcacatggatgttgataagatcgcatttactggatctaccgatactggaaaaattattctcgagttggctgcaaagagcaaccttaagacagtgacactggagttaggaggcaagtcccctttcatcataatggacgatgctgatgttgaccatgctgttgagcttgcgcactttgccctgttctttaaccagggacaatgctgctgcgctggatctcgcacgtttgtacatgagcgtgtttatgatgagtttgtggagaaggccaaggctcgtgcattgaagcgcgtcgttggtgatccgttcaggaaaggtgttgaacagggcccgcagattgacgacgagcaattcaacaagatcttgcgctacattaggtatggtgttgacggtggagctacccttgtgacgggtggtgataggttgggtgacaagggtttctacatccagccaacgattttctcagatgtccaggacggcatgaagattgctcaggaggagatatttgggcctgtgcagtcgatcctcaagttcaagtgagcattatcctcttgtccgctatctgaaactctaattaataaccaagcaatcaagaaatgcgaataaatcttaagaaacagtctctttggttatatataactttcgctgtgcttgaacagagacctcaatgaggttatcaagagggcaaacgcgagccagtatggattggccgccggcgtgttcaccaacagcctggacacggccaacaccctgacgcgcgcgctcagggccgggaccgtctgggtgaactgcttcgacgtcttcgatgctgcgattccgtttggtgggtacaagatgagcggcatcgggagggagaagggcgttgacagcctgaagaactacctgcaggtgaaggcggtcgtcaccccaatcaagaacgccgcgtggttgtagacgctgcaagtgtggccttgtgcacgagaaccacgtatattcatttcctggtcacatccccgaacaatgtgaaggcgttaatcagatagatgacgatgaagaagaacaactataataagatttgccctagcctgggttctcagttatctctaataagttttatggttggtgcctatatattgtgcaatttggttgctcccttttattttgtttctttttgataagactgttctagcaacggatatgcagagttcattatgaaaatgcatttgttagtgtctttgatggttaa

SEQ ID NO: 152337 - DNA, 2219 bp, Zea Mays
attcgagccctgaaatcccaaaagcccaaaccaaatccaagcgcaagagggggcaaagccgcaaagggggaggcaccaggcaccggcagccattacttactggtcctcactcccacaccaaccaaccaacctcctctgcctgccgcttctcctgctgcgggcgggcactgctgcaagtactagaggaggacatccgcttccattactgcgcctgcggaggatcggaggaaccagtagcggaggcttcgattttcggcgggcgcaataaatttcccgcatggctcggagggccgcgtcctcgctcgtctcccgctgcctcctggcgagggcccctgccggcgcgccgcccgctgccccctctgcgccgcgcaggacagtgcctgcagatgggatgcacaggctgttgccaggtgtccttcagaggttcagcactgcagcagcagtagaggagcccatcacgccgtcagtccatgtgaactacacaaagctcctcattaatgggaactttgttgattccgcatccggcaagaccttcccaactctggaccctcgtacaggggaggtgattgctcatgtggctgagggtgacgcagaggacattaaccgtgcagtagctgcggctcgcaaggcttttgatgaagggccatggccgaagatgactgcctatgagaggtcccgtatcctactgcggtttgctgatttgatagagaagcacaatgacgagcttgctgctttggagacatgggacaacgggaagccatatgagcaagcagcccagattgaagtacccatggtggcccgtcttatgcgttactatgctggttgggctgataagatccatgggctcattgtgccggctgatggcccacaccatgtacagatcttgcatgagccaattggtgttgcaggtcagatcatcccatggaactttcctcttctgatgtatgcctggaaagttggccctgctttggcatgtggaaatactctcgtgctcaagactgctgaacaaacccctctatcggctttgtatatctccaaattgttgcatgaggctggactacctgagggtgttgtgaatgtcgtttctggttttggccctactgctggtgctgctcttgctagtcacatggatgttgataagatcgcatttactggatctaccgatactggaaaaattattctcgagttggctgcaaagagcaaccttaagacagtgacactggagttaggaggcaagtcccctttcatcataatggacgatgctgatgttgaccatgctgttgagcttgcgcactttgccctgttctttaaccagggacaatgctgctgcgctggatctcgcacgtttgtacatgagcgtgtttatgatgagtttgtggagaaggccaaggctcgtgcattgaagcgcgtcgttggtgatccgttcaggaaaggtgttgaacagggcccgcagattgacgacgagcaattcaacaagatcttgcgctacattaggtatggtgttgacggtggagctacccttgtgacgggtggtgataggttgggtgacaagggtttctacatccagccaacgattttctcagatgtccaggacggcatgaagattgctcaggaggagatatttgggcctgtgcagtcgatcctcaagttcaaagacctcaatgaggttatcaagagggcaaacgcgagccagtatggattggccgccggcgtgttcaccaacagcctggacacggccaacaccctgacgcgcgcgctcagggccgggaccgtctgggtgaactgcttcgacgtcttcgatgctgcgattccgtttggtgggtacaagatgagcggcatcgggagggagaagggcgttgacagcctgaagaactacctgcaggtgaaggcggtcgtcaccccaatcaagaacgccgcgtggttgtagacgctgcaagtgtggccttgtgcacgagaaccacgtatattcatttcctggtcacatccccgaacaatgtgaaggcgttaatcagatagatgacgatgaagaagaacaactataataagatttgccctagcctgggttctcagttatctctaataagttttatggttggtgcctatatattgtgcaatttggttgctcccttttattttgtttctttttgataagactgttctagcaacggatatgcagagttcattatgaaaatgcatttgttagtgtctttgatggttaa

SEQ ID NO: 152338 - DNA, 99 bp, Zea Mays
atggcccccctgaggcgtgcacggcggcgaggtgggagtggctgcggcatcggatcccgagggcatgcacgcggcggcagccacatgaggtttttatga

SEQ ID NO: 152339 - DNA, 1254 bp, Zea Mays
atgatccattccattcgtggcttcctcaccggagctcgccggagccgccacaccactccgaagatcaagtatgttcgcgctcttgctgccgtcctcttcgctggtgccacgttgtcggttctttttctcggccccttacaatggtggtcccccttctccgcctccacgttctccagtgtcgccgccgcctgcgacctcacgcgaggccagtgggtgcgcgaccccgccgcgcggccgtactacaccaacgctacgtgcgcgttcatcgagggctaccagaactgcatgaagcacggcaagccaagcatggagttcctgcggtggcggtggcagccagacggcggcgagctggagcgcttcgacgccgcgcgattcttcgggctcgtccggggcaggtcgatcctcttcgtcggggactccctggccagtagccacgtccggtcgctcgtgtgcgccttgtggcaggtggagagcccgtcgaggtcgcgctccgagggattcgagtactggcggttcccggcgcacgtgttcacggtcgccttcttctggacgccgttccaagtgcggtggcgcctgacgcggggtccgccggaggcggtcgggcccgacctgcagggagaggtgttcgccggtcccagcgacctccacgtcaacgagcccgacgagcggtggatgccggccgccaaggaccacgactacgtggtcttgtctgcgtcgcactggttcgagcgcccagccgtctattacagcggcggccgtgtcgtcgggtgccacggctgcggcatggccaacgtcaccgcgctcaagccgcagtacgcgcagcgggccgcgttgcgcaccgtgctccgggcgctagccgggatgaaggggttcaaggggaccgccatcctgcggacggtggcgccgacgcactacgggaacggcgggtggttcgacggcggggagtgcacggccacggagccggccgaccccgaggagccgctggagatgaaggagccggatggcgacttctacgaggcgcagttggaggagttcgcggccgcggaggaggacgcgaggaggaacggcgtgcggatgaggatgatggacgtgaccaagatgatgctgcgccggccagacgggcaccccgacaggtacggccatggccaaggcgagcacgaaggcttcgacatcgactgcctgcactggtgtctgccgggaccgatcgatgtgtggaacgagctgctgcttcagatcctggccggccattattag

SEQ ID NO: 152340 - DNA, 926 bp, Zea Mays
ctacatgttagtacctagttatcccttaattggggatgtggacccattggggacccgaaacccgaatggggatgagtatgagatgagttttgtacccatgatggatatggagatgagtatggagatggatcaaacatgatggggatggagatgagatgctataacccggtggggaattcccattgacatctctaaccacacctcttacctaaaataagaaagaaaactagaacctaaaaaccagcgacgccgagcggatctacagccaccttggtcaccggcggcgatggcgagttccaagtccggcatccctatcaaggcagaacaagattcggatggctcggcacaaagcacagctgatatgacggcttttgtgcaaaaccttcttatgcagatgcaaaccaggttccaagctatgtcggagaacatcatttcaaagatagatgaaatgggtgcgagaattgatgaattggaacagagcctcaatgacctcaaggctgagataggcggtgaaggcatgtcgacgccatctaagatgaaggaagagtcaagaccttcagacagctccgcatgagtgcagcagaagcagcatgactcgtttcagaggccgttgctgtgtcttgggcgttcatcactaacaaatacgtacctgttttaaggtctcatttgagcaagagattgtaacccgtgctacttgtgttttgctgaatggtttgccataaattgtacccgtcttcgttctgtgtagacctacccgtggttatgcgctgagcatgtagtgacagctgctagaatgctagcaccccaattactaagaattcgggattcgcaagcataatttactttgcttctgtgttagttttatcacttacatggatagtagtgtatatatttttaattggcttacatattaaattcatgttcgc

SEQ ID NO: 152341 - DNA, 1933 bp, Zea Mays
tctcatgcagaacaacaacatcaccggcccaatcccagcagagattggcaagcttacaaagctcaagacacttgatctctccagcaaccacctgtacggtggaatccccgcttctgtaggccaccttgagagcctgcagtacttgaggctcaacaacaacaccctttctggtccattcccttcagcatcagctaacttgtcccagctcgttttcctagacttgtcatataataacctgagtggtccaataccgggatctttggcaagaacattcaacatagttgggaatcctctcatctgcggcaccaacaccgaggaagattgctacgggactgccccaatgccgatgtcctacaagctcaatagctcgcagggtgctccgccactggcaaaatccaaaagccacaagtttgttgcagttgcattcggtgcagcaattggttgcatcagcatcctctccctcgctgccggattcctgttctggtggaggcaccgtagaaaccggcagatccttttcgacgtcgacgaccaacacatggagaacgttggccttggaaacgtgaagaggttccagttcagggagctccaggccgcgacagacaagttcagcggcaagaacctgctagggaaaggtggctttgggttcgtttacagagggcagctccctgacgggactctcgtggctgtgaagcgactgaaggacggcaatgtcgcgggaggcgaggcgcagttccagactgaggttgagatgatcagcttggcgctgcacagaaaccttctcaggctctatgggttttgcacgaccgccaccgagaggctgctggtctacccatacatgtctaacggaagcgtcgcgtcgcgcctgaaagggaagccgcctttggactgggcgaccaggaggaggatagctcttggcgcagggagggggctgctgtacctgcacgagcagtgtgaccccaagatcatacacagggacgtcaaagcagccaacgtcctgctagatgactgctgcgaggccatcgttggtgactttgggctcgcgaagctcctggaccaccgggactcgcatgtcaccactgcggtgcgaggcaccgtcggtcacatcgcgcccgagtacctctccactggccagtcgtctgacaagaccgacgtcttcgggtttggcatcctgctgctggagctggtcactggtcagaccgcgctggagttcgggaaggcagcaaaccagaagaagggagccatgcttgattgggtgaagaagatgcaccaggagaagaagctggacgttctggtggacaaggggctgaggagcaggtacgacgggatcgagatggaggagatggtgcaggtggcgttgctgtgcacgcagtacctccccggccaccggccgaagatgtcggaggtggtccggatgctggaaggtgacgggctcgcagagcggtggcaggcttcgcagcgcgcggactcgcacaagtccttcaaagtgcccgacttcactttcagccgctgctactccgaccttaccgacgactcgtcattgctggtgcaggccgtcgagctgtccggcccaagatgacaccaaccaccaccaccgtcagtttgcacttgtacagcataaggaccgagaatcatgtgtatattgccatattggagaataaaatgagccatgttagaataactatagtgtgtattagatagatgaactgtacaaaagaagagcgtaaggtttgtacaggtttggatatttacatatttctagcagttgagacagtaataccaagtagacgagctttttactgaaccggaaagcttttgcttgtgttgtcaggttctgttgacccttccctctatatccgtttccttgctgtatatttccagagtgcaaaaggttctgaaatcttataaagtccttagttgatatgagctgcatttc

SEQ ID NO: 152342 - DNA, 2059 bp, Zea Mays
tctcatgcagaacaacaacatcaccggcccaatcccagcagagattggcaagcttacaaagctcaagacacttgatctctccagcaaccacctgtacggtggaatccccgcttctgtaggccaccttgagagcctgcagtacttgtgagcgccaactctacagtagtactagtacatacaagcttctcattaatgctgttcttcaggttttcgcattaaatagttcctgtcctcttgccatgatatgctggattttgttgccatgtccaggaggctcaacaacaacaccctttctggtccattcccttcagcatcagctaacttgtcccagctcgttttcctagacttgtcatataataacctgagtggtccaataccgggatctttggcaagaacattcaacatagttgggaatcctctcatctgcggcaccaacaccgaggaagattgctacgggactgccccaatgccgatgtcctacaagctcaatagctcgcagggtgctccgccactggcaaaatccaaaagccacaagtttgttgcagttgcattcggtgcagcaattggttgcatcagcatcctctccctcgctgccggattcctgttctggtggaggcaccgtagaaaccggcagatccttttcgacgtcgacgaccaacacatggagaacgttggccttggaaacgtgaagaggttccagttcagggagctccaggccgcgacagacaagttcagcggcaagaacctgctagggaaaggtggctttgggttcgtttacagagggcagctccctgacgggactctcgtggctgtgaagcgactgaaggacggcaatgtcgcgggaggcgaggcgcagttccagactgaggttgagatgatcagcttggcgctgcacagaaaccttctcaggctctatgggttttgcacgaccgccaccgagaggctgctggtctacccatacatgtctaacggaagcgtcgcgtcgcgcctgaaagggaagccgcctttggactgggcgaccaggaggaggatagctcttggcgcagggagggggctgctgtacctgcacgagcagtgtgaccccaagatcatacacagggacgtcaaagcagccaacgtcctgctagatgactgctgcgaggccatcgttggtgactttgggctcgcgaagctcctggaccaccgggactcgcatgtcaccactgcggtgcgaggcaccgtcggtcacatcgcgcccgagtacctctccactggccagtcgtctgacaagaccgacgtcttcgggtttggcatcctgctgctggagctggtcactggtcagaccgcgctggagttcgggaaggcagcaaaccagaagaagggagccatgcttgattgggtgaagaagatgcaccaggagaagaagctggacgttctggtggacaaggggctgaggagcaggtacgacgggatcgagatggaggagatggtgcaggtggcgttgctgtgcacgcagtacctccccggccaccggccgaagatgtcggaggtggtccggatgctggaaggtgacgggctcgcagagcggtggcaggcttcgcagcgcgcggactcgcacaagtccttcaaagtgcccgacttcactttcagccgctgctactccgaccttaccgacgactcgtcattgctggtgcaggccgtcgagctgtccggcccaagatgacaccaaccaccaccaccgtcagtttgcacttgtacagcataaggaccgagaatcatgtgtatattgccatattggagaataaaatgagccatgttagaataactatagtgtgtattagatagatgaactgtacaaaagaagagcgtaaggtttgtacaggtttggatatttacatatttctagcagttgagacagtaataccaagtagacgagctttttactgaaccggaaagcttttgcttgtgttgtcaggttctgttgacccttccctctatatccgtttccttgctgtatatttccagagtgcaaaaggttctgaaatcttataaagtccttagttgatatgagctgcatttc

SEQ ID NO: 152343 - DNA, 827 bp, Zea Mays
tcccccaaagccgaacacacttcctcgcgctcgcgctctcgagtcccgactcacctgcttctagccatggaggcgcctccatcttctcccttcctagtgttgctcctgctgttcttcccttcgagcggccttgccgcccccatggattttaaccatgaagtgcaagtccttatggtgatcaagagcctcctcaaggacccctatggcgcgctgagaaactgggacaggaactccgtcgatccctgtacctggtccttcatctcctgctcgccggagaatctcgtcactgcactggaagctccaagcaagaacctttccggccggctctccccgagcatagggaacctgacaaaacttgagaagcttcagctgcagaacaacaacataattgggccaatcccagcagagatcggcaagttagcaaagctcaggacgctggttctgtccagtaacaaattacatggcacagtcccaaattctttaggccgactcggaagactccagtacatagacttgtcgtacaataacttgagtggcccgataccaaaaacgtctgcaagaacgctcaacatagccgggaatcctctcatctgtgctgcagaacaggattgtgacagtaccaagctgaaaccgatgctggattcctatatcgctggtgaacagtaggagccccaagttgggagtcggttaccttgctaaggagtatgtacctaacgaacctcgggtgccgtttggtttcacaaaatgtaatgtaaatgataataattaacactcgtgtgacaacaataataagtttgagtaagttggtatcacaaaaaaaaaaaaaa

SEQ ID NO: 152344 - DNA, 156 bp, Zea Mays
tttgtttctaattttaaaaagacctttttaataaatatcatatttaacaaggttcgttatagatgtttaagtatagccgtattaaatagaaacttaaaatagaaacttaaaagaatatgtagaccatatttttcttaattaaaaatagaagataaa

SEQ ID NO: 152345 - DNA, 714 bp, Zea Mays
atggatttcggtcatggcgacagcgtccgccgcgacggacgagggcgaatccggccgggtttgtttgagcgcgagaagaaagctgggacaagggaaagggtcgcggcggtctccttatatgggggtagggcatggaggataggccggagcataccagaccactccgaggttcacggcgggtttatgaactcgtcgtcggagggcaactcggggtccgccgccgaggtcggctgcgtgggggaggtcgtcaagcacgagcgcttcgccgatgactggttcttcctcatctgcaagggccagcagaggttccgcgtcgcccgcgtcgtgcgcaccaagccctacctcgtcgccgccgtgcactggctcgaggaccgcccgcccgccaagcccccggcacacgaggaggacgccgaggcgttggccaccgacgtcgaggccctcatgcgggatgtcatacacatcaccaaccgcctcaacggtaagcccgagaaggaggtcgaggacttgcgcaggggcctgttcctcacccccttctccttctatgtcggcaacaccttcgagggcgcaccccgcgagcagcaggcgcttctcgagctcgaggacaccgccgctaggctgcgcagggagcgggacacgctgcgcaacacgctcaactacctcaccaccgcctccgccgtcaaggacgcattcccatcctcgccgtcttcggggtga

SEQ ID NO: 152346 - DNA, 1367 bp, Zea Mays
ggtggaggtaaagttctaattccaatgtttgctctgggaagagctcaggattgtttgatttctcttgtgggattttggtggtgtcgatgctggagagtgaattcgaggaacgatgggccaatggagaaatacctggatggggaaataaaggtgcagaaaaaggtctgaaatagatcttgattactacagcacagttgaagaacttgttgagcttggcccagaaaaattaaaacaggctttatctgctcaaggtttgaagtgtggtggtactgttcaacagcgtgcgtatcggcttttcttgctgaaggtgatattaaagacgccaatgctactgtagattcatttatattcacttgtttcgtgttgcagtctttaagattatgtatgcttagaatatactagtaaatttacattcacttgtttcccttgcaggtacttgaatgctatacagacaaatgcacaccatcttattaggtatctagctactacagttgttgtcaacaaaaggagaaggaatatgcttaaagagttgattaaggtcattcaataggagcaccatagctacaaggatcccgtaactgaatttctggaatgcttatatgttaactatgattttgatggtgctcaacagaaactcatagagtgtgagcaggtaactttgaggttgtttttcctgcaattttcaaggcctcaattttgttattcacgtgtgtgcttcttgaattatggaaaaagcctgaaagacaacacatccttttttgtgtgtgcaaaacatccttctgtgaaatgatcctcaaccgtcaattcttttaaatgttccctagtaaaatgatttattcttgatggttcaaaagtttccctattccttggatgtatcatatgcatcggggatgtcatattgaagaatcagtataataatatggactattcggaggggtctttaaatgagcttggaagttggtgcataaggctgcaacaccgtctagtggagggtgttttggacaaagaaagcttgtaccttaaaacaggaggatacaagaagctggagtggttgtctgaaggcttttgaactgcttgaagcattagtgtagctttggtgcttttgtgactgatcaactctggagcagctagagtgatgtagttgtgggcttttgaacaatagctggagtgatatgaaatattagtgatgtagttgtgggcttttgaactgcttcaagctggagtgatgtcgttgtggtgcttttgtgactgatcatctctggagcttttgtgaatgatctagctagctatctgtaaatgatctagtcgtgaatgatattataattgtgatgcttttgtgaatatataattgtggtgcttttgtgttt

SEQ ID NO: 152347 - DNA, 2418 bp, Zea Mays
cccgcactcaccaacagaaagggaaaagaccatcctacccacgccagctccggagttccgacgcaacttcccattccgatccacatcagccccgtcgctgtctctccaggatctggagaccctacccgcctgagccctcagccggccgcgcggtgcggcaccgcaccaccgccaccgagccacgaacccgccggagtaccgacccgcctgcgccctccgctggccgtgcggcgtggcagcgcaccacctacggcgggctgcggcaccgccccggccctcgcaccagttccgcggcgacgtggtccagcagcaccgccaggccgcctacggccatttcactcgcggcttctgagcatctacctgcacttcttcaattacctgcagctttcatcgtatttcctttgcattgcataccgtgcagccacctctgcacatgatgtttcggatgttatcttattattaaaaaactagatttactcatgtttttcttcctctgtcattattgctgatttggtaactaatctttctgtggggtttatgcactgttaatttttccctgtcattttaggtctaatttgtattcgacactctcatcgtagtaactgcctcataggttttgtgccctctgtatacatctctatcggctccatgtccaaggcactgcaccacccttttgttatcaggttttaaaccggcttttggaattgtacacatggatcaatttgtgggagtggaaattagagcagatttctgtgcttttttttttccagcacatctgccagactagtatcatcagcaattgtccatcgcagcataggattggtgctcacgtcgcgacatccaaagccagccacaagataggcacacagcgctgctccgcaccaagaatgacgccaagtgtcacgccctggattcctctggcacccaccctcctattagtactctgcactggacttgcagcgctgtggatccatcactgcaacttcatggattataattttgacaccagcgtcctcgacgaggacgtcgccgggagaggaggcagggaagggagctgcccgccagcatgggccagggcgtgcgacgggtgccgcgcagcccccagcgtggtgtactgccatgcggacaccgcgtacctgtgcgcgtcatgcaactcgcgggtgcatgccgccaatcgcgtggcctcgcgccatgagcgcgtgcgcgtctgcgaggcctgcgagtgcgcccccgcggtgctcgcgtgccgcgccgacgcggcggcgctctgcgctgcctgcgacgcgcaggtccactccgccaacccgcttgcggggaggcaccagcgcgtgcccgtcctgccgctcccggccgccgccgtcccggctgcctctgtgctcgccgaggcagctgccaccgccgcggccgttgctggtgacaaggacgaggaggtcgactcctggctgctgctcaccaaggacccagacgacgacgacaagaaccacaactgcagtagcaacaacaacaacatcagcagcaacaccagcacgttctacgcagacgttgacgagtacttcgatctggtcgggtacagttcctactgtgacaaccacatcaatagcaacacgaaacagtacgggatgcaagagcagcagctcctgctgcacaaggagtttggagacaaggagggaagcgagtacgtggtgccttcacaggtcgggcagcagcagagtggctatcacagagttattgggacggagcaggctgcctccatgactcccggggtcagtgcttacacagattccatcagcaacagcatctctttctcatcgtcaatggaggtgggtatagtaccagacaacatggcaacgacagacatgccaagctccggcatcctgctgacgcctgctggggccatcagcctgttctcgtcgggtcctccgctccagatgccgcttcacttggcctccatggacagggaggccagggtgctgaggtacagggagaagaagaagagcaggaagtttgagaagaccatacggtatgcaacgaggaagacgtacgcagaagcacggccgaggatcaagggacgcttcgcgaaaagatcgtctgatatggatgtcgaagtggatcagatgttctcagctgcggctctgtcgtctgatggtagctatggtaccgttccatggttctgaaggaactttagtgagacattatatgtatcatacagtataataattgtaacatgcgttgaccatatatagtggtaaggtcaagtacaagtagttctaggaaaccgatggtaatgagtgatattgtgtttgttttgaaagataaatgaacaaatatcttagcatttgagttttggtttgtaattgcatgcacatatcaggtctatacagaattttcagtcacttaaacatttttcactgaacagat

SEQ ID NO: 152348 - DNA, 1446 bp, Zea Mays
cgcaacttcccattccgatccacatcagccccgtcgctgtctctccaggatctggagaccctacccgcctgagccctcagccggccgcgcggtgcggcaccgcaccaccgccaccgagccacgaacccgccggagtaccgacccgcctgcgccctccgctggccgtgcggcgtggcagcgcaccacctacggcgggctgcggcaccgccccggccctcgcaccagttccgcggcgacgtggtccagcagcaccgccaggccgcctacggccatttcactcgcggcttctgagcatctacctgcacttcttcaattacctgcagctttcatcgtatttcctttgcattgcataccgtgcagccacctctgcacatgatgtttcggatgttatcttattattaaaaaactagatttactcatgtttttcttcctctgtcattattgctgatttggtaactaatctttctgtggggtttatgcactgttaatttttccctgtcattttaggtctaatttgtattcgacactctcatcgtagtaactgcctcataggttttgtgccctctgtatacatctctatcggctccatgtccaaggcactgcaccacccttttgttatcaggttttaaaccggcttttggaattgtacacatggatcaatttgtgggagtggaaattagagcagatttctgtgcttttttttttccagcacatctgccagactagtatcatcagcaattgtccatcgcagcatagggtctatgacacctgcaacccccttacgattcgcatatttcagtgaccatttgccgattccatctcagatctctttctcatcgtcaatggaggtgggtatagtaccagacaacatggcaacgacagacatgccaagctccggcatcctgctgacgcctgctggggccatcagcctgttctcgtcgggtcctccgctccagatgccgcttcacttggcctccatggacagggaggccagggtgctgaggtacagggagaagaagaagagcaggaagtttgagaagaccatacggtatgcaacgaggaagacgtacgcagaagcacggccgaggatcaagggacgcttcgcgaaaagatcgtctgatatggatgtcgaagtggatcagatgttctcagctgcggctctgtcgtctgatggtagctatggtaccgttccatggttctgaaggaactttagtgagacattatatgtatcatacagtataataattgtaacatgcgttgaccatatatagtggtaaggtcaagtacaagtagttctaggaaaccgatggtaatgagtgatattgtgtttgttttgaaagataaatgaacaaatatcttagcatttgagttttggtttgtaattgcatgcacatatcaggtctatacagaattttcagtcacttaaacatttttcactgaacagat

SEQ ID NO: 152349 - DNA, 1358 bp, Zea Mays
cacatcagccccgtcgctgtctctccaggatctggagaccctacccgcctgagccctcagccggccgcgcggtgcggcaccgcaccaccgccaccgagccacgaacccgccggagtaccgacccgcctgcgccctccgctggccgtgcggcgtggcagcgcaccacctacggcgggctgcggcaccgccccggccctcgcaccagttccgcggcgacgtggtccagcagcaccgccaggccgcctacggccatttcactcgcggcttctgagcatctacctgcacttcttcaattacctgcagctttcatcgtatttcctttgcattgcataccgtgcagccacctctgcacatgatgtttcggatgttatcttattattaaaaaactagatttactcatgtttttcttcctctgtcattattgctgatttggtaactaatctttctgtggggtttatgcactgttaatttttccctgtcattttaggtctaatttgtattcgacactctcatcgtagtaactgcctcataggttttgtgccctctgtatacatctctatcggctccatgtccaaggcactgcaccacccttttgttatcaggttttaaaccggcttttggaattgtacacatggatcaatttgtgggagtggaaattagagcagatttctgtgcttttttttttccagcacatctgccagactagtatcatcagcaattgtccatcgcagcatagatctctttctcatcgtcaatggaggtgggtatagtaccagacaacatggcaacgacagacatgccaagctccggcatcctgctgacgcctgctggggccatcagcctgttctcgtcgggtcctccgctccagatgccgcttcacttggcctccatggacagggaggccagggtgctgaggtacagggagaagaagaagagcaggaagtttgagaagaccatacggtatgcaacgaggaagacgtacgcagaagcacggccgaggatcaagggacgcttcgcgaaaagatcgtctgatatggatgtcgaagtggatcagatgttctcagctgcggctctgtcgtctgatggtagctatggtaccgttccatggttctgaaggaactttagtgagacattatatgtatcatacagtataataattgtaacatgcgttgaccatatatagtggtaaggtcaagtacaagtagttctaggaaaccgatggtaatgagtgatattgtgtttgttttgaaagataaatgaacaaatatcttagcatttgagttttggtttgtaattgcatgcacatatcaggtctatacagaattttcagtcacttaaacatttttcactgaacagat

SEQ ID NO: 152350 - DNA, 2176 bp, Zea Mays
gccactaccaccgaaaccaaatggctctctccctatcaaaaaaattgctagggtgccccggtccttgtctcgcggttcacagtagagcggtggcaccacgtttttcctaatcctcttcctgttctacttctacccatttgttccgtcgcttcaacggcacggaagagaatcgctacccagccaatcgaagtcttctcttgccctgctgtatctcatatcctgttgcgcgagattcttggcgattctgctactggtttttatttttattttgctagttcttgaaatttctttcacgagtgtcagtagccaactgctgataacaacatcctatcgttcctgtagcccctttccgtgaccttgccaaagaatttgctcttctctgtgcgtgtgcaatttcttccgctacagctcaaggatccgctactctgctgttttgggagattcgccatgggcggcggggccgttaacgaccacttcccgggggccagcgacccgctgctccccacgaagcgggatggggacggggacgaggacgacgcaggtgcctccgcgttccacgagttcgacggcgcctccttcgccggcgcggtgttcaacctctccaccaccatcgtcggcgcgggcatcatggcgctaccggccaccatgaaggtgctcggtctcgtccctgggctcgtcatgatagtgctcgccgcgctcctcaccgacgcctccatcgagctgctcgtgcggttcagccgggccgcgggcgcgcgctcctacagcgcggccatggccgacgccttcggatggtggggtaggaggctgctccaggtctgcgtcgtcatcaacaacgtcggcgtcatgattgtgtacatgatcattataggcgatgtgctttctggatccacttctggtggtgagcatcactatggtgtgttagaaggatggtttggaatacactggtggaatgggcgtttatttgttctccttgtcacaaccctttgtgtgttcactccactagcatgcttgaagcgtattgattcactaagctatacatccacaatatctgttgctttggcggttgtattcgttattattactgcaggaattgctgtcatcaagttgataggtggacaaattccaatgcccaagttgtttcccactgtttctgatttggcatctgtttgggaactttttacagcagtgccggttcttgtcactgcttacgtttgccattacaatgttcacccaattcataatgagctaaaggactctacccagattaagccaatagtacacacatcattgacactatgctcgaccatctacatcacaacaagtttctttggatatctcctctttggtgaatctacactctctgatgtgctctccaactttgattcaaatcttgggatcccatacagttcagtcctcaatgatgctgtcagagtgagctatgctgttcacctgatgcttgtgttccccatgatattccatgcattgaggcttaatttggatgggctcctcttcgcctctgcaaggcctctgtcttctgacaacagaagattcggcataattacagcatcgctcctcctagtgatttttgggtctgcaatcttcattcctagtatttgggatgcctttcagtttactggggcaactgctgctgtctgtatcgcctttattttcccagctgcgatcactttaagggattcacaaggtattgccaagaagtgggacaaaattctggcgatcttcatgattgttcttgctgttgtatcaaatgtagtagcggtctacagcgatgcctacaaaatattcaacaaggaaagtgctccttctaatgcctggatcggggagtcaactgaaaatagatcttcgtggtggcttgtacgttagttggccaataaaatattcatagttcatttaggctttgtttttggtgatttgttccacgggccatggtctgctcaaatctcattgagttttgtgtgtatatctacgataggtatgaaaatttgcacaaaccgaagtgctccggtaccataaaaataattgtgtcaaatctgaaattacagagttacgatcatgatgactctttttgaaaaaaattgtatcggatgtgaagtaaccatcgatatctcttgtacgtgctctatgctttagtgcatttgttagaagattaagtgggaag

SEQ ID NO: 152351 - DNA, 411 bp, Zea Mays
tgtggaaccttaggattcagatgcatcgagatgcaagaacatagaaactggacttaacaggtcgacacatacgacctctatgtcattgtgcacatgatgctacacgagttaggcatgagcgtcgagaaggtgcccaagattggtggaggctacaattatcagcctaagcaaccgtttataaggtactggaatgttgatctgtggcagaagctcttctcaaacgacagcgtcgtggccgcgctccagagcctccggggcgtctttttgggatacatgtgcagcaaccgggagctagtcggcaagttgatcgagctgttggcgaagcagaaggcctcctacaccgttgccatgagctgtgacagcccaaacgtctagctcctcgttcgtttccgagcaccactggtgcccgtg

SEQ ID NO: 152352 - DNA, 870 bp, Zea Mays
atctcaatccgacaccacaggctgcacaagatgaaccagctctctcttctccaccgcgccttccacctgcatctcctctctcccgaacgcggtcatggcctcacagccgccgtcatccgagttcgactgccctcctctcaacacaccccacgacagcacgcaaagcgcctcctcgcagtagcacctcacgaaagcatcgcggcagccacggaggagagcagccgtccgcgtcaagagctcgcggcggcgggcaataagaacgacggcggcggcggcggcggcaggacctgcgcgctgccgacgtgggcgctcatcggcggcatcacggcgggggtggccgtggcgctggccctgtccgcgggggccggccccgccctggcgctggggccggagggccccctggtggaggagttctgggacaacatgcggcgttacgcgctgtacgtggtgacggtgagcacaggggtggcgtatacggtgctgcagcccatagtggagctgctcaagaaccccatcacggcgctgctcatcgtggccgtcctcgccggcagcggcttcctcgtctcgcaggtgctcaatgccatggtcggcaactccgacttcatctacatgtacgagtaggtagagcaggccggccaggggatggcgagcttgtggcgctgaggcagccacggcccaccgtgcgcccgcgaattaatggagatggatgcaagtgtgacgtgtcagcgaatcattggcacttatatcattttttcgaaacattagcgatggttctgatgatggagctatatacatgtatagatggtattcgatcgtgtactcaagtttgcttaccttgaacacggcttcgttttccagttagaacagcaa

SEQ ID NO: 152353 - DNA, 486 bp, Zea Mays
atgaacccttccatgccaccgcctccgccgcgtaaccctaattccttttcgtcatccgcctccatgccaccttctccgctcccaaacccctcgccgccgacggcacggccggaggcggcgtccgagcccgacttgtcttcagcggaggtgaacggtcgcgctaaccctagcacatcctcctcgatgcctccgcctccgcctcaaaaacccgccccaccggcaccgcagatggaagcgaaggcggcagaggctgagggaggcgctgtcccgagcccgagcgtgagcggttcgtcagcgaaggaggcgcccaacagcagcggggcctcctccggcaacaacgtgatggaggaagcggccgcgtcgccggtggagcggcagagggctcgcgcgccgtacgccattcccgagtggagcaccgcgccgagccaacccttcttccttgaggtgctcaaggacgggacgatcgttgatcagcttgacgtgtga

SEQ ID NO: 152354 - DNA, 2077 bp, Zea Mays
atgaagattgagcaggaaaaagacttgcagaagcttcgggatgctagaattcagcaagacatgcttgatcgtgaagcttccattttacgtgcaaaaactcaagcagctttggcagagggaatctcatggggtatgacagatgatgcaatagaagagtctgcagaggatgatgcagatgaaattacttggcaaacctacaaaggtcagcttactgatagacaagagaaaactcgtagcaagatagtaaaacgaatggagaagattgccaacatgaaaaaagaaattgatgcaataagagttaaggacatttctcaaggtgggctaacccaaggtcaacaaacacaaattgcacgaaatgaacaacggatgtctcagattatggaggagctagataatctagaagaaactttaaatgacagtatacgggaaagtattggtgctcgttctggaaaggcaaagcgtggcagctataaagcaagtctcgaggaagaagatgacgttcttagtgacgatgatgaattttatgatcgaacgaagaagaaatctactcagaaatcaagtgagcaacaatcggttgagactgctgacagccttcttgagaaaaaagatttcatcaccaatgatattgaaagtaaaacaaaattgctggaagaagagaagcataagctgtctcagagtgatacaccagatctcagggatgaccttgatgcttatatgagtggcttgtcatctcaattagtacatgataagattgcccgaattcagaaggagctctctgatcttcaggatgagctggacagagtagtgtacctactgaaaatagctgaccctacgggagaagcagctcgtaagagggatctaaagccaagagaagcgaaacctccaacatctaatgataatccaagactagaatcaaagaaacaaaataaaattggaaaagctacagctgaggagaaacccaaggattcttctagcgaagtgggcacagataaacctgctaaattacagacagatatctccaagaaccaagaagatggcagcaaacctgcattcgccatgccaaaacctcaatggcttggtgacaaaaggatcataaaacctgaagaaaaccttataaatgaagaaaagtctgatgcagaggaacctgataattttgtggactacaaagaccggaaaattattctttcttcaggcagtgaaaagaagcttgaagaggctgcccctgggcttattttacggaagagaaagtctgctgacgagtcagttgctagcgaggcaaattcatcttcggttgaaagtgaagcatcagttgctgatgctgtggcccttctgcttaagcataaacgtggtctacaaacctcagaagaaatggagaatgagactgaaccatattctagcaagaccgaagggaagaagtcgaaacaaaaacgtgtattgggcccagcaagaccagatttccttgaagccagacaagactctgaaacatgggtgccacctgaaggtcaaactggtgatgggcgcactgcattgaatgaccgtttgggttattgaaaagctcttccagcaacagttcccttgtggagaagtgcagtatcgtgcctatggttttgagcctgtttggggctccatattctgtgaagacaacgcaatagaagttaagaatgcttattctgttgatggcaagtttggtgaaggaactattcattgactttttagggcgctagtgggactgtagctcggctaatcctctcacactctaagggtttgttcggttattttcaatctatatggattggaggggattgatataaattgggagagattttgagtactaggaattgaaaccccatcaattcctctcaatccatttcgattgtggtagaaccgaacatgacctaaagaggatatttaggctataaagaggttcaatgtgttaaggcctattaggtctaggcctactgcacacacacacacacacacatatatatatatatatatatatatatatagggaagaggtaatggaagccctgggcttcccctactaatggaagccccagccaggacgcggtcaaccc

SEQ ID NO: 152355 - DNA, 620 bp, Zea Mays
aattttctttctttatttagtataggacttataaaaattcttttatatatattctaacaaatacaatattattactaagacaataaatcttatttgcagaatattattttaggaaattcctattatttaaataaatgatcttcacacaaggaaaataaaatgaaatggaatccttgcaaacacttataaacaaaattagtaacatatcggaatgtgtatttcaaaaacattattataacaactcaatatttattttattaaaataagattttcacatcaacataaatccaaaaattggatacatcaaacaaaatttatgccttggcatgaattcatcaaacgcttggcaaaattttatctattcaagaaattgtttgattaatatatcaccgtttcattatctaaaaacataaatatttcctttcttctgaaaattaagaatataaactaggttacctttaattgatgaacttaggttgttaccccccgccgctctcgctgtccgctgggcccgccttgtcgatcaccacgactgtaccgcgtcagtgcccgtttctgcctcgtctggtgtcgccgttgcatccacgcccggaacctgcccatgtcccgagctccacctc

SEQ ID NO: 152356 - DNA, 2001 bp, Zea Mays
atggcgctccagctccgccgcttcctcccgcacggctacggccagcgacaccgcgctgtcacccacgtgctatcaccgccgccgccactcgcgatgcttcagttcgaggtgtttcagagatattcttccgcaccctggcccttgtcacctttccgcccttgtgaaatgtgtggggttgcattcaggagcaattcaacaaggaaaatgtgctcgagaaatatttttggggttgcatcacagcccaaaagtagcaccttttttactactggactctctggcaaccgtagctctgtatgtttcagagcgagggacagccgtggaattgctttaaagactaataatattgttaattcacgaccattctcaactatatacagtaaaaagctaaggtttcttattaaaaataagacttcatgcaataatctaaatgtgagaagggaagatggaagtgttgcacatagtttgttttgtagatctgagaaacgccaaagcacagttgctacgtgtagcaccattgctgacgaggcttcaacatctactagtaacagcagcaagagtgttactgattctaagactgacactgccaagatgaggcgttcaagaggaagcaaaaaagaagttgatggagttatgaaagataaggaagtacataccaagaaaaagagaatatcttctagaacttgtatagctgcaacaaagacgactgagagttctagtgcgaagcaagaaaacaagaagactgataattgtaaactgaaaaagggtactgatagtcctaaagagaaaaaagtgaataataggtcaaagtcaaaagcaaaggtttctgcttcttctgtatcttctgaagctgagatttgtatgaaatcctctatcgatggttctggtattgagaaaaagccactggtgccattgtatcctccgagagccaaatcagtcgtggttgtggaatcagccacgaaagcaaaagttattcagaattatcttggggacatgtatgaagtgttaccaagctatggtcatgtgagagatttagcaggtagatcaaaatctgtccgccctaatgatgacttcagcatggtctgggaggtgcctgctgctgcctggacacaccttaagagcattaaagttgcactgaaaggagcagaaaatttaattcttgcatctgatcctgatcgtgaaggtgaagcgattgcttggcacatcaaagaaatgcttgaacaacaaggtgcattgggctgtgatgtgactgttgcaagagttgttttccatgaaataactgagaatgcaataaaaaaggctttaatgtccccaaggtatattgatatggacttggtcaatgcttatcttgcacgccgttcccttgattatgtaattgggtttggcatatcaccacttctgtggaggaagttgcctggttgccaatcagctggacgggtccaatctgctgctttggcccttgtgtgcgatcgagaatctgaaatagaacagtttaagccacaggaatactggacaattgcccaaaagctttatgagggtatcaatctttcctcagaagaaacaactgggttaataacatacataagaactgatgggtttcatatttctgatggagccgcagaagacatccgttcattagtcaaagaaagatacggccagaagtacgttttagaggacactaggaagtatttaaagaagagttatacttctatgaatatgacacttaggagtttgaaatgtctccccataacggaggatactgtgttctacacatctttggttggaatacttgacgatgattctctaaaactgtacactctaatatggaaaaggacaatggcttgccaaatggaagcttctagaactcagatggttggttactccaatgcttcatttttccatgtggttgattttacacttcatgatgataatggttatgaactatgggtgtacaaagttacattgcttaaggagatcttgataagtttaacttggtatgcatga

SEQ ID NO: 152357 - DNA, 93 bp, Zea Mays
attcaagtggatgttggcactcctgaaggagagatgatttttcattcagctgcatcaaagctagacttcaagggataccaatctgtttatgag

SEQ ID NO: 152358 - DNA, 192 bp, Zea Mays
atggtttttttgaaacaaggcccatatggccactatgttcagattggagaggacaaaaagggactgtttccgaaaagggcttccctttccaagcctgcgtgctggttgggcctaaggcttgtaatgggagaacttggagtgtttgagggtggttttggtagaattttctacaagagaacatatgccatgtaa

SEQ ID NO: 152359 - DNA, 498 bp, Zea Mays
atggcgaggggagagcacagggctgggactcgcacggaggctgggctgccgcgctggccgcgccaggacgttgcgccgcgtgacaggagagaagagagggacgcggggaaaggagaagagggaaaggaggagaagaatggggtgctcaccttgatgatcgcggcgagggcaaggtggagcgaggccggcgagctccgacagttcgggcgtggaaaaacagattcgtccatgaaccgagtcttaggttcctacaacagaatcgacatggtggggctcgacctacccaagactgagcttgaaccctataacgcgttgaagactttcatgccgagttgggcagtcaccaacgccataactgggacaatgccaggcatcgagattagaaatatgacggttatgaagctgaacatgatgactcaaactatgaccgagtctagcgggatctggcgcttgaaggcctctcaacatccattgtctagccattcacaggccgcttga

SEQ ID NO: 152360 - DNA, 100 bp, Zea Mays
gaatccaaattcaaatcaaacaaattcattatagaatacatggattggcaccagccttagtcaaacctgcattgctggaacgacttccaaatgtgtttcg

SEQ ID NO: 152361 - DNA, 874 bp, Zea Mays
atggcggcatgcagaaatggaaccgaaccccgtacgcacaccaaagcaggggtcaaagatatagactctgttactctagaagatgcaatcgagcttttgcaatatcccaaaattttgggaaaacatcctgaagatgattatcctgtacttataacacattctaaagttggatacaacatcaagcataggagatctctagctctagtgccaaagagtgttgacccaaagaagatgacacttgagcgtgcgctcaagctactaagcggtaaaagtgtcagacgaattggtcgaccgaaggggaaggttgaaaacaaggaacccatggaatggcattagctgcctgcactcgttacaagatcctaaacgtgtgtggtttgatagtcagtcagccttatatccatgcaaaaaattcagagagaagtcaatattcatagcatccgaggttcagcctttggtgtgcttaactgcttatgatgagagcggagaaggcaatgtgtgacaaagaatctggtcaacaagaacaaggactgtcctccgctaactgataacttatactccctcagtgccaagtgttgttctcgctttcggagtagtcaaatatatacaacgacaacatagtcttttgtcccactgcaagaaaaaggatagaaaaaaacgctgaaaaggtaaatgaaagacggtagagttaatggtaaccctgcctatgagttgtcaggttattctcattctttaacagccatgcggttagagatcactttctcctttctcctactgcttggaaactcagcatggcttcgtgttctattttactgccattggggtccacatttgggactcatgtttgtccggtgaattgagtttctatttttttaca

SEQ ID NO: 152362 - DNA, 1340 bp, Zea Mays
cctctctgctcggttcatcctgcgtcgctcagccctgctcatctccatggcgctcggcctcctgctccatcgcgcccgccgttccctggtgccgctagctcgccgcacccttgctttccccggctgtctctctctccactgctcaaccatggtgaatctctcccagccagccgaggtctcttccctagtgccgccagccaactcaggggagatctggcgctcggccgccctcaactcccagctcggccacctacctccctggattgctgcgcgtccctggctggagttcctctgctcggccgcctgccatggagctcgccctgccccctgtttccatgaccggcgtccttcccgtggccaccgcgccgtgctcctcaagctcggagctgcctctgcccgtttccagtgccacgtcccagcctctctgctaccgctcaccatggacgcccagcagctccttttcttccatcgcgcagcaccagcttccctctcccatgccgacgcgttctgctctctgttgttcccagtccgttctggctgcgggcgcgcttgcctcgaaccgccatggtgctctgcgccccgagctctctgcgtgtcgcgccgttcctagctccctagcgcgcgcgagttcttctgctagcactgctccctgcgtcgcgcccagctctgttgtcgcgcgagctccaccttccttagccgccgtgcctctctgctggtcggagctccagcatgccgcgtccagcccctgcaccttgtttttctctgcgacgtggagtctcctcgccgcgttcggatctcgcctggtcgccgttgtcgctctgctcggcattctgcgcgcccatttccctgctgttgtgtcgaccggagttttctgctcgccagcgtgtcctctcggctcgcttggcctgaattctcatcgcgtcgacgatcttgccgggtatcgtcgttcattgtcgggtcgtgcgtacaacagtcccggatctgtgccgccctggtcttgttgtcgacatcgttcgccgtggctcaacttgctagttcgtcgttatttcatcgtctcgtcttgctgacagtccctacgtgctgtcttcgactggtgttcgcgacgacaaaagcaatcccctagtcgatacccctgatactcggcgaaaagccagaacaagaatcgtcgccagttatgcggagttctagttcatatggaaagattccaagaattgtggatggaagagagagtaaagcttagttcaatgctcgccaggtgttcgatcgaagattttattcggagactgtcgacactctcgcaagctttaagtcggaattaatggacggtaagtggattcgtt

SEQ ID NO: 152363 - DNA, 2502 bp, Zea Mays
atgaccgactagcccatggtctctctccgctccgacgcgcccgacccaccaccacatccctcatggctgccctcgccgacatcgactcctcggcacttccgccgtccgagtcatccaaaggcaagggcaagatggacgaggaggaggaggacgaggcggagggcgcggagaagatgtgcggcatctgctatctcgacggccggcgggccatccgcggcgagctcgactgctgcgcccatttcttttgctttgtctgcatcatggcttggggccgcgtcgagtcccgctgtcccttctgcagggcccgcttccacaccatccgccgcccgcccgtcgccggccggttccccgacgagcgaatcgtctcgatccaagagcgcaaccaggtacaccatcctcagggcaacgggagcagcatagtgggcggagatccttacgtgaacaccatatgcaccgtttgcagcagctccagcgatgacgagctgctgctactctgcgagctctgcgactcagctgcacacacttactgtgtcgggctggggaccaccgtgccagagggggactggttctgcaaagactgcgggacgatcagagatgatcaattgagatggcaggctgagaatcagggtgaatttgagatcagcatggatgttcctggagctgagccagttccagccccctcgatttctggtgttgtggatgaggaccatgatctggaaaggccatatgcgcggagtggtggcggttcgacggatgacccggttccttccatttatgaaattgtgggtgatgattttgctaccagtgcagggatctttaggaggaggattgctgaggatattggatcccagggtacttcagctggatctcagtgtcccagatcgacccagggacgagacaatggtcttgcagcctatcatgctcacattcgtcttgaggttgagagagctagaacattacgcaattcccgcaatcttgataagcgcataagagagctgcgagagaactgggctgctctgcgtgctggttctgtggggtttgctccgcatatgcctgtcagaagaaggaaggatatggctggttctgcttctgttgctactgagcatcaacgttatgcagagcctgtaactctcagttcccgaaatggcgccgctgcagcttctgttccgctgccaatgcccttctctgaggaaactaatacctcactgggccatagtaaaaaagtcttgcaaaaggacacccgtgatgcccgtaaggcatggaaaaggttggagatggctaaatcatctggtgggaggaagacatctaagacacctgcctccattaactgctgtcccccattttccatgggtaacagatcgacttcttacagtccaattgatacaattgtgggacacaagaacgggaatctgcgtagtaagtcttgtcaacaaaattattcaatctgtggtcatgttacaaaagtggaacatacgctgcccacgaataactccagaggatgccatagcttgcctgagaacagtcgtgccttggatcatgagaggatggtttcttcccagaatcgaataaatcaggaaagctttagtggcaaagttgcatcatcgacccacattcaacatgttgaccaagcattagtatctacctttaatacacacagaccagaaaaactcgtatcagacatgctgcatccactaaagtatggttcatcatctggccagtcagctgtgacttcatccctacaattaggatctagtgttggatctgggagccaatccactatgccggtaaaccctgaggaaccttcagctgtttgtgctgaagatattgcagcaaccattgaagttacgaaaagttctagtctggaccagcatgagcgcaagagaaaacacagttcggaaagatgcagtgatcaaagatccaaaagatccaggtcaacctgtaaaattgcaaaaagtgagatttcttctttggccattcgtgagttgaagctactcaagatagacaaaacacatggttctgacagattcaaggaagttgctcggacagcaacacattccatcttggctgcctgcagatttgagcattcgccatcgcaatcccttgcactctcaagacctgtctgcaagcacagccccaaagtcaaacagctgaactcgtcagcaattactgatttttgcagagaatgcttgcataactttgttaaagaagctgtcagtttggcattgtctggcgggcagatggatcaaactggtaccccctgttagattgtagacaaatttgggattctttcttgtcttatcattgtgaatatctcaaagcacaaactagggacaagttgtacaatttatggcatgttaatgcctgtcctgtagtgtagttgccaggtctaatcagtactgtaacaactaacaaaatattctctttaatatgccacgaccatggctgaagtattggagcctaacattggccggctactgaggtgtggttggtgtacctggagca

SEQ ID NO: 152364 - DNA, 1825 bp, Zea Mays
gactcagtcaatctcgccttgctctcctcttcgacccatcgtcggttcctgggatcagcatcgacgagcaggatttttccggctgtggaggattactgctgcttgacaaatccgagcgcaaaggttgcttcctgacgcgttcccccatggcacgagcaggagcacgagcacgagcaggagaaggcggctagaaggttcctgctcccgggcgtgacctctcacacggcatggtcgttgcttcgccggggaggcgcagcggggatggtcgataggagcagggccgtgctcatcggggtcaccgccggcgtcgcggccgcgctggtcgcggcggcgggcgtgcttctggccgtctggctctaccgccggcgggccagcgtcgccgcacggacgcgctccccggagtcgccctcggcgacgctgcgggccggcggcgccggtcgcgccagcctcgactccagcgtctccgtctcggtggtctccgagagcgccgccgactggggccacccgccaccgcacaaacgcgccgcgttctgggcctggagaggcggcgccggccacaacggcagggagccgccaccgctgtccgtctccgggatcccaaaataccattacaaggatctgcagaaggctaccagcaactttaccacaattcttgggcaaggatcgttcggccctgtgtacaaagctgtaatggccactggtgaagtggtagctgtaaaggtgctcgcgagtgattcaaggcaaggggaaagagagttccagactgaggtagcattgcttagcaggttgcatcataggaatcttgttaatttggttgggtattgtgtagaaaaaggtcagcgcattctgatttatgagtacatgagcaatgggagtttggcaagacttttatatggcgacaataaacgaagtttgagctggcaagaaaggctgcaaattgctcacgatgtttctcatgggattgagtacctgcatgaaggggctgttccttctgttattcacagggacctaaagtctgataatatacttttggaccattcaatgagagccaaggttgcagactttggtctatcaaaggaggaagtgtatgatggaaggaagtctggccttaagggcacctatggctatatggatcctgattacatgtccacaaataagctaacaaagaagagcgacgtgtatagctttggcataatactttttgaactgataactgccataaatccacaacaaggtctgatggagtacattaatctggcagcgattggaggggaggggagggttgattgggacgagatactggacaaggacctcctagtagggaacatccctgaagaggttcggatgcttgctgatgttgcctaccgatgcgttaacaagaatccgaggaagcgcccctggatatcagaggtcacacaggccatctcaagactcagacagcaccagctgataaagcatgatgcgataactctgccgaggagtgagaccaggaccgtccttaggaggatagactaccagcacgtggagcttagtgacctcactagcatcaaagaacttacgccgataagggcatcatgaactcgtgagcttgttctagtatgtaggttgctttatagagttagatttggacttggttcggcgatgttgtagctgtttgatgaaagcatcaggtagctagatcgttgaaagatgtcttggctgcaatgagagctctccttaattggagttctgtactgacctgaggtttgaaatcgttgtaaaaaaatcaacagtagtagctgtagcatttgataaaaaaagactttataaactgcatttttaccat

SEQ ID NO: 152365 - DNA, 443 bp, Zea Mays
ggtacctgtcattgaaggagctggaggatcaataactgattggagaggggacaagctctattggcctgttactgcagaatcacaatccacaagttttaacgtggtagcagttggggatgcccgtgtccacaaagaggcccttgatgcgttgcagtggcgctagcgtgctctttagataagcattatactaataaccaactatttagacatttacatgtgatatttgtatgaccaataataagctttacctgtatgcttgttggttggcctcaacctttgcactaataatagacagcttggttgtaaactaccaagcagtggcttgctgtttgcaccaagcagatattatgtcttgggaacgctaaatgtgtgaggtattaccttagtgtgagcttcccttgcacccagcaattcagctccattgtgcagtgcttggggatgct

SEQ ID NO: 152366 - DNA, 1434 bp, Zea Mays
atgtccccctttgttctcacattggggaagatatcaagagaattgtctggaaatgaagctgggaggatatcaagagaagtgtttaagattatcctggatgtcccatctgtgggaggaagattaatgcttgtggacatggctggatctgaaaacatagaagctgcaggacaaacaggatttgaagccaaaatgcagacagcaaaaatcaatcaagggaacactgctttgaagcgagtggttgagtctattgctaatggtgattcccatgttccattcagggacagcaaactcacaatgctactacaggattcattcgaggatgacaaatcaaaaatcctgatgattctgtgtgctagtcctgacgcaaaggaactgcacaagacagtttctactttggaatatggtgctaaggcaaagtgtattgtccgtgttgctcatgccgcaacacctagggacaaaatgagctccgaggagtcatctgtagaggagaactggctgaaagtaacatctaaagcgattgttggaactctttggagtagcgttctaacaagcgagtcggagcagatcgcccgcacacaccgtcgcatggcgcgtttcgagcgttcaggcagacaaggaagcgctgggcacggatgcggagtggcggcacaccggccggtgggagcggggctccttcttcgtcaccggcagcgacacaccgatgatgtgcctggagcacgcagtggtgccacacttagagagagcaccgacgacggttgtggacgcggagtgcgcagatgtggtgtgcggagggagggagagtggacgcctacactaatgggggaaggcagccgcgagaggatgggaagaatcgcggcgcggagggagaggattggcagccgcaaacagcacggagggagcgtatgggaagaatcgcggcgcgtagggagccgcgtccatggatggaagggcgcagagggtgcgcgactgccatggatggaaggggcgacgccatggaaggggaattcgcgtgatttgtgggcgcggctgcagggaagaatcttgcgcgggctgccatggatggaagggggtgacgccttggatgcggctgtaatggaagacgcgaggacatggaaaggggagttgtgggcgcggctgaagggaagaatcggtgagggcagggatgccctggatggagccatggatggaatggaggacgccttggatgcggctgcagtggggcgacgacttgaatgcagggaagaacgggtgcggcggctgtcctcggctacgggcgcgaggacggcagcggcggctgcgggcgcggggaggggaatcgcgggcgggggcatccgtccgtggatctcgccggcctacgcgggatggaggaggaatcgcgcgatgccagaatcgtgcgtcaaaactggtacgtggacgcctacactaaagacataa

SEQ ID NO: 152367 - DNA, 669 bp, Zea Mays
caggagggccagcccttgagcacccgcgggccccaggtgtccccgacggccgtgagctgcacgacacaggtccagagcagcaccgtggtggtggcgcgcaccaaccagagcttcatccgcgaccgcgcggcggcggaggaggttgggagcctgagcttgtcgccggccgccttacaccctgacgccaccttccaccccatggaccatggaccaagcggaagcggagcgagaagcacctagggcgccgggagcgtgcgaaacaagctggggaggctcctcctgggattaaatcggccgcctcctcggcgcacgcggccaatgcagctacgagcaaggcgccaccaacaaccccgcccaggacgccgcccggaagctgagaacgtcaccggcgcccggccgcccgcccgccctcttgctcaggctggcaccgcgcctctacggaacccacctcctcctcctcctgcccagtgctccctggaccggttagcaaaaccggcggtcggtcgcggccgcgcagagatggccaggaggcagcgtgagccgccgtaggcgagggcgggggcgccggagaggaggcggcgtggatctcggggctagcgcaagcggagcgagaaggggaggggagagggaaggaaggtggagcgatttgtggggacgcctagtttattt

SEQ ID NO: 152368 - DNA, 1423 bp, Zea Mays
caatcagtggcctagcacttctgccgaaagccagcatctctatttgttccggcaagcctcctctccaagcttcgaatcgtagagaaaagcaagcccgcggggccgacccggtcggcatccgaacccaacgcctctgagagccttaaaccccgacccgagcctgtcagactgacatcgctcgaccattttcccatttccattcccatcccaattcccagcggtttcatttccacctcctccttttccaatttcgactcgattcgaaacaggataccaaatgcatgatcgatcccacaagccgcagccggcggaggccggcaacggcgggccggctggcgagggcggcggcgggaacgtggatcgggtgctcttcaagaacctcgtcgagatggtgccgctcgtcgagtcgctcatggaccggagggtcaacccggcatactcgcgtcgcgcttcgctggtctacacgccggcgccgcccaagaaggcaagcgatttgaaaagtgtcaaattgccacagagcgtatcagccaaaaagcggagagaccctggtgatatagccaagaagagcaccccagattctaacggcgacaacggttcagttgtgccattatctctgtcaggtgctgaaaatatgcccaaggatgaggttgctgtgctaagcgagcagatcaatgacctacaaaagaagctgcttgagaaggaggaggcactgaggtctgcggagagctctgtgactgagatgaatgcagcatatgcaactatcgatgaactcagacgcctggtggctgacaaagaagctttgatcagatctaccaattctcagttgcatgatgcaaagattatgcttgcagacaagcaagcgtctttagagaaacttgaatgggaggtgaagatgtcaaataaaaaggtcgaagatcttcaaggagatatgtcgaatatgggattcgagataagctcattgatggtatttttcgaaaaaatttcagagaatgtttcaggtgactcttatgatgatataataccatcatcatatgaattagagacacttcaatcaatgagtgaaattgacaagattgaggtcgacaagctagacaaggaaagggttacatatgctgaagctctggcggcagcgagagagaaccctgacgaggagcacttgaatatagctgcggaggcgaggtcaaggctgcaggtccttgtactttagtgtccccttctgattatagcgtttgtatgataatgttgaactgctgatgtaattgtatgtgttggcttgagttgaggtgctcgtggaatccttccggtgattgattcagcactgtaaactgacagctgtttcatgttgtaaccatatttaaggcatgtttgatttctttagtcaccctcctaaattttaggaactaaatttagtccctaaaatttc

SEQ ID NO: 152369 - DNA, 1389 bp, Zea Mays
acttctgccgaaagccagcatctctatttgttccggcaagcctcctctccaagcttcgaatcgtagagaaaagcaagcccgcggggccgacccggtcggcatccgaacccaacgcctctgagagccttaaaccccgacccgagcctgtcagactgacatcgctcgaccattttcccatttccattcccatcccaattcccagcggtttcatttccacctcctccttttccaatttcgactcgattcgaaacaggataccaaatgcatgatcgatcccacaagccgcagccggcggaggccggcaacggcgggccggctggcgagggcggcggcgggaacgtggatcgggtgctcttcaagaacctcgtcgagatggtgccgctcgtcgagtcgctcatggaccggagggtcaacccggcatactcgcgtcgcgcttcgctggtctacacgccggcgccgcccaagaaggcaagcgatttgaaaagtgtcaaattgccacagagcgtatcagccaaaaagcggagagaccctggtgatatagccaagaagagcaccccagattctaacggcgacaacggttcagttgtgccattatctctgtcaggtgctgaaaatatgcccaaggatgaggttgctgtgctaagcgagcagatcaatgacctacaaaagaagctgcttgagaaggaggaggcactgaggtctgcggagagctctgtgactgagatgaatgcagcatatgcaactatcgatgaactcagacgcctggtggctgacaaagaagctttgatcagatctaccaattctcagttgcatgatgcaaagattatgcttgcagacaagcaagcgtctttagagaaacttgaatgggaggtgaagatgtcaaataaaaaggtcgaagatcttcaaggagatatgtcgaatatgggattcgagataagctcattgatggtatttttcgaaaaaatttcagagaatgtttcaggtgactcttatgatgatataataccatcatcatatgaattagagacacttcaatcaatgctgtgcacaaaacattggctcagagtgaaattgacaagattgaggtcgacaagctagacaaggaaagggttacatatgctgaagctctggcggcagcgagagagaaccctgacgaggagcacttgaatatagctgcggaggcgaggtcaaggctgcaggtccttgtactttagtgtccccttctgattatagcgtttgtatgataatgttgaactgctgatgtaattgtatgtgttggcttgagttgaggtgctcgtggaatccttccggtgattgattcagcactgtaaactgacagctgtttcatgttgtaaccatatttaaggcatgtttgatttctttagtcac

SEQ ID NO: 152370 - DNA, 758 bp, Zea Mays
tcaccccacaaagcaagaaacaatccttgcacccctcccctgcgtcaccccaccatatccggccagcccaacgaaaatgtcgcgcgccacagctgcggtcctcttctacatcctcgccgtcgctgccctcagcgcggccgaggcaccggcagagtcaccgaaggcaggcagtcctgccaaggcaccggccgagtcaccgaaggcaggcagtcctgcagctcctgccaaggcacccgagtctgctgccacgagaactgcccccgctaaggcacctcaagccgcctccacccccgccgctgccgctgccccatcgtcgtcgtcgtctaggaagtctggtccagctgccgcgccgaccaccgccgcctctacaccgtcttcttccacggacgaggagttgagcccttcgccgtcggcatccaccgccgaggtggcgtcccctgccgctgatgggcctgctgagggaccggcggctgctgatgcctccggtgctgctacccttggaagcggagctgccatcgctggtgtcgccgctgctgtcgctaccatgatcttctactgagttcaccagggaccgtgtcgtcgagggtgggcacgtagttggctgtgcggtaattgctcgtctggtcgggagggaccaataacgcaagtgttgctttgctttgctcacttcgtttgctcttgtaactttatggggtcaaccgttatataactgaaacgatttgattaattgatactaatgctctctatctgtcatgtat

SEQ ID NO: 152371 - DNA, 907 bp, Zea Mays
atgggggagtatgacaagggcgtcgtcgagcgttgtgccaggaagcagctcctcaccaccggcttccaccggcagctcctcaccaccgggaggaagcagctcgtggagatgctcaagcggtcaccctaattcctctccacccgcgtccacctctaggtccgcgcgggcgagcgatccaacgaggcaccgttctccccatcaagggtttcataacaaatgctgtgaaaagacatatgagacttcaatatcttcttctgagctaagctgtcttggagatagatactttgctacagattctcaaggagacaacaacacagaatcatataaaacatagtaccaaacatgaatggcttcaaggctagcaaatgttcgaggacacttgatctgcaccaatgaggtactacctcgtaacaagattactactccctctggtgtcctattatttgtcgttttggacgagtcaggaaaccttccattacgaccttatttctgcagaagtatgacatcaactttcatctattctctaccaccaaagagatggaaaagcaggttgcccccacccccataacaggtttacctatgttatataaagacgccgtagcaacgcacgtgtaaagatacaaatggatacaccatctggtgtgaagggttccattctttcctgcatcaagttttctgtgcaggttccagataaaataccatacaatggtatatattacgacccacccaaagagatatgttcaaatttttatcttgcatttttagtaaactatcattcaatgcaatgtattatcattttatgattcattaaattatgtggtgttttatatagattgacatttcaagtattttatctattagttttgtcataacaacatatagctcaaatattgattatcctttttca

SEQ ID NO: 152372 - DNA, 1620 bp, Zea Mays
aaaccctttcctttcctcttgttcaaataaagaagacaaaacacccggccagcacacagaatgacaggaagcagcaaacctttcggtttctcgagcgcaatgcctctcgctgcagtgctccttcccctcctcgtcctcggcgcgtcgtcggtgtgtcaaggtcaaggcgctgcgagccacaacatcacggccatcctggcggcgtacccggagttcaccgacttcagcgctgccctggtcagcaccggcgccgcggcggagatcgaccgccgcagcaccgtcaccgtcctcgccgtcgacaacgccgtcatggcgcggctaaaggcgcagaagctgcagctcgacgacctgcagcgcgtgatctacctccacgtcctcctggactacttcgacgccgccaagctaggcagcatccagggcggtttcgcccaggccgctagcctctaccaggcctccggcaaggcgcaggggagcgacgggatcgtcaacatcaccgtgttccccgacggccgcgtggcggcgttcacgccgtcgggcccctccaacaggttgccgaccgccttctaccaacgatccatcaaggaacaaccgtactacatcgccgtcctgcaggtgagggacctgatctggtctccggcgccggcggacggggtgcaggctccaccgcccgcgccgcagcccgacgcggcgccggggttgacggatctgctgtccaagaacggctgcgggggcttcgccagcctcctcgccgcgacggccgacgcagtcaccaagtacgacagcagcgccgccgggctcaccgtcttctgcccggccgacgaggcggtggaggccttcaactccaccttcaagaacctcaccgccgacgcccagctcgcgctcctgctgtaccacggcgtggcggaacactactccgcgcagtctctcaaggcgatcaatggggacgtaagcacgcttgcctccgacggatccaagaacaacaacgggtacaacctaacgatacgtgccgacggggacacagtgaaaatctcgtctgcatctgccagcgccgccacggtgaccaagacgctgctcgacaaggcgccgctctccgtctacctcatcgacgcggtgctcctgccaaggcagcagtctaacgacgaccagggacacactgcgcccgcccctgcgccggcctcctcgcctgcacatgcacctacacctgcccttgcgccggtctcgccgtcgcctgcccctgtaccggtctcgccgtcgccgtcgccgtcgcctgcacatgcacccacacccccacttgcccctgctccggtgactgcacctgcgcccaggcgtcgcccagcgccatcgccagagcacactaccccagctccttcgccagacgcggacggccaaccgcctgcagatcagaagaacaacgcagcaagggacacggcatcttggactatcggcgcggcgctggcgatcgtgtgcctcttgtcgtgaagggtttaaggctttaagcttagatatattgacgccgattgggatccgtcatctcgccgccaataccagtgtacactgaagacaatgtttatgggcatgcattggccaaaataatattattctgcttccgcctgcttaact

SEQ ID NO: 152373 - DNA, 1058 bp, Zea Mays
catgaataatccccaaaaccctaaagccagtgctccttgcaccttgccaccggagcttcccaaagaagcagtggcgaccgacgaagcaccgccgccaatgggcaacaacaacaacacggaatcggcgacggcgacgatggtccgggagcaggaccggctgatgcccgtggccaacgtgtcccgcatcatgcgccaagtgctgcctccgtacgccaagatctccgacgacgccaaggaggtgatccaggagtgcgtgtcggagttcatcagcttcgtcactggcgaggcgaacgagcggtgccacaccgagcgccgcaagaccgtcacctccgaggacatcgtgtgggccatgagccgcctcggcttcgacgactacgtcgcgcccctcggcgccttcctccagcgcatgcgcgacgacagcgaccacggcggtgaagagcgcggcggccctgcagggcgtggtggctcgcgccgcggctcgtcgtccttgccgctccactgcccgcagcagatgcaccacctgcacccagccgtctgccggcgtccgcaccagagcgtgtcgcctgctgcaggatacgccgtccggcccgttccccgcccgatgccagccagtgggtaccgcatgcagggcggagaccaccgcagcgtgggcggcgtggctccctgcagctacggaggggcgctcgtccaggccggtggaacccaacacgttgttggattccacgacgacgaggcaagctcttcgagtgaaaatccgccgccggaggggcgtgccgctggctcgaactagcctagcttctcagttccccgtgtacaataagaggggcggtcgcggcgccgcgccgcgcccttgggttgggccgggcgctatgctgcagtttggtttgtaaactaacgagcctagggtagctggtgcacgcgcgccacctcgccggacgtcgccgtcgtcgtcggcatggacttaaccggcgggccctgttgttatttctcaagtttgtagccaacgcactgttcggtgcgttccataatttaatttaccatgttgctctcgaaatgaa

SEQ ID NO: 152374 - DNA, 485 bp, Zea Mays
cgccgcacccgcaagccagcatggccccatctacacgcgccactctttcccttcccgccgcaccgccaatggcttcgcgcctccgcctcgtcgacccgaccccaagcacagacgcggattccgctcagaacccaggcatctccggcaaggcagcgggtgaaggggagcgagtgggagaggcgaagacgccgcagccgcggcagccggatgtgacggaccttggcggcggcagcgaggtggtctacatccctcggttcgtggctcgggagaaggcgtgggagtggttcgactacctcgacaacgccatcccctggacacgccccgaaatccgcgtctttggccgctctgccatccaggtccgtgccaccttcattacttcccagtccgaagtatcatacccaatatcaagaatgccacatagaatgctgccagaaagatacacctccataatgtataatatcatacttatatgtttatatgtttga

SEQ ID NO: 152375 - DNA, 597 bp, Zea Mays
atgtcgccacatctcactgtctcttctgtctccaattacgttaataaacaaagcaaaaacgtcaagttttgccagatggacattggtagagtgcctagagatgtgtgctatgttgcagatgaagggttgacagatttgagatatagtggccatcagcctcttgcacattcttgggatgaattccccgtgctcaaggacgtcttgaaagtggtccatgaagcccttcccgggagctatttcaacagcttgctcctgaacagatacaagacaggttcagactacgtttcatggcatgcagacgatgagcccctctacgggccgactccagagatagcatctgttacctttgggtgtgaacgtgacttcttacttcggaagaagcctaccaaatcgcaagccacttctggatctggagaagctggtcgaaagcggctcaaggtcgatgcacctcaaaagccacatcattttcttctgaagcatggctcgctgcttgtgatgagaggctacacccagcgggactggcagcactcggttccgaagcgagccaaagtgagctcaccaaggatcaatctgactttcaggcatgtactgcggtga

SEQ ID NO: 152376 - DNA, 680 bp, Zea Mays
gtgcctgtgcctgacttttcctcctcttcgtcccctcccacccgcaaccgcacagagaaaggggaggaggctctctacccagcgcagcccgagcacccctccccccggatcgggacccctgctctgcgcaatccacccatggcggaggaatcaggccgccccttgccaaagtttggcgattgggatgttaatgatccagcttccgcagacggattcactgtcatattcaacaaagccagagacgagaagaagggtgggaacggacaagacactgagtcaccttccaaggacaccaggactgagagggtggaatcttatgctgcaaagccaagcacggtgcgtttctttatttgaactccacctgatgacgagcgagcaccattttcatctcttaaaaacctatgaccttttcaactctatcattaactgtgttcttgtgcttgcagaagaaatggttttgttgtgtgacagccagccctacgcaatcctgaggaagacaactgcatgcgttttggaaatactgtccctttaattttctatacatactatccataagacaatgtaggggtacccagggctccaggatgggctatctcgtaaaactcttgcgtgcgtgtatgtatggtgtgagagaattcacaaagtggacttctggttgtaattcttagtcgtctctctct

SEQ ID NO: 152377 - DNA, 623 bp, Zea Mays
gtgcctgtgcctgacttttcctcctcttcgtcccctcccacccgcaaccgcacagagaaaggggaggaggctctctacccagcgcagcccgagcacccctccccccggatcgggacccctgctctgcgcaatccacccatggcggaggaatcaggccgccccttgccaaagtttggcgattgggatgttaatgatccagcttccgcagacggattcactgtcatattcaacaaagccagagacgagaagaagggtgggaacggacaagacactgagtcaccttccaaggacaccaggactgagagggtggaatcttatgctgcaaagccaagcacgaagaaatggttttgttgtgtgacagccagccctacgcaatcctgaggaagacaactgcatgcgttttggaaatactgtccctttaattttctatacatactatccataagacaatgtaggggtacccagggctccaggatgggctatctcgtaaaactcttgcgtgcgtgtatgtatggtgtgagagaattcacaaagtggacttctggttgtaattcttagtcgtctctctctctctttttgggttggtcacggttctatgatccagcaatccactgaactgtttg

SEQ ID NO: 152378 - DNA, 118 bp, Zea Mays
gcttaaataaaataagagaagcagttaaaatgatgattattcctacattttacatttttgtccttttattaatatatacagtttgtcgtacacaatttagttccagaaatgcaagaaa

SEQ ID NO: 152379 - DNA, 1748 bp, Zea Mays
cggagtactggcaaagtcgcatcagtcaccaacactaatcacactttactagccacaccaacgtatcagctccaccccttcggccacacaacccaggtgatcgaccatgtcctcgccggcaccatcatcggcctccaggtccagccacggctcacgaggctccccgcgcatcgtcctcttcccgagtgctggcatgggccacctggtcccgttcacccgcctcgccgtcgcgctttccgccggccacggttgcgagatctccctcctgacggcgctgcccacagtttcgtccgcggagtcccgccacatcgccgcgctctacgctgcgttccccgccatccggcagctggacctccgctttgcccctttcgacgcgtcgtccgaattccccggcgccgatccattctacctccgctacgaggccctgcgccgctgcgcgccctcgctcctcggcccgctcctcgctggcgcaggcgcgtcggctctcgtcgtggacatggcgctggcctccgtggccatacccgtagccagggagctccacgtcccgtgcttcgtcttcttcaccgcgtcggccacgatgctctcattcaaagcctactttcccacctacctcgacgacgtcggtgccggacatggcgttggcgatgttgacgtgcccggcgtgtaccgcatcccaagttcgtccgtcccacaggcgctgcatgatcccgacaacatcttcacccggcagttcgtcgcgaatggacgggcgctcgcgacagccgacggcctcctggtcaacgccttccacgccatggagccggaggccgtcgaggcactacagggtcgcttcgtgctctccgttctgccgcccgtgttcgccgtggggccgcttatgccggtgaacgacctccgggagacaggggaggcagcgcaaaaacaggggaactatagggcgtggctggacgagcagccgccgcggtctgtggtgtatgtcagctttggcagccgcaaggctctccccaaggaccagatcaaggagctcgccgccggactagaagcgtgtggccaccgcttcttgtgggttgtgaagggcgctgtcgtggacagggatgacgctggggagctcagcgaactgcttggcgaggccttcctgcggcgcgtgcatggccgtggcctggtgaccaagtcgtgggtggagcaagaggaggtgctcaggcacccggccgtggcgctgttcgtcagccactgcggatggaactcggtgacggaggcagtgagcagcggcgtgccggtgctggcgtggccaaggttcgcggaccagcgagtgaacgcccgcgtggtggtccgttgcgggctcggcgtgtgggctgatcagtggagctgggagggggaagaggcgctggtgagagcggaggagatcacagcgctggtgatggaggctatggaagatgacgcgatggcagtgaaagcggcgaatgtccgcgaggctgcgtcgagagccgttgtggacggcggcacgagctaccgaagcctggcggcgttcgtgcgtcgttgcaccgcatgaagttatataaaaattacttatataacttaacttcacggtctataaacttttaaaatatgcctattcagaacatattctatgttcagaactttagatctttcttaaatacaaaccgtaagaaagagaataggaagaactgttctcgctatgtactttatgacgtcgagtacaaatatatatagattacaaccaaatatcatgc

SEQ ID NO: 152380 - DNA, 1118 bp, Zea Mays
caccatgcaccacaccccgcatctcctagccccagctagatctttggacacatatcgaaacagctctagctagcgcgctcgtcgtctaacctggcttccggcatggcttccaagcagatcggagtcttgacctgcttcattgccatcaccgctctcgccttccgtccctgcgcatccgccgtgcccatggacggtggctggtcgaacggcggcgccacctggtacggcccagccaagggcgctggatccgacggtggtgcgtgtgggtaccagggtgccgtcgaccagcctccgttctcgtcaatgatcaccgccggcagccaatccatcttccaggacggcaagggctgcggcacctgctaccaggtgaagtgcaccggccacgagtcgtgctccggcagcccggtgacagtggtcatcaccgacctgtgccccgacgctacgtgccaggtggagcccgtccacttcgacctgagcgggacggcgttcggtgccatggcgaagcccggccaggccgacaagctccgaaacgccggccgcctacaagtccagtacactcgggtggcgtgcaactggaacggcttggacatcgccttcagggtggacgccggctcaaacgccaactacctggccatggccatcgagtacgagtccggggacggggacctgcgcgccgtggagctgaagcagagcggcgcggcggcgtgggcgcccatgcaacgctcctggggcgctgtgtggcagtacaagtccggctccaccaatctgcaggcccccctgtctgtccgcctcacctcgggctccggcagggtcctcgtcgccagcaacgtcatccccgccggatggcagcccggcagaacctaccgctccgtcgtcaacttcggaggaaaccatgcataacgagtggtattaagatatcgatcgtctgcagatgtctccatccaacaataagatgcatgcatatatgatctgtgtggccagctagctgctagatcatctcacttcctgagtgtgctgatgctcagccaataaagaatcattccatctgtatcggaaattcaacatatataataatgcaagcaccggaaataaaattctactgtgttctgtgacgacgt

SEQ ID NO: 152381 - DNA, 575 bp, Zea Mays
cacataaacacaaaagcaccacaattatatattcacaaaagcatcacaattataatatcattcacaactagatcatttacagatagatcactccagcttgaagcagttcaaaagccacaactacatcaatctagctgctccagagctgatcactcacaaaagcaccaaagctacactaatgcttcaagcagttcaaaagccttcagacaaccactccaacttcttgtatcctcctattttaaggtacaagctttctttgtccagaacaccctataaaaaagtacagcaaattagtgcgaggcaaaacttatgcaccaacttcagaatatttaactacatcaaattagtgcgaggcaaaacttatgcaccaactttttacaatcttccctgtttttctagaaaccatattttccttgtagtctattcaaacttgaggaggcaatgtatgattagataatcaatactataatgttgtgcctaacaagactcggctttgagttggtgattaagaaaacattcagcatttctttttatttatattgtaatgacatatacaaacctaaattacacatacc

SEQ ID NO: 152382 - DNA, 757 bp, Zea Mays
aaatttgggtccttgtggtaattaatccaagaagaattggggtaggaatgctatagcaaagtgaaagaccatgtcaaggagagcaaatgtcatgagttggcttgctactgtaaagaatttacacaaaaaggagttgaaaaactctctatcggattaaacatgtgctgtttcagacttctaaaattggaatgtttcagtgtttttgttatgttttggtgcaccatagcttgtggtttgtatgattttgaccttggactgctgtagcaaactggtagtgctatggtttgggagcaggtttggctaactaagttggtctggtgctataaaaaacgatgagtttaagggacatgtacaggagggttcaggtggacaataaggtgtaattaggagtacttaatgttatcctctttgtaactgcataagcataaacatccatgatcatgtcatttcatgtagaactcccagcagaaggattaaagattcaagctgaagtggcgactgaagaggaatctactccagtgcttgtagagggatctagacctcttcactgcaacaaaggcaagccccgatgcatgcaaccccatccttgtatttttaaaagacttatatacattttaagtctaatgaaatgtgcattaagtttttaggagttgcatggaaactatttgatgcattgactaccttgatattcattcctgttatagatacttctttggaagtatcaaatattgtttacaaaaattgcttagtcctgcct

SEQ ID NO: 152383 - DNA, 2396 bp, Zea Mays
catggctgtgccacccacactaatcacccccccaaatcgaccacccctccctctccctctcttaagatcgccggcgaggggagagccgagaggcgcagggcagcccccgccgacgcttccgctcccgctcccgccgctgccgcagccgcagccgcagccgcagccgtagcggcattttgtcgagcatatggcgctcgtgcccagcggcggcgcgggcgcttgcaaggacgaggccgcccttgggctcccgtggtccgaaatgttccgctccgcctcgcgccgccggcccaagcaggagtccgacgatgcgccgcccaagaagcccgcgctgaagacggcgggtgccaaggagatgaaggccaagccgtcgtcggtagggactggagctggggcaggagccgacatcgcagggctgtcgctggagcccgacgcgcgcctggcgctctacatcgccatggcgcacgcgggcctcgccaccgcgctgctcgtgctctacggcctttacctgctgctcgccgacttcctccgcccgctgcagtgggcgttgctctgctccgtcccgctccgcgagacgcagcgcgcgctcgtcgccttctgggagcccccgctccgtggcggactcagcgccgcactgctcgcgctgccactcgctgtgctccggtcctcgaccgcaacgctcgccgacgcgcgcgccgcgctcctgcgccgcccgctcccgtcatcgccggcgttcccgcgcctcctccgctggctcgtctccttctttttcttcctcatcctcttcgagcgcctcggcgccgccaccgcgctgctgctcctcgttttcgcgctcgcattcttcgccgcgtcccccaagctcaaacgcgctgcctcctcacgcatctccggtcggcctccctcctctcgcggcctcctattaactggaggcatcctccgccaccttaagacactagtcgctcttggtctcatgcttggtatgatcgctgggttcataactggcagcatcttcttctcctacaagattgggctagagggcaaggacgccgtcatgtccctcaagtcccatgtcgagaagagcaactactcagagaagattggcttgaagaagtggatggacgacaatgacattcctggcttggtcgatcagtattctgccaagatctatgacaccttgtgggagcaggtcgaccaattggctgtgcagtacaaccttacagatttcactagtggcttccggcatttcttgatcagccaatcagttgaccccaaaagcaaggcgctcatcagttccagaccgcacccatactcaatgaagttgcaatcaattgcgacacgtgtgagaaacagagaatgggtggagatttactgggagcttgactcattctttagggagctgttaatcacaagagaggatttggtcatcaaggccaaagagcttgctttgcagggaacagaaatcgcaaagaggcttctgtccagcagcacatcggtgctgggcggtagtgccaatttgatgttgtcaatcaccctccgcattgtctcaggtgcggctgaggttgttaatttcctgtcacaactgatggtgttcttgtgggtgctgtattaccttattactgtggagggaggtggagctacagagcaaatcattgatcttttgccagtgtcaaaacaagtaaaggaccgctgtgttgaggtcatggatcatgccatcagtagtgtattgttggccactgccaagattgccatattccagggggggctgacatggctattgttcaagttcttcaaagtgcattttgtgtacacatcaactgtgcttggattcataagtgcacttgtgccaatacttccattttggctgtcctcgatatttgccacagggcagcttctcatggaagggagatatgttcttgcactggtggtaactgtgatacacctcatgctcatggattatggcacaactaccattctggaggatatacctgggtacaatgggtatctcaccggcctcagcataattggtggcatgacactgtttcccaatgcactggagggtgcaatattaggtccccttataatgacggttgttatagcgttgaagaacttgtacacagagtttgtacttgctgatggagaggagacgagcagctagcatcagatgcaaggctaaaatgcttgtgttgccaaagaaatacttgtgtagggcttctacatgcaatgttgcatgatggttttgctcttgtaccatgccttatatgcacagctattgcagcagttgtgagctttccttgttaatatctattggatcgttccatagacttggttttgatatctgccgatgctgaatgacctctctgtccaattgaaccggaagttgtgcagtattttttcttttc

SEQ ID NO: 152384 - DNA, 3545 bp, Zea Mays
tttttttttcaatcccaagtgttcatcagctccagttcccaacctgagcagcagcaatcagaagagaaggcgagaaaggaaaccgggttgtttcggttccattttgattcgactggaggagatatacgcacacccaaatcgaatacatagtaggggggatgaggctggtggtgcgcgtcatcgaggcgcggggcctcccgcccacggacgccgacgggacacgggagccctacgccaaggcgcagctcgggaagcagcgggccaagaccaaggtgatgcgcaagacgctctgccccgtctgggacgaggagttcaccttccgggtaggggacctcagtgacaacctcctcgtctccgtgctcgacgaggaccgctatttcgccgacgacgtcctcggccaggtcaaggtgcccctcaccgccgtgctcgacgccgacaaccgcacgctcgggatgcagtggtaccagctgcagcccaagagcaagaagtccaagctcaaggattgcggagagattcatctcagcgtttctctggctcaaaactactccgacgagacaacggcacattgggcctcagatgaccatgaccttgcatcgaattcagacaaatcaactgaactggtgaaaggatcttctttctcaaatattcctatagaggtacgcacacaagtatcagaggtcgatgagacagaagttgccaaggaggataaatcaaacgctgccccatcatttgtcaacaagctatatcaaatgtttaatagtaaaccaaaagatgcagaagcttctgctccatcttcctccaagttgaacgacgcttcagatattaccgaagaaatgctgtcaaccaactctgaagctcctgataagcaggatcttgatgccagtgcatctatgtccttcgatgagctactgaaggcctttggttctcgaggtgaagggaaagaaatgcctgaaaatttgtcaggtggagttgttcttgatcaagtttatgctgttgcaccgagtgatttgaacacacttcttttctctccaagttcagactttctgcaatcacttgcagagattcaaggaactacaggtcttgaaattcaacagtggcgacttgaaaatgacggtgaaatcctgaggagggtggtaagctacacaaaagctcctaccaaactagttaaggctgtgaaagcaacagaagacatgacatatttgaaggcagacagagagatgtttgcagttttagcagatgttagtactcctgacgttccttttggcaatactttcagagttgaggttttgacctgtataataccaggacctgaactaccagatgacgaaaaatcttcacgacttatggtctcttggcgcataaattttgtccaaagcaccatgatgaagagcatggttgaaaatggagcaaaacaaggcttaaaggataactatgttcaattctctgagctgctggctaaaaattttaggccagttgatgcaaaagatacaacatacagtaatgaagtcctttcttctgtgcaaccagagcaagaatctgactggaagctagcgtttcgagtatttggaaatttcacacttttttcctcagtttttgcatttgtttatgtttctgcacacatcttccttacaagccctagtataattcaaggtcttgagttcccgggcctggacttgccggattctgttggtgaagttgtagtttgtggagttcttattctacaaggacagcgtgtgctaaatatggttgcacgattcatccaggcgaagaggcagagaggtgatcatggagttaaagcacaaggggatggctggttattgactgttgctctcatggagggaactaacatggcagcaaccaaatcatctgattactctgatccatatgttgtatttacatgcaatgggaagacaaagacaagttcgattaagtttcacaccctcgagcctcagtggaatgaaatttttgagtttgacgccatggaagatcctccatcagtgatggaaatacatgtgtatgatttcgatggaccgttcgacaaagttgcctcccttggtcatactgaagtgaatttcttgaaatataataatatatccaagcttgctgacatttggattcctctgaaaggaaagcttgctcaagcatgtcagtcaaaattgcatctaagaattttcttaaacaatacaaggggtactgaagtagtgaaggattacctggacaaaatggagaaagaagttggcaaaaagattgctatgaggtccccacacacaaacttagcattccagaaaatattttctttgccaccagaagaatttcttatcaattattttacttgtcacttaaagaggaaaatgctaacacagggtcgtctttttctatctccaagaatatttgggttttacacaaatatttttggccacaaaacaaaattcttcttactttgggaagatattgaagacattttactggtccctgcaaccctatccttaatgggaagtccatctctggtgattattcttcgaaagggcagaggaatggatgcaaagcatggcgcaaagcaactggacagtcaagggagactaaacttccatttccaatcttttgtctcattcaatgtggcacataaaacaataacggcactgtggaaggcaaggtccttgacccctgaacaaaaggtagagcttgtagaagaggaatcagaaacagaagagttccaaaacgtggaaggagaatctttcttagggatagaggatgcccaaatgtcaggagtgttctcatccacaaaaccttttgatgtaacaacactcatgggcatatttgagggtggtcctttggagtgccgggtgatggagaaagttggctgtatggactactctgttacagcatgggaacctgtcagagctgatatttaccagaggcaagttcattataaatttgacaagaaatcagtacggcatggaggagaagcgatgagcactcagcagaagtcccctttgcctaataagaatggctggcttgttgaagaagtgatgacgcttgaaggtatccctgttggtgaatgtttcaatctccatattcgataccaactagagaacaatgtatccaagcagaagacttgcactatccaggtatctattggcatagtatggttaaagaactgcaagaaccgaaaaaagatcacgcatgatatagcaaccaatgcatcttctcgcctgaagaagatattcagccaatttgagaaggaacctataccagcaaagtaggaaccttgtttttgtctgcgtcctacttttgctgctgcacatatgctagcactatgtattttcttgctgcccatgctgagcaaagatcagggacatagtgaggaagttgcaacccaaggcaaagccctcaagaagacttttataaagcaaccgtattgcaagattttagattagagaactgtacagcctggaatgtggtttagcttaaccatgtatacataacattcaaacattgtttttgacttctacaaaaaggtaagaggatatgaatttctgaatctt

SEQ ID NO: 152385 - DNA, 634 bp, Zea Mays
tcataaacccccctccttcatcaccttgcctacccgctaaacctattcgacccatcaacgaacagatccaccctcaccagccgcctgacgttcgagccgcaccagccctaaacccttccacctccagccgccataactgtaatcccttccaccatcagctgcccctccgttcgagccgtcgacgccctaatcctatcaccttctggccgcccaaatccctttcggctcctgccgccctctgtttgaggcgcaggccatggagtcgtcggtcttcgagtgccaggccatggagttgtcgatcttcgagtgccaggccatggcggcacagaccatggagtcacaggctatgatggcgcaggtcttagtctttaggccatggagtcgcaatcaggcgttcaagatgctctgagacttgagtcaggtttttccaacatgcatgatggattcagtacaccaaaaaaatgaatatccttctgacatcagtgagctgctctttgctttggtttgttctgctgccatattgataaattcatgtagtgcctcgttacagctgtccatctgtgtacttgattgtgatgataaattgaagccagtaattagatagtcatttggttctctagaggaagtggaagaa

SEQ ID NO: 152386 - DNA, 745 bp, Zea Mays
tcataaacccccctccttcatcaccttgcctacccgctaaacctattcgacccatcaacgaacagatccaccctcaccagccgcctgacgttcgagccgcaccagccctaaacccttccacctccagccgccataactgtaatcccttccaccatcagctgcccctccgttcgagccgtcgacgccctaatcctatcaccttctggccgcccaaatccctttcggctcctgccgccctctgtttgaggcgcaggccatggagtcgtcggtcttcgagtgccaggccatggagttgtcgatcttcgagtgccaggccatggcggcacagaccatggagtcacaggctatgatggcgcaggtcttagtctttaggccatggagtcgcaatcaggcgttcaagatgctctgagacttgagtcaggtttttccaacatgcatgatggattcagtacaccaaaaaaatgaatatccttctgacatcagaatgatatatgtgttctctgtccactgatgcggctggagcgtcatgtcaacggctcaccctccccctaacaaattaaactagactgatgagtggagcttcatgttgggatgatccatgcaccttttaagttttggaacgtcgtactcaaatgtagcttgtgttagttgaacctatcgtactttcttttggaattaaattatatgatatttaaacatgtttgatgtttaatacttgtgttggatgctttatgcttcaaatata

SEQ ID NO: 152387 - DNA, 869 bp, Zea Mays
ggtgaagtcgaaaggtttcagacttagtaggactaagaccgagtacatgatgtgtgatttcagtgcgactagacataaggatggagatgttacctttgatgggcaactggtggctaaggagtattttcggtacttaggatcgatgctacaaaatgatggttacattgaagaatatgttaagctagaatttcagtcggttgattgaaatggtgtcatgcttctagcgtcctatgtgacaagagggtgccaccaaagtttaaaggtaagttttataggacgacaattatgtccaacgatgttatatggtgccgaataatgatccacaaaaaaggcgatatgtccagcaactgagtgtagcagagatgtgtatgttacattggtttgtgggtacacaagaagggatatagtctgagaaaacaaagatattcaagatagggtcagagtggcaccaattgaggagaaattaattcaacatcacttgatatagtttgggcatgtccaaaaaagacctcctagagcgccgatgcgtagaggccttttagagcgagtcatataggcgtcaacctaaaatgacttgggatgaggtgattaaaagagatttaaggagtgtaatatctccaaggaattagctaaggataggcgtgcttggagactagccatcaacatgcttgaactatgatctttgtctatttttgtttaccaactctaccgtctttattttaccatttcagtgtcttttttcctatccttgtttctcgtggatttcatctctagcctacttggacaaaaaggctatgttgttattgattatgctgacttcaatatgctagataaggatgttgtatcaatgaacaattatatacaggatc

SEQ ID NO: 152388 - DNA, 507 bp, Zea Mays
atggtggccaggtggggctgctcgaggaactccacggcaaggcggggatggccggatttggggcgaagaagctctgggcgagcaggggttgggcgaattgggtctggcctggagctggactgcgtgggggagagctttatgcgcctagggaaaggaaggggtggcgctgggcagaggaggccaactgggagacatggcgccatggatctgatgggggaaggggcgcctgcaccatgggagctcggatctagcgtagcacggtggggaagaaggctgatcgagctccacggtggctacacgaacctggctgcggacaagcgcgcaggagctatggcctgtggcctggcgttcaggactggtgcttggagggaaggagctcgccgcggcaagagcagggaagggggcgcacacgtctgggtgcccagggagaagagcgccatggaggccgatgtggaggtcgaggtagggacctcaggcttggccatgggagagagggcaccaagctga

SEQ ID NO: 152389 - DNA, 3374 bp, Zea Mays
cggagacgaagaagagaaccgaagaaggttccctcacttcccttgcctcgacgcgcccaaccacgccacgaagccacgcgcccgccggcggctcacctttcccgtcccttcaccttccccttccccttctccgttcggtgaaactgcgggagaccctcgcggcttccccacctcgacctccaaactctaaccacagacgcatcgaaaaccctcggtgcccggccgatggggaggaggaaggagcgccgcctggctgccatggccgcggcgggccgcagggtcaagctggacctcttcctcgatctcccccccggggaggcatcacataatgatggaataggaggtgaaaaccgtgaccaacagactgtggttcccacttcatcttcaggtgggtttcatcaatttccttccaagggatatgtaaagaagacatacctatggattattgaacataaatatggtggaaatttggatttgtgtacaagcttgtattcctccgcaaatctggttctgagatacatgtagggttgctggcctgcaaggaacattgagtaaattctactgagctgccactgtcaaaactgagtgaatgcctatgggcaatttctcatttggcagcatctaagcatggggatttctggatgtgattgttccctcctcgataaaaaggagaatcctctagcattgcttgggcaatatagtgatgatgaagaggaaaatgaggaaacaacagatcaacccactgatgaagctaagaggagtcctggagatgctagtgctaagttatctagtccgtgtgtggatacagctggtaataatggcgtggcaagaactgaaccatcggtttctgtcggtgatcaacaagaagcacctcaagctggtgatattaagaactatacccaaagtgttacagaaaacactattgctcccgagccaattctacaagacgagaatgtgaaatcaactgaatctgttcctgattcatctggcatgcaaattgttggtgaagtcggtggaaattggagagcaataatgcatgaacagagtaatcaatgttattactggaacactgttactggagaaacgtcttgggacataccaaatggattagcttcaggagctgcgactgcatctgttccttctgatgtgggctattcaatagaagctcaagcccatgttcttcctcacagcacacttgaagcgtacccaagtgacatgtctgtcgggaatggcacatcaacttttgctaattttggaatggcatgtggaagtgcacaggttactcaagatgcttacgcttatgctgctcctatcgccagtcatgagcctatggacattgatcccttgtatcttgcaaaatatggtgatgatttgctgcaaagattgaacctgttggaaaggctctgtggcttgaatgaaggtcttgaattgataaggagagaaatcgggatacggatatcagactgcaatgcactttcatcgtatgggtcttctttgctcccgttgtggatgcatgctgaggtgcaccttaagcaactagactcttccatttctaggatggaaatgagctaccatgcagatacagaacataggaattctaagacagaggttgttgaacacaatgcacctgatggagctgacctgacaacaccctccaatggtgaggctttgaaatctgaggttagtcctgggattactatcgatgaaaatgtggagattgataagccaacttcgatattatctgctcaggattcacaaggtagggatattgcagcagttcctccaaaagttgaatctgacaatgaccaagatatggatgtggaaatggaagttgatgaagataacgtcgaagagcaggcacattgcagttctgtacctaaaaaggagcatcctccatcagaacagttgagttcaactaatttgccatcatttgaagatcctacacctgaggataattctgtccctccgcctccaccagaagaggaatggattccacctccaccacctgaaaatgaaccagctcctccagaccctccaaaagagccagctgcatcatatgttcaggtggatgccattcctcagccatatatcgctcaagaaaatgttgggtatacaatttcaggaatggagtactatggtattgtaggtacagaaggtacaaatgccaattactatatgcaagtgagtgagcctcatgtccttcaagcacaacagcattcttattatgcaccagtatctgggagtggcgtatctgtttctgttgatggcacatctattgccccagaatcttattatacccatccttcagtcactatggctgccagcgcagtagcagctgaacattctgtatactatgcttcatcaatctctgccatttctagcagcgcagcagatatcaaaacaagctcagcttctcttgtttctgcaaatagcaattcagatctcaaaggtcctgataaacttatatccaatgatgcgagtattgtacctttgacccaagctgtagtagcaacatcaggcgcaggaacgccatctgtcctgggaagttctacacagccttctagcagtactaaaaatctgaccaaagttactcgtaacaagaagcgggctgttggtattacctcgtctctgaggtctaataagaaagtttcaagtttggtggataagtggaaagctgcaaaagaggaacttcgcaacgaagaggaagaggagcctgaaagtgctctggaggcattagaaaggaagcggcaaaaggaaatagaggaatggcggaaacaacagatagctagtggagaagctcaggaaaatgccaattttattcctgttcgtggtgattggcgtgaccgtgtcaaacgcaaaagggctcaagcaaaaaatgagtcaaaagatgacattgttgctgcatctttaggtagttccgaacagcataaaggacctcctgatctagcagagctctccaaggatcttcctactggttggcaggcatacttggatgagtatactaagcaagtctattatgggaacaacctcacgtcagagacgtcctgggagcggccaacaaaatgaaaatctacagccttgtgcggtcacgaacagtaggataagggcatgtttgtttggaattctaatgtgttcggattatataatccaatatattttgaactacttaggctctgtttatttcccttctagattatataagctgaattatggtgaaaggttaagagggtaaaataacacattgggatcataaataaactaaaataagctactcaatactagcttatttcagcttatttatggtcctacagtgatattttatcctcctaccctttttattataatccaacttatataatcgagtaaacaaacgt

SEQ ID NO: 152390 - DNA, 2720 bp, Zea Mays
gctgccactgtcaaaactgagtgaatgcctatgggcaatttctcatttggcagcatctaagcatggggatttctggatgtgattgttccctcctcgataaaaaggagaatcctctagcattgcttgggcaatatagtgatgatgaagaggaaaatgaggaaacaacagatcaacccactgatgaagctaagaggagtcctggagatgctagtgctaagttatctagtccgtgtgtggatacagctggtaataatggcgtggcaagaactgaaccatcggtttctgtcggtgatcaacaagaagcacctcaagctggtgatattaagaactatacccaaagtgttacagaaaacactattgctcccgagccaattctacaagacgagaatgtgaaatcaactgaatctgttcctgattcatctggcatgcaaattgttggtgaagtcggtggaaattggagagcaataatgcatgaacagagtaatcaatgttattactggaacactgttactggagaaacgtcttgggacataccaaatggattagcttcaggagctgcgactgcatctgttccttctgatgtgggctattcaatagaagctcaagcccatgttcttcctcacagcacacttgaagcgtacccaagtgacatgtctgtcgggaatggcacatcaacttttgctaattttggaatggcatgtggaagtgcacaggttactcaagatgcttacgcttatgctgctcctatcgccagtcatgagcctatggacattgatcccttgtatcttgcaaaatatggtgatgatttgctgcaaagattgaacctgttggaaaggctctgtggcttgaatgaaggtcttgaattgataaggagagaaatcgggatacggatatcagactgcaatgcactttcatcgtatgggtcttctttgctcccgttgtggatgcatgctgaggtgcaccttaagcaactagactcttccatttctaggatggaaatgagctaccatgcagatacagaacataggaattctaagacagaggttgttgaacacaatgcacctgatggagctgacctgacaacaccctccaatggattcacaaggtagggatattgcagcagttcctccaaaagttgaatctgacaatgaccaagatatggatgtggaaatggaagttgatgaagataacgtcgaagagcaggcacattgcagttctgtacctaaaaaggagcatcctccatcagaacagttgagttcaactaatttgccatcatttgaagatcctacacctgaggataattctgtccctccgcctccaccagaagaggaatggattccacctccaccacctgaaaatgaaccagctcctccagaccctccaaaagagccagctgcatcatatgttcaggtggatgccattcctcagccatatatcgctcaagaaaatgttgggtatacaatttcaggaatggagtactatggtattgtaggtacagaaggtacaaatgccaattactatatgcaagtgagtgagcctcatgtccttcaagcacaacagcattcttattatgcaccagtatctgggagtggcgtatctgtttctgttgatggcacatctattgccccagaatcttattatacccatccttcagtcactatggctgccagcgcagtagcagctgaacattctgtatactatgcttcatcaatctctgccatttctagcagcgcagcagatatcaaaacaagctcagcttctcttgtttctgcaaatagcaattcagatctcaaaggtcctgataaacttatatccaatgatgcgagtattgtacctttgacccaagctgtagtagcaacatcaggcgcaggaacgccatctgtcctgggaagttctacacagccttctagcagtactaaaaatctgaccaaagttactcgtaacaagaagcgggctgttggtattacctcgtctctgaggtctaataagaaagtttcaagtttggtggataagtggaaagctgcaaaagaggaacttcgcaacgaagaggaagaggagcctgaaagtgctctggaggcattagaaaggaagcggcaaaaggaaatagaggaatggcggaaacaacagatagctagtggagaagctcaggaaaatgccaattttattcctgttcgtggtgattggcgtgaccgtgtcaaacgcaaaagggctcaagcaaaaaatgagtcaaaagatgacattgttgctgcatctttaggtagttccgaacagcataaaggacctcctgatctagcagagctctccaaggatcttcctactggttggcaggcatacttggatgagtatactaagcaagtctattatgggaacaacctcacgtcagagacgtcctgggagcggccaacaaaatgaaaatctacagccttgtgcggtcacgaacagtaggataagggcatgtttgtttggaattctaatgtgttcggattatataatccaatatattttgaactacttaggctctgtttatttcccttctagattatataagctgaattatggtgaaaggttaagagggtaaaataacacattgggatcataaataaactaaaataagctactcaatactagcttatttcagcttatttatggtcctacagtgatattttatcctcctaccctttttattataatccaacttatataatcgagtaaacaaacgt

SEQ ID NO: 152391 - DNA, 2865 bp, Zea Mays
gctgccactgtcaaaactgagtgaatgcctatgggcaatttctcatttggcagcatctaagcatggggatttctggatgtgattgttccctcctcgataaaaaggagaatcctctagcattgcttgggcaatatagtgatgatgaagaggaaaatgaggaaacaacagatcaacccactgatgaagctaagaggagtcctggagatgctagtgctaagttatctagtccgtgtgtggatacagctggtaataatggcgtggcaagaactgaaccatcggtttctgtcggtgatcaacaagaagcacctcaagctggtgatattaagaactatacccaaagtgttacagaaaacactattgctcccgagccaattctacaagacgagaatgtgaaatcaactgaatctgttcctgattcatctggcatgcaaattgttggtgaagtcggtggaaattggagagcaataatgcatgaacagagtaatcaatgttattactggaacactgttactggagaaacgtcttgggacataccaaatggattagcttcaggagctgcgactgcatctgttccttctgatgtgggctattcaatagaagctcaagcccatgttcttcctcacagcacacttgaagcgtacccaagtgacatgtctgtcgggaatggcacatcaacttttgctaattttggaatggcatgtggaagtgcacaggttactcaagatgcttacgcttatgctgctcctatcgccagtcatgagcctatggacattgatcccttgtatcttgcaaaatatggtgatgatttgctgcaaagattgaacctgttggaaaggctctgtggcttgaatgaaggtcttgaattgataaggagagaaatcgggatacggatatcagactgcaatgcactttcatcgtatgggtcttctttgctcccgttgtggatgcatgctgaggtgcaccttaagcaactagactcttccatttctaggatggaaatgagctaccatgcagatacagaacataggaattctaagacagaggttgttgaacacaatgcacctgatggagctgacctgacaacaccctccaatggtgaggctttgaaatctgaggttagtcctgggattactatcgatgaaaatgtggagattgataagccaacttcgatattatctgctcaggattcacaaggtagggatattgcagcagttcctccaaaagttgaatctgacaatgaccaagatatggatgtggaaatggaagttgatgaagataacgtcgaagagcaggcacattgcagttctgtacctaaaaaggagcatcctccatcagaacagttgagttcaactaatttgccatcatttgaagatcctacacctgaggataattctgtccctccgcctccaccagaagaggaatggattccacctccaccacctgaaaatgaaccagctcctccagaccctccaaaagagccagctgcatcatatgttcaggtggatgccattcctcagccatatatcgctcaagaaaatgttgggtatacaatttcaggaatggagtactatggtattgtaggtacagaaggtacaaatgccaattactatatgcaagtgagtgagcctcatgtccttcaagcacaacagcattcttattatgcaccagtatctgggagtggcgtatctgtttctgttgatggcacatctattgccccagaatcttattatacccatccttcagtcactatggctgccagcgcagtagcagctgaacattctgtatactatgcttcatcaatctctgccatttctagcagcgcagcagatatcaaaacaagctcagcttctcttgtttctgcaaatagcaattcagatctcaaaggtcctgataaacttatatccaatgatgcgagtattgtacctttgacccaagctgtagtagcaacatcaggcgcaggaacgccatctgtcctgggaagttctacacagccttctagcagtactaaaaatctgaccaaagttactcgtaacaagaagcgggctgttggtattacctcgtctctgaggtctaataagaaagtttcaagtttggtggataagtggaaagctgcaaaagaggaacttcgcaacgaagaggaagaggagcctgaaagtgctctggaggcattagaaaggaagcggcaaaaggaaatagaggaatggcggaaacaacagatagctagtggagaagctcaggaaaatgccaattttattcctgttcgtggtgattggcgtgaccgtgtcaaacgcaaaagggctcaagcaaaaaatgagtcaaaagatgacattgttgctgcatctttaggtagttccgaacagcataaaggacctcctgatctagcagagctctccaaggatcttcctactggttggcaggcatacttggatgagtatactaagcaagtctattatgggaacaacctcacgtcagagacgtcctgggagcggccaacaaaatgaaaatctacagccttgtgcggtcacgaacagtaggcttaatttaaccatgtagatggtgctgtacaatgggcagatcaattttgttgtagatatctcctggagttttaaaagaacgaacagaagtgccaaggatgtttagagaatgaaaacggaaagtgaagttcttataatgaattaatgatgctcagtttctagttttctatcttcgtgctacgagaagctccaacatgatctattttgatgattggagagcacatagtcactcaaatttctttcatagttttcatttctagggctcttattattcgtttgtaagaaataattggtgatgtagtttgtaaggaataaggtgatgttcttcctc

SEQ ID NO: 152392 - DNA, 166 bp, Zea Mays
tattttaattttattttactcctcacatattgtacatgtcaacaattactcaaacatttctttatcataattatatacacatctttataagtgattaaaatatttcatcatcacacaggcctactaatattctacttggtacactaatttagctgattaaccggaa

SEQ ID NO: 152393 - DNA, 175 bp, Zea Mays
tggccgcgcgcaccaggccttcgccatctgtggagctcggcgtttcccccttcgccgcgtgctgctcatcctctcccctcctcgccaccgctcggcgatccgcccgacgcctcgccagagcgcgtggatgtcgcggcgtccaccaatttgggggtcatggcgtcgtagctggggc

SEQ ID NO: 152394 - DNA, 285 bp, Zea Mays
atgacaggagacaagacgatagagtgggtgctccctgcgtttgccgtactcacgctcggtgactcctcgtcaccgcagccacgggttagtccgcctgcatgtggggcgctcgtaaccgctgcttctcaggacaaaaggggaagcggggaggaggacaaaccgatagctgatcaggtgggcttcggcaacgagacgctgagcgccgggctggatcggccccaccgcgatgatttgacatcggtcgctgtctccgcctcaccatcggccatgatggtcagtggatga

SEQ ID NO: 152395 - DNA, 1561 bp, Zea Mays
agatttgtcctaatacccgttttgcagccctgtcctcccccgccctctgcccgctactggcgtcgaaactgtaggtgagctcccctccaatcaccgcctccgctgttacgagtcctgtaaccctagattgcagcgcccccaggtcctctcgccctcggaagaatcggggaaaaccacgaatggagggtgccgtgacggagaatgcagcggtgcctgtgcgagcggcggcccctgaagccgctgttcactcggatcagcatgtggagagtggtgcgatggtggaggactctgcggcgtccacggtggctccagagtcaacttctgacgcagatcaggctatcgaggacgcagccccggaggacggggtggacgaggatacagtgacaaatgttgatgtcagtcctgaggacatgagaagcatcattgaagttatagctgacaccggaaagttctggcatgactggaggttcctcaagagtgtactgtctattcaattgaagcaggtcttggatgaatattttgaggttgaaatggtgagccaaaatgatgggcaactgaggtctttctcagagctatttagtcggctaaatggtgcccttgaaaggtttgaagagggtcctccattcacactgcaaaggctttgtgagattttgttggatccaaaaggaacatatacaaaattaccaaagcttacattggccctggagaagaatctcctagttacatctacaataacgaagtgcactgacccatatccagctgctcatgggctgccatgttcggattgcacgcaaattacagaaatttctgggcctgctgatgtagagtctgtgagcacacctgagcatacaacagcagtaccaaatggaacagagcatgtagcaggtgatgttgacggagagatggctgaagcagaagctgaggaatcatctggtagccacgacatagagatgcaggaggacaagcgtgatcaggttgataatgttaatgctgatgctaatcctggtgctgcagctgctcctgaagcagttaatgccagtgaatccacatcgcagccacaaagttgagcttgctagaaaagaaagtcgcagaatcaagtttctagtacagctgtccatttagcaatttgagagtattgctcgccaactcttgggattcgctccttgcttcctcaaacaaccagaaagggaatgtggattcagaagttgacaggattagccgatcatactagatgttgatcatcctgaaacactttaaactttccagggaatgccttactcacaaaggccatggtatgttttgatcaatcgtacctttctttctgcgtcaccacataggttagaaattctgtgtacgggttgccaaaatccatgaaggatgagtaaaacgaatatcttcactaagtcgctgatgtatcattagagtgaatttcatgcacgtcttgccccatctactccagtatttattactgaaccttgaaaaaaatcccagtccatcgttcatttgtaatgactttgccctgatgcattcactaggttaagataatgctaattttttcttc

SEQ ID NO: 152396 - DNA, 1545 bp, Zea Mays
agatttgtcctaatacccgttttgcagccctgtcctcccccgccctctgcccgctactggcgtcgaaactgtagaatcggggaaaaccacgaatggagggtgccgtgacggagaatgcagcggtgcctgtgcgagcggcggcccctgaagccgctgttcactcggatcagcatgtggagagtggtgcgatggtggaggactctgcggcgtccacggtggctccagagtcaacttctgacgcagatcaggctatcgaggacgcagccccggaggacggggtggacgaggatacagtgacaaatgttgatgtcagtcctgaggacatgagaagcatcattgaagttatagctgacaccggaaagttctggcatgactggaggttcctcaagagtgtactgtctattcaattgaagcaggtcttggatgaatattttgaggttgaaatggtgagccaaaatgatgggcaactgaggtctttctcagagctatttagtcggctaaatggtgcccttgaaaggtttgaagagggtcctccattcacactgcaaaggctttgtgagattttgttggatccaaaaggaacatatacaaaattaccaaagcttacattggccctggagaagaatctcctagttacatctacaataacgaagtgcactgacccatatccagctgctcatgggctgccatgttcggattgcacgcaaattacagaaatttctgggcctgctgatgtagagtctgtgagcacacctgagcatacaacagcagtaccaaatggaacagagcatgtagcaggtgatgttgacggagagatggctgaagcagaagctgaggaatcatctggtagccacgacatagagatgcaggaggacaagcgtgatcaggttgataatgttaatgctgatgctaatcctggtgctgcagctgctcctgaagcagttaatgccagtgaatccacatcgcagccacaaagttgagcttgctagaaaagaaagtcgcagaatcaagtttctagtacagctgtccatttagcaatttgagagtattgctcgccaactcttgggattcgctccttgcttcctcaaacaaccagaaagggaatgtggattcagaagttgacaggattagccgatcatactagatgttgatcatcctgaaacactttaaactttccagggaatgccttactcacaaaggccatggtatgttttgatcaatcgtacctttctttctgcgtcaccacataggttagaaattctgtgtacgggttgccaaaatccatgaaggatgagtaaaacgaatatcttcactaagtcgctgatgtatcattagagtgaatttcatgcacgtcttgccccatctactccagtatttattactgaaccttgaaaaaaatcccagtccatcgttcatttgtaatgactttgccctgatgcattcactaggttaagataatgctaattttttcttcattttctagtttcctagcactagagcaaatattttctgtctgaaatgtcaacaagtcagtgtttattgctt

SEQ ID NO: 152397 - DNA, 1459 bp, Zea Mays
gtccactgccatgcgcccgctcgattgtccggatttatgattcttcgcctatcttgcagaatcggggaaaaccacgaatggagggtgccgtgacggagaatgcagcggtgcctgtgcgagcggcggcccctgaagccgctgttcactcggatcagcatgtggagagtggtgcgatggtggaggactctgcggcgtccacggtggctccagagtcaacttctgacgcagatcaggctatcgaggacgcagccccggaggacggggtggacgaggatacagtgacaaatgttgatgtcagtcctgaggacatgagaagcatcattgaagttatagctgacaccggaaagttctggcatgactggaggttcctcaagagtgtactgtctattcaattgaagcaggtcttggatgaatattttgaggttgaaatggtgagccaaaatgatgggcaactgaggtctttctcagagctatttagtcggctaaatggtgcccttgaaaggtttgaagagggtcctccattcacactgcaaaggctttgtgagattttgttggatccaaaaggaacatatacaaaattaccaaagcttacattggccctggagaagaatctcctagttacatctacaataacgaagtgcactgacccatatccagctgctcatgggctgccatgttcggattgcacgcaaattacagaaatttctgggcctgctgatgtagagtctgtgagcacacctgagcatacaacagcagtaccaaatggaacagagcatgtagcaggtgatgttgacggagagatggctgaagcagaagctgaggaatcatctggtagccacgacatagagatgcaggaggacaagcgtgatcaggttgataatgttaatgctgatgctaatcctggtgctgcagctgctcctgaagcagttaatgccagtgaatccacatcgcagccacaaagttgagcttgctagaaaagaaagtcgcagaatcaagtttctagtacagctgtccatttagcaatttgagagtattgctcgccaactcttgggattcgctccttgcttcctcaaacaaccagaaagggaatgtggattcagaagttgacaggattagccgatcatactagatgttgatcatcctgaaacactttaaactttccagggaatgccttactcacaaaggccatggtatgttttgatcaatcgtacctttctttctgcgtcaccacataggttagaaattctgtgtacgggttgccaaaatccatgaaggatgagtaaaacgaatatcttcactaagtcgctgatgtatcattagagtgaatttcatgcacgtcttgccccatctactccagtatttattactgaaccttgaaaaaaatcccagtccatcgttcatttgtaatgactttgccctgatgcattcactaggttaagataatgctaattttttcttc

SEQ ID NO: 152398 - DNA, 151 bp, Zea Mays
agactagagcgcccgctgctgcgctatgtgtgcgccgcacagtgcaaaaagggcgaggacttcgtcttactcagaacggactgccctcgttccgccatctctgtctcctccccggcctcctagcaccccaccttcgtcgtatttgatgtga

SEQ ID NO: 152399 - DNA, 394 bp, Zea Mays
atgaccggcgatgcccgcgccatcgccgcagcaggctgccaccgcgggctcgcgtggacaggccacctggggctgccgccggcccagccaactccttggctgggcgcgccctccaccagggacggctcggctggccccgccgcgctcggccgacgccggcgagccccggcaaggcaaggccgatcccctttcccctgtacgttccaaggaagaagacgatggaccaatctgcaaattccagaacagcaggggggtaagtgaagggtttgtgactcttatgaacagtgcttaaagggcatatgtgcggacgtgtaggcatgtttgtttcagggacctgggtgaaagtttgttgttccctttttcggttttatatctcagattttgtgctgaagtt

SEQ ID NO: 152400 - DNA, 413 bp, Zea Mays
attgcgcgacgtcgtagatgacgctgaacgtctgctgctgcgtgttgccgatgatggccgtgctgtcggtgggcgcaaacgccaggcacgtcgtggagtcgtcgacgtctatgagcacgttccgcgtcgtcagcttcatggaggcgccgcccgcgaacgccatgaccacggtgggcacgcgcagctgcgacgcctggccctcgaagcacgtgtccaggatggagaaggccggtgcgcgctgcgcccctgccatggcctgggccaccgccttgctgagcgccgtgtgcacagccgtcggcaggcgcgtgatcaccgtgcccgagtctatgatcgtgggcaggctgctgtactccgacggcgagaccgcgagtgggctcccgccgaccgacatcccggacagggtgatgaagtag

SEQ ID NO: 152401 - DNA, 1075 bp, Zea Mays
ttcgaacaatgatattttgcatattctcttatttgatttagtacctctgtcccttttgttgcagcacacgtcattgagccctgatggaaagcttgttattattgttggtgatgacacagatgctttacttattgatgctaattcaggaaagactattcattccatgaaaggtcacttggatttctcctttgcttcggcttggagcccagatggcctgacattcgccacaggtaaccaagacaaaacttgtcggatttgggatgccaggaatctcaccgagtctgtccatgtcttgagaggcaacgttggagcaataagatctattcgttttacatccgacgggcacttcttgtcgatggcagaagcagcagactttgtccacatctttgacatcaaaagtgactacaataagagacaggaattggatttctttggcgaggtatccggtatgtccttcagccccgacacggacacactttatgttggaatctcggacaggacatatggcagcctacttcagtttggccgcctctacaattattcatacctcgactcactactatgaaggtcaaagaaaatatgtgttttccctcggcttataatcaacccagattaggcatcccaaatgaaatttaatttagcctggtattcctcgtaaagaatcctgtaccctggtgtatgtgtacataaaaaaactgtattttatagacaccagtagtctgctaccctgctttcagataggtatataaggtgtcaggattcaaatcgcaagttagatctcaattcgttatagcacaagatgaatccataaagtcagaactttgcatgttaagggcttgctcgttttgatctcaatccatatggattaagtaagattgtgtgcctccgtccacgtgcaggagcggcctcattgtggcgcttcccgacacatgggttctaggtggaagtgagataaataggagatgggggttgtaccaaacgccttttgttcttagatccatggtggagtggagatactccacggtgaatctaggtgaatgtcagatctaaattcactttttttattattgaagct

SEQ ID NO: 152402 - DNA, 186 bp, Zea Mays
tttatgagatccggtaaatcctccacccatcgtcagtgccaaatcagttcccttccgtgcctaattcaccttcccatccttggcactagcggcttcgtagcctccaatccttcagcctctccatctgatttggcgcagatgcctccagggaggaaggggcaacgatgcacaagggaaaccccaggt

SEQ ID NO: 152403 - DNA, 921 bp, Zea Mays
atccgcccattccgcccgccgcgttctctgctcctgcggcggctcaccctcggcggctcggcgtctctaaacaagggtgcagtttgcgcggcggccgtcggcctaccagtagtcctgccggtggtgcacgtgatggccaatgggcacgctttcgttggtagccaggaagcgatgatgcttacctgatgtcctctgctcaaccacaattgggtaggcagagaggatgctgaagatgaaggtgactgagaaggatttcacattttcacctgatgacttgcggaaatgcagaggagttgggtagaatgcatggcctttgagattaaagctaccgttggttagctcaaggagcccatctggtttgattgtggcagtgccgtctaggctgagatttgcttctctgaagctggagtagacgaattgatcaccagcaatgatgaaggatgtaaagttgaggatggaaaggtagagaagatggtatagaatgagccacttatgtttcttttcaggcatggatgtaacttgtggtagctcaagaaggatgcaagagcaaagtattttctgagctacctggggcttgcagttgtcctctacatctagtctcagtttgttgttaatatatagtggaattgaaccggtaaggtgtttaatgtttacttttcttcgaagacatatgtcattcaataattgagtcactgtcagtggatgttgaatcagtgaagttagctatttgttcaggttcaaacatttgctagatactttgacctgttgattttttccatacattttctttgaaggtttcacattgtgaggacttctttctcttaatgtactacagttggctcttttggttcttgctacctccagggtaggtaaaaaggacagacccagtgctagaggcttctataagtgaggtatggggaa

SEQ ID NO: 152404 - DNA, 82 bp, Zea Mays
tgagaatgaaatttccttgcccattgtctctatgtcccagttgttaggaatatatcaagaaatgcgtgctgtggtaggattt

SEQ ID NO: 152405 - DNA, 2492 bp, Zea Mays
ttttatagagtttacttcatgtcttcatctttatggaacattgactatgtgtgcaactgtgcatgcaaacattgaagacctgtgcctgccactgtcaagccccatagcatctagtcatctacctcctgactcctgagatggtagatattgtgccgaagcctatttctgatggacagtgcattatcagctcatcattctgcatcaaggctagcatggaaaagcttaagtttggtgttaactctggtattggcatttctttgttgaggtactgcatgacttgcctcatatttggccttgcactagtgaatgggtgggagcataacaatcctagcttcagtgctagacatgcctcatcaatatcatattcaccttgaattttgatgtccactgtatcagtaagtgatcccttatgccaatgttccagcacccagtcaactaacattacctgcctgtcttgggtactttgcttgataggcctctgcccacatgtgacctcaagaatgaatataccgaaggcaaaaacatccgtcagaggggttgccctgccagtgcgtgctacctccggagccaggtatcctatggtgccaaccacatgtgtggcttctgggtcagtgccatggtcatacaatttcgcgagaccaaaatcaccaatcctcccatggatctcattatcgatgagcacattgcttgccttgatgtcacaatgtatgatgactttctcacactcctcatgaaggtagagtaaaccagatgctactcctttgattatttggaacctttgattccaatctaaagtaggcttgccctctttaccatacaagtatttgtcgaggcttccattgggcatgtaatcatacactaagagaagctcgcctttccgccgggagtaccccaataagggcaccaggttacgatgttgaagatggccgatgctaacaatctctgttataaactcctttatgccctgttttgagtcgtgtgacaccctcttcacagcaatattcagtctggatccacggagaatccccttgtacaccattccaaaccctcctgtacctaacaggttagcttctctaaatcctcttgtggcatcgaataaatccttgtatgagaacctgtgaggcccatactcaacctcccaatcttcacgtagttcagcatatcttagcttcctccgcacgaataaaaaaatagtaatgcttgcagcaaggaacagagccagaattgttattggcagagttatctgtaatgctttcgaccgagccttctgaccaagacgaggcatctctggcagcttggtaatgtcgattggtggagcaggactgttgatgccaaagctccaaccaagcagatagtgttgcccactaacagagcctgttgaggatgagaaaccaatatacgccggattagtgatgactgctgagagattgtagttagcagacagcaatggcctcactggtttggcgacattgaggggagctatggtgacattgatctgtgtggtttctctgttgtagttcacccacacttgcatcgcctcatggctatcgagtgacagatctttgaacaaaccacttttatcatcatagtagcctgcatcatgggatcggatggagcgtagactattgacgttgatgccaacatggtaactgttgatgtcctgtaggtcataattttggacggtgtcgagctcaactgcaaagatgtggctgtttgggtcaccattggtctggtcactgaagaggcccaagtactgggttgggaatgaacccgataaattcttgtctggcgcaatgaagaaagctaggccatgaccactctcagtctcaggataggtagagagaatggcgaacacaaaggatacagagaaagactgcactgcaccactagaggactcgtagaagagcaccgaactggggtggaatccatggcctttctgccgaacggtgccattggttagctcaaggaggccgctcggcgtgactgtcgctccaccatcgagggttaggttgctgctagcgaagccggtgtagacgaattggtcgtcgtccccagcagtgaatccagcaatactaaggcctacggacaggatgaacaaggtaatgttttggttcgccaccatgtctgtacttttctactcctccattggtcgtgcgctgtggtttgcacattggaagttctttaattttgctgtgtggtcacacgacctgtaggtactacttatccaaaacttgagactgacttggtacagatttgcattgctaaaatgaaggatttattatttgcatgaggctgacccatgggaagtttgcacaaagttccaggacacgtcatgtcaaggatttgaggattgtgggcgcttaacaatggtggctgctagtagtcaaactgtcatttttggtcacagtctttcctcattggcaaaactgtccttgctctccaaggattgacggtggctatcaaggttcagcaaaagaaaagaaaaaaatggc

SEQ ID NO: 152406 - DNA, 1745 bp, Zea Mays
caagcagctcgctgcaagttgtgaacgaacataccaccatggcgtcgtcttcatcggcattgttggcgcttccggttcttgtgctttctattgccttctccattgttcatggtactgcagatgacgcgcaaaggtacatggtcgtagcatctagttccctggagccatcagaagtctgctcaggccaaaaagttacctcatccaagaacggtgccacgctaccactagtccaccgtcacggcccgtgctctccggtcatgtccaaagagaagccttcgcacgaggaaacgctcggccgagaccaactacgagccgccaacatccacgcgaagctttcttctcctcgaaacagtagcgcgaaagagctccagcagtcgggcgtgactatcccgactagctccggctactccctgggcaccccagagtacgtgatcaccgtcagcctgggcacgcccgccgtgacccaggtcatgagcatagacacaggcagcgacgtctcgtgggtgcagtgcgctccgtgcgccgcgcagtcgtgctcctcgcagaaggacaagctgttcgatccggccaagtccgcgacgtactccgccttctcctgcagctctgcccagtgcgcgcagctcggcggcgagggcaatggctgcttgaactcgcattgccagtacatcgtcaagtacgtcgaccactccaacaccacggggacgtacggctccgacacactcggcctcaccacgtccgacgccgtcaagaacttccagttcgggtgcagccaccgcgcaaacggcttcgtgggccagctggacggcctcatggggctcggtggcgacacggagtccctcgtgtcgcagacggctgcgacctacggcaaggcgttctcctactgcctcccgccgtcgtcgagctccgctggagggttcctcaccctcggcgcagctgctggtggcacgtcctcgtcgcgctactcacgcacgccgctggtgagattcaacgttcccacgttctacggcgtgttcctccaggccatcaccgtggccgggaccaagctcaacgtgccggcctcggtcttctccggcgcgtccgtcgtcgactccggcaccgtcatcacgcagctgccgccgacggcgtaccaggcgctacggacggcgttcaagaaagagatgaaggcgtacccgtcggcggccccggttggcatcctggacacctgcttcgacttcagcggcatcaagacggtcagggtgccggtggtgacactgactttctcccgcggcgccgtcatggacctcgacgtctccggcatattctacgctggctgcctcgcgttcactgccacggcccaagatggcgacaccggaatcttggggaacgtgcagcagcgtacgttcgagatgctattcgatgtcggagggagcacccttggattccgccctggcgcttgctaaatttctattaataatttcaagggaatacgggaaattttcgtcccaaaaagtaacgtatttgatggaaatccatccgaataagcataaaccatgaatgaacatttagatgatgtctatcaacaacacggctttggaaattttaatcaagactataaacagatttaatagtctctgcataagtgacctagtattttgttcaaatgtctacaagattatgtgtattcgtactgtatttcagaaaaacacgcacacatcttgtcgtgtacaattgagagtatatatgtcactacatgacggttgagtttt

SEQ ID NO: 152407 - DNA, 1432 bp, Zea Mays
ctcagaccctcacggtcaccctcatggcctcacccactcaccctctcggtctctccctctctcctagtttccccaaaaacgaaaccctagcgccgccgccccggtggccgtggacccctagagtagaaaaatagagcaggcgtcggtggccgtggacctgtggaggagagcaggcgccgccgcgccagtgtgctgcgtcgccggcgagtgagccaaccactgtccactggtctgctcttgtttattcaatggccacgaaaggatctcatccagccgaggtgagtcatctccgtatagggacgtctgctgaactccctcgatactcatctttcccccttcttctacctccttccatagctttctccccactatgtacctcatcggtgcacttgaagaagcgtcattgagcaccgttcggagattccccttcccagcatcatcgcctgaccaagatttgacacagttcatctgtcgctcgagccataacgggcgtgatgtgatgaagaaactgaattttgtagtggaaatgaggtactcacatcgtgaatctttctaaaattgtggttatcaatgtgcactaggatcctgcaacaaacagatagacataaacctgctcataacctatactatatacatatacacactgtttcatcggaggtattgtgaggttccgccggcgtctcggcacaagtgaaccacgatctgcatctcagtcgtctccccaagcaccatcgcctatcatggatgcctacaggcaccagttgcagccagcaaaagcaaacttacaagtgaggtggttcctcccgcggattcaccagtaataaattatccaatgctttagacctagcaaagtgctacaaagaaaaggtcgtgcacatcacctacagggaggcctacaaagaagctttttgttaatgacgttgattagaaggatggaggggctgactgtgctgcagccaaagctaggcttattagctcctgcaagatcactggaatagatagttcagaacaaataagtgacattttgcgtggcattgaaggaagagtgatactgctttggtcatgtcttcttccacatgtgcattgagatctgtggtgagctatgtaattgacccaaaaggcacttcaagcgggcaggaaagtctaaggcccttactaagtacttccaaggtgttctggacaaagaaatcttgtacattaaaacaggaggatacaagaagctggagtggttgtctgaaggcttttgaactgtttgaagcgttagtgtagctttggtgcttttgtgactgatcagctctggagcagctagagtgatgtagttgtgggattttgaacaatagctagagtgatataaaacattagtgatgtagttgtgggcttttgaactgtttcaagctgaagtgatgtcgctgtggtgcttttgtgactgatc

SEQ ID NO: 152408 - DNA, 782 bp, Zea Mays
ccctcacggtcaccctcatggcctcacccactcaccctctcggtctctccctctctcctagtttccccaaaaacgaaaccctagcgccgccgccccggtggccgtggacccctagagtagaaaaatagagcaggcgtcggtggccgtggacctgtggaggagagcaggcgccgccgcgccagtgtgctgcgtcgccggcgagtgagccaaccactgtccactggtctgctcttgtttattcaatggccacgaaaggatctcatccagccgagctttctccccactatgtacctcatcggtgcacttgaagaagcgtcattgagcaccgttcggagattccccttcccagcatcatcgcctgaccaagatttgacacagttcatctgtcgctcgagccataacgggcgtgatgtgatgaagaaactgaattttgtagtggaaatgaggtactcacatcgtgaatctttctaaaattgtggttatcaatgtgcactaggatcctgcaacaaacagatagacataaacctgctcataacctatactatatacatatacacactgtttcatcggaggtattgtgaggttccgccggcgtctcggcacaagtgaaccacgatctgcatctcagtcgtctccccaagcaccatcgcctatcatggatgcctacaggtatatgctagtttttgttcttatggaatccggattttagtactgggcatgactgaatatcggaagtccatggggtcatatgtctgcatcactgcatccaaaaatactagtac

SEQ ID NO: 152409 - DNA, 1006 bp, Zea Mays
ccctcacggtcaccctcatggcctcacccactcaccctctcggtctctccctctctcctagtttccccaaaaacgaaaccctagcgccgccgccccggtggccgtggacccctagagtagaaaaatagagcaggcgtcggtggccgtggacctgtggaggagagcaggcgccgccgcgccagtgtgctgcgtcgccggcgagtgagccaaccactgtccactggtctgctcttgtttattcaatggccacgaaaggatctcatccagccgagctttctccccactatgtacctcatcggtgcacttgaagaagcgtcattgagcaccgttcggagattccccttcccagcatcatcgcctgaccaagatttgacacagttcatctgtcgctcgagccataacgggcgtgatgtgatgaagaaactgaattttgtagtggaaatgaggtactcacatcgtgaatctttctaaaattgtggttatcaatgtgcactaggatcctgcaacaaacagatagacataaacctgctcataacctatactatatacatatacacactgtttcatcggaggtattgtgaggttccgccggcgtctcggcacaagtgaaccacgatctgcatctcagtcgtctccccaagcaccatcgcctatcatggatgcctacaggcaccagttgcagccagcaaaagcaaacttacaagtgaggtggttcctcccgcggattcaccagtaataaattatccaatgctttagacctagcaaagtgctacaaagaaaaggtcgtgcacatcacctacagggaggcctacaaagaagctttttgttaatgacgttgattagaaggatggaggggctgactgtgctgcagccaaagctaggcttattagctcctgcaagatcactggaatagatagttcagaacaaataagtgacattttgcgtggcattgaaggaagagtgatactgctttggtcatgtcttcttccacatgtgcattgagatc

SEQ ID NO: 152410 - DNA, 1383 bp, Zea Mays
ccctcacggtcaccctcatggcctcacccactcaccctctcggtctctccctctctcctagtttccccaaaaacgaaaccctagcgccgccgccccggtggccgtggacccctagagtagaaaaatagagcaggcgtcggtggccgtggacctgtggaggagagcaggcgccgccgcgccagtgtgctgcgtcgccggcgagtgagccaaccactgtccactggtctgctcttgtttattcaatggccacgaaaggatctcatccagccgagctttctccccactatgtacctcatcggtgcacttgaagaagcgtcattgagcaccgttcggagattccccttcccagcatcatcgcctgaccaagatttgacacagttcatctgtcgctcgagccataacgggcgtgatgtgatgaagaaactgaattttgtagtggaaatgaggtattgtgaggttccgccggcgtctcggcacaagtgaaccacgatctgcatctcagtcgtctccccaagcaccatcgcctatcatggatgcctacaggcaccagttgcagccagcaaaagcaaacttacaagtgaggtggttcctcccgcggattcaccagtaataaattatccaatgctttagacctagcaaagtgctacaaagaaaaggtcgtgcacatcacctacagggaggcctacaaagaagctttttgttaatgacgttgattagaaggatggaggggctgactgtgctgcagccaaagctaggcttattagctcctgcaagatcactggaatagatagttcagaacaaataagtgacattttgcgtggcattgaaggaagagtgatactgctttggtcatgtcttcttccacatgtgcattgagatctgtggtgagctatgtaattgacccaaaaggcacttcaagcgggcaggaaagtctaaggcccttactaagtacttccaactgaagttggtgcataaggctgcaacaccgcctagtggaagtagataagggtgttctggacaaagaaatcttgtacattaaaacaggaggatacaagaagctggagtggttgtctgaaggcttttgaactgtttgaagcgttagtgtagctttggtgcttttgtgactgatcagctctggagcagctagagtgatgtagttgtgggattttgaacaatagctagagtgatataaaacattagtgatgtagttgtgggcttttgaactgtttcaagctgaagtgatgtcgctgtggtgcttttgtgactgatcatctctggagcttttgtgaatgatctagctagctatctgtaaatgatctagttgtgaatgatattataattgtgatgcttttgtgaatatataattgtggtgcttttgtgttt

SEQ ID NO: 152411 - DNA, 1334 bp, Zea Mays
ccctcacggtcaccctcatggcctcacccactcaccctctcggtctctccctctctcctagtttccccaaaaacgaaaccctagcgccgccgccccggtggccgtggacccctagagtagaaaaatagagcaggcgtcggtggccgtggacctgtggaggagagcaggcgccgccgcgccagtgtgctgcgtcgccggcgagtgagccaaccactgtccactggtctgctcttgtttattcaatggccacgaaaggatctcatccagccgagctttctccccactatgtacctcatcggtgcacttgaagaagcgtcattgagcaccgttcggagattccccttcccagcatcatcgcctgaccaagatttgacacagttcatctgtcgctcgagccataacgggcgtgatgtgatgaagaaactgaattttgtagtggaaatgaggtattgtgaggttccgccggcgtctcggcacaagtgaaccacgatctgcatctcagtcgtctccccaagcaccatcgcctatcatggatgcctacaggcaccagttgcagccagcaaaagcaaacttacaagtgaggtggttcctcccgcggattcaccagtaataaattatccaatgctttagacctagcaaagtgctacaaagaaaaggtcgtgcacatcacctacagggaggcctacaaagaagctttttgttaatgacgttgattagaaggatggaggggctgactgtgctgcagccaaagctaggcttattagctcctgcaagatcactggaatagatagttcagaacaaataagtgacattttgcgtggcattgaaggaagagtgatactgctttggtcatgtcttcttccacatgtgcattgagatctgtggtgagctatgtaattgacccaaaaggcacttcaagcgggcaggaaagtctaaggcccttactaagtacttccaaggtgttctggacaaagaaatcttgtacattaaaacaggaggatacaagaagctggagtggttgtctgaaggcttttgaactgtttgaagcgttagtgtagctttggtgcttttgtgactgatcagctctggagcagctagagtgatgtagttgtgggattttgaacaatagctagagtgatataaaacattagtgatgtagttgtgggcttttgaactgtttcaagctgaagtgatgtcgctgtggtgcttttgtgactgatcatctctggagcttttgtgaatgatctagctagctatctgtaaatgatctagttgtgaatgatattataattgtgatgcttttgtgaatatataattgtggtgcttttgtgttt

SEQ ID NO: 152412 - DNA, 1547 bp, Zea Mays
ggccaggtccatgtcatgttacgttcaaggacgcggccatgcatgcacgaactaactgtcctttcccaccacgccgtctatatgttctcttcatttgttttgtcgtcttgacctgttcgctcgtcgctgttgtcaatgccttaaaccatggcgtgcatttcattatggagggatgattatgtcgagagggaagttagaacatgcatgtgtgagaacaagcacagcttgtcaaacaacaacaacctacaacgtacgtactcagcagctacatgtatccggcgccgtacctctataaatacggggggcgggagacgcaatggacatgcccacccaacattaattgcatcatcacttgataattaagtacgagtacaacatagctagatacttgttgcctctgccatacgatagagcgcgctttgtgtcaccaatggcgggtcgatccatggcgactcggtgttgcgcagctctgttgctgccaatggccctcgtgctcttcgcaggtagctcaccgccggtgctggctcagctggagctcggctactacagcaagacatgcccgaacgtggaggcgatcgtccgcaaggagatggagaagatcatctcggccgcacccagcctcgctggcccgctcctcaggcttcatttccacgactgcttcgtcaggggctgtgacgcgtctgtgctcctcaactccaccgcgggtaaccgcctgtctgagatggacgccactccgaacaggagcctgcgaggcttcggttccgtcgacagggtgaaggccaagctggaggccgcctgccccaacacggtttcctgcgctgacgtcctcacgctcatggcccgcgacgccgtcgcgctggccaagggccccgtctgggccgtcgcgctcgggaggcgagacggcagggtgtccagcgccacggaggcggccggccagctgcccccgtcctacggagacgtaccgctgctggccaagattttcgcggcgaaaggcctcgacctcaaggacctggctgtcctgtccggagcgcacaccctcggcacggcgcactgccggtcttacgccggccggctctacaacttcagcagcgcctacactgcggacccgtctctcgacagcaggtacgccgaccggctcaggacgcgctgcaggagcgtcgacgacgacgatgccgtgctttcggagatggaccccggcagcttcaagaccttcgacacgagctactaccgccacgtcgccaagcggaggggcctcttccagtccgacgccgcgctcctcgccgacgccaccactagggagtacgtccagcgcattgcgaccggcaggtttgacgacgagttcttcaacgacttcagcgagtccatggtcaagatgggtaacgtcggcgtgctcaccggtgcacagggggagatcaggaggaaatgctacatcgtcaactagctagtattatcagttacagggggatgatctgacgcatgcatgtttgttagttgtttatcattattgtaatgtattaattattacattgttgtaacttcattcttct

SEQ ID NO: 152413 - DNA, 509 bp, Zea Mays
tagttcatcaaaatgattatgagcaagatccatatgtgaaggaatttgggatcaacattagtgagaagctaaccttgttgaagctcgagtctttcctgcaccttggttgctcattgttgatgcatcgaatttaaaaagagaaagagtgccattgtgtgtaattattttgtagaaagtgataaatggatgcaaggtgtgccattgggcatgtataaccttttcatggacagttcctataaaccacagctcggggattttgccaggaattggcacaaatatgttcatgtttgtgcacaagacaaaaacttgtttaaattgaaaccgtaagcatcttttaatttgactccctaagtaatacaggaatttaacagtgaggctgtgatgccaatatattcaactagactagatcaagtagtgaaggcacttaaaaatcataacgtggacaaaccaactacgagcagcaatgaagatcttgaactacttttggctatcctacctggcaacaatgg

SEQ ID NO: 152414 - DNA, 540 bp, Zea Mays
atgcccggatatgaggtgtgggaacatcatggtgaggtagtacccaacccgaatgtagaagaggaggagaacaatgattgggctggcgatgatgcgatgcatgagatgctagattcgaggcgctatcgtttggaacctaaggctcagaagcatgcagaccgagtattaaagaaaaatatgaagaaagtgtgcaaggatgcattttccaatgctcgtctacaggttgtgaacgcatacatgaagcgccgagggcattctatcaacaactttcgacaatattcggatgtctacttgattgtggaccagtacatggagtcttggtttctagatgtggcacaacatcaatcattcgttttccctcaatttcagtcgtcgatgcctaaggaggattacatgctccgccacctcaacctcagggatccgggttatggaccacaacaccccaccactggtgataccagcaccaggaggaaattatggaggggagggagctactacatgagaggtaatggtcacaacttaaatgattctgatatgtga

SEQ ID NO: 152415 - DNA, 252 bp, Zea Mays
atggccagacttgggttggatttcgacacagacacgaaggacagggctcatggggcgatcgaaggccacaaacatgccctagacaagctgaccatcatggaggaggacacgcacggtgagcccgtcgaaaggggtgaagccatgggagagcggagaagtgaatggcaaatggagcagcagagggatgcacggcgtccagcgacaagggacacacgcgctgaagagaaggaggggcagacaccgcagcgttga

SEQ ID NO: 152416 - DNA, 387 bp, Zea Mays
atggcgagcgtcctcttcatttccctggtgctcgcccctctccagccgagcttcttcctgctcacgcccagtcgctccctctttgttgccgcgcgccctggttctttcccctgcgcgcaacccgccaagctccctccattcctccttgcgtcttctgctgagcagcttccctgcttttctccctccctcctcggtctctgctcatccagcgatgtggaggctgcgcacgtgtcgcgcgctctggcagctgcaccttaccgtgctcctttgcgtgtcgctcgtccctcctatggccgctttgggacctactgtcgaccctccggcgtggtctcctctggcgactcgcgcttaaaaatttcgctgtacgccacgataagcttgccgtag

SEQ ID NO: 152417 - DNA, 2023 bp, Zea Mays
atggagcaccaagacgccgccatccgcaagctactcgacgaaatgcgactcatggaggcgcgtctgtgcgagcgcatcagcggacgctgcgacgacgtcgagcgccacctggacgagtgctgtgaagagccctgtgatgagacgcctagcttcgacaagggtcccatcttcaatgaggaaccctgtttccaccgccgcctcctcaattcggatccgagctctccctgcgactgggtcgatctgctctcggtcgtccgtgcagtggccccgagctcccgggatttgcttcctccaccgggcatccgtgccgtgccgagcagctacgtcacgagcgggtatccgcgggaggacagagaacttgtccagcccctgcgacgagtcgagtcggctacacgcgtcgagtcaagcgttactagggcctccagcactgagctagacagggagttcatcgtcgcctccgccttcatcacagcatcatccacctccggcaccagcgccctcgaggcaggcgcgcgcgtggacacggctagcgaaccggagtttccgcctcgtgccaccctcggtgcccaccctgactacgaacttcgccatgtcgaaccggtgggtcttctcgaaggggcggtagtccggccacttctcgaagagcttgagcgccagcacagcacggcccagcgggtcatcgttgcgcggggacaattggtcctccaccgtcagtaccagctggactcgtccccgctcgactcctgcatcgtcttcgttcctgaaagaccggccgaccgggagatggtcgaggcatcggccgtcatggtggtgtgggcgtacgacaccgcgtgcgaccgcgtcggcgtggaggaggtgaagcatgcgtgcgaggtcggatgcagcggcggcgagatgtgccttttcacggacctcctcggtgacttgctctgccgcattcaccgctcgccgaactctctcatgctggtcgcggagacaacaatcggcaccaacagcacggagatcgccggaattgtccgcagctgcgctaagaccgctgtctctgttggcaccacccagcaggccaaagaagaccccatttacaccaagggagcattctgatgaggcacttgaaggggagagaacagtgcaggctgggttggaacaagagtgtgaggtgctggggatattgtcaacgatcacctcggatatttttgcaatagggctcagtccaaatcagtataccgtgtatttttatcagaatttgatggcctgcatgatgttgatccgtcgcagattcttgctgtcatttggacgtagttgggatgcagtgacgtacaagcaaccatggccaccacccgtgcatgttgtgatactaggagatggcttgtccgtcaggcttacaccttggcaaccatttgatactgatatctacagctttcctgtgaacagaccagaatcatctgcaagtgtcattggtattgcaacagaatcaacgagtgtgcctatgattcccaaggaaacagtgtctcgacaatcctcttgatgatgcaaaggtgcctttatgaacagatgatgcaatacaaatctgaagagggctgtactcgggtagtgaaatgcctcccaccggctgacgcaagtttacttgtttggctgttaatcagatgacatatccattgattgcattgatgtatgcggtccaagtgatgaattttctcaaggacaaagatgagtcaccttgagaggatgttttgctgctccagaaggacccatttgatggcaacaggcattagaaacccaacgtgacacttgccatctccttgaggaaagatccaggagtcattgttgcgtgcactgccccaaccaacgaagtaccaacatatgtggaggactacactagtagctcaaaatctgcaattgctggctagtggctatcaccgatgctcccggcatgacaactaaaatttcttaccatcagtggcttgggggcaagccacatttcaagcggtggggaatgtcagcagcagtctaggggagacgctag

SEQ ID NO: 152418 - DNA, 465 bp, Zea Mays
atggcggtgggttgtgcgcaaccgtaccctggcatggcataccgtgtgatacacccggtatacgggtcccagcagcaaatgttgagatccctgcaacgacgtttggaggagattgacaaggagattgaggacaagaagacagagctggagcccaaggtcgtggaggcctacgaagcatctcctcctgaggtcaaggctctgttcaaggataagaagccagtcaaggtcatcaagaagaactcggctgcagtcaccaagttcctcgatgagctggctaagattggccatgttattagtcttgacctgtctaggcatgtaccaatatttcatggcaaatcttatatcccaagttttttatatgctcaacaggccgcacttgaagaaatcttatatcagtttgaggaaaaactccaagctgaaaaagtggaagctgctaggaagcaggaagagttgcaatctgtttga

SEQ ID NO: 152419 - DNA, 1116 bp, Zea Mays
ccacaccccgcatctcctagccccagctagtagatcattggacacatatcgaaacagctctctagctagcgcgctcgtcgtctaacctggcttccggcatggcttccaagcagatcggagtcttgacctgcttcattgccatcaccgctctcgccttccgtccctgcgcatccgccgtgcccatggacggcggctggtcgaacggcggcgccacctggtacggccccgccaagggcgctggatccgacggtggtgcgtgtgggtaccagggtgccgtcgaccaacctccgttctcgtcaatgatcaccgccggcagccaatccatcttccaggacggcaagggctgcggcacctgctaccaggtgaagtgcaccggacacgagtcgtgctccggcagcccggtgacagtggttatcaccgacctgtgccccgacgctacgtgccaggtggagcccgtccacttcgacctgagcgggacggcgttcggtgccatggcgaagcccggccaggccgacatgctccgaaacgccggccgcctacaagtccagtacactcgggtggcgtgcaactggaacggcttggacatcgccttcagggtggacgccggctcaaacgccaactacctggccatggccatcgagtacgagtccggggacggggacctgcgcgccgtggagctgaagcagagcggcgcggcggcgtggggcgcccatgcaacgctcctggggcgctgtgtggcagtacaagtccggctccaccaatctgcaggcccccctgtctgtccgcctcacctcgggctccggcagggttctcgtcgccagcaacgtcatccccgccggatggcagcccggcagaacctaccgctccgtcgtcaacttcggaggaaaccatgcataacgagtggtattaagatgtcgatcgtctgcagatgtctccatccaacaataagatgcatgcatatatgatctgtgtggccagctagctgctagaccatctcactccctgagtctgctgatgctcagccaataatgaatcattccatctcgatcggaaattcaacatatataataatgcaagcaccggaaataaaattctactgtgttctgtgacgacgta

SEQ ID NO: 152420 - DNA, 1210 bp, Zea Mays
atgcagggatccaagcccctgccatctattcagccgccccgacgtccacaggggataccaactgatgggccaccaaccatgttgttccacgctctgggctgctgctggaagctaatcaatcgcttggttagaccatcgcagattagcggtgggattcccaggttcaataatctcgtttcgggccatgccctcgatgtcattatctggcttgaggtttgtcgtggagaagcaaagggatgtttacatgtgctctattctaagtcttagggtctgggattaattgggtacgattcgttctagaggatgatgcgagtaagtgcttaagtgccctgctaattttttcagctacctctttcgaatttgttgtctacctgtttgttaggcaagcatggagtattcgcttggttctactcaagaagggaatcaaggaattcaggactttatgcactgattgtaatagtccaacgaaagagcggatccacatgttaaaaatctcagcaagtgttcctttctgacagagtttcaacttatgtgttactaatgtagaagggatcccaattacttgctgcattgggtgatcgaacagtcatagtatggagtttaggaaacaggaaatgcattggtctcttgtttgggcatactgggagcgtgaggtcgttgccttgccattcctccaatccggagagaacaagaacttgactggaacatcaagataagcaagtgtaaatacccaccttgaaattggtagttttaattcaaacacatgccttttgtatgttatgttcttgcctccttggtattataacatgcttgcattaaatgatttattgaaggtaaattctggaagtattgtgattcccataaaacgtgtccttacagatcatgtattaagggtgtggacggttatgttgcctttttcacaaacttcaatttatgatcaattgcaagcaagatgtggtctagctgttggaatgcggatcacgaaggtggtgtcttcactcttcagcatgttccagtgtcgtgtgttccagatcgggttgctatcgggagtctgttggtttgcatggaatcaatcaggtttagcttggattcatgaataattggtttgtgtcgtccggctgttcgagctacgtcatcatgattagaatctacatttttccctacgcttgtatttaaaatggagtttacaaagataatcgttagaatggaa

SEQ ID NO: 152421 - DNA, 2039 bp, Zea Mays
atggagcggtgggaggactcggttgaaaaacgcgtgacaacctggggtgcctctcagcaaaactaccaccacgatcggaagcttctccgccatcttctgtttccttcccgacgaagcagcagctgcaacgactcctcacccaaatctgccctgccgctctctccgccgtcatctccaacctccggggatcttagccgccaaatctgggccgtgctcgcgcttgggcatctgcggcctacgatggggagcgagtcggagcccgccaaggggctgctgccctacctgcagcgcgcggacgaactgcagaagcacgagcccctcgtggcgtactactgtcggctctacgcgatggagaaggggttgaggataccccagaaggagcgcaccaagaccacaaactccattctcatctcccttatgaaccagctcgagaaggacaagaagtcgttgactttggggcctgacgacaatcttcatttggaggggtttgcattaaatgtctttgctaaagcagataaacaggaccgtgctggacgagctgacataaacactgctaaaaccttctatgctgcaagcatcttctttgagattcttaaccagtttggtgagcttcaacctgatattgagcaaaaacagaaatatgccatctggaaagctgctgaaataagaaaagctctcaaagaaggccgacagcctgaagctggaccacctggtgggggtaaagatgaagcgcctgtcaataccaccaccatttctcaggatatggcgcgaagccattccttcagcagtgcgaaccagggcagtgaagcatcacctcgacctgtcaacatggattttagtaggcggggtagcttttctgctgtgcagccaggaaataatttgcctccccaaagtacagaattcaatgatcatccctctacccagtcaccctattcttccccaccaccctcacagtcccagcacccttctccatcacaatcttattcctctccctcataccaggcaacagattacccttcttctgatattcacaaaccatcccccaattattcatcttccccctacacaagcacagactaccctaccaatgagctccacaaaccaccttccaattattccccacctccttacaccaggacagatcacccttctaatgatggctacaatcctcacagcaatgataaaccggatgtttcggcttaccctcaggcataccaacccccaccctacacaattgaccctcagcacatctctcaaaactactactccaccaaagccccagctgctccatacaactaccctaattttcagtcatatccaagttttcaggacagcacgtcaccttctgtcccgactgagccgacgtatcaatcttcattctatcctgcaactgatggtcctgcagctacttcgtacactcctgcttcaaattcctctgccccaacacattaccactcaactgctgactattcacctcaagttactcctccagctgcgccaccagctagccaatataaatatgatagcagttaccagcctgaagttgagaagattgctgaggctcacaaggcagccaggtttgcggtcggtgctcttgcatttgacgacgtatctgttgccgtggatcacctgaaacgtgcactggatcttctgacaaacccttctgctgaacctcgctagctcttttgcattcccttgctcttgtcagaagcatcatctgtacatatacaagattggcgtaccacccatggataaattgccaggctgcatacttacaagacaggggtaaccacacaaatctaggagataataagcgagcctttccgtgtgagcttttgaagtgacacttacaggaaaccttaatgtctaaaatctagttattttattctgagttttgtgctatgtaacccattatattcatttgcacgttctcgaggtctggtatggtattttgggtatggatggttgatgccgtgcctgcttgtttctctttcatggtttgtcatgctgctgtcactcacgaaaagatgatttagatg

SEQ ID NO: 152422 - DNA, 2160 bp, Zea Mays
atggagcggtgggaggactcggttgaaaaacgcgtgacaacctggggtgcctctcagcaaaactaccaccacgatcggaagcttctccgccatcttctgtttccttcccgacgaagcagcagctgcaacgactcctcacccaaatctgccctgccgctctctccgccgtcatctccaacctccggggatcttagccgccaaatctgggccgtgctcgcgcttgggcatctgcggcctacgatggggagcgagtcggagcccgccaaggggctgctgccctacctgcagcgcgcggacgaactgcagaagcacgagcccctcgtggcgtactactgtcggctctacgcgatggagaaggggttgaggataccccagaaggagcgcaccaagaccacaaactccattctcatctcccttatgaaccagctcgagaaggtggatgactataggatgactaggagtaaactaggctcgactaatcgagcaaatcgacgacttatcacgattagtcaccttatcggtgctcaggcgacttgtcgactttaaaaccttgcgggacaagaagtcgttgactttggggcctgacgacaatcttcatttggaggggtttgcattaaatgtctttgctaaagcagataaacaggaccgtgctggacgagctgacataaacactgctaaaaccttctatgctgcaagcatcttctttgagattcttaaccagtttggtgagcttcaacctgatattgagcaaaaacagaaatatgccatctggaaagctgctgaaataagaaaagctctcaaagaaggccgacagcctgaagctggaccacctggtgggggtaaagatgaagcgcctgtcaataccaccaccatttctcaggatatggcgcgaagccattccttcagcagtgcgaaccagggcagtgaagcatcacctcgacctgtcaacatggattttagtaggcggggtagcttttctgctgtgcagccaggaaataatttgcctccccaaagtacagaattcaatgatcatccctctacccagtcaccctattcttccccaccaccctcacagtcccagcacccttctccatcacaatcttattcctctccctcataccaggcaacagattacccttcttctgatattcacaaaccatcccccaattattcatcttccccctacacaagcacagactaccctaccaatgagctccacaaaccaccttccaattattccccacctccttacaccaggacagatcacccttctaatgatggctacaatcctcacagcaatgataaaccggatgtttcggcttaccctcaggcataccaacccccaccctacacaattgaccctcagcacatctctcaaaactactactccaccaaagccccagctgctccatacaactaccctaattttcagtcatatccaagttttcaggacagcacgtcaccttctgtcccgactgagccgacgtatcaatcttcattctatcctgcaactgatggtcctgcagctacttcgtacactcctgcttcaaattcctctgccccaacacattaccactcaactgctgactattcacctcaagttactcctccagctgcgccaccagctagccaatataaatatgatagcagttaccagcctgaagttgagaagattgctgaggctcacaaggcagccaggtttgcggtcggtgctcttgcatttgacgacgtatctgttgccgtggatcacctgaaacgtgcactggatcttctgacaaacccttctgctgaacctcgctagctcttttgcattcccttgctcttgtcagaagcatcatctgtacatatacaagattggcgtaccacccatggataaattgccaggctgcatacttacaagacaggggtaaccacacaaatctaggagataataagcgagcctttccgtgtgagcttttgaagtgacacttacaggaaaccttaatgtctaaaatctagttattttattctgagttttgtgctatgtaacccattatattcatttgcacgttctcgaggtctggtatggtattttgggtatggatggttgatgccgtgcctgcttgtttctctttcatggtttgtcatgctgctgtcactcacgaaaagatgatttagatg

SEQ ID NO: 152423 - DNA, 377 bp, Zea Mays
cctggataacactaggttagtgttgttagacgatgaccacttgacgagtatccttgtcctagcacttgatgagggaggttcttccatcagcattaccatgcgtagtagcccgcgcttggggtcgacttggctcgtcttccgcatcacgcgattaattatcgtacctcatgggatgcacaatgcacatgtatgaatatatagaggaatattataaaacaattaatctacgttgaagatgacgaaacacttataacaaagcattaagcagatactaactagtgatatatgactaattataataattatgcttttctagcctattcaaaggtatttcatatatcacaaaactatatatatatatatatatatatatatat

SEQ ID NO: 152424 - DNA, 408 bp, Zea Mays
atggaaggagcagaggggctactgagcgttcggccgacctcggctagggagagcaccggggcgagccatggagcttgggacgaggagcaggaaggaccggcgagcttcggcgagctgcgcgcagggaagttgggtgccgagcgccaggaaggggatgggctggagcagcgagctgcagagaccgagctcggcagagagagctgcggcgcgatagaggaagaagatgtgcgcagggtggcaaacttcgcgcacgccggggagctgggcaaactccatgggcgagcagaagtcgggctcaaaggggatccggctaggcgcggccgatcaggggtgccgcggcaagggagtagagagaatcatgcggacgaccggaactccgtcagggcgcgcgccatggggacgagctga

SEQ ID NO: 152425 - DNA, 1815 bp, Zea Mays
agctcagctagtggactcgtttcgcttcctccaggctccagcgcctgaggcagccgcaacgcaagggccccggaaccacgcgaaaacgcggccaaaacaccgcgaaaatctcgacacccaactgcgccgcgtgggcggctgcggcggacgaccaatgtggagggggacgcgcatgtacagcctcctaggcgtcctcctcctcctggccctggcctacctgaactggcatccaggccacggcccctccgccggcggccctggtgggttcaagctccccatgccgtggctgcagccgcggatgtccttcgtgggccgcgccggcacccacttcgtcgacaccctcactggcgcgccgatctacatcaacggctggaactcgtactggctcctctcggcccggtctccctcgttgtccgtcgagatgctgcgccgcggccgccgcatggggctgacgatatgccgcacatgggcattcagcgacggtggccccggcgcgctgcagatctccccaggccggtttagcgagcctgttttccagatgctggattatgtgatatacgagtcccgaagaaatcatgttagattgatcctatgccttgtcaacaatcttgataactttggagggaaggcccagtatgttcaatgggcacaagcagctggtgttaatgtcacaaattctacggattcctttttctttcacccaactattaaaggttactacatggagtatgtaaaggcaatattaaccagaagaaacacttacagtggaatcaaatattgtgatgaacctgctatatttgcttgggaactcatgaatgagcctagatgtgtgtccaattcatcgggtccgtatattcagtcttggatagaagaaatggcagcatatattaagagtttggacagaaagcatcttattacagtgggtactgaaggattttatggccctgggagaggtgagagactgggcgtaaatcctggagactgggcagcttcagtctgctctgactttatacagaactcagctgtcaaagatattgattttgcctcggttcacgcctatcctgatagctggtctgtatcattacattttcattactgaacaattttaattgtaccatgtcattgatgcatctttgctacaggctaccaaaggcaagtatggaagaaaaagtcaagtacctttctgtctgggttgattcacacttgaatgatagtgaatacgtcttgagaaagcctgtcttgtttacagaagtaggttacctccaacatgcagaagctaacagcacagttgatggagacattcttctaaaagttgtctatgataaactatacgattcggcaaaaaagctgcaagcaggaagtggcgctcttatttggcagttgatggtcgaaggcacgcagatgtaccatgatgacttctccatggtggcacgggatcgtccgtccacatataagctgatgaaggagcagtcatgccgactgcagagtctatatggaaaagagggagaccctacttggaaatgctcaccctaaggttttttcttcttcctattggtttcgaaaccttccacttcatccaacaaactggattgttggaatcattcagaaagaggatgattagggaaatgatgaacaaacatctgtgtggtaaatagcttgttcatagatttgtagctgaagagctagactgctagtggaaaatccacttcttacaacaaacatgcattctgtcatatcacatcatgctgtacgttgtacaattaatatgacctattagtggtcaaagtgaaaagagcaccgatacaagttatgata

SEQ ID NO: 152426 - DNA, 901 bp, Zea Mays
accccaagccgcgtcctacgtggtcgaggactacagcaagaaatgggggtctacaagtctgcagttctgcttggtgtggttttggcctcagtccttctcggcttcctggacgttgtgtacgcaagggagctcactgaagccaatggctctggagtgaagaataatgtgaagcctgcaggagagcctgggctcaaggatgagaagtggtttggtggtggatacaagcatggtggagggtatggaaacaaccagccaggatacggtggcggaggaaacagccaacctggatacggcggcggaggaaacagtcagcccggatacggtggaggatacaagcgccatcaccctggtggcggctacgggtctggacaaggagggcctggatgtggatgtggaggagggtatggaggtggcaatggtagtcctgggtacggcgatgacaatggtggtggcagtggcactggtggcggaaatggcaatgctggtgggtacggaggaggaggaggcggcggttatggaggcggctacggcagtggtagtggtacagcaccaggaggcggatatcatggcggtggtggtgcacaacgctacgctgggcaaaactagcaagaacaaccccttatgctagtttatgttaaataaacgatccattgttcatgtgactgagcaatttaagcagtgaaggatcttgactcgtgttatttgtgttaccatatgtattggttgttttatgtttaagatgaatgtacaccgctatttgtatgtcgaactcgttgcatggagatgaaaaaaaaaggcacaaaaacatcagcaaaccatgctttccttccggtcgaccagatttgggctgatatttattgagtaaaaaaaatgtatctctgggagattgtttcaagtaaaa

SEQ ID NO: 152427 - DNA, 783 bp, Zea Mays
cccgcggtacgtgccctccttctcgcgctcctaaacaatcgcccgacatcctccccttccattctaggctccgtgtctcgctgtccccactacgtctcctccggctccatctcatcccgctgccgctccttctcatcgtcgtcgtcccagtcccggagtcgctcccctcctctggctaagcgcagccttgatgtgtcggcaactggagtatttggtacaagactgcttgatccagataattttattacacttcaggcgtggcttgtgtgttcagactactactgttgaatacagttacagttggtccttgtggccctcaacagtttggatgccgtcattcagcattgaacagagccagagtctggtaacagtttttaatcatgttcttgataggatggatacatctgttaaatgtgtgaccctgcatttagaattcagatcgacacctttgattggttccaattccctgctgctggcttattatttaactttcctttttgcagtttctataatagcagagacatgcactaaccagcatttgctaacccaatcaatttgttggcatcattttattgattgaatccatcctgcctcatgctttgcttcgccctgttaacatgtttttattgctgtcgtgggctcttcgcaatttaaagttctctcgtatatgaagtcacatagttacatgacgtacattctacttgaacatggttgtttggtattttttctcatgaattgtaatgtttcttatgctggttctctttatcctgggtgcatttactt

SEQ ID NO: 152428 - DNA, 699 bp, Zea Mays
atgtccggcgccagcgcgcaagaggagttgtccatgtggcatcatctctggctccgccactctggtttgagggatgccgaggggttgtacctcgccagcgattcgaacaagcggctattgatctacttcccctttatgcaggtcaagctacattccgtgctattcaaaggccccaaggatgacggcttaccagtgcttatggacctttgtttgttcgggacactacctttgctaatggggaacaggcaaggggaaaatcttcttatagatctgttccgtcactgtgacaatcatttgggagagaaacaaaaaactccatctggaagtgcacgacagccactacagttgactaacgatgtaaccaagatgatgcaaaagcatcagctagaaacgccacagttccatcagacccgattttccgttttacagaatatgtcatttccatccttaagacaaacaagaactacaggctgcttccgtcttcacccaatcagggatgaggatgccaagttcaagctctgcaacaggaggtctgttcagtttgacgtcggcaacatggtcatggtgaccggcgggaggaacactgggcgtgtaggagtgatcaagaactgggagaagcacaagggcatcttcgaggaaaacatagaatggaattcaaatttggtggtcgtaaaagtgtggagacttgaattcaaataa

SEQ ID NO: 152429 - DNA, 456 bp, Zea Mays
atgggggtcaagtttttagtccttctcggtgttgtcctggcctctcttgtcttccaggacgtggcatttgctagagagctcactgaggccaataatgaggatgagggaaagaacatgaaacaaggaggaatgactgaattaaaggatgagaaatggggaggtggatataatggaggatatggatatggaggtgggtatggtggtggatatggaaaaccgggctatggtggtggatatggtggaggatacaggcccaaatatggcaggggctacaggtccggatatggatacggtggcgggtatggtggaggatacggtggcggttatggtgggggatatggtggcggtggtggctatggagaaggtggaggctttggaggtgggcatggtggtggtcgctatcctggtggtggagggcaccatggtggtggagggcaccatggtggatggaattaa

SEQ ID NO: 152430 - DNA, 190 bp, Zea Mays
aggctaagaaggacctaacggaggttacccacaaggtctacttcgatgtcgagattgacggccagcccgcaggtcggattgtcatggggtttttttgggaagactgttcctaagacagcagagaacttccgagctctttgcacaggaatggaagcaagaaggcacagagaggcagaggatgtacctagaa

SEQ ID NO: 152431 - DNA, 393 bp, Zea Mays
atggaacctcgacgcgtaggggacgcggacggagaatcccgctccgcagtggcccaatcggtcctgcccccgtgcgcggagacccacgggatgaaccagcggtcgcgccggagaagtacgaggggaaaccgtggaggtagtaggggacgaagggcgctgacctccgtgtgggggatccatggccgaattgcctgcccgcccgccggaggggctgaggggaggaggatgggggtgggggagaggtgtcaagatccctatcctctcctcctaccatgtgaggcatgctggaagtccatcaaccaccggatcctctccagccgtctcgcccccgcggtcctccccgatgagcacgcgctcgcggagtccatcaagcgccgcctcgggctgccctga

SEQ ID NO: 152432 - DNA, 339 bp, Zea Mays
atggagatagggatttcatatccggttaaagtttgggacacagtggctccttcgagtggttcatcaccatgtgtaggcagtgctcacctcaactcaaatgggccaccaattgctatgaaatgccatgaatccctttgctatattgctgctggagctgaagtgacagtgattgacttgaggacaatgaagaaggcttttgtccttgcactccagaaccacagaatactttcttgtgatatattttatgatgctcagaatgatttcttgacacctgaatgggacagtgagaatttacaagtggttccttcagtaattcaaaccatcaccaatcccttctga

SEQ ID NO: 152433 - DNA, 1758 bp, Zea Mays
aaatcgtccctcacacggcggcagcaaaaacagaggacacgggtgcgagagacatgcgacagagaatccatggcggcggcggcgtggtgggagacgctggtggtggcagcggcggcggatggaaccggtgggagcagcaccacggtggtgtccatctgcatgttcacgacggtgctgtgcctgtgcctcgtcgcgggccacctcctcgaggagaacaagtgggtcaatgagtccatcaccgccctcgtcatcgggtgcatcataggagtgatcgtatttctgctgaccaaggggaagcactcacacatcctgcggttcgatgagcagctcttcttcatctacgtgcttccaccgataatcttcaacgccgggtttcaggtcaagaaaaagcagttcttccacaacttcatgaccatcatgtccttcggcgtgttcggcgttttcatctcaggtgcaatagtttcggcaggctgctattggctcttcccgaaagtcgggtttggagaacttggtgcggtagattatttagcactgggagccatattttcttcaacagacaccgtgtgcacgttgcaggtcataaaccaagatgagacaccaaggctgtacagcctggtgtttggagaaggagttgtcaacgatgcaacggcggtcgttcttttcaatgccatcaaggatctcgatatcagtcggctcaagggtggggttgtgctaaaagtgatatttgacttcctctatctctttgcaaccagcactgtcctcggaatctcaatcggtctagtaactgcatatgttctcaaagctctgtattttggtaggcattcgaccgatagagaggttgccttgatggctctcatggcctatctatcgtatatgctggcagagttgctagagctgagtggaattttgaccgtgttcttttgcggcattgtcatgtcccattatgcatggcacaacgtgacagagagctcaaggattacaacaaagcatatatttgcaacattatctttcattgccgagacattcatcttcctttacgtcggtatggatgctcttgacattgataagtggaggacatcaaaggaaagcttcaagacatccatcggtatctttggcatcctcatattgctcatactactgggacgagtggcatttgttttccctatatccattttgtcaaatatcatgagtggaagttctgaaagaaccccgatcacattcaagcaccaggttgttatttggtgggctgggctcatgagaggtgctgtttccattgcactagcatacaatcagttcacattttcaggtgtaacatcggatccagttcatgccaccatcatcactagcacaataatcgtcgtcttcttcaccactctggtgtttggcttcttgaccaggcccctgatcagtggcatgctcccgcaccagtcgagggcgctgtccagaggccatagcacaggcagcaactccccgaaggatgacttcaccctgccgttcctgtcgggcgatgaaggcgcgtcaggcagcggtatcgtcttggagcaagccaagaggagcttgtctatgatgctggagaggcccgtccacacggttcacatctactggaggaagttcgatgacaggttcatgaggccaatctttggtggaccgcggtcgcactgactgcaggtgcatataagaggagttagtttctctgaattctgtcagcatagttcgcccatggcactgtaaagttgataacactgaatgctttcaagc

SEQ ID NO: 152434 - DNA, 1932 bp, Zea Mays
gacccggacgaccggaggcagatacgtgtgcgaccctggacgcgcgagaagatccatccctccacacggatctcctcctgtccaccaggctacttaactgatgagacggcacggccaaaagattctcgtggacgtctccggcgcccaattgtatagtagcccgcgcgctctagcgagaagctagcgcgccatcgccgccggcgtcgtgtcatggaaatggtagagtgctccctcgttgctacacttgctccgcgcccgctgcccggacaggttcggaaggccttgccccggccggcggcttttggggcgagagcgagactccgggtgcggtccgtgggccgagaggagcctctgcatccgcagcagacggcagtccgggcttccggaccggatcacggaggccgggcgctggggcaggctgcggtggggttcgccgccgctgccgttgtgtcactaaccgggttctccggggatgtgtccccgctgccgacgccgcctgcccgggccgagtcgctcaccgtcgcgttccccgtctccaaggcgcgcgaagtgaacagagtgcagaggacgctggtggagacgtgggggctgatccgtgagacctttgttgatcccaccttcaaccaccaagattgggatcagaaactacagcaaaccatggtagagatatttccactgaaatcagcggatgctgcctacagtaagattagtgggatgctgtccacactcggcgacccatttacaaggatcatcagccccaaggagtaccagagttttaggataggaagtgatgggaatgtgcaaggggtcggggtgtttataaacaaggagccaagctctggacgattgcttgttatggactgcattcagggaggcccagcagatcgagcaggcatacatgaaggcgatgagctagtcgagatagacggcaaaagtgtttctggtttggatggagaggctgcagctcagaggcttagaggccgtgtaggaacaacagtgaaagtgaagttgttagatggaactgacgatgaaaggggtgggggtttaagacaaaaggaggtccagctgtctcgtgaaattatcaacctttcacctctgtcaactgcaattatctctcatagaacagacgatggccatgagtgcaagactggctatgttagattagcttccttttatcagggaggtttagtaaaagctggtcttgatgtggctcaaatttggttggatggagatgaaacccttgtcaacactattgatcgtgaagggaatgtgctaccaataaatatgatccaagggcattcattaacgcatgatccccttgttgtgcttgtcaatgaaggaagcgcaagtgcaagtgaaatcttggcaggggcattacatgacaatggacgagctattctggttggccatagaacctttggtaaaggaaaaattcagagtgtgactgagctggacgacggatctgctctgtttatcacagttgcaaagtatctatctccagcgctgcatgaaatcgatcaagtaggaatccaacctgacatacaatgcagccctgacatcctttctttgccaagagcgccttcgctaagagaaaacagcaacgccacaaatttggagatggattcgtgtatcatggtagcagaacaagcgttggaaattcagcaaagcaagggttccgcttcttagatgcactatgggctctgtacattatttgcattctacagtagattggatagcttaccttagagacttataaagttctgtagcggtatatagagagaggctgatcctcacatgtttcattttaggcattatctattcggtgattcatgggaatgtatataagttgaccttgtcatatatctgtgtcgggttcattcttgactatccatactcagaaatataacgtgcaatttttttgtaattaggcct

SEQ ID NO: 152435 - DNA, 2063 bp, Zea Mays
gacccggacgaccggaggcagatacgtgtgcgaccctggacgcgcgagaagatccatccctccacacggatctcctcctgtccaccaggctacttaactgatgagacggcacggccaaaagattctcgtggacgtctccggcgcccaattgtatagtagcccgcgcgctctagcgagaagctagcgcgccatcgccgccggcgtcgtgtcatggaaatggtagagtgctccctcgttgctacacttgctccgcgcccgctgcccggacaggttcggaaggccttgccccggccggcggcttttggggcgagagcgagactccgggtgcggtccgtgggccgagaggagcctctgcatccgcagcagacggcagtccgggcttccggaccggatcacggaggccgggcgctggggcaggctgcggtggggttcgccgccgctgccgttgtgtcactaaccgggttctccggggatgtgtccccgctgccgacgccgcctgcccgggccgagtcgctcaccgtcgcgttccccgtctccaaggcgcgcgaagtgaacagagtgcagaggacgctggtggagacgtgggggctgatccgtgagacctttgttgatcccaccttcaaccaccaagattgggatcagaaactacagcaaaccatggtagagatatttccactgaaatcagcggatgctgcctacagtaagattagtgggatgctgtccacactcggcgacccatttacaaggatcatcagccccaaggagtaccagagttttaggataggaagtgatgggaatgtgcaaggggtcggggtgtttataaacaaggagccaagctctggacgattgcttgttatggactgcattcagggaggcccagcagatcgagcaggcatacatgaaggcgatgagctagtcgagatagacggcaaaagtgtttctggtttggatggagaggctgcagctcagaggcttagaggccgtgtaggaacaacagtgaaagtgaagttgttagatggaactgacgatgaaaggggtgggggtttaagacaaaaggaggtccagctgtctcgtgaaattatcaacctttcacctctgtcaactgcaattatctctcatagaacagacgatggccatgagtgcaagactggctatgttagattagcttccttttatcagactgcagcagctgaaatggaaaatgccgtaaaaaggatggaggatatcggtgtccagtcttatattctagatctgcggaataacccaggaggtttagtaaaagctggtcttgatgtggctcaaatttggttggatggagatgaaacccttgtcaacactattgatcgtgaagggaatgtgctaccaataaatatgatccaagggcattcattaacgcatgatccccttgttgtgcttgtcaatgaaggaagcgcaagtgcaagtgaaatcttggcaggggcattacatgacaatggacgagctattctggttggccatagaacctttggtaaaggaaaaattcagagtgtgactgagctggacgacggatctgctctgtttatcacagttgcaaagtatctatctccagcgctgcatgaaatcgatcaagtaggaatccaacctgacatacaatgcagccctgacatcctttctttgccaagagcgccttcgctaagagaaaacagcaacgccacaaatttggagatggattcgtgtatcatggtagcagaacaagcgttggaaattcagcaaagcaagggttccgcttcttagatgcactatgggctctgtacattatttgcattctacagtagattggatagcttaccttagagacttataaagttctgtagcggtatatagagagaggctgatcctcacatgtttcattttaggcattatctattcggtgattcatgggaatgtatataagttgaccttgtcatatatctgtgtcgggttcattcttgactatccatactcagaaatataacgtgcaatttttttgtaattaggcctattggttcttgtgtaatctttaaggttgatcagcatctaaaggt

SEQ ID NO: 152436 - DNA, 2025 bp, Zea Mays
gacccggacgaccggaggcagatacgtgtgcgaccctggacgcgcgagaagatccatccctccacacggatctcctcctgtccaccaggctacttaactgatgagacggcacggccaaaagattctcgtggacgtctccggcgcccaattgtatagtagcccgcgcgctctagcgagaagctagcgcgccatcgccgccggcgtcgtgtcatggaaatggtagagtgctccctcgttgctacacttgctccgcgcccgctgcccggacaggttcggaaggccttgccccggccggcggcttttggggcgagagcgagactccgggtgcggtccgtgggccgagaggagcctctgcatccgcagcagacggcagtccgggcttccggaccggatcacggaggccgggcgctggggcaggctgcggtggggttcgccgccgctgccgttgtgtcactaaccgggttctccggggatgtgtccccgctgccgacgccgcctgcccgggccgagtcgctcaccgtcgcgttccccgtctccaaggcgcgcgaagtgaacagagtgcagaggacgctggtggagacgtgggggctgatccgtgagacctttgttgatcccaccttcaaccaccaagattgggatcagaaactacagcaaaccatggtagagatatttccactgaaatcagcggatgctgcctacagtaagattagtgggatgctgtccacactcggcgacccatttacaaggatcatcagccccaaggagtaccagagttttaggataggaagtgatgggaatgtgcaaggggtcggggtgtttataaacaaggagccaagctctggacgattgcttgttatggactgcattcagggaggcccagcagatcgagcaggcatacatgaaggcgatgagctagtcgagatagacggcaaaagtgtttctggtttggatggagaggctgcagctcagaggcttagaggccgtgtaggaacaacagtgaaagtgaagttgttagatggaactgacgatgaaaggggtgggggtttaagacaaaaggaggtccagctgtctcgtgaaattatcaacctttcacctctgtcaactgcaattatctctcatagaacagacgatggccatgagtgcaagactggctatgttagattagcttccttttatcagactgcagcagctgaaatggaaaatgccgtaaaaaggatggaggatatcggtgtccagtcttatattctagatctgcggaataacccaggaggtttagtaaaagctggtcttgatgtggctcaaatttggttggatggagatgaaacccttgtcaacactattgatcgtgaagggaatgtgctaccaataaatatgatccaagggcattcattaacgcatgatccccttgttgtgcttgtcaatgaaggaagcgcaagtgcaagtgaaatcttggcaggggcattacatgacaatggacgagctattctggttggccatagaacctttggtaaaggaaaaattcagagtgtgactgagctggacgacggatctgctctgtttatcacagttgcaaagtatctatctccagcgctgcatgaaatcgatcaagtaggaatccaacctgacatacaatgcagccctgacatcctttctttgccaagagcgccttcgctaagagaaaacagcaacgccacaaatttggagatggattcgtgtatcatggtagcagaacaagcgttggaaattcagcaaagcaagggttccgcttcttagatgcactatgggctctgtacattatttgcattctacagtagattggatagcttaccttagagacttataaagttctgtagcggtatatagagagaggctgatcctcacatgtttcattttaggcattatctattcggtgattcatgggaatgtatataagttgaccttgtcatatatctgtgtcgggttcattcttgactatccatactcagaaatataacgtgcaatttttttgcaaaaacaaaaaactaa

SEQ ID NO: 152437 - DNA, 729 bp, Zea Mays
gcaaaattgatgactgaggtaattgtaccattatctgcaaccttagcaatagaggaagtttttgaatccttcaaaagtgactctaagtttatggcgctcttacatgaccattcatacactgctcatgctatgggctatactgcaacactaaacgctatggattgatatcgggatcctattcaaaccttgatgtcgaccacatgaaactcaaggagggtgcagggccacaccacacatatggactgctttcagtttgtgtgtcaaatctattttccacaaataaattatataaacaaaaggatagcatcacaaagaaggatgggacagtgatgaggctttcaggtggtgggcatagctgctttcgggatagtgatgaggcaagattaagattcaaacggaagttctgggagaaggctgtggagatagatgatctatgtggaaaggatggtgcatggtggggtattaaaggttacatgcaagacaatttcaaccatagcaataaggtcacctcgcacaaagagcatttttagaacagtaggctcgtgaaatctgtgttggatatgtattgggagcttcgtcctattaccggttcatccttaacacaccaaacaaggtatgacccaacacgtgcagttgaccaaatcattgaagatggtcactacaccttgtttcgaagcctagcgagattggatgcctcagtgttcaattgttacacgcagatggtatttg

SEQ ID NO: 152438 - DNA, 1892 bp, Zea Mays
agggaaagcctcaaaaggcgacgcgcaagggccgaggagagaaaggaacctgaggaaggcacaccagtttcaagcaatccctaggccgtggcgacgtgctgggaaggattcaaatcaggggcgaagcctaggtgacggcgctgttagtcgcctctagtagctgcgcgacgcgggctggcttgtccgatcggtttgcctcggccatgtcgactaagaaagttctttgcaagttcttcatgcatggagcttgcttgaaaggagagtactgtgaattctcccacgactggagtgatcaagcaaataatgtttgcacattctaccaaaaaggtgcatgctcgtatggtagccgttgcagatatgaccatgtcaaagtttctcgtaaccccacagtgccaccaccacgcccaacgtcaagtacttcaagacgtgcatctacttctcttcaactttcaagttacaatcatccacctcatatggtgcaccaaacagattcaagcaaccaaagacatcagatatctgtggatgtgttggcacattctgccagtaagcctgcatggagaaatgattttcagcatgatattgtttcagatgatggaattgactggtcttctaatcaaaatttgataaaccagacatcattgaaacctgtggatctccctatttgttcttttgctgctgctggtaattgtccttatggggaagggtgccctcaaatgcatggagatctgtgtgcaacctgtggaaaactgtgcttgcatccttatcgtcctgatgagagggaggagcatatcaagttatgtgagaaaaatcacaaacgccttgtagctctgaaacgcagccaagaaatagaatgcagtgtatgtttggatcgtgtgctttcaaagcctactgctgctgaaaggaagtttggactcttatccgaatgtgatcatcctttctgtattgaatgcattagaaattggcgtagcaattctcctgcatctggtatggatgtgaactcagcattgagggcttgtccaatatgtcggaaactttcatactatgtcattccaagtgttctttggtacttctcaaaggaagagaaagaggagatcactgaaagctacaaatccaagctcaagtctattgattgcaagtacttcgactttgggactggctcatgccccttcggaacaagttgtttctataagcatgcctacagagatggccgcttggaagaggtaatactgcggcatcttgatgctgatgatggaagtacagtaattgcaaaaagtatcaggttatcagacttccttggtaggatggatctttagggaccagcagctgtattgatatcaaattttgaagatctccatggtcctgtagatgctgggattaccttttcagagcactgttgacctgagggcgacggaaacaagtctgacaacaattgtgcttgaatatcaaaacagaagtaatactcgtatttatagacttcactaagtgtggctctatgtatcaattgctggtcttctaggccaccagataatagctgaacatttcctggccgacaagtgaaaggggcagccgtataaatttgcttccattccacctgaatgttctcttcatattgtggaagggtactgcaccaataggtccaataaggccatttgtttgctttacttaatatacaaaaaaagtatagcagatgaaatgcaatgacaactgtaatgcagcattgttgaatgtgagcgtgagcggtggttttttatcgatgacctgctgaggaaggtcctcttagtaggcaggtaaactgagaacatttttttgttatatatatacagcataattgtacgagaaaaatagcaaatgaaccgagaatgatcattaaatgcagtcgtcggttgtatggt

SEQ ID NO: 152439 - DNA, 1896 bp, Zea Mays
agggaaagcctcaaaaggcgacgcgcaagggccgaggagagaaaggaacctgaggaaggcacaccagtttcaagcaatccctaggccgtggcgacgtgctgggaaggattcaaatcaggggcgaagcctaggtgacggcgctgttagtcgcctctagtagctgcgcgacgcgggctggcttgtccgatcggtttgcctcggccatgtcgactaagaaagttctttgcaagttcttcatgcatggagcttgcttgaaaggagagtactgtgaattctcccacgactggagtgatcaagcaaataatgtttgcacattctaccaaaaaggtgcatgctcgtatggtagccgttgcagatatgaccatgtcaaagtttctcgtaaccccacagtgccaccaccacgcccaacgtcaagtacttcaagacgtgcatctacttctcttcaactttcaagttacaatcatccacctcatatggtgcaccaaacagattcaagcaaccaaagacatcagatatctgtggatgtgttggcacattctgccagtaagcctgcatggagaaatgattttcagcatgatattgtttcagatgatggaattgactggtcttctaatcaaaatttgataaaccagacatcattgaaacctgtggatctccctatttgttcttttgctgctgctggtaattgtccttatggggaagggtgccctcaaatgcatggagatctgtgtgcaacctgtggaaaactgtgcttgcatccttatcgtcctgatgagagggaggagcatatcaagttatgtgagaaaaatcacaaacgccttgtagctctgaaacgcagccaagaaatagaatgcagtgtatgtttggatcgtgtgctttcaaagcctactgctgctgaaaggaagtttggactcttatccgaatgtgatcatcctttctgtattgaatgcattagaaattggcgtagcaattctcctgcatctggtatggatgtgaactcagcattgagggcttgtccaatatgtcggaaactttcatactatgtcattccaagtgttctttggtacttctcaaaggaagagaaagaggagatcactgaaagctacaaatccaagctcaagtctattgattgcaagtacttcgactttgggactggctcatgccccttcggaacaagttgtttctataagcatgcctacagagatggccgcttggaagaggtaatactgcggcatcttgatgctgatgatggaagtacagtaattgcaaaaagtatcaggttatcagacttccttggtaggatggatctttagggaccagcagctgtattgatatcaaataaagtttgaagatctccatggtcctgtagatgctgggattaccttttcagagcactgttgacctgagggcgacggaaacaagtctgacaacaattgtgcttgaatatcaaaacagaagtaatactcgtatttatagacttcactaagtgtggctctatgtatcaattgctggtcttctaggccaccagataatagctgaacatttcctggccgacaagtgaaaggggcagccgtataaatttgcttccattccacctgaatgttctcttcatattgtggaagggtactgcaccaataggtccaataaggccatttgtttgctttacttaatatacaaaaaaagtatagcagatgaaatgcaatgacaactgtaatgcagcattgttgaatgtgagcgtgagcggtggttttttatcgatgacctgctgaggaaggtcctcttagtaggcaggtaaactgagaacatttttttgttatatatatacagcataattgtacgagaaaaatagcaaatgaaccgagaatgatcattaaatgcagtcgtcggttgtatggt

SEQ ID NO: 152440 - DNA, 925 bp, Zea Mays
cccgatcgaggcaagctagccacaggcaagggcgcaaccaataatagcaagtgtgatcatccgttgatccatcttgctaataagcctgcgtgcccttcgttcttcctcgtctcgatcccgacgacgctccgttcggctccggcaaaccacatcaagtcgcgatggagatgaagaaggtcgcctgcgccgtcctcgccgccgccgcctccgccaccgtggtcctcgccgccgaggccccggcgcccgcccccaccagcgcctcctcggccgcgttcccggccgtcggcgccgtgctgggcgcctccgtgctctccttcttcgcctactacctgcagtaaaattaaaggaggatcggagggagaggctgctggctgccattgcctgtattcggttggattccgtttatatatatatttaagtactttaatttgggtctgaacatgtcgattgatccattcattttatttgctttgccatttctcccttttctgttaatttcgatatgtaaagaggggagaatgggagacactattcgtttggacatgacaattggaaattaatcaatacccattgttagttatgctgttgtcatttcagcttcatcttcatggctattgatttttttctttactctgattttcaaaatcgagggttatattggagaggatgaggcagtaataaatactccttgtttaaactggttttttttctcgtaatcaaatggcacaaattaagaataaaaactaatcttttcatcaaaaagaagaaaaactattcttcaataatggttatagttgtgtgttgcccgcatacctaacacatccaagattatttccagaagtgtaaccttttgcggagaacggttaaccatgagtgccaggccaaggcacatgctagccgtgcgcgctcatacaacatatgttag

SEQ ID NO: 152441 - DNA, 123 bp, Zea Mays
ttagcgggtaagctgggacaaccacattccccaacgttcccttccttccttccgtccaattttaacggagaggtaaggacgatattgagatggtattattataatcttaaaccaaacaatcat

SEQ ID NO: 152442 - DNA, 775 bp, Zea Mays
ccgccccatctgttcggcccaattcgaagacacagcactgatataaccgggcgatgcctagggtttctcagtctttccctgccacagtcatcagccgccgtagggagcaggagtgagggagcgcgatggcggagaagaagcagcgcccaggagggtccaggaaggacgaggtggttacccgcgagtacaccatcaacctacacaagcgcctccacggatggtatagtcgcagtcgcagacacctccgcacccttgccactcccgtctttccccgaacctgatctagcgacgcttgctgcgaacgaattttccttgcaagaatgaatcgatttcgtttagttatacaggcgtgtgcgaactttgatctgtgcatattgggccagcacgttgcaattgttcagttctctggttgtttttgcaacaactccgacctccgggtatagtccagtgcatgtctttgaccttgtggctgtgcactctacatacccggcacagtgaaatctgctcatcgtacacgtgttgctccttgaaatgctactatgtgttacatttgggcaggaaattgctctaattcagcgctcccagtggatggcctgttcgatgtgtttgccacgttttgtcttggtgcctctagtagacatagttttattttctgttgtaattgtaagatactgccgtttgtgcctcattgaagatgcgttgctaccacttactttcatcctgaactcatgatacatgttgcatagacaaatagcagcaattttgtctatagcag

SEQ ID NO: 152443 - DNA, 410 bp, Zea Mays
ccgccccatctgttcggcccaattcgaagacacagcactgatataaccgggcgatgcctagggtttctcagtctttccctgccacagtcatcagccgccgtagggagcaggagtgagggagcgcgatggcggagaagaagcagcgcccaggagggtccaggaaggacgaggtggttacccgcgagtacaccatcaacctacacaagcgcctccacggatggatcctctgctgtaacgtccgtgaacgttgtggccgacgactggctgacatgtgggaccagccccatactgcagtagctggacgatacggcagaggagccgttcctctttgtttacatgcacattttctttcggttggtttgtatatagatgtcatgccagtgtgctgcaattggactaagggggtgttt

SEQ ID NO: 152444 - DNA, 852 bp, Zea Mays
ccgccccatctgttcggcccaattcgaagacacagcactgatataaccgggcgatgcctagggtttctcagtctttccctgccacagtcatcagccgccgtagggagcaggagtgagggagcgcgatggcggagaagaagcagcgcccaggagggtccaggaaggacgaggtggttacccgcgagtacaccatcaacctacacaagcgcctccacggatgcaccttcaagaagaaagcccccaatgctataaaggaaatcaggaagtttgcacagaaggcaatgggcaccactgacatcaggattgatgtgaaactcaacaagcacatctggagcagtggtatccggagtgtgccgaggcgtgtccgtgtcaggatcgcacgcaagaggaacgatgaggaagacgccaaggaagagctttactctcttgttaccgttgctgagatccccccagaaggcctgaagggtctgggtaccaaggttgtggaggacgacgagtagatctgcctgggtactgatctgtgtcaactgtcaaatcattttttttggtgtttttgagtttgttagcactaagtcgatagccttgtgagaaatctttgagttttctgatggcgcgcttgttctcgtctggttttgaacttttgaagatacccgcaccaagtactgtagtctgtcgttccaaatcttttctgtaggcatcagatatgcagcatgtctgagtctgacgaattttgtttcattcgcatttgaacttggtaagtacgaattatttcaaagcaaattagttacaattagttacaaatggaatcctcttcgtagctgccaaaccgaaatggaaacctcttcgttgctg

SEQ ID NO: 152445 - DNA, 487 bp, Zea Mays
taaagagaggttcacatctttttttactgcaatagccaaaatggtttatcctccccaaaattattcagtaaccaaagccaaagaaaattttgtagcgtggtggtggtggcgtggtgccggtgcagctgaaaattttgtggccaccgccaaagagacatttttacacaagcagtagaaagctcacattgacgggatcatgggaaagcatgcaaagtgcagatcagcagatgcaactgcagaccgcgagacagtagaacgcgtgactgctggttctctgattaacacaactctgctactccatcccatagtccacgctcgaggtcactccaactgatatatgaatatatgatgtacaacttctccgccgccatggagaagaagggatcgtctgctgatcagatcatcgacggtagatgctaatgctgcgcaggcacgtataggcttgcctggaactggaacggacggggaacaattgggacggtttcat

SEQ ID NO: 152446 - DNA, 2962 bp, Zea Mays
tttctttttttttggtcatatatgaactgaattattagttccacacaatttcccagcttctggttcggcatgtagataaactgaattattaagcttcacacgattccccagcttctggtccggcatgtagatgaactgaattacagtacatgttattatggccactctacgcagatggaacccgaacgggaaaccagatctgtcagtactcagttgccgccagcgcagaggagggcgtcaaccttgtccttgaggtgcgcctcgtcgtccccgaggcgggcggcggcggcgccatcctcccagcggatcagcgttggcacgcccttgagcccgaacctggggtccaccctccacgggtgcgccgggtcgcgccaagtgggcttgtccccgacgtaggcgcgcaggagcaccgcgtccttgccctccagtgcctccagccgctcgtagatcaccggctccgccacgttgcagtctgccgcgccgcacaacgacgacggtgggtaagtacgggaccagagcgtcaccacgactagagctgaattcccagaatctgggcttaccggggcaccaggagagggaggagccaggcttgcggtcggccaggaagagcagcagcttcaccttgccgtcggaggcggcgtccggggaagcgaagaggcgatcgaagtgggcgtcgaagtcggaaagccccgcgtccaccttctccaccgtcatctcgccctcctctccccttccgctggccgagtaaagagagcgaattggagcagcaagaaagattgggagacagattggtggaagtggaatgaccgaatgacctaggaagcacacgagacggcgtgccgtgtgattcctttctgggatttctcgcagcctgccggtggtccccgcatctcaacccgcgtgttgcgtacgcgagccggaatcgggggaggtttgggtatggactgaagaggcccaagagctaccgtcgagcccaacaaccaaatgcagccgagtccaacagagtcatcctcatacatcgttcactacttcactctcgtcgttctccccgatcggttccggcctcgcgttcgtcgtctccttccccctcgccggccgcgtgatctgcctgccgcgcggacgccgcgggcgcgacgatgcacgacccgtcggagatccgcaacctccccatcgacatcgcctttggccgcctccaggagtggctcgtggaccgcaagcgagtgccgcacgactggcggaagcgcctcgccggtattcgcgcccgcatcgcgcccgctttctccgccctgccgcggaacctgcacccctcactcctcgccctcgatccagaaggtagtagagttgttcctccctctcagcgggtcatcagtaaattggctaccttgaagcaaagaagatatacagcattctcctagaatccaacaccgagagtcgcaacatatttggccgcctgacgggatccgcgggtgaatgggagtcaattattaaagcttacgagaaggaccatgtcttccttggagaggcagcgcagatcatggttcaaaatgttaactatgacattccatatcagaggaagcagatgcagaagactcagcagcagcttgcagagcttgatcgaagggaggctgacatcaagcgtcttgcggcattgtcagcgactagatatgtagaagcctgccaggaactcggtttacagggaataaatgtgagggaagaactaatagagtccgcaaaaacactcccatctacttttagcaaaatcttggaggtcctgaacagtgatcctgtctcaaatgctatggagtactacacaacttttgttaaggactgccatactgaggacaagagaaatagtgattctgtgctacccaaactgaaagacttgcaggccaatcctccttctttgcatgtctcagtatataatgagatcaagagttctcttggagaggcatcaaaatctcctgggtttactgtgatcgcgggagaaattgactcaaatgttgctgctgctgatgatattgattgggacatttctgtggatactaatgaaattgattgggacattggtgctgtggaacaacctggtgaagaatctggcgatggctttggatcgtatgaaattattgatgctaatatagagctggccggttctgaaaattataatgttggtgtctcagacaaatcaatgaacaaagaagatcttgcatcatctgagtctggtatttgctgggacatcactgctgatagttctgaagaaattgctagtatacagaatgcttcatctgtattagagcaatctcagtctcaaatgatagctgaagatagaagtttgttgctggaaaaagaatataggaataatattctggatgatttactcgaggtaaaatcatttttgactcaacgcttaggggagatgaggaatgcagacacatcatctctacagcatcaagtgcaagctgtctcaccttttgttctccagcagcatgctcctgacagtttggagaacatgcttgtagagatctcgtcagcaatctcattgctaactaatcagaagactcttgaccttataatgatccttaactctaaaaggtttctggatagattagtttcaagcttagaagagaagaagcatcacgaagtaaaactacgggaaggtttaggtgatttatctgttaagcgtatggagctgcaaaacgcactgtcatcatcatggccaaagcaagaggcagcaattacaaaaacaagggaactaaagaagctgtgtgagtcgacactgtcgtctgtttttgatggaagaccagtgtatataattggagagatcaatactttactgagctcaagtgttagtcaattagctggatgactgtatttccgttcctggaccaaataagattgcaaaaatattatcttatggtatatacttctgaatatttatggtttcctggtcctgtttctttgctgc

SEQ ID NO: 152447 - DNA, 207 bp, Zea Mays
atgcaccgcgagcccttcggcgaatctttcccgctggtcgccgccgaccgatatcaagcgtgggcggtcacatcggggtgtggtggaagtgttcgcaggggcagaagggaggttggacccgtggcgatcgcgggattgctcatcggagtcgcgtttccgctgagcttgcgtcccgccgtggccgtaaccaccagagcaacgatccaa

SEQ ID NO: 152448 - DNA, 777 bp, Zea Mays
atggacgttgtagtgatcacactgtcacgagagctgagcaaactacaacctgcaagagctacacatggcatgcttgaccacatcatggtggagaatgcaagtgttaaagttgcattgaatcgcattgccgttgtttctatcctggatgcacataccctgcgtccacacctccatggtgcacgttatgtcgcgcccccgcatccgcctgcggtcgcacgccgccccgcatcccgccggcagcaaccatctttgctgactgatggctgcaaatatttcttcacgttgtctgtaacccttggtatcatgtttgcctatttgctcgacttgtttgttccttggaggcttcttgcagtaataggaaccttgctctgcatagtgttgatatctggccttttcttcattccggaatctccaagatggctggcaaagatgaatataatggatgattgcgagacttctctacaagttctgagaggattcgatgctgacatcacttcagaattgaatgatataaaggtaggtggagatggtcgagaaattgagacacatggttttgctgtcctgggtaacttctgcggcaaaaaaaacataacagagtggataaggaaaaaacataacactgggagcaacatatggtatgacttcattatttctgctttacagctatcactttctaggattatcggattggattgctacactgggagcaacatatggtcatatgtactgatagtgcaaaaagatactgaaagaagctgtcattggcagattcagtag

SEQ ID NO: 152449 - DNA, 117 bp, Zea Mays
ggagaactgcgcctcattatattaataagaaaaagaaaccaaggtctaaaggaagacctaatacaaaagaccccttacgaggccagaaacatgcatataggaagaaatccatctagg

SEQ ID NO: 152450 - DNA, 2286 bp, Zea Mays
atggcggtggcggttgttgacccacgtggcacggcggcggtgtggtgcgtgtgcaggggctcggccagcggcggcgaacgcgacgaccccgacccccaccaccgggtgcgcggcgtccagcgtgagcgtgacggtgtcacagtccaacacgggcgacagggccgggtacgacccggtgttcaagccctggcagagcccgctcgtgatgcccatcccgccgaggacgaggacgacgccgaggcgggcccgttcgcgcagcgccgccttcccccgacagcctcggtgcgccccgcccgcacggcgtccccggccgcaggagcgctccaccgcctcacgcccgccagggagcggatcaagagctcgccggcacctaccggcgctgctgtgtcggcgcctaagccttccaacttccaatcccatgctggggagtacacaccagagcgcctccgggagctccagaagaatgcgcgcccgctccctgggagcctcttgcgtgcccaaccacggactcctgcgactgagccccggtcgcagaagttgtctggtacccctgcaagttccactccagctaccaccaccgcagctgcaacagaaatggtgcttgttcttaaaggtctggtgaaacctatgtctgaggccagcattgggctaaggataccgaagcacgacaaggaggaagataaatctgaagaagaggggaaaggagatgaagaggatgaaggaccacagccaaggcatgcggcgccagattatatctctcttgatgttggtggtgtgctgagcagccagaatgctgctggtgagtcgagtgatgaggatgacaatgagataacggatcagattgcaatgtacactgacaagccaagtgatggaccgaggagcacaaaaggtgtattcagtgggataagtaacaggggtcctgccaccagtttgggggctttcagtgatggcagcaggaaggttgtggatgatagagatgatgatgatgacgaagaagaagagaggaaatgggaggaagagcagttcaggaaggggattggtaggaggatggacgatgcttctactcagaggtcagcaaatggggtaccagctgctatgcaggtccagccacaaccatttggatacccagtgagttcccattaccagccctcccttagcggtgttgtgccaacggcatcagtttttgcatctggaactgcagagttcttgtccatcgctcagcaagcggatgttgcaaataaagccttgcaagacaacatccaaaaacttagggagactcacaagacaatagtcagtgctttagttaagaccgacacacatcttaatgaagctctttcagagatatcaagcctcgagagtggtttgcatgattctgaaaagaggtttgtttatatgcaggagctacgtgattatatttctgtgatgtgtgacttcttgaatgacaaggcatttttaatggagttagaggaaaacatacaacaattgcatgaaaaacgagctttggctatttctgagaggcgtgcggctgacctagctgatgaatcaggtgtaatcgaagctgctgtaagtgctgcagtatctatccttagcaaaggatcaagctcaacttgcctatctgctgcatcaaatgctgcccaagcagcagctgctgctgctaggggaagttccaacctccaacctgagttggatgagtttggcagagatatcaacatgcagaagcgtatggatcttaagcgcagggaagagggcagaagacaaaggaaaactcagtcagagaccaagagattggcatctgcagcgaagaataaggacatcaagaagatcgaaggagagctaagcactgatgaaagcgacagtgagagcactgcttatgtttctagccgggatgagtttcttaaggctgctgaccatgtgttcattgatgctaaagaggaatactcgagccttaggattgtcaagaacaagtttgaaggttggaaagctcagtacccttctgcataccgagatgcccatgtagctctgagtgcaccatctgtgttcagcccttatgtgagactagagctcttgaagtgggatcccctccacgaaacgaccgatttctttgacatggattggcacaagatctacagtctattatgcaaaaaagatgaatctacgtacaagctagaagaggatgcacaagatcttggcctgtctattgaacttcttccactgagccaccccgatgagcagttcgacatgtccccattttatgcggcaatagtagtctcccggctccgtctttga

SEQ ID NO: 152451 - DNA, 1759 bp, Zea Mays
ccatcttccttctcggcaatcccctctgctccgtcttcctctgcgcacgtgtctgtgttttgcgccgcgtcctcagctctaggccatggcgcactcccgctccagcttgcctctgctcggagctccttccttcccctcccatggcgtcctggcccctgctcggattggtcaagctcgcgtgcgattcccatgatgcgcgctatgcttcttggtcgccatggcgctcgcccttgcgagcgagctctatggtctccctgctccctcgcggcgtcctgctggccggcgcttggactgcgcccaagctcctccatgtcgcgcccttttctctctctctcgagtctctgtaccgcgccctagcgtctgcgcccgacgatgctcccagctcaagctccttcctgctccgcgccatggcggctcctagtccctcgttgctcctccggctgagttctctgttttttcttctcccagttttctgcgctcgccgagcaacctccatggccggatctccctgctcctcgctgctcgccctaagctctcagccatggccgtcgagtccccctgttcccatggccgatctcggttctgtttgtcacggcagccgactctactgcttgcttccctgcgcgtcgtgctcctctgctctctgtctgcgcgcgtgctgtgctcgacgtcttcccatggcgctcgactgttggccgtgccgtggagcctgcgcgctcagtcctgcctatctcgtagtgtttggattcagcgcagctcgtgtttgccagcgtgttctctcggctcgcttggcccgaattcctatcgcgtcgtcgatcttgccaagtatcgtcgttcgtcgtcgcgctgtgcgtgcaacagccctgagtctatgtcgccccggtcttgttgtcgacaccgctcgccgtagctcagcttgctagttcgtcgtgtcgcgtcgtgtgccgatattctctcccggcaggcctcgccgtcgacgatgttcaagtgattgtttggctcctcgcatcccgcctattcaataaaacacccaaatccatagactgtcgagacactgctgccatacgcagctgtctccgtcacttgcgtcagctcgccagacctacagctccatatatgtcactctcccgtatcgtcgtcgagcccggcgaacctcgttcttctctgctcgatctcgtcgaaccacgaatcccggactttagacaaaaataagcgaggtccttatgcatcgcttatcaagtactcggtcgaagacttcaatcgaagatcgtcgtcatttcgtgcgtcatcgaggaatcccaaggatcggatgaagacgaagctagcagcgatattccccaagcgcttgacaaattgcctgaatcggaaaatcgctaccgatctcgtggattcatgtcagctgtggaaacggtaagctgataaattattcagaatagttcgatcggtgcatttaatgtgctagtgcgatgctcatttaggtgctcaataaattgcgcaagtcatgaaactctcgtcgacttcgcagttcttgcgattatcgagccagattcagttatagtgagttatttcactatttcggtcaattagcggaattagtgtaccgagtagaatatgagtaggcctatgtgatgataaaatattttaatcacttctatatatatatatatatatatatatatatatatatatttacgataaagaaatgtttgagtaattgttgacatgaaaaacatgtgaggagtaaaataaaattaaaata

SEQ ID NO: 152452 - DNA, 112 bp, Zea Mays
ggccttcggtggctgataggagatattttctatttctttatttctttttcttcttaaaaaatacatatatatccatgtttagtaactcggatctgagtaagatgcaaataga

SEQ ID NO: 152453 - DNA, 2433 bp, Zea Mays
agtataccagttttacactctgcagaggttgtaccctgaacaacaagtcgtgtatcccatgtcgccagggtttgcatggcccttagacacttccgaggtgaatggctagggatccactacgaggcctttacaaagttccactagctttagaaaacccgctatagtttctaggaagagcaatgcaggaatcccccatttgccgccatcgcagcaaaatcaactcgggaacctccctacacgcctactcccctactgcccttgcccctatcgggtaaggtagtcatccactagctttcctagttagtcggctaagggcgtcccattccacccttgtggtggcacgtgtttctcaagttaagctccatgttccaattaaaataatgatcttgtcatgaataataaataaaataacagtataaatggaatataatcataatgtaatattaatcccaaaaccatatagagcaatagcgaaaactacccaaatattttaggggtaaataaggtgtaaagataaccaaactagggtgacctattaggtcccatcaaaattaagcctatgcatgaataaatgattataaagaacattattgggtaaatgaaagtggtcaagggcacaacttgcctgggacttgagattccaggtaccaacttgctcttcaagtgactcgtaacctcgcgctagtcatagcaatacaaacaaacgctgtatacgcaaaattaatatcacaccaaacataagtacaaactgcataataatattctacgcgtcgtaacgaggtcgtgggttcaagaaccactaaattcggagctacggttataaagttatgattttttaaatatttagatgattaaataataaaactatgttctatgttgactataattcatgtgataaagatattacaaataaataactttattagtccttattatgaattagttacacatcatatcttcgttaaattatagccatgcactagatgatactattgttttcactataattagagaagttaatcaagtactttattaattttaaaaacatgttaaataataaaataatgtttacaaatgtgtaggttttaatattacgaagctaacacaacttgaatgggttaaatctgatttatattaaagaaactattgaatttcaaagtattttatactaattttatactctaaaattgtctcaagggtgtttctgctaataccaggtactacattgtaatttaagcactcagccgaggtcccaaccaacatttccctcgacccaggtggatggcgggtcgaataactaaacgcatagggtctcttctgcaatttgcccgaggcgaaggggtacgcttcattcccagccgttggatcaagtcccacggttcagattacaccagcgatttaaggaaacagcgagcgaccgcggcccttggatcacagatccatgacccgagattcttacgcccccgatctagtgtcgctcacacatataggatcctagggtccagattgcatcgagctcttcccttaatccgatcctacccatttggatcggacggccacggacccatcttcctcacccgatggtgccacggtggaggagagccctgtgctcatgactagtgctggaaatatgggtcgggtcttttgggccagcacgagcacagcccgaaaataagagcccaaatcacggcctggcacgaaataatatgggccgggctagcacggctcgaaggcgggcttgggccgggcctcaatttccggcccgtcgggcccccagcacggcccgcatagatgggccgggcttaggccggcacggcccaattaagcccaatctatttaatttctttaatttagtaagatattgactttatattgttattatattttgagtttatctggtcaaatgatgctagaactgtttaatatctttaatttagtaagctatgaactttatatggttgtaatattttgattttatgtggtcaaatatatgggccgggcttgggccggcacggcccaaagaaggcacgatatggtttagggctgggttgggccactgtttttacacttcgggctggcacggcacgacccaaaaatcttttgggctttgctggcccgaactcgtttggcacgaagcacgataggcttgggccgggctggcctggcccggcccaattcccagcactactcatgatgcctcaccgacgaaccgcagacagagaaaacgctctcatgtccctgttttccccaccggaagtgtgctacgcaaagagaaaacggaggtggacacgaagatcaagtactcaccgatggtagcgacacggacgccagtgcccacgcgcgcaggacgaaccgcggcaggtttgattttccggcgaccaattcgatcggaataggtgacccatttcgcccggtggtgcatcacgcagattc

SEQ ID NO: 152454 - DNA, 1144 bp, Zea Mays
atggcggcgggattttgtggcgcgcaggcggcgctatggaggggacgcgcgggcggcgctgtggagggggcgtgcgggcggcgctatggaggggacgcgcgggcggcgctcggcgctgtggagggggcgtgcgggcggcgctatggaggggacgcgcgggcggcgctgtggagggggcgtgcgggcggcgcggcctacaccctcagctcaacgtcgacgttggcgatgtgtctgccgttctcctgttgccaccgcggtgaccatgacacaaaggagtctgaagtggaaagccaaccttattatcattatccgtctcctgtgaaagaagcacatgatggtcaccgtgcgagtgcgaccaacgacatgcctcccgtcgtcgaggacaacagcaagaacggaggagggcacacgacgggtttcagcagccactcagacgacggcgttgtccgaggtggagagacgacgataactaccgagaagatcgtggcgccgcccaccactactccagcaccgcaagctgcttctagggatctggctgtgcagcaagctcctcagggtacgtatgtctctgctagtcgtcctcgccacaaccatggccgtgggtcgtcggcagcatcgcctcccagcgaggccgtcgtcaccaaagtcgtactaccgattgctcgtcgtggtggtgaagactactagatagttaccctactgcatgctgcggccacagaagccgcctatatatccccaacaatttctcgttccgttctactctacgccattcgtgacccgtaataatgatctcctgtgcacatatatggcaaaacaaagatatatagcagcaacagcagtgaaggttcgaacatctccacgagcaactttctccatcgtcaaatgaggacaccagcaaaaccgagggcaccaccataaaaaaccttcctgaagggttttttatggtcccctttcctgaaatcaactgaggacgcggcatgaagagactcctgcgctcgcgttgcgtggtgtgcagaacgtaggtctcccaacgatagcagccaattaattccctcccaccctactatattatattgtcaattggacgagtgaaaatatgtacctttcagttttaaattaataaatttggtgatgatgtattttc

SEQ ID NO: 152455 - DNA, 678 bp, Zea Mays
tgaaatattgtgcatggtggacatatagtgcagcaccatattggctatgggatgatatcagatgcacgaccctgtctagatgatacaaccacagcatgagacacggcttcaagaacctcctccattataaatacttgtcatctgatccaaataagctgaatgatatgaaacaagatgttttcggtagctacagaaacatctttggttactctagaaatactagggatgatatgttgccactttcaagtacttctgaggaatctcgctttatgaaaatgttggagaacaattctaggaaaacaagaaattctgtcactactctcaaagaactttgcacagttgagggatataacttagtttttcaagcctgtccatctccagcagatggtttagttgggaaagaatcttatgctcagatacaaattggtaggcaaattctaggcaaaggagatgcaggaagtggcatatttgctgctaggggcgagactgaatgagatgaatctgccaatacttttgcaactcccattcggatgactccaaagaattatcaagtactacttatgcaggttgatttctattctattttgttcaggcttcatagctggcaacccttctatgttgaattgttgatattaggagtatattcaccttttcttcatgtagtttaacttttttcat

SEQ ID NO: 152456 - DNA, 357 bp, Zea Mays
agtttaaaatgttatagcagtcctaaagtcttcaagatatggttgcaagcgtttcaaacaacttttaacaatccgattaataatatggcaagcacaacgctaatgcaaaaagatattactcaaatcactctcattcctactaggtgcaagtatcaaatggccaatataaccagcaaagacaggtttcaaaacatcaatagtagttttgttagatgaggcattatcaagcacaatagcaaaaatcttatcagtaatgctatagtcatttgcaaccatttcaacacgctcaacaatgttaagacctatatgagctacctctataggtctaagaccaagcaatctcttttctaaacacca

SEQ ID NO: 152457 - DNA, 1746 bp, Zea Mays
aagaggagaggactgagagaccgagatttagggttacctgcaacaccggagcaccggatccaccaaccagagggcagacgacagaggcataggagcgagcttggcgcagatcgaggtttagggatagggttacagtgactaggcgaagcgagaaaggaagatgagaggacagagcgagagaggaagatgaagattagcgccggccgaagttcttctccaccggcgccgcccacgggcatggtaggcgacaacacgcgctaacggcggcacagacaatcgccaagccgagacgcctggtgtggcataccatggagagctcgtcgccgtcagtgccgttcccgctgctgcaggcgccggtcgagagcacctaccgcgcctgcaccatcccctaccgtttcccctccgacaacccgcgcaaggccacccctgtcgagatccaatggattgacctctttctcaactctgtcccgtccttcaaacagcgggcggagaacgaccccaccgtacccgatgcgcccgcgaaagcggagaagttcgcgcagaggtacacgtcaatgcttgaagagttgaagaagaatccggagagccatggaggaccaccagattgcatacttctttgtaggcttcgtgagctagtactcagagagctgggatttagggatatcttcaagaaggtcaaggatgaggagaatgccaaggctatgtcactttttgagggagttattaagcggaatgacgaaattgaggatgacggcaaaagaattgagaacttggtccgtggaattttagctggaaacatttttgatctaggatctgcacagcttgcagaagtttttgctaaagatggcatgtcatttttggcaagttgccagaatcttgtatctcgaccatgggttattgatgaccttgatgcttttaagagtaaatggaccaagaaatcatgggaaaaggcagttatttttgttgataactctggtgctgatattatcttgggtatattaccatttgcgagggagttgctccgacgtggcacaaaggtgatacttgctgctaatgatatgccttcgatcaacgatgtcacgtatccagagcttgttgagattataaacaagctcaaggatgcagatggaaagctatcaaatgtggacgcatctggcctccttgttgccaactctggcaacgatctgcctgtaattgatttgtctagtgtatcaccagagcttgcctttatggcaaatgatgctgacctggtggtgctcgaaggcatgggaagagcaattgaaactaacctatatgcgcagatgaaatgtgactcgatcaagattggaatggttaagcatcctgaggtcgcccaatttttaggaggaagactttatgattgcgtcttcaagttcaatgaggcctgaactacgagatacatttgataacacaataccggccgcactagtggtggcttagttctccccaagatcagcttgttaggtgttgcactgaacataattttgttagtatcagcaataatttcaatcaaaataagctacgtatatgtggtggtttatggaagtgtcaggaagggtggttatgaggctgttggattttgtacgaaatctgatgcaccagttcccatttaacgcatcggtagccaagccacgcccgtctgaacttgagctcatgtccgtttgtgcttatggtccgtaataattggttagctaccactggcttgtaaacatcacacttagacgctct

SEQ ID NO: 152458 - DNA, 1841 bp, Zea Mays
gtcgggccgagaccgattcaatcgactaatcgggctatgccgatgccgacaccgcgtgccaggtcgccagtcaagcacggcacgggcacgacagcctatctgccagccgcccagccgcggccgtgttagggctgcggcccggtttggacatgtataggtgctggcgccttgcgtctcatcatccgcttctgtcagttccttttctaaaagaaaaaaatacagtcgcatctcgcctccagcagggtgagttcgcctcggcagggtgtggcataccatggagagctcgtcgccgtcagtgccgttcccgctgctgcaggcgccggtcgagagcacctaccgcgcctgcaccatcccctaccgtttcccctccgacaacccgcgcaaggccacccctgtcgagatccaatggattgacctctttctcaactctgtcccgtccttcaaacagcgggcggagaacgaccccaccgtacccgatgcgcccgcgaaagcggagaagttcgcgcagaggtacacgtcaatgcttgaagagttgaagaagaatccggagagccatggaggaccaccagattgcatacttctttgtaggcttcgtgagctagtactcagagagctgggatttagggatatcttcaagaaggtcaaggatgaggagaatgccaaggctatgtcactttttgagggagttattaagcggaatgacgaaattgaggatgacggcaaaagaattgagaacttggtccgtggaattttagctggaaacatttttgatctaggatctgcacagcttgcagaagtttttgctaaagatggcatgtcatttttggcaagttgccagaatcttgtatctcgaccatgggttattgatgaccttgatgcttttaagagtaaatggaccaagaaatcatgggaaaaggcagttatttttgttgataactctggtgctgatattatcttgggtatattaccatttgcgagggagttgctccgacgtggcacaaaggtgatacttgctgctaatgatatgccttcgatcaacgatgtcacgtatccagagcttgttgagattataaacaagctcaaggatgcagatggaaagctatcaaatgtggacgcatctggcctccttgttgccaactctggcaacgatctgcctgtaattgatttgtctagtgtatcaccagagcttgcctttatggcaaatgatgctgacctggtggtgctcgaaggcatgggaagagcaattgaaactaacctatatgcgcagatgaaatgtgactcgatcaagattggaatggttaagcatcctgaggtcgcccaatttttaggaggaagactttatgattgcgtcttcaagttcaatgaggcctgaactacgagatacatttgataacacaataccggccgcactagtggtggcttagttctccccaagatcagcttgttaggtgttgcactgaacataattttgttagtatcagcaataatttcaatcaaaataagctacgtatatgtggtggtttatggaagtgtcaggaagggtggttatgaggctgttggattttgtacgaaatctgatgcaccagttcccatttaacgcatcggtagccaagccacgcccgtctgaacttgagctcatgtccgtttgtgcttatggtccgtaataattggttagctaccactggcttgtaaacatcacacttagacgctctggtggcccctttgtgatggtattcataaaagtgtttgtcccgaaactaaaggggtgcgggtgattatggggtgggaaatgtctatggcaatcgaaggaagaaaactctccaaactagaggaaaaaataa

SEQ ID NO: 152459 - DNA, 346 bp, Zea Mays
gcagttatcctgcgtgttcgataaaaagttgctaacattggttagtgcaggtgatacttgctgctaatgatatgccttcgatcaacgatgtcacgtatccagagcttgttgagattataaacaagctcaaggatgcagatggaaagctatcaaatgtggacgcatctggcctccttgttgccaactctggcaacgatctgcctgtaatcgaaccttgttatgcaaccgactatggtctccttgctctatggctttatcttggatgcttaactagactactgtctattttcaggtaattgatttgtctagtgtatcaccagagcttgcctttatggcaaatgatgct

SEQ ID NO: 152460 - DNA, 490 bp, Zea Mays
gaccaaaataaaactaagatgttttgtggatgcacattataaacctttggtcagaaagaaaaaaatattacaactagctcacaaataatattcagttctctgtttagtgtttaattgagtactatacatccatacagaatacatatacaatgatcatcatcactattcactatccatatctaggtattggttctcgatggcttaatgaagctctagattctccaagttatgctagtcatgtgggctttgacggaccttagttaaatactgagtctatatttagtgggcctcggtgtgccttagttaaatgggccgtgctaggccggcccgtgggcttgacttgaggcccaggcacggcccacaatgtgggccgtgccggcccaggcccacaattaggttgggccgtgccagatatgggccgtgccagaaattgtgtgctttgggccggcctattaggcacagcacaaatgtacacctatatgcagatata

SEQ ID NO: 152461 - DNA, 162 bp, Zea Mays
ggaggcgacgtcgaggccatcaaggccaagatcatctcgcacccacactactactcgctcctcacttcctacctcgagtgcaacaaggtgagggcaccaccggaggtgtcggcaaggctgacggagatagcgcaggaggtggaggcgcggcagcgcacggcg

SEQ ID NO: 152462 - DNA, 255 bp, Zea Mays
atgacgtcccagggcccggcgtcgaacgaggtcttggtgatcgtcttccagcggctgtcgcccaggtccgtcaccgcctgccgcgccgtgtgcctcaggtggtccgagctgctctcttcgctctgtctcgagtttctcgccgacgtcgacgacggcaacgccgactcgtccgcatgcttcgctggcctcggcggggggaggggggcttttatagatgtttcattggcctggtttgtcacaaacatggagaaatga

SEQ ID NO: 152463 - DNA, 825 bp, Zea Mays
atggagaaaattggaaaagcaagaaatgtggggtcaaaggatgtgcatgaagaagaaaaatccagaatagttgcaaactgcagtgcgttaacaaaatggctaaattttaaggagggaatacgcacaaatctgaatgcaatcacaagtctaggtgtagccaagatcaaagattttgtggaccacgtattctccttgtcattaaccggcactgtcagatgcccttgtaggcggcacgaaaatagtatatttcttaataaggaaagagttagcctagatctttgtcagtttggatttatgtccggatatgaggtgtggggacatcatggtgaggtagtacccaaccggaatgtagaagagaaggagaacaattattgggctagcgatgatgcgatgcatgagatgctagattcgctacgtccacaattaaacctaagctccgaggatcctgtcgcaccagaggtttctagatttttcaaactactaaaagactctgaagagccgttccatgaacacatagatgtgagtatactcgcttttgtgactcggttcatgaccattaagtccaagtactttttctcgaacaattgttacaatgagattttaaagttattaggagatgtgctcccaaagcccaataagttgcctaaagacatgtaccattcaaagacaattatcaaaggtcttggtatggattatgaaaagattgatgtgtgcaaaaataattgtatgcttttcatgaaggagcatgcggaagagaaaaaatgtctaaaatgtggacaactacaaacagaacccccatatagcaatgcatatatgtgttgctaa

SEQ ID NO: 152464 - DNA, 2209 bp, Zea Mays
gagagagagacgagacatcaccgcacggacagccacgtcgtgcctccgtgcacgcacacggtatacgacagcgccatcactccataaaaggatccggggcagcgccaccgccggatccgacggcctccgaggcggggccgaaccgccgaagtagccaagacaacacgagcagcgaaacgccatctattcccgactctgctgcacctgcacctccgggccgccgccgagatgggcgcggatggcgggctgaaccgggcggcggagaagcccagggatggagagggcggggaggcgagggtgttccggtgcacggactactcgctgccgcggacgacgctggcgctggcgctctggctgggcggtatccacttcaacgtccttctcgtccttgcgtcgctcttcctcctctccggccgcgccgctgccatgtccgtacctcctatcccgttcatccaacccccatcttttcctgtacctactccaatctccatgattcgaccaaacaaaaaagagggtcttttatgatttattattatttatccatcttgctggtgacaacgtctgttacagacccgtttattgatgcagagtcgtggcgttccagctcttgttcatgttcgcgcccgtcaacgacagggacaaatggggccagagcgtcgccaggttcatatgcagacacgcaatgggctacttccctatcactctgcatgtggaggactacaagtccttggatcccagcagggcttacggtatgctcccgaaaacctgcttctccattcatggatgctgcagtcatcgtatccattatccaatccataagtgcccacgggagtcgagaaagtatcaacttcagttgctgagtgttaagggaagggaatcttttatttgcagagttggtgtggtgatagtgatggtagtgttgtgcatttgcagtgttcggttatgagccgcactcagtgctgccgataggtctgtcggctcttgctgatcttgttggctttctgcctctcactaagatcaaggtccttgcgagcagtgcggtaagtcagctaaatgccttgacgccaaatgccacaggattcagggactcccctcatgatggttaatttcgagttggggccaggtgttctacaccccgttcttgagacagatttggacatggcttggcttggtacctgcgacaaggaagaatttctactgctaccttggagctggttatagttgtatcgtagtccctggtggtgtacgggaaatgcttcatatgaacaatgattcagaggttgcttttcttaaatcaagaaaaggttttgtcaagatagctatacagtctggatgtcctttagtcccagttttctgctttgggcagagctatgcatacaagtggtggaggcctggtggtaaattgtttatcaagatcgctagagcagttaaatttactcctattatcttctggggtagatttgggtaacttcatggctcttagcattctgttcttttccttccagacttatgttctatactttttttgaaacattgttctctggtattagataatttttcatggtctactgacatttgaatgcagcacaccattccccttcccaaaacccatgcatgtggtcgtgggtaaacctattgaagtcaataagattccccatcctacaattgacgagattaatgaagtccatgaacagttcatcattgccatgcgggacctctttgagaagtacaaggcgaaagctggatatcctggccttcatctaagagtcctatgacattccacaaccagactcaaagttagaattcagcaataacatggctctattactcttccctcaactggggtgtcaaactgcacctcgcaggcactcgggcggtagttgttgcattatggtgatgataataaggctccagcaccgatgccaaaacatgcacgagttggtcacgagtcagagccttttgttgctggcttaacttttttctttaatgttgcaaagataagataatgtaattactggttatgtgatgttgcatatgatatgagaatatgaggattggtgatatataagctcctgtacatgcagctgtatcatcagtgtctgaatcaccaggaggttgctgatattgactgctgcctgtggacctgcagctgtgtcattgtctgaagaactttcagatatatcatatccccaagaagcccatttggttt

SEQ ID NO: 152465 - DNA, 1721 bp, Zea Mays
gagagagagacgagacatcaccgcacggacagccacgtcgtgcctccgtgcacgcacacggtatacgacagcgccatcactccataaaaggatccggggcagcgccaccgccggatccgacggcctccgaggcggggccgaaccgccgaagtagccaagacaacacgagcagcgaaacgccatctattcccgactctgctgcacctgcacctccgggccgccgccgagatgggcgcggatggcgggctgaaccgggcggcggagaagcccagggatggagagggcggggaggcgagggtgttccggtgcacggactactcgctgccgcggacgacgctggcgctggcgctctggctgggcggtatccacttcaacgtccttctcgtccttgcgtcgctcttcctcctctccggccgcgccgctgccatagtcgtggcgttccagctcttgttcatgttcgcgcccgtcaacgacagggacaaatggggccagagcgtcgccaggttcatatgcagacacgcaatgggctacttccctatcactctgcatgtggaggactacaagtccttggatcccagcagggcttacggattcagggactcccctcatgatggttaatttcgagttggggccaggtgttctacaccccgttcttgagacagatttggacatggcttggcttggtacctgcgacaaggaagaatttctactgctaccttggagctggttatagttgtatcgtagtccctggtggtgtacgggaaatgcttcatatgaacaatgattcagaggttgcttttcttaaatcaagaaaaggttttgtcaagatagctatacagtctggatgtcctttagtcccagttttctgctttgggcagagctatgcatacaagtggtggaggcctggtggtaaattgtttatcaagatcgctagagcagttaaatttactcctattatcttctggggtagatttgggtaacttcatggctcttagcattctgttcttttccttccagacttatgttctatactttttttgaaacattgttctctggtattagataatttttcatggtctactgacatttgaatgcagcacaccattccccttcccaaaacccatgcatgtggtcgtgggtaaacctattgaagtcaataagattccccatcctacaattgacgagattaatgaagtccatgaacagttcatcattgccatgcgggacctctttgagaagtacaaggcgaaagctggatatcctggccttcatctaagagtcctatgacattccacaaccagactcaaagttagaattcagcaataacatggctctattactcttccctcaactggggtgtcaaactgcacctcgcaggcactcgggcggtagttgttgcattatggtgatgataataaggctccagcaccgatgccaaaacatgcacgagttggtcacgagtcagagccttttgttgctggcttaacttttttctttaatgttgcaaagataagataatgtaattactggttatgtgatgttgcatatgatatgagaatatgaggattggtgatatataagctcctgtacatgcagctgtatcatcagtgtctgaatcaccaggaggttgctgatattgactgctgcctgtggacctgcagctgtgtcattgtctgaagaactttcagatatatcatatccccaagaagcccatttggttt

SEQ ID NO: 152466 - DNA, 1169 bp, Zea Mays
gagacgagacatcaccgcacggacagccacgtcgtgcctccgtgcacgcacacggtatacgacagcgccatcactccataaaaggatccggggcagcgccaccgccggatccgacggcctccgaggcggggccgaaccgccgaagtagccaagacaacacgagcagcgaaacgccatctattcccgactctgctgcacctgcacctccgggccgccgccgagatgggcgcggatggcgggctgaaccgggcggcggagaagcccagggatggagagggcggggaggcgagggtgttccggtgcacggactactcgctgccgcggacgacgctggcgctggcgctctggctgggcggtatccacttcaacgtccttctcgtccttgcgtcgctcttcctcctctccggccgcgccgctgccatagtcgtggcgttccagctcttgttcatgttcgcgcccgtcaacgacagggacaaatggggccagagcgtcgccaggttcatatgcagacacgcaatgggctacttccctatcactctgcatgtggaggactacaagtccttggatcccagcagggcttacgtgttcggttatgagccgcactcagtgctgccgataggtctgtcggctcttgctgatcttgttggctttctgcctctcactaagatcaaggtccttgcgagcagtgcggtgttctacaccccgttcttgagacagatttggacatggcttggcttggtacctgcgacaaggaagaatttctactgctaccttggagctggttatagttgtatcgtagtccctggtggtgtacgggaaatgcttcatatgaacaatgattcagaggttgcttttcttaaatcaagaaaaggttttgtcaagatagctatacagtctggatgtcctttagtcccagttttctgctttgggcagagctatgcatacaagtggtggaggcctggtggtaaattgtttatcaagatcgctagagcagttaaatttactcctattatcttctggggtagatttggcacaccattccccttcccaaaacccatgcatgtggtcgtgggtaaacctattgaagtcaataagattccccatcctacaattgacgaggtaggtttctggatttaatcaaaaccacttttttgagagaaacatttttg

SEQ ID NO: 152467 - DNA, 1776 bp, Zea Mays
gagacgagacatcaccgcacggacagccacgtcgtgcctccgtgcacgcacacggtatacgacagcgccatcactccataaaaggatccggggcagcgccaccgccggatccgacggcctccgaggcggggccgaaccgccgaagtagccaagacaacacgagcagcgaaacgccatctattcccgactctgctgcacctgcacctccgggccgccgccgagatgggcgcggatggcgggctgaaccgggcggcggagaagcccagggatggagagggcggggaggcgagggtgttccggtgcacggactactcgctgccgcggacgacgctggcgctggcgctctggctgggcggtatccacttcaacgtccttctcgtccttgcgtcgctcttcctcctctccggccgcgccgctgccatagtcgtggcgttccagctcttgttcatgttcgcgcccgtcaacgacagggacaaatggggccagagcgtcgccaggttcatatgcagacacgcaatgggctacttccctatcactctgcatgtggaggactacaagtccttggatcccagcagggcttacgtgttcggttatgagccgcactcagtgctgccgataggtctgtcggctcttgctgatcttgttggctttctgcctctcactaagatcaaggtccttgcgagcagtgcggtgttctacaccccgttcttgagacagatttggacatggcttggcttggtacctgcgacaaggaagaatttctactgctaccttggagctggttatagttgtatcgtagtccctggtggtgtacgggaaatgcttcatatgaacaatgattcagaggttgcttttcttaaatcaagaaaaggttttgtcaagatagctatacagtctggatgtcctttagtcccagttttctgctttgggcagagctatgcatacaagtggtggaggcctggtggtaaattgtttatcaagatcgctagagcagttaaatttactcctattatcttctggggtagatttgggtaacttcatggctcttagcattctgttcttttccttccagacttatgttctatactttttttgaaacattgttctctggtattagataatttttcatggtctactgacatttgaatgcagcacaccattccccttcccaaaacccatgcatgtggtcgtgggtaaacctattgaagtcaataagattccccatcctacaattgacgagattaatgaagtccatgaacagttcatcattgccatgcgggacctctttgagaagtacaaggcgaaagctggatatcctggccttcatctaagagtcctatgacattccacaaccagactcaaagttagaattcagcaataacatggctctattactcttccctcaactggggtgtcaaactgcacctcgcaggcactcgggcggtagttgttgcattatggtgatgataataaggctccagcaccgatgccaaaacatgcacgagttggtcacgagtcagagccttttgttgctggcttaacttttttctttaatgttgcaaagataagataatgtaattactggttatgtgatgttgcatatgatatgagaatatgaggattggtgatatataagctcctgtacatgcagctgtatcatcagtgtctgaatcaccaggaggttgctgatattgactgctgcctgtggacctgcagctgtgtcattgtctgaagaactttcagatatatcatatccccaagaagcccatttggttt

SEQ ID NO: 152468 - DNA, 1632 bp, Zea Mays
cagccacgtcgtgcctccgtgcacgcacacggtatacgacagcgccatcactccataaaaggatccggggcagcgccaccgccggatccgacggcctccgaggcggggccgaaccgccgaagtagccaagacaacacgagcagcgaaacgccatctattcccgactctgctgcacctgcacctccgggccgccgccgagatgggcgcggatggcgggctgaaccgggcggcggagaagcccagggatggagagggcggggaggcgagggtgttccggtgcacggactactcgctgccgcggacgacgctggcgctggcgctctggctgggcggtatccacttcaacgtccttctcgtccttgcgtcgctcttcctcctctccggccgcgccgctgccatagtcgtggcgttccagctcttgttcatgttcgcgcccgtcaacgacagggacaaatggggccagagcgtcgccaggttcatatgcagacacgcaatgggctacttccctatcactctgcatgtggaggactacaagtccttggatcccagcagggcttacgtgttcggttatgagccgcactcagtgctgccgataggtctgtcggctcttgctgatcttgttggctttctgcctctcactaagatcaaggtccttgcgagcagtgcggtgttctacaccccgttcttgagacagatttggacatggcttggcttggtacctgcgacaaggaagaatttctactgctaccttggagctggttatagttgtatcgtagtccctggtggtgtacgggaaatgcttcatatgaacaatgattcagaggttgcttttcttaaatcaagaaaaggttttgtcaagatagctatacagtctggatgtcctttagtcccagttttctgctttgggcagagctatgcatacaagtggtggaggcctggtggtaaattgtttatcaagatcgctagagcagttaaatttactcctattatcttctggggtagatttggcacaccattccccttcccaaaacccatgcatgtggtcgtgggtaaacctattgaagtcaataagattccccatcctacaattgacgagattaatgaagtccatgaacagttcatcattgccatgcgggacctctttgagaagtacaaggcgaaagctggatatcctggccttcatctaagagtcctatgacattccacaaccagactcaaagttagaattcagcaataacatggctctattactcttccctcaactggggtgtcaaactgcacctcgcaggcactcgggcggtagttgttgcattatggtgatgataataaggctccagcaccgatgccaaaacatgcacgagttggtcacgagtcagagccttttgttgctggcttaacttttttctttaatgttgcaaagataagataatgtaattactggttatgtgatgttgcatatgatatgagaatatgaggattggtgatatataagctcctgtacatgcagctgtatcatcagtgtctgaatcaccaggaggttgctgatattgactgctgcctgtggacctgcagctgtgtcattgtctgaagaactttcagatatatcatatccccaagaagcccatttggttt

SEQ ID NO: 152469 - DNA, 1596 bp, Zea Mays
cgtgcctccgtgcacgcacacggtatacgacagcgccatcactccataaaaggatccggggcagcgccaccgccggatccgacggcctccgaggcggggccgaaccgccgaagtagccaagacaacacgagcagcgaaacgccatctattcccgactctgctgcacctgcacctccgggccgccgccgagatgggcgcggatggcgggctgaaccgggcggcggagaagcccagggatggagagggcggggaggcgagggtgttccggtgcacggactactcgctgccgcggacgacgctggcgctggcgctctggctgggcggtatccacttcaacgtccttctcgtccttgcgtcgctcttcctcctctccggccgcgccgctgccatagtcgtggcgttccagctcttgttcatgttcgcgcccgtcaacgacagggacaaatggggccagagcgtcgccaggttcatatgcagacacgcaatgggctacttccctatcactctgcatgtggaggactacaagtccttggatcccagcagggcttacgtgttcggttatgagccgcactcagtgctgccgataggtctgtcggctcttgctgatcttgttggctttctgcctctcactaagatcaaggtccttgcgagcagtgcgatttggacatggcttggcttggtacctgcgacaaggaagaatttctactgctaccttggagctggttatagttgtatcgtagtccctggtggtgtacgggaaatgcttcatatgaacaatgattcagaggttgcttttcttaaatcaagaaaaggttttgtcaagatagctatacagtctggatgtcctttagtcccagttttctgctttgggcagagctatgcatacaagtggtggaggcctggtggtaaattgtttatcaagatcgctagagcagttaaatttactcctattatcttctggggtagatttggcacaccattccccttcccaaaacccatgcatgtggtcgtgggtaaacctattgaagtcaataagattccccatcctacaattgacgagattaatgaagtccatgaacagttcatcattgccatgcgggacctctttgagaagtacaaggcgaaagctggatatcctggccttcatctaagagtcctatgacattccacaaccagactcaaagttagaattcagcaataacatggctctattactcttccctcaactggggtgtcaaactgcacctcgcaggcactcgggcggtagttgttgcattatggtgatgataataaggctccagcaccgatgccaaaacatgcacgagttggtcacgagtcagagccttttgttgctggcttaacttttttctttaatgttgcaaagataagataatgtaattactggttatgtgatgttgcatatgatatgagaatatgaggattggtgatatataagctcctgtacatgcagctgtatcatcagtgtctgaatcaccaggaggttgctgatattgactgctgcctgtggacctgcagctgtgtcattgtctgaagaactttcagatatatcatatccccaagaagcccatttggttt

SEQ ID NO: 152470 - DNA, 1471 bp, Zea Mays
ggacgaagacgaactagcgagatcaagaagctggcggcaagcaagtggtgggagcgcggcggtgagggcgtcatggccggaatggatcccggcggcggcggtggggccgcgtcgcactacctggaactcctccgtgcgcagcaacagcagctgctacagcagcaccagcaggcgccgctatccccgtcctcccacgtcaagatggagcgctccgcgccgtcgccggagaacgtcgatccgggcggggatcagcccgcctcggagggcagcggggggtccggtgggccgacgaggaagccgcgcgggcggccgctggggtcaaagaacaagcccaagccgcctatcatcataacgcgggacagccccaacgcgctccactcccacctgctcgaggtcgccgccggagccgacatcgtcgagtgtgtctccgagtacgcgcgccgccgctgccgcggcgtatgcgtgctgagcggaggcggcgccgtctccaacctcgcgctacgccagcccggcgccgatcccccgggcagcctcctcgctaccctgcgcgggcagttcgagatcctgtcgctcacgggcacggtgctgccgccgcccgcgccccccggggccagcaacctcagcgtgtacgtcgctggcgggcaggggcaggtgatgggcgggagcgtggccggccagctcatcgccgccgggcccgtagtcctcatggccgcgtcgttcgccaacgccgtctacgagcggctgcctctggaggaagaggaggaggaggcggccacggcagccgcagccgctgccgctgtcacagaaacccaaggcgcagcagtggagccggccgaaggacagcaacaggaggcgtcgcagtcttctggagtgacgggtggcgatgtcggcggcattggtcatggcatgtcactgtatgatcttggagggaacgcggctggctacgagttgcccggagagaacttcggcacctggagcggtggtataaggccaccgttttgatatggcataccgatctctttctcttggcagctgcatttgtatcacggcaagaatctccaagagatcgcgatccatgacggagaagctccttaatcctgcattttggttgaaggctacactttgacgagggcaccaggccatgtggtgatttggtgataatgcatgttgccatggtgttcgacttcgacttggaaacaatccagatcgatgtataccattaccatctatggctatggaaaagtgagtactaccgacgatgcatgtctattttttgggtggtctattggtccaacaaaatccaaggaaggtcattaggtccagtgttaactgtttagagaccatcctgtcgacttcttgtcctcttttgctttggaacgatgtttgtcaagttgtcatgacatttgcctttcacttctattctattaactccctccgttataaaatactagtctcataatattagtcgttt

SEQ ID NO: 152471 - DNA, 216 bp, Zea Mays
caaagtgcagcacgcatctgaaaaaaggaagacaagtaaaaaggttattgatgcaatgaagggtatgcggctggaaatacgtaacaaaggaagccatgcaaaccggagtaaaaaacggcatgggaatagaagtcagttaggattttgtctttaggataaagtctcgggataagcttgagataggatataaaagcattattgtatgctgttgccgaa

SEQ ID NO: 152472 - DNA, 201 bp, Zea Mays
ggtcatgcatctggatgctgagaaggattcgatgtcacagtgtgtggctcttcttgggaagtttattgcagtccgggagccaaacattcggtacctcagtctggaaaacatgactaggatgctgttagtaacagatgtgcaggatatcattagaagacaccaggcccagatcattacatctttgaaggatctagatatcag

SEQ ID NO: 152473 - DNA, 682 bp, Zea Mays
aaccaggacagatagatggaggatcatcacacggacaggaggatatccaaggaggccggcgaggaaacgaagctgaccaggagcttccgctacgaggactacagcaccaggcgagtcttcctgcgcagctacccgctgcagtgggactggtcgccctcgcgggacgacgacgacgacgacaagcaggacggccaggatgccgccgacggcgacgagtgctgcggcagcaggcggtggaagagcaagatggtggcggccgtcacggagtggggggaggacaagctgctgctgctacgcagggccaagaagcgcctcgcgctctacctcatcggctgccaccaccacggtcgccgcgcgctgcccttcccgtcagcctcacccgccggatcatgcaccgtcgccatgatgctcgcctccagatgatcgatagatatccaccaccgtacgtgcacgcacggcgcgcgcgcgtgcatcatatatgtgtgtggtcgaccatcggtcgcgcgcgccccacgtcgtcttcctctctctttctagtgtatgattggcccctacatacgtgctctcggaaatgaattgaaaatgcactgtatactcttgctaccaaaaaagttgattaattacacacaccacaggtaaatacgacgacctatagcagagctattactttaattatgtacta

SEQ ID NO: 152474 - DNA, 89 bp, Zea Mays
tttgttagatgttctttgtgttatatacactctgtatacaaggatgcgatacacacatcagctagtcctaatgatgccaccgactttac

SEQ ID NO: 152475 - DNA, 120 bp, Zea Mays
cccctattttttcatctccagcagcggttccccctattttatccccatataccacactacaaccataaaatatcattttctatacctacttttcatctcatatcaatttttcatttacta

SEQ ID NO: 152476 - DNA, 463 bp, Zea Mays
atagcaaaaaattggaaggggcaaacatccttccaagctgcactgtttcacttaactatacaccaatgtaccaagatccagtttagacttgatgagaacagctaaaacaccaaggcatgaaaatatctacattgattgcggaaaaagtatggggaaaaggtttccaggtgccagtgttccctcagaatgtggacaagatgtcaagatgtactaaaggaaaataaaccatcgcaaggaacattaaggcacaaccattccattctattgagaattattcagatggtagatgctctggagccaatgagctccaaaaactttgaacaaaactttaccaatgcaaagcacagttagtttggagggatcaatcttctgggattcgccatcttctcaaagccttctcaagtgtctcagctcgttcatggacatgtgctgcttcatcttccacccaagttctgaaataaga

SEQ ID NO: 152477 - DNA, 76 bp, Zea Mays
tttacattttagggtttgtccatgtaaaaacctcagtccatgtattcatctcaatacatatatgatgataaatgtt

SEQ ID NO: 152478 - DNA, 254 bp, Zea Mays
aagggttggagacacatatttatagccctagaggctgcactaccacaccttctcacacacactacacaacaggattgtcctctagatgctaaagagactacagaggacagtcaaaagcgactgttgtcctctagatgctaaagggactacagaggacagtcaaaagggaatgttgtcctctagatgctaaagggactacagaggacagtcaaaagcgactgctgtcctctagatgctcaagacttattccatca

SEQ ID NO: 152479 - DNA, 108 bp, Zea Mays
caaaggtccaacgccttgtctcgccttaccgctttaagaactatgatgagatgaagtctttttgtaggataatcaacctcattctagaagtgtccttgtataatgttg

SEQ ID NO: 152480 - DNA, 154 bp, Zea Mays
ttatttatttattttatttcattattatcattttttcttctaccaattttgggctttacacctcaccttcgagtgagctagtggtattcgatcctggataagtggctttatcggactagatccgagggactgacgggttattccgatttaagtg

SEQ ID NO: 152481 - DNA, 510 bp, Zea Mays
atgacggcagcagcgaggaccaccagaagcagactgccatgggcggaggacatcgatgcggacgtggcgccgttaatctgcgaggaggcaacggccactggtagctcatcgtcggcggggagcgagcaggtggccgggtggcccgcgccggcctcgtcggccgccatgagcgcctggatgaccgccgtggccgcctcgcggtaccgcgtggggttccggttcagcagccatgtcaggcccatgaggtggcagtcctcgcggtgctcctgcttcgccttcgccgacgacgtggcgttgctcctcccacccagctgcagcccaggaaacccagtacagggagtcagtaaacaaattaacagcgacggtaattttttacatcgcgaaaggacagagattcctgcggaggtaaaggacacaagactccgagagaggacggggccaccggccatggcaatggcggtcctcgtgccatcgctctcggaacagttggcgcacgcggaatcggcgtga

SEQ ID NO: 152482 - DNA, 336 bp, Zea Mays
atgggcatggatacgggtacagtttcttgcccgattggtttggtgggtatggatatttatagaagtcttgggtacaatttcgggtcgggtattattatacccgaacaaaacccgacccgctgccatccctactctggggtagtcagtagactgacccagagtgtgagattatgcatgtgcaaccatgttggccagcttatggtgtgcagatgtggagcacagggatggtggtcaacggcggaggtgaagatcgtgcgggttcgtgtcgatggaccaggagcggtgaaggacgagcgccgggacttgaccgagggaccagggtcgtcgggtgactag

SEQ ID NO: 152483 - DNA, 1852 bp, Zea Mays
agtagtaccattccactgctgactgctgaaacacaataatagaggcagaagcagaggcagaggcagaggcagagccaagacggttccgttcagtgtctggcggcgcatagatagatagccatggcgaagaagccagtggaggaagcgctcctcgcagcggcagacgagcaggagagcctgagcgtgcgcgaggagctgaagaagcagctatggctggctgggcccatgatcgccggcgcgctcctgcagaacgtgatccagatgatctccgtcatgtacgtgggacaccttggagagctgcccctcgctggcgcatccatggccaactccttcgccaccgtcaccggcctcagcctgctgctaggcatggcaagcgctctagacacactgtgcggccaagcgttcggcgcgaggcagtactatctcctgggcatctacaagcagcgcgccatgttcctcctgaccctggtgagcgtccctctgtcagtggtgtggttctacaccggcgagatcctcctcctgttcggccaggacccggacatcgccgcagaggccggcacctacgcccggtggatgatcccgctgctgttcgcgtacggcctgctgcagtgccacgtccggttcctccagacgcagaacatcgtggtgcccgtgatggcgagcgccggcgccgccgcggcctgccacgtcgtcgtctgctgggcgctggtgtacgcgctcgggatgggcagcaagggcgcggcgctcagcaactccatctcctactgggtcaacgtggccgtgctggccgtgtacgtgagggtgtccagcgcctgcaaggagacgtggacgggcttctccacggaggccttccgcgacgcgctcggcttcttcaggcttgcggtcccgtccgctctcatggtctgcttggagatgtggtcgtttgaactcattgtgctcctctcgggccttcttcccaacccaaaactggagacctccgtgctgtcgatcagccttaacactgctgcgttcgtgtggatgatcccctttgggcttagctcagctatcagcactcgcgtgtcgaatgagctgggtgccgggcgtcctcgagccgcccgccttgcggtgcgtgtcgttgtgttgctgtctgtcgccgaagggctaggcgtgggcctcatcctggtgtgcgtgcgctacgtctggggccatgcctacagcaacgtcgaggaggtggtgacgtacgtggccaacatgatgctggtcattgcagtgtccaacttcttcgatggtatccagtgcgtgctttcaggtgtggctagaggctgtggatggcagaagatcggtgcctgcatcaaccttggcgcctactacatcgtcggcatcccctctgcttacctcatagcgttcgtcctgcgtgtcggtgggacgggactctggttgggcatcatatgtgggctcatcgtacagctccttctgctcgcgatcatcactctctgcaccaactgggatagcgaggcaacgaaggcaaagaacagagtgttcaattcttcctctccagcatccggaacgtgaacggattggcggtgaagtaaacggcgagcaaacacggaaactataggagttatgcctgtagttttggaaacttcagcacctctgatcctctccgattttctggctcccacattaactctaatggttagcattgacacttgcagtctggattttgaaacataaatgcgttccttgaacagagtaggaagggaccaatggaaaacttatacaatagtgttagatcgcatgcaacattgtcctccaaagtgacctcatcacacaacaaaacgtgggtaattccaagaccactttttcggtacaa

SEQ ID NO: 152484 - DNA, 1644 bp, Zea Mays
agaccgcccccgcctccacccgcacgcccttccgcaaaccccgccgttcgcccgctcttcctaccacctccgcaaccgacaggacgccgctgcggcggcactcggtccggctgctggcgctcgtcgccggggagcacccgcgggacgccgtcgcgccgctcgtgcccaggctcctggccgcctccagacttcaaatccccaccaccatcgaacctccccaacccggcaaatcctaaatccaatataggctaaccctagccgcccatccgcccgccgtgaaggcgtcgatcaagttccgggacgacgaccgaccgctgctgcgcgccaaggtgccgattggcgtgctagggctgcccttcctctcgggcctcgcggcggggggagacgccaaggacctccgttttgacctctccaccgccttcccctctgtcccggcgctccgcctctcataccgccccaacgaacccctccagccttttgccctctccgtccgcacggggtcccctatccgcgccccattcgccctcgccgccgaattcaacctcacctcctccaacccgcccgccttctcgctcctcttcaagccccggatcggggacttcgccgtcgcaagctccgtccactccccgccgacaccgccgcccacatccactccgcccccgctagcgatcaagatggtcgacctcaccaccaacagcgacgaccacgactgcgaagcacacggtaacgacctctccttcgccgagaatgtattcggggcgaacgtggcggccgccaccgggacgaacggcggcggcgtaggcgcgctgctgtccgggatgcggctcacgaccaggagcgtgctgccactgtggagtaaagcgagcatgtggttccagtgggggctgcgcgtgccgccggagatcaaggccacgcttgcagacaacgggtacgggcgcaaggctgggagcctcgccatcagcaagctgccgctgctggtgatgaacaagatcattatcgagcacacgcccaaggtgccttcacagtctgaagcggacaagaagaggaagaaagacacaccaccggcagctgaggatgaagagttctcactcatgaagaggcaactggataagctgaatgcggagagcacaatgctgcgtcgtgcagtcgaggacttgagtgcagagattggagccggcaaaggcaatgatcgtaagctgccaacagcagtgccacctcaacaacatactttagtgtcgaaaccagatcgtcatttccacataaatgcgaaggaattggtagacagtgggacgaaaccggcctcaaatgaagcaagtgaggagttgaagaaggtgcttgagggccgacggaagtaagaagcacctagctagggcttgctgttattgcaagccctacaatatgacatagctgctgactattgtgtcaggttttgtggttaataataatacttcctcgctggagaagattgctaagggcagtttagcccctcgctggagcctggaggcaagtgaggttgccattcgccataggtgtggtagtaattttgcctcaattctattttcattgcttgtcttaggatatcctgttctgtataaattttcatattttgatctaaaatgaatgatggattagctttttcaacag

SEQ ID NO: 152485 - DNA, 509 bp, Zea Mays
ttaataagaatgaaagagcctggaccaacaactcttgctttagggattgattagacctcgttggggttgaatttaaactcccaagataatctttacaagacatttggctctccgtggtcaagtgagccagctataggagaacctgattatcagatcccagcttgtttctctgcagagccaccaccagcactgcaaccatttcattttcagaagtttcaccctttgacactattctacatcttttacagctcatgtggtcttttaagccctgcctctacatggacttcggcctcgcttccgctgtcaccacgctctggacctgcaccgatgtcacgcacctcgtgcacgtgctcctgcagttccgcctcgtctggtgcggcaagctaatccgttatgcccgcgccgtcgccgcacactacgtctgctccgtcaagggcctctgctttgacctcttcatcattaggggtagaaacagagctttcaatgcatgttggaggtgcacgatgtga

SEQ ID NO: 152486 - DNA, 912 bp, Zea Mays
atgatttggaacaatgtatacgataaaggcttagtcgatgtgatgcatgatcacaaagataatccaaaattcaaaggtcaaaatagttggaatcgtgatggatggaatagtatcactaccaagttcaatgaaaagttccctctagctcatttctctaaacaacaaccgcaagagaaggagagagagcttaaaggatactacaaggcaataagggattcaagaaaagaaagcggggttggtttgaatgacatcatatgcatggtactcgctgaaccataagtttggccaaggctgattcgcgtatctaagttttgcaacaggccattccctcttttttacagtttagaagggctatatgaaggtagtgtggctatcggagagttaaatttcacatcaaccgatgttgatcttcctccaccttcagctccatcaaggagtgcgtctggacaaagtctcaatcccttgagtactaattcacttgatttggatggacaagaaaccacaagtgtgttcgatctatctactaatgctcaatttgtcccagtcaatactaatgaacccactgaagctcaatttgtcccatctaatcaagaatgaagctagagagaaggtggcagtgggagaaagcgtaagaaaagccatgttggattagctcttgaaatttatgtggagtttaaaaagatctaaaatacataaacacttgcaactcttaaagaacataagaggcaagaggatcaattttctattagcaagtgtcataaacacttaaaggaatggatggattaacagccgtggacaaatcaatgctttggagcttttcgtatctgcgacaaacagagagattttcttaacaacaatagagcatgatgttagagaaatttggctcaagcacaaaattaggtatgccataac

SEQ ID NO: 152487 - DNA, 701 bp, Zea Mays
gctggccggctggcggtccacgttcgggcagctgcgactgctgggacttctattgacgagttgcatcatcaacatgcaggcgtgggggctagcggcatcagtgtgcggtctgcgagggggcctgtggctgcactgtgcaagtgtggtcgcggcttcgtgcaggcgaggtggtggatacgaggaccggttcagcggtgacgatggtgcgccccgtgatggtgtctggttctgtgtgctcaactggagggggtggcggtcgacgcagctttgcggctgctgcagcagtcgatgtgtcgatgcccctctggaagggcttgtgcgggatgtcagggcatcagtgacgacggaggttgcttgctttgacccggggtctttgcctaacgttgtgttgggggtcttcttgggtgaaagcctcggcgacagtgacgcgcgtgggtgccgcttaccctgttgagggcgtcgcactccctaacactgtcttccacgaacaaaagcctggtccatcttggacatgcgacggtggcgtccccgacgtcactcccttcctaaaggcgtcgctattgaagatttgtttcggtcacgacgttgccttttggttgatgcttttcccttctcgtcgtccgatatgcggggtggtggtgcgggttgcagcgtgaagtcgaagctgctacgtcaagggatgtggctcggcaacgatgacg

SEQ ID NO: 152488 - DNA, 78 bp, Zea Mays
aagtcatactctcttgattgatcatcattataaaacatatcatcataggcaagtaaaggcaacagttaaatataaaat

SEQ ID NO: 152489 - DNA, 3637 bp, Zea Mays
aaatcgcagttcccgtccatctgtcaccacctcgctctctacattgcggaaccctattctctcatcgcgctctcgcctcaccggcgccgccaatccgccggcgagctagggctttctgatcactggcctctccagtttcccgccaccatgggggtcgacagcgacgacgaggatctcgtcgtctatgggacgcccatcgagcgagaggaggacacctccgcccgcaagcgccgggccgtcgccgaggctggccaactccgcgccctccctgcctggaagcaggaggtgagggatgaagaaggaagaagaagatttcatggtgcatttactggtggattctctgctggcttttacaacactgttggctcaaaagaggggtggacaccacagacatttacatcatcacgaaagaatagagctgagctgacaaagcaaagcatatacaattttcttgatgaagaggatataaaggatatgggtggtaatgctttggagacatctcagcagtacgatacctttggttttacagctgcagagcacgctcgaaaacaggcatccaaggaacaaaaggagagaccatctgctatacctggtcccatacctgatgaattcgtggtccccaccacaaattcaattggtgtgacattgttaatgaaaatgggttggcgccaaggacgctctattagggactcacatgctgattccttatatgaatcacgcaggaatgctagaaaagcttttcttgctctctctggtgccaaggatggtgaagatcaagatcaaagtgctgaaaagcctagcttagataaagctgttgtggggtcagtcggggaaatacctgtatctggaaatacccctgtctatgtgcttcatccaaagcaggattttcatggattaggttacgatccattcaagcatgctcctgagtttagagacaggaaaacattgcagaagtcaagagagaggggccgcaaacgaaatgatgtttctatgaggggaaatcttctgatttctaactcaggacattatgctcctggttttgggattggagctctcgaagaacttgatgttgaagatgaagatatttatgcatcaggttttgcttatgaacaaactgaagttgatattgagccttcaaaaactgccaatgacagtaattataaacttgatgacagaaaaagaggtttctatctgagctttaagattgcctcaaattctgaatacaaacttgaacggttccttcctcctgagatccctgatgattttgatgctcaacacaaatttccaactccagttcaatctgctgagatgttttctgactctgctcctcttgaggttcctccaccagaagacactagcttgacactattgattgacggctgtgcagctatggttgcacgttgtgggaaacatattgaagatttctacaaggagaaaagtaagacaaacccgcagttccttttcctaagtggaggagctggctgtaactattacatgagaaagttatgggagcatcagcaaaaacatattggtcagcgatggcatgattctgcaaaatcaaagacttcttctgataagttgacagcagagaatcgtgggaaaattcttggtgaaaggccccttgacagaactactaaagtacatagcccatctctttctgcaaaggaagctgttcaactgcaatctaatcttactgagacatttgtcaagccaatatcccttgatggcctaccagagtatgagaagccttttagcaatgatcctgcgaaacaagttagatttgagcaatttcttagagataaatacaagggaggtcttcgtgctgcaaatgttacacctacaagtactatgtcagaaggtgatcgtgctcgggaaaggcttgattttgaggctgctgcagaggcaattgaaaagggcaagggaaaaaaagttattgatcctttgtcagtgttctctttgcctggaatgaatgagcaacgctttgtagcggcaacccaaccagagagctctgtagtgatacaagatgagaagcccatctatccacaaaggcagcagtttgaatggcggccttctccaatactgtgcaaacgttttgatattgttgaccctttcatggggaagccaatgcatgttcaaagaccaaggagcaagatggagaaccttatctttatgacagaatccaacaaaggaacaaatgatgaagtggagagctcgagtagaagtttgcagcatgcttctatggaagcgctatctgatgttgaatcacgaggagccgctactgatcctgactttgagcccagcagcttgcaaagacctgttgatctttacaaggctatcttttctgatgactcagatgatgatgcagatgaaattcttagcaatcaactagtggatccagtgaagacaagtgaaggtgccaacatggctctcaatcgtcttgtagctgaggatttcctagaatcattgggtaaagaactgggattagaagtcccgccagaaaggcctcatgtttcatctgaacctgaaaaattttcagcttctcgggctagtctctcatcccaggatgaaaggataacaactgctctcaccaaagtaaaggagaatcagtgctctattgacattgtgcaagttggcaatatcaatgaagatactccattagccagtgctgaaacccttggtatgaaatacgagaatcaggagaatagaaccgagaaaatcaggtctcgccctatgaatcgacaaagccagaaccatagtccaaggtctgattcatctagcgaacggcacaggagttggaaaaggagacatcgtcacatctggaatggaactccagaatctgagtccggtgaacgccataggagcaaaagaaaggagtctcattcaagacacagaaaacgcaggagtagaagtccaggtagtgatactcccagtgatacccaacatgagacaaaacggaaggagaaaaggcatcgccgaacttacacatctgatactgattctagtgatcatgaacacagcgaaagatataaatctagtagtaggcgatcatctgacaaagacagaagtagaaagcgtcgtatacaccacaagcacagaagaaaagatcatgtagattaaacatgaatgggaactgctggaatacgactgtacaaacgatggaaggtgcagtgcagggccattgggtttagcaaaccatggaagtttgatgagaacactgggaggtatggaaaatttgctcacaggaagtattctgctcatattggcttcattgcgttcatcacttttgcccgaagttttctttgttggattggtggaataccactgtagcattgctataccacaaagcagtttcatggaaaggaatcgcaatcatctggtcgcttgtagaagtcttaggaaaaagatcttgttgaagtagccgtgtttgcaaaaatgttgatcttgatagcaaatggtttgactacaaatctatggtgtgtgtaaaaccgcaagttgtatgatagctatttttttagtttacttagttatatgataatgtagttttgttttgttttacagaaggtaattaggtttttgagaatggtcaaagcatagcgtaatggttaaggcttctgagtagaacctttaggtcccggtt

SEQ ID NO: 152490 - DNA, 3840 bp, Zea Mays
atggcgccgaccaagaggatggagaagctcaagctcagcacattgttgactttcatgcgttgccacaggggctctagtgatgaccactcacggattgggacagtggggttctcccgagtcgtttacgtcaacgagcctgatatgcttgaagaggagggattcaactaccccttgaatgaagtgtcgacgacaaagtacactctggccaccttccttcccaagtccctcttcgagcagttcaggagggtggccaatttctacttccttgtctctggtatccttgccttgactccacttgcaccttacacggcagtgagcgcgcttgcaccgctctgtgtcgtgattgtagccaccatggcaaaagaaggggttgaggactggcggaggaaacaacaggatcatgagctcaataatcggatagtcaaagtgcataggggaagtggccattttgaagagacaaaatggaagaatatcaaagttggagatgtaataaaactggagaaggataatttctttcccgctgatatgattctgctttcatctagctatccggatggaatatgttatgtagagaccatgaaccttgatggtgaaacaaatttgaaaattaaacaagctctcgaggtgacattggatttacaggaggacacaaagttcagagaagtcagacaaacaataaaatgtgaagacccaaatgcgaacctctactcctttgtcggttcaatggaatggagaggccagcagtatcccctgtcacccctacagcttcttctccgggactcaaaactacggaacacagactacatatatggggctgtcatcttcacaggtcatgatacaaaagtgatgcaaaatgcaacagatccaccatctaaaagaagtaagattgagaagaaaatggatcaaattatttacgttctgatgtcttctctactcatgattgcattacttggttccatcttctttgggatctggaccaaagaggacgtaagagatggtgggctcaaacggtggtatcttcggccagatgctactactatattctatgatccaaagagagcagctctggcatctttctttcatttgttgacggccttgatgctgtacagctacttcatacccatttctttgtatatatccattgagatagtcaagatcttgcaagctctatttatcaaccaggatattgaaatgtatcatgaagaatcagataagccaactcatgctcgtacttcgaatctaaatgaagaactaggtatggttgatacaattctatccgataagactggaacattaacatgcaacatgatggagttcatcaagtgttcaattgctggcacagcctatggtaagggcgtcactgaagttgagagagctatggctatgaggaaaggtgacagtttagatgatgacattgaaaatggagactacaaagacaaaaaaaatcacaacagtcccaatgttaaagggttcaatttcaaggatccacgaataatggatgggaattggattcatgagcctaacaaagatatgataagagattttttccggctcctagccatctgccacacatgcattgctgaaatagacgaaaatgagaaggtttcatacgaagctgagtcccctgatgaagctgcatttgttattgcggcaagagaactagggtttgagttttacaagaggtcactggcaactataattattcgtgagcaggatccaagttggaatgttgttgagaaaaggtacagaaagtatgaactcttaaatatattggagttcagtagctcaaggagacggatgtccgtgatagtcaaagaaccagagggaaggatattacttctcagcaagggtgctgataggcttgcaccaaatggaagaaaatatgaagaagaaacaagaagacacataaatgagtattctgactctggtctaagaaccttggttctagcataccgtgtcttagatgagaaagagtacaaggaattcaatgaaaaactgaacactgccaaagcatctgtaagtgctgatagagatgtaaaaattgagcaggctgctgatagcattgaacaggacttgattcttcttggtgctactgcagttgaagataagctccagcaaggggtgcctgaatgcatagacaagcttgcgcaagccggaattaagatatgggtcctgactggcgacaagatggagacagctatcaatattgggtttgcatgtagcctgcttaggcaagacatgacacagataattgtcacactggaacaacctgacatcatcgcgttggagaaagatggtgacaaatataaaatttttaagcatcgggcatgttgcagtcattttacatataacaatgtcaacattggaatgccctatcaagccttttctataagggatgcaacatctgaagaagctgaggatgctgaaccagcagcagctgatgcaacttgtgtgctcatcttcgtgctcccttggacctgcagatggggaagagaatcagcgagcttctttgtgtcctgcgtacccacgaccttctctttgatccctgctgccctacagcaggcatcaaagaaaaaggttatgagtcagatagaggatggaatcaaacaaattccaccttcaactaaaattagcactgcatcatttgcactaatcattgatggtaaatcaataccttatgctttggaagatgatgtcaagtttaagttcttggatcttgctatcaactgtgcatcagtgatatgttgccgatcttcaccaaaacagaaggcactggtcacaagatttgttaagcaagtaacacataaagtgactttagcaataggtgatggggcaaatgatgttggcatgcttcaagaagctgacataggggttggcatcagtggtgctgaaggaatgcaggctgtcatggctagtgatgttgctgttgcccaattccgctttttggaacggctacttctggtgcatggacattggtgttaccggcgtatttcagtgatgatatgctatttcttctacaagaatgttacttttggtgtcactctctttctctacgaagcatttgcatctttctctgggaagccagcttataatgattggttcttgtcactctataatgtcttcttcacctcccttcctgtcattgctttgggagtctttgaccaggatgtgtctgccaggctatgcatacagtatccacagctataccaagaaggagtgcagaatatattattcagttggtgtcggatacttggctggatgcttaacggtgttatgaatgctgtcttaatatttttcttctgcatcacaacctttgaggaccaggtgttccgccgggatggtcaagttgcaggcttggatgctctaggcgtcgccatgtacacttgtattgtatgggttgtcaactgtcaaatggcgctctctgtgaactacttcaccataatccagcacatattcatatggggcagcattgcagtatggtacctcttcctcatagtttatggttccatgaacccgaggttctcaactacagcctacatggtcttcatcgaacagctggccccagccctctcattttggttggtgacactttttgttgtgctggcaacacttgtcccctacttcacgtatgccgcgatccagatccggtttttcccaatgttccacaacaagattcagtggaagcggtacttggggaaggctgaagacccagaagtggcaaggcagttgtcatcacgacaccggacgtcgtcgcagcagaggatggtcggtatctctgctcgtcgggacggcaaggctatgcaaataacaagggagacagagatagaagttcaggagtag

SEQ ID NO: 152491 - DNA, 282 bp, Zea Mays
gtgctggcaacacttgtcccctacttcacgtatgccgcgatccagatccggtttttcccaatgttccacaacaagattcagtggaagcggtacttggggaaggctgaagacccagaagtggcaaggcagttgtcatcacgacaccggacgtcgtcgcagcagaggatggtcggtatctctgctcgtcgggacggcaaggctatgcaaataacaagggagacagagatagaagttcaggagtagcattgtcagtagattttgcgttttgtacagcttatagga

SEQ ID NO: 152492 - DNA, 204 bp, Zea Mays
atcaacccatcataaggctctactgtcttagttcaggcctaaagcacaagacccttggtagccttcactaccaggtccgtgtattgctggaacggagtcatggaaaacttagtatggctccagaattcaggcatgaggaagccataggtcttcatcgggcagtcgaaggttgcctgtgcacaactaaaccagatgacttatgaa

SEQ ID NO: 152493 - DNA, 553 bp, Zea Mays
ccttggactgatctaacatatggtttccaaatctgtcggcactcttcctgcgatggacccttcctctcttgatagatcgatccgtttgagtagtctatgtacaaatggcatcatgcgaggtactcgagggaaccagctttgttcgtttttatgctcgtgcattttatatatgattacatttttcttgagcgcgagtggtctcatattgatgaaacgttgtttgattctagctatatttgtacaaattaggataggtatgttgcattttcactttgtggtcattattagtactttagtttttagtattgatcgataatgaacacaataactggacattgctagaaccattacagtttatcccgtatttaatcaactttgaaactatgctcaagctttcccctacttaggatttggaaaactcttcaattatgagaaggtctggttcagtctctaatgacataatattgaggcactacatttgaataatcgatagatatcagagaaatacttgttctatcaatagagaaggacaactttttttgagaccagagag

SEQ ID NO: 152494 - DNA, 2069 bp, Zea Mays
cccatctccatcttcctcgcagcttcgacgctccatcttccgctccctcccttacccgcggtcggcacgcaggcgacgccggcggcgctcaggctcgggctctcatctactgcgtcagcagcttcccctcccgcatctcgccagtcgcctcgcgctctcacctccggtcttccgcacactggccggtgaccctgccttataatattctgccacatcactctgggtgaagcaagattggtgctctttaaatttggaacttggaacatggagcatgtgctgattagtagaaggtttccaactgatcctgctctctaaatttggaacatggagcatgtgctgagtagtagaaggtttccaactgatcccaatgagtataagttatatgaggaaattggagatggtgttagtgccacagtataccgagctctttgtgtcccacttgacatcttggttgccatcaaagtgcttgaccttgagaaatgtaacaatgacctggatgggataagacgggaagtgcaaactatgagtttgattgatcacccaaatcttcttcgtgcatattgctcatttacaaatgggcaccagctttgggttgtcatgccttacatggctgctggatctgctctccacattatgaaaacttcttttccagaagggtttgatgagccagtcattgctactcttttgcgtgaagttttgaaagctcttgtctacctacattctcaaggacatattcacagagatgtcaaggctggaaacatcttaatagatacaaatggggctgttaagctaggagactttggtgtgtcagcctgtatgttcgatactggaaataggcaaagagcaagaaatacatttgtagggacgccttgctggatggctcctgaagtcatgcaacaactgcatggttatgattacaaagctgacatttggtcctttggaataacggcattagaactagcacatggtcatgctccattttcgaagtaccctccaatgaaggtgttgcttatgaccttgcaaaatgcaccaccaggtttagattatgagagggacaagcggttttcaaagtctttcaaggatttggttgctacatgcttagtcaaggatccacgcaagcgtccttcgtctgaaaagctgctgaagcattctttctttaagcatgctcgctcagctgaatatctggcacggagtattcttgatggcctccctccattgggtgaacgctttagggaactgaagagcaaagaggctgagttgcttctcaataacaaacttggtcaggagagcaaggagcagctatcacagaaagagtacataaggggcatcagtggctggaacttcaatctagaggacttgaaaaatgcagctgcccttatagacagttcaaatggcacttgttatttagatgtcagggagaacagagttaaggatgactcacaagaagcttacaatggtccagaacatatttaccaggaaaggctcaaccatgttgcttctagaaggcctgaagaggatgagatacaagaagttgaagccttgaatgatgctgtctcctcttcgttttcaagccgctcccttgaggcactaaaatcttgctttgatgtttgtggtgttgatgatccgagcccaactgctactgattcaagagcgcaaccaagtgtcggaactttacctttccagcagttgcaaaaatttgagcattgtaaaagtggcgactgcaatggtgaaagcttggaaagaagcgtttctgtacctacgaatctggtcactagtggataccacaagcattcaagtggttctcttatacctgagcaagttctttctccctacttgagcagtgatttggaaagggatggatttcgtcagaaaaacttaagcagcaggaactgtagtggccctttattgttccgccaaatgaaggattcacgcacacatcaatctgttgcgccagacgagtcgtcggaaggaaaaattatccgtcgaagggggcgcttccaggttacatcagatagtatttctgaaaaggtagctacatcatcctgcaacagcagcaggataaatctacc

SEQ ID NO: 152495 - DNA, 2614 bp, Zea Mays
cccatctccatcttcctcgcagcttcgacgctccatcttccgctccctcccttacccgcggtcggcacgcaggcgacgccggcggcgctcaggctcgggctctcatctactgcgtcagcagcttcccctcccgcatctcgccagtcgcctcgcgctctcacctccggtcttccgcacactggccggtgaccctgccttataatattctgccacatcactctgggtgaagcaagattgggtagctttccggtgcctacttcattcttgagtttgtcaatataagccactgaagccaaggatgcatgaaaattaacccaatgaaataaatgctcctacatgagtccaagcatttacctatcaaacttgataatgctggatgctattctcaggcagacctatatggtgatcttgccatttattgtcgtgtttctatgttatggaaattttaagagcgctgatgttacctgtagtgctctttaaatttggaacttggaacatggagcatgtgctgattagtagaaggtttccaactgatcctgctctctaaatttggaacatggagcatgtgctgagtagtagaaggtttccaactgatcccaatgagtataagttatatgaggaaattggagatggtgttagtgccacagtataccgagctctttgtgtcccacttgacatcttggttgccatcaaagtgcttgaccttgagaaatgtaacaatgacctggatgggataagacgggaagtgcaaactatgagtttgattgatcacccaaatcttcttcgtgcatattgctcatttacaaatgggcaccagctttgggttgtcatgccttacatggctgctggatctgctctccacattatgaaaacttcttttccagaagggtttgatgagccagtcattgctactcttttgcgtgaagttttgaaagctcttgtctacctacattctcaaggacatattcacagagatgtcaaggctggaaacatcttaatagatacaaatggggctgttaagctaggagactttggtgtgtcagcctgtatgttcgatactggaaataggcaaagagcaagaaatacatttgtagggacgccttgctggatggctcctgaagtcatgcaacaactgcatggttatgattacaaagctgacatttggtcctttggaataacggcattagaactagcacatggtcatgctccattttcgaagtaccctccaatgaaggtgttgcttatgaccttgcaaaatgcaccaccaggtttagattatgagagggacaagcggttttcaaagtctttcaaggatttggttgctacatgcttagtcaaggatccacgcaagcgtccttcgtctgaaaagctgctgaagcattctttctttaagcatgctcgctcagctgaatatctggcacggagtattcttgatggcctccctccattgggtgaacgctttagggaactgaagagcaaagaggctgagttgcttctcaataacaaacttggtcaggagagcaaggagcagctatcacagaaagagtacataaggggcatcagtggctggaacttcaatctagaggacttgaaaaatgcagctgcccttatagacagttcaaatggcacttgttatttagatgtcagggagaacagagttaaggatgactcacaagaagcttacaatggtccagaacatatttaccaggaaaggctcaaccatgttgcttctagaaggcctgaagaggatgagatacaagaagttgaagccttgaatgatgctgtctcctcttcgttttcaagccgctcccttgaggcactaaaatcttgctttgatgtttgtggtgttgatgatccgagcccaactgctactgattcaagagcgcaaccaagtgtcggaactttacctttccagcagttgcaaaaatttgagcattgtaaaagtggcgactgcaatggtgaaagcttggaaagaagcgtttctgtacctacgaatctggtcactagtggataccacaagcattcaagtggttctcttatacctgagcaagttctttctccctacttgagcagtgatttggaaagggatggatttcgtcagaaaaacttaagcagcaggaactgtagtggccctttattgttccgccaaatgaaggattcacgcacacatcaatctgttgcgccagacgagtcgtcggaaggaaaaattatccgtcgaagggggcgcttccaggttacatcagatagtatttctgaaaaggtagctacatcatcctgcaacagcagcaggataaatctaccaattgatgcagcacgttcaagtcccaagttgtctgcaattcttccaactttgcaattcttgatgaagcagaatactatgcaaaaggaagtactcagtaggctgatttcttcaattgaggaaacatctgatgattctgaagcaaccggaagcagttcatatcaggtgtgtaacattttaatgtggactgtagtctacttttgtttttttttctcgaaacacgcaggtgaactgtgccccatatataatatattaagaagatttaggaaaaggtctaaagaagaccagaaacaaaacagcttctttacggaggcc

SEQ ID NO: 152496 - DNA, 619 bp, Zea Mays
tccccgatctatccatccatggtttacttgaacctcaatctataccaccacttgaaggacggagcagcagccgtcatagcaggtcatttggagaaggatggatcggcggcaatcaagcagcagcgggatgatggagggaccgttccgattcttgccggccgaagtgaaagagatggaggagcgcctgttcccggtcaccaatcgcaggctggatcacatcctcatggatgagctcgctctgaaatttagctgcttccggcgccgtgctggcatggttcccgtcaagccaaagcaggtgctcaactggttttataacaaccgtaacaagacttctgccaaggtagcagccagggaagcacatgctccatgggagttttgggccaaccatcagcaagctagagctagaggaggctcatccatcagcaagctgaagccaaagaaggcgactacgcacgcaggatcttcctcagggaataattatatcgatgtatatcacaccaagtttgaagctaagtcagctagagatggctcttggtaccttgtcgaagaattcttgactgaaaagttttgtgaatcaggcgatttgggaggacactatgcagaggctaaatgcagttag

SEQ ID NO: 152497 - DNA, 955 bp, Zea Mays
tccccgatctatccatccatggtttacttgaacctcaatctataccaccacttgaaggacggagcagcagccgtcatagcaggtcatttggagaaggatggatcggcggcaatcaagcagcagcgggatgatggagggaccgttccgattcttgccggccgaagtgaaagagatggaggagcgcctgttcccggtcaccaatcgcaggctggatcacatcctcatggatgagctcgctctgaaatttagctgcttccggcgccgtgctggcatggttcccgtcaagccaaagcaggtgctcaactggttttataacaaccgtaacaagacttctgccaaggtagcagccagggaagcacatgctccatgggagttttgggccaaccatcagcaagctagagctagaggaggctcatccatcagcaagctgaagccaaagaaggcgactacgcacgcaggatcttcctcagggaataattatatcgatgtatatcacaccaagtttgaagctaagtcagctagagatggctcttggtaccttgtcgaagaattcttgactgaaaagttttgtgaatcaggcgatttgcaagtattggttcgctttcctggatttggagttgaggaagctgaatggatcgatgttcgtacatgtactttgcggcaacgctcagtgccatacaaggccacagaatgtgcagatgttcatatttgggaccctgttctttgttacaaggtaagtgaacagagtggtctctattttgatgctgaagtgcatgctattgaaaggaaaacacataattcaggagaagaatgtgattgcaaaatccttgttctttatgtgcatgataattctgaggacatcgtttccttgaagaagttgcgccgtcgatacgtagaatatgactacaaacctcaaacttcgtatgagctgccaaaaggaacgaaaatagcttaa

SEQ ID NO: 152498 - DNA, 441 bp, Zea Mays
atgattaaggctggttatagggcatgcagctctcatcctcatgaaatccattctgcactaccacctttccatcaagtattggttcgctttcctggatttggagttgaggaagctgaatggatcgatgttcgtacatgtactttgcggcaacgctcagtgccatacaaggccacagaatgtgcagatgttcatatttgggaccctgttctttgttacaaggtaagtgaacagagtggtctctattttgatgctgaagtgcatgctattgaaaggaaaacacataattcaggagaagaatgtgattgcaaaatccttgttctttatgtgcatgataattctgaggacatcgtttccttgaagaagttgcgccgtcgatacgtagaatatgactacaaacctcaaacttcgtatgagctgccaaaaggaacgaaaatagcttaa

SEQ ID NO: 152499 - DNA, 216 bp, Zea Mays
atgactagtggtgctatagaaattgaacagactggtggaggagttggcactgatagggatgcaaacgttggtggcgtctctagcaataagatcgacgatgaaagagaacatggggtgaagggaggacaaggcggcacgggatctgtgccagatgcagtgcgttgtgcctttaaggaatcgaacgtagaaaaatctagtactgctgtcggtgaataa

SEQ ID NO: 152500 - DNA, 1837 bp, Zea Mays
gcgacacagaccacgcgcatagctagctagatccaccgtaccgtcgcataagctaggccaggcctctgatccatcggccgatcaaagataaggagaccagcgaaggatgggtgccgactcgccgccgtcgtcgtcgtcaacggcgccggtggccggcgttggcgcgaagaacacggtgaaacagtaccaccggatcgtggttggcttcctcctcggcttcttcgtcgtcctcgtgctctacaccactctttcttcccagttcggttcacgaactgccattggtgtcctgcagtctttgtctgccgtgcgtactgatcaggctaccggggctgccccaccgttgccgtcgtcgaatacgccgagtaatttggcacaagaggaagatggcgggcacaaaaatgataaacctaacaagacggaggaggaacatatccaagacgatgctcatcgaatcgggaagaacaatcaatctgaagccaaattagatgtcaacaataatgggcaaaatgcagagaagacaggtcaaccagcagcgaacgatgcaagtgacaggatggaggaagagcttatccggcaagaaatcgatcaaggcagcaacaagaacgataccatcatggagcctgcagctacggcgccacgcaagcctatctgcgacctttccgaccccaggtacgacatctgcgagatctccggcgacgcacggaccatgggagccaaccgcaccgttctgtacgtgccaccggtcggcgagctcggctcggacggccaggaatggagcatccgtgaccagtctcgcaagcacctcgagttcgtgaacaaggtcaccgtcaagtcgctgaacgcctcccagtcgctggcggcgccagagtgcacctcccggcacgccgtccgcgcgctggtgttcgcgatgaacgggctgacgtccaacccgtggcacgacttcagcgacgtgctcatcccgctcttcatcaccacgcgtgccttggagggcgaggtgcagttcctcgtctccgatctccagccgtggttcgtggacaagtacaggctcgtcctcaagaacctctcccgctacgacatcatcgacttcaaccaggacggcggcgtccggtgctacccgcacgtcaccgtcggcctccgcagccaccgcgacctgggcatcgaccctgcgcgcgccccgcggaactacaccatgctcgacttccgcctctacatccgcgagatctaccgcctgccgtccgcaggcgtcagcatcccatacaaggaggcgaacagcaacgctgcggcagctgcgcccggcgccccagctgagcagctgcagcggaagccacgactgatgcttatcaaccgtggccgcacgaggaagttcgtcaacttcccggagatcgtcggagcggtccagaaggctgggttcgaggtcatcccgatcgagccgcgtagagacctcagcgtggaggacttcgcccggaccgtcgactcgtgcgacgtgctcatgggcgcgcacggggccggcctcaccaacttcttcttcctccgtaccaacgcggtgatgctgcaggtggtgccgtgggggcacatggagcacccttccatggcgttctacggcgggccggccaaggagatgaggctgcgagatgtcgagtacagcatagcggacgtggagagcacgctctacgacaagtacggcaaggacaacccggtggttagcgacccagagtccatacacaagcaagggtggcagcttgggatgaggtattactggatagagcaggacatcaggctcaacgtcacaaggtttgctcccacgctgcagaaggtgcttcagatgatcagggaatag

SEQ ID NO: 152501 - DNA, 1969 bp, Zea Mays
gcgacacagaccacgcgcatagctagctagatccaccgtaccgtcgcataagctaggccaggcctctgatccatcggccgatcaaagataaggagaccagcgaaggatgggtgccgactcgccgccgtcgtcgtcgtcaacggcgccggtggccggcgttggcgcgaagaacacggtgaaacagtaccaccggatcgtggttggcttcctcctcggcttcttcgtcgtcctcgtgctctacaccactctttcttcccagttcggttcacgaactgccattggtgtcctgcagtctttgtctgccgtgcgtactgatcaggctaccggggctgccccaccgttgccgtcgtcgaatacgccgagtaatttggcacaagaggaagatggcgggcacaaaaatgataaacctaacaagacggaggaggaacatatccaagacgatgctcatcgaatcgggaagaacaatcaatctgaagccaaattagagaagacaggtcaaccagcagcgaacgatgcaagtgacaggatggaggaagagcttatccggcaagaaatcgatcaaggcagcaacaagaacgataccatcatggagcctgcagctacggcgccacgcaagcctatctgcgacctttccgaccccaggtacgacatctgcgagatctccggcgacgcacggaccatgggagccaaccgcaccgttctgtacgtgccaccggtcggcgagctcggctcggacggccaggaatggagcatccgtgaccagtctcgcaagcacctcgagttcgtgaacaaggtcaccgtcaagtcgctgaacgcctcccagtcgctggcggcgccagagtgcacctcccggcacgccgtccgcgcgctggtgttcgcgatgaacgggctgacgtccaacccgtggcacgacttcagcgacgtgctcatcccgctcttcatcaccacgcgtgccttggagggcgaggtgcagttcctcgtctccgatctccagccgtggttcgtggacaagtacaggctcgtcctcaagaacctctcccgctacgacatcatcgacttcaaccaggacggcggcgtccggtgctacccgcacgtcaccgtcggcctccgcagccaccgcgacctgggcatcgaccctgcgcgcgccccgcggaactacaccatgctcgacttccgcctctacatccgcgagatctaccgcctgccgtccgcaggcgtcagcatcccatacaaggaggcgaacagcaacgctgcggcagctgcgcccggcgccccagctgagcagctgcagcggaagccacgactgatgcttatcaaccgtggccgcacgaggaagttcgtcaacttcccggagatcgtcggagcggtccagaaggctgggttcgaggtcatcccgatcgagccgcgtagagacctcagcgtggaggacttcgcccggaccgtcgactcgtgcgacgtgctcatgggcgcgcacggggccggcctcaccaacttcttcttcctccgtaccaacgcggtgatgctgcaggtggtgccgtgggggcacatggagcacccttccatggcgttctacggcgggccggccaaggagatgaggctgcgagatgtcgagtacagcatagcggacgtggagagcacgctctacgacaagtacggcaaggacaacccggtggttagcgacccagagtccatacacaagcaagggtggcagcttgggatgaggtattactggatagagcaggacatcaggctcaacgtcacaaggtttgctcccacgctgcagaaggtgcttcagatgatcagggaatagaggaaaatgagatcaatggaacatatgttacattacatttattattcatgcttagagatgaataggattaatcttgtttttttacatttggtatattggcctatacatggaacaattatccatatgcgtcaatcttaatccgtggtttctgttggattt

SEQ ID NO: 152502 - DNA, 1595 bp, Zea Mays
atggctaaattcacttcccaagaagtttcagcacttcaggaagggggcaatgagttacctaatattctctttcttccagctgctaaggaaatctatttcaagcattgggacttgcaaggccctgttattgacagtagtgatgtacatagactcagaaatttcatcaagaatgtatatgttgaacggagatattcagaccaaagaattggcgaacatttagcgcaagcaaagggtaatcaggactcttatggaaatagcaatgcagattcatctccaggagttttaagaagtgcatatgtcgaaacttatgaagataatcacgatctaaagcgcaccaaagaaagtctctcagaaaatcaaaacaatttggatggacatccaactgctatattgtcaaaactataccttgactgcaggaggtattatatatattttggaaaggaagctgcaaatccttttgaatattgtgatgtggttaccacaaccacgcacaagtccctcagagggccaagggctggcatgatcttctacaggaaaggccctaagccccccaagaagggccagcctgagggtgctgtttatgattatgaagacaatatcaactttgtagtgttcccatctctccaaggtggccctcacaaccaccagattgctgcacttgctgttgctctacagcaaactatgtcgcctggcttcaaggcctatgcaaagcaagtgaaggccaatgctgttgcaattggaaactatctcatgagcaagggctacaagatggatctccgcccccttggcttgactggaaacaaggttgaaaagctatgtgatctttgcctcatcacattgaacaagaatgctgtcttcggtgacaacagtgcattgtctccgggtggtgtccgcattgttttttttgcaatactgcatttgagctcaaaatcctacacatatttcattggttatggaactgcttcagagttgcagactagtatgattgaaacattggaagcagtggagatagagaaacagagacatcacaacactagaatggaagcccttgcacgtttggctagacttgaggttacaaacggtgagcttgcaaagtcacttgccagggaacaatgggagctggaagttcaagtagatcaagtggcgcagcttcgagaggaagttgaattgaagaaacttgctcaagataaatacagaagaaagctaacaaagatacaaaagacaagtgcccctccggttgatgaaatagaatctttgagaaggttcaagttggaggaagaaattgttgatgcagaatacactctgacatgtgacagaattgtgaaggacaagtttcaattaagcccttacaaatctctcccacaatgggaactgctgataccttgattgagacattttgacgccagagctgaggaagcattgtacatttgtcatataatggctccagtgtagcgagtcagatattttgccttgtgctcaaactgctcgtgtgtgtgtgttttggtagggaatgtacaggttcaaaccttgatgttatgttgtattttttggtagatgacccatggtagaaatagcgctgttatgtttatggcact

SEQ ID NO: 152503 - DNA, 109 bp, Zea Mays
ccattaccttagaggccagctgctttcctgctgcctcaagttcagagcaccttcaaaagtaagcactggttactatggtacatggctaaacaattttattttgaaataa

SEQ ID NO: 152504 - DNA, 873 bp, Zea Mays
ctcgcctggcgctcgcccctgacctcccatggctgtctgccccagctcggcttggccctctgttcggcgtgtttgcccctgcagaacccgcctagcctccatttttccccagcccggatctccctgctcgccttgctcctccggcgccgcggttttctgctcgcttggccggccatggtggctgtgcatgcctcctggccgtggacggttctggcccaggccaccgtcgtgcctagggaaatggtgcgcgtccctgcgcccggttttcgtttctgtcgcaccgatctgtgctccgtcctggccgtcttttctgcctccaatcttggcgccgtcacgagctcgtcagccactgttgtcttgtccgcgccagcacgcgttcatggtcgcgtcggccaagttcgccaacgttctattaccagttcgactatcgtcgctgttgcgtgcgctcgcgctcgctatcccctgctcgacctcgtcgtcaggcttcgccttaccagtcgtcgttcttcgctcagcaaggtttcgttctaagcgccgcccttcaagttcgcgtccttggtggactcgcacctccgtgtcgtgtccgtttgtccatgctgtcgacccgttagaacatagggtctcgctagagtcgcgctgccgttgacgcaacgcggggttagctcttttgtcgtgctcgaccctggaagcctccaactcgttgacatcctttgcgtcgtcgaaaattcccgagagtttgaataaagcaacaaatcccatgtgatgcaacatttgccaagagctcgaccggatgtctaaactgaaaaccgtcgtcgccctcgcggttatcaaatcgattcgatcatggtgagccaatttattattttgtgatta

SEQ ID NO: 152505 - DNA, 1212 bp, Zea Mays
tctctcatggacgcgcgagcctggcccctgcgcccagcccatctccttggacaccgccaaccctggtgctcgcccgggaactgccctttcctgtccatggcgcccaagctctgcttgacaccccttccagcgcgcgtcactgctccctttgtcgttgctccccaccgggcagtgcgtctagctcgccggccaaactccctcaacaccggcctccatggcagccagcacttcactgctccctgcatgcgccccctcactggatcccctccatttgtgaccagcgccacttcctggtccaagctccctggttctttcccctgcgcgcccagccgtcgaagctccctgcactcgcctggcgctcgcccctgacctcccatggctgtctgccccagctcggcttggccctctgttcggcgtgtttgcccctgcagaacccgcccagcctccatttttccccagcccggatctccctgctcgccttgctcctccggcgccgcggttttctgctcgcttggccggccatggtggctgtgcatgcctcctggccgtggacggttctggcccaggccaccgtcgtgcccagggaaatggtgcgcgtccctgcgcccggttttcgtttctgtcgcaccgatctgtgctccgtcctggccgtcttttctgcctccaatcttggcgccgtcgcaagcttgtcagccactgttgtcttgtccacgccagcacgcgttcatggtcgcgtcggccaagttcgccaacgttctattaccagttcgactatcgtcgcgcgctcgcgctcgctatcccctgctcgacctcatcgtcaggcttcgccttgccagtcgtcgttcttcgctcagcaaggtttcgttctaagcgccgcccttcaagttcgcgtccttggtggactcgcacctccgtgtcgtgtccgttcgtccatgctgtcgacccgtacgaacatagggtctcgctagagtcgcgctgccgttgacgcaacgcggggttagctcttttgtcgtgctcgaccctggaagcctccaactcgttgacatcctttgcgtcgtcgaaaattcccgagagtttgaataaagcaacaaatcccatgtgatgcaacatttgccaagagctcgaccggatgtctaaactgaaaactgtcgtcgccctcgcggttatcaaatcgattcgatcatggtgagccaatttattattttgtgatta

SEQ ID NO: 152506 - DNA, 739 bp, Zea Mays
tgctcacgggcctcaccgtcctcaatagcgagtgtagcctcaaacttcgcaccaacacactcgacaagcttgatggcgacccctacgtcaacatccgcatgggcaaggtttgtgtggcgaaagaagatagagcgtgatgtatctcagggacagaaggtgaacatttctgttaaatctgagaagaagaaacaacaagaaagaatggctgaaatagaaaaggttaagaaaagaagagaagaaagagctattgaaaaggcacaacatgaagaggaaatgacattgctagctagagaaagagcacgtgccgagtttcaagactgggagaagaaagaggaagaggtctgagatcaggttgcgggaggggcgtacaaagcctattgatgttctcctaaagaatcttaatttctcagatgaatttgacattgaattaaatgagccctatctggtgttcaagctgttgtatattctgacaccatcgcacagtacatcaaatgcattttataacttagcagttcctgaaatatgtgtattttgcaataaactggaggatgagatgcacgaggatgaagatgataaacgatattcacctgagcctatacctcaacagacagataaccaatttgaagaggaagatggatccttttctccacagctaatgcatggcaacgaagatgaagatgcaattgatcctgaagaagacaaagctgagctggtagagttctatgtttctattttctaa

SEQ ID NO: 152507 - DNA, 357 bp, Zea Mays
ttttttttcttttctatttctattttattgcaaactacaagttcaaacttcattcaaattttacttagatctgatttatagatcatatgaaatcattcacataatttccagcatgaatgcaaaagtggaatatttatttattatcttattttattgtttatgcttttatatgtaaaattggtgaaagaaacatttattaaattcaataggaaaactccatattatttatttttctgagatttgaaattataatctatattttataagttaaatttaaatctgagtcattaaaccctaatatatattttttttatttgtttaatcatttggaaggctaaatcatacactagattcaat

SEQ ID NO: 152508 - DNA, 1201 bp, Zea Mays
cctagactccttgagtccttgtcgtgtgaagccgtgagacagacagaagcccagaacttaaacctggaagcctggaggatggaacgggtactagcttgctagggttcgtgtccggcggcggcgactgcagctggaacgccgacggcgcagctcagtggacgctcccatcgaccattcccaggtttggttctccctcatccggtcctcctccatgtctccatggctgaatcactatcgttctcttctcacgcacgtcatgttgtcaaatccatcactggctttagctcccgtgatctgatcaacagcaaaacgaactcactacacactatgccactatggcatggagtttaattatgagacaatgtaaagactagagcgagtccactaatcacgggtggccaaagaaattcacccgaccaggccttcagagtttagtattttactattattcgtcaccaccctgctacatgattacttgtatataaatagagggcacacgacaccatcctgtaggttgtagtcttgtgatcttgtccttggaggtacacacaaagactggtagacacagacgacctctgccgatggcaggtgccccaaaagctcgacttgtatataattgcaagttatagattatattgcatacaggtgacatattagtttatatgtatttttcagtgtttttatatctaattttagaggagcagactgttcaaccaatgatggcaggtggtcgtgtacttgatccattttgtactcgccttgaccctaccatggtagaagcactggtctgcaccaaagattggatagctggagcaagaaaaggttatatagtagtaccttatatttatttacaatttaattagtcattagttgtgatcaatttgtaatattgtgaacttgtgatctttgtgatcaacctgttatattgtgaacttgtgatctttgtgatcaacttgttatactgtgaattgtgaatttgtggtctttgtgatatttgtaaactttgttgtattgtgaacttgttatattgagatattttcatatttatatggttaccgattgtaattaaggttccgaccggtaccgatgtatttttcgtaccgaactttcgattccgatgtttccgaaataccgatatcgtttccatttccgaagttaccgtttccgatttcgtttccgataaaaaatatgaaaacgataa

SEQ ID NO: 152509 - DNA, 842 bp, Zea Mays
gaagccgtgagacagacagaagcccagaacttaaacctggaagcctggaggatggaacgggtactagcttgctagggttcgtgtccggcggcggcgactgcagctggaacgccgacggcgcagctcagtggacgctcccatcgaccattcccaggttgtagtcttgtgatcttgtccttggaggtacacacaaagactggtagacacagacgacctctgccgatggcaggtgccccaaaagctcgacttgtatataattgcaagttatagattatattgcatacaggtgacatattagtttatatgtatttttcagtgtttttatatctaattttagaggagcagactgttcaaccaatgatggcaggtggtcgtgtacttgatccattttgtactcgccttgaccctaccatggtagaagcactggtctgcaccaaagattggatagctggagcaagaaaaggttatatagtagtaccttatatttatttacaatttaattagtcattagttgtgatcaatttgtaatattgtgaacttgtgatctttgtgatcaacctgttatattgtgaacttgtgatctttgtgatcaacttgttatactgtgaattgtgaatttgtggtctttgtgatatttgtaaactttgttgtattgtgaacttgttatattgagatattttcatatttatatggttaccgattgtaattaaggttccgaccggtaccgatgtatttttcgtaccgaactttcgattccgatgtttccgaaataccgatatcgtttccatttccgaagttaccgtttccgatttcgtttccgataaaaaatatgaaaacgataa

SEQ ID NO: 152510 - DNA, 651 bp, Zea Mays
gaagccgtgagacagacagaagcccagaacttaaacctggaagcctggaggatggaacgggtactagcttgctagggttcgtgtccggcggcggcgactgcagctggaacgccgacggcgcagctcagtggacgctcccatcgaccattcccagactgttcaaccaatgatggcaggtggtcgtgtacttgatccattttgtactcgccttgaccctaccatggtagaagcactggtctgcaccaaagattggatagctggagcaagaaaaggttatatagtagtaccttatatttatttacaatttaattagtcattagttgtgatcaatttgtaatattgtgaacttgtgatctttgtgatcaacctgttatattgtgaacttgtgatctttgtgatcaacttgttatactgtgaattgtgaatttgtggtctttgtgatatttgtaaactttgttgtattgtgaacttgttatattgagatattttcatatttatatggttaccgattgtaattaaggttccgaccggtaccgatgtatttttcgtaccgaactttcgattccgatgtttccgaaataccgatatcgtttccatttccgaagttaccgtttccgatttcgtttccgataaaaaatatgaaaacgataa

SEQ ID NO: 152511 - DNA, 629 bp, Zea Mays
gaagccgtgagacagacagaagcccagaacttaaacctggaagcctggaggatggaacgggtactagcttgctagggttcgtgtccggcggcggcgactgcagctggaacgccgacggcgcagctcagtggacgctcccatcgaccattcccaggtggtcgtgtacttgatccattttgtactcgccttgaccctaccatggtagaagcactggtctgcaccaaagattggatagctggagcaagaaaaggttatatagtagtaccttatatttatttacaatttaattagtcattagttgtgatcaatttgtaatattgtgaacttgtgatctttgtgatcaacctgttatattgtgaacttgtgatctttgtgatcaacttgttatactgtgaattgtgaatttgtggtctttgtgatatttgtaaactttgttgtattgtgaacttgttatattgagatattttcatatttatatggttaccgattgtaattaaggttccgaccggtaccgatgtatttttcgtaccgaactttcgattccgatgtttccgaaataccgatatcgtttccatttccgaagttaccgtttccgatttcgtttccgataaaaaatatgaaaacgataa

SEQ ID NO: 152512 - DNA, 584 bp, Zea Mays
gggtcaatattttttgggtggtgcttaggcctattgggtgtttgaatgcactaaagcttacgagatatccaatcagttagaattcaggttaaagagggtctttatcctcgtcgtatcctttatatggaaatctggggccatggggtcattcccttgactcgtactgatgagaagttttttactccacgagaatttgaacaaaaagctgctgaattggcctatttcttgtgtgtaccaattgtagtatttggagtaccaattgcaattttttgcaattgtaaggggattttcgagtatttatctaaagtaaaggaaggaacaaacaaggataagagaaaattgcttcgaatttgttttgtccaagtgagatatatggaattctattcttcaatttttatatgaaaggccttttttatttctctattccactccatttagatctaagaaagaacccaatacaatgaaattccactagtatacaaaaagagaaatagatacaaacacaaggtttcaaaccttgttatagaatttttgcttcaaagaaaagaaatatcatatatattcagcttacagatcaaaaatga

SEQ ID NO: 152513 - DNA, 1719 bp, Zea Mays
cggcgagcctgcatcaggcattcagaagcagtgaagtgagagaggtaaaacaagctgagactctaacttcaaaggaagatacacacacaaaggacagtgagaaggaggccaagaagcttgctcgcaaggcgctagggaggaagaagacaaccacgcactattgctgttgcttgtgcttagtgtgtgctcgcggctagaagcagacaagcagctgcgggagcataagggcggcatggcttcttgcggtagcttctactttgttcccttgctcctgctgatgctcctgctcgcttctcccgccactgctgcactggtgacatcctcccagcctggcggcaatgccactgctgcaaggccgaggccggggatggagcagctcaagcgcaagaggatcagggctctgctcaccaagcttaacaagcctgctctcaagactatccagagctcggatggcgacatcatagactgtgttccctctcacctccagcccgcatttgaccacccaaagctcaggggcgaaaagattctggatccgccggagaggcccaagaaccgcaacttcacctttggcggcagcggcagaagcagggtcggcgaggtggtggtgcaggcgtggcacgccaccggcgaggcgtgtccagaggggaccgtgccgatacggcggacgacggagaaggatctgctcagggctagctccctcaggaggtacggcaggaagccagcgcgccggggtgttcgccgtgattccacaagcagcggccatgagcatgcagttgggtatgtaaactcagaacagtactatggggccaaggccagtgtttatgtgtggtcgccaaggataggtgacccatcggagtccagcctgtctcagatctgggtcctctctggctcctcgggcaatgatctcaacaccatcgaagctggatggcaggtaagcccagagctatacggagacagtaacccaagattcttcacctactggacaactgacgcgtaccaagaaaccgggtgctacaaccacaattgccgcggattcgtgcagacgacgaacaagattgcaattggggcggctatcaccccggagtcggtgtacaatggcaggcagttcgacatcactctcatgctatggaaggacccaaagcacgggcactggtggctggagctgggcccgggcctcgtagtcgggtactggccgtcgcacctcttcagccacctggctcgccacgccaacatggtgcagttcggcggcgaggtcgtcaacacccggccgtcggggtcgcataccgcgacgcagatgggcagcggccacttccccagagagggcttcgaccgcgccgcctacttccggaacctgcaggtggtggactgggacaacaacctcatcccggcggccaacctgaaactcctcgccgaccatcctggatgctacgatatccagggaggcactaacagctactggggaagctacttctactacggaggacccgggaggaacgccaaatgtccctgagatcaattcggaccggatgtctctttcttgttcgatgttcttttttcgttgccctttctaggatttggtaggtcttatacgtctttaacgaaagaatgcatccacggttgagacttgggaggaatttgtaaatttggcaagtacctgttatatttaatatccctatggctcatattttattttatttatttaaataaactctaggtaca

SEQ ID NO: 152514 - DNA, 342 bp, Zea Mays
attctgccaaggtagtagctttgggtcgttgctttgaaccagatttagctatggctgcaagtgaatattttactaggtggtcagataaattggattgcagtggtctctattacgcttcatgtacaaccactaaggtaaccgcctttgattttctttttttaactgccgcatgaatatgatgtacttagccttgttgtatttggcatgacaactgatagcctctccatttaacctggttaggctagatttgtagggtcataagctgctatgacaggaacatgagaactctgtacctgcggtttgatcttctctatggaattctgaactatttgaggaaagaat

SEQ ID NO: 152515 - DNA, 282 bp, Zea Mays
atgatctccccggacaccatccgcaagaccatcggcgtcatcggcaatgggactgcactcgtgctcttcctctcccctagtgtaataatcaattcatccatttgtgtctcactgtacaaacctctgagggctatggttatgggagctcctttggaggatgctcaccaccttgcccaaaggtacgacagaatgcgtcaagaagctgaagcacagattttgttttactcggccggggagggaaagaccgccctcccggctattgaagtttcgataaatttgtag

SEQ ID NO: 152516 - DNA, 126 bp, Zea Mays
atggttgcctggccggcgagctgcctggcaaggtagcaaccaaacaggcccctagagtgtcaccaatcaccaatgcaatgtgaaagattaagaattcatgttaaattttaaggacatattctttat

SEQ ID NO: 152517 - DNA, 702 bp, Zea Mays
atggttgcctggccggcgagctgcctggcaaggacacttcttctaggcggtggtgaagagtctaccatccgtaggcgtaatctccagcccttgctcagccaaacaaagcgactgtgttcattgtctgagcacattcctcatggttaccgtagaaaatcactttttgaaggtctaattcgatataatgttccgttgctaagagcaacatggtttattaaagtcacatacctgaaccagctacagacccgacagacacctaacagtatttcagtagcgggttctgataaccaacgctctcagtggacaaaggatgttgttgaatatttacaacatattttggacgaattttgttctaaagagggtgcattcgtgcatccatcttttagagagcagtcatcaccaggacctactgttggaaccaatcagataaaaatgaaaactgaagcatctctagctgctggagacattgaagaacccttggtgcacttcaaatggtggtatatggttcgtctcatccaatggcatctcacagaagaattgcttgttccctcagtacttatcgaatggctatctaaccaactccaggagagagattcagttgacgttttagaacttctcttgcctattatgcttggtctggttgacaccattagtctctcacaaacatatgtgcgcatgtttgtgcgcatctttttactatag

SEQ ID NO: 152518 - DNA, 321 bp, Zea Mays
atgactcgtccagcacctcaggaagacttccgcctcgaccgagcaggggctctaatctcgataaacgtagcagggaatctcgacgtcatcccgtgcaaggacgctgacgcgccccgtaagcagcctttagcccataccctgacgctgttacaacaactacagtatgggcagcctctccctcgggggctcgggcgtacggacaacccctcggcctctgcctcggctctctacaggaaatcggtggacgcaagtcaaccgcacagtgcaccatcacgtcggcttgcagagcgccaggacatctccttcgaatgcaacgcctag

SEQ ID NO: 152519 - DNA, 1416 bp, Zea Mays
acccacattgcttgcttccatcgtcctcgtcgcctcgtcggcgcaaccccattccttgttgcgtcgctcgtcatcgtcggctcatcgccgtgccgatggcggacgccgccgacagcagcatggcgctggtgcattcaagcctggcagactccgtgctgacgtcgccgcggacgttgaggcaggggcagaagtgggaggtggagtatgcgcgctacttcggtacgccgcggcgggaccccaccgcggctccaccatcagggctccgctacatcatgcggggcgtccaccgccaccagggaacctggatccccgcctcatgccccgcttctctctgcgtctgccaccctagcctcccctccgcggtccccgtcctcaccatctccatcggcgacgtcgtcttcgaggagcactttgtgtcgattctcaacttctcttggcctcaggttacttgtgtgacgcagtgccccatcagaggtagcagggtggtattcgtgagcttctgtgataagtttaaacagatccagaagtttgctgtacgtttcccacagccctgtgacgcagaatcgttcttaagttgtgtggaatgctcatgcggaagcagcggaaccatggacatcataccatttggaagtgattatgtgtgtgaagattcatcagcatctgaatatattgtttctaatggacttcatcacaggctggatgatgcttcaaaccttgaggagcaatgttttgaccacacaatagatgaaccaccaatgaactaccacgaggaaacagaccagcatgttcttgaacctctcagtgctagcaacactagtaacaactctgctttccctcctagtttcaaccaaatgctgaaaagttgttcaattgattatgaccaagaggaaccctgtccattggctgcatcaaaccatgtccttcaagaggtgtatgtgctggatacttctcatgatgttgccaatgaagaaaggactgctggtaaaggaatggatgctgctgaaggagttgatgccagtatattaacatatgacctaatggcacggataaagacatatatggctgatgaatcctttaatgatatgttgctcaagcttgataaagccattgatgaacttggtggtgacatgtcgctgtagatagcaaaacctcttctgcggtgaaggaatgcaggcgtgcttcgtggcaccctacagcacatttctcaaaagttcagattgtgaagcaacagtatagttacatatggttatacatagtagatagatagtgtctatatagattacgtgcaaagataaaaattcagtactatccactgctttttgccaataatttacaatacatgcaaagttcaaaatacagacattttgcaaccatgctcatgtttatctagatgattaaacagtagcaggttctttc

SEQ ID NO: 152520 - DNA, 1068 bp, Zea Mays
tgttgcgtcgctcgtcatcgtcggctcatcgccgtgccgatggcggacgccgccgacagcagcatggcgctggtgcattcaagcctggcagactccgtgctgacgtcgccgcggacgttgaggcaggggcagaagtgggaggtggagtatgcgcgctacttcggtacgccgcggcgggaccccaccgcggctccaccatcagggctccgctacatcatgcggggcgtccaccgccaccagggaacctggatccccgcctcatgccccgcttctctctgcgtctgccaccctagcctcccctccgcggtccccgtcctcaccatctccatcggcgacgtcgtcttcgaggagcactttgtgtcgattctcaacttctcttggcctcaggttacttgtgtgacgcagtgccccatcagaggtagcagggtggtattcgtgagcttctgtgataagtttaaacagatccagaagtttgctgtacgtttcccacagccctgtgacgcagaatcgttcttaagttgtgtggaatgctcatgcggaagcagcggaaccatggacatcataccatttggaagtgattatgtgtgtgaagattcatcagcatctgaatatattgtttctaatggacttcatcacaggctggatgatgcttcaaaccttgaggagcaatgttttgaccacacaatagatgaaccaccaatgaactaccacgaggaaacagaccagcatgttcttgaacctctcagtgctagcaacactagtaacaactctgctttccctcctagtttcaaccaaatgctgaaaagttgttcaattgattatgaccaagaggaaccctgtccattggctgcatcaaaccatgtccttcaagaggtgtatgtgctggatacttctcatgatgttgccaatgaagaaaggactgctggtaaaggaatggatgctgctgaaggagttgatgccagtatattaacatatgacctaatggcacggataaagacatatatggctgatgaatcctttaatggtatgtcttctcttcctcacgctgtacatattcataagagatga

SEQ ID NO: 152521 - DNA, 645 bp, Zea Mays
aacaaatctgaacttgagaaatatctctctgaagaaacagaagacccagagtcaaaaatagatattcttgcttggtggaaagtcaattcaaataggtttccagttttgggtcacatggctcgtgacgtgcttgttatacccatcacaacagtagcgtcggagtcagcttttagcacaggtggacgtattttggatgactttcgtacctctcttactctgttcatgttagaggctttagtatgcacacaagattggcttcgaagacctactgttgacataaaagagagtacagaggaattggcaataatagaaaaggagtggatagaagaatatggtggcaaaggaaaaaagaatgagtagccaactgtgactgtcggcatatccaagtcacaaacaccaagcagtaatgttcagacctcgactatggctccacacagtacttgaagtttagactatggccgactgaaggtctacaactaggttgctgccagtgctagccagtcaaagtgccaatggagccctggagaacaacttgtggatctgtgtttttgtgactgtttcactggaatgtctgaatgtgtaatgtgttcacggtatcttcatgttagcacctgttaagtactcaagttgttagcacctgttagt

SEQ ID NO: 152522 - DNA, 1171 bp, Zea Mays
cctcgtcagcatctacctcacaccaaaacaaactcatccctgaatcccgcaaacaccatagcagatctccgtgttgctcgcgtccattggatgcgctcgggttgctggggttcgacctccctataaagcaaggcaccgtgatttcccctagcatcccacctagccgggacctgagaacgaagagagagcgaggaggatccgccgcgagctcctctgcatctcaccggtaatcagccaatcattgaggccaagaaggggggttcgctagggagtgcacggacactggatcaaggaagacaaacagaagattcaataatttctagccgaacttgggtttcgtcaccggtccgtcccgcggcatggcgaaatcgccgccgcggccatctcatgtgcacaccgctgcgccacccatggagagctactagggatctttgccattggttctgggtcctgcggctacctttctggggtcgaatgggacctcgagtggtggatgattgctcgccggaatcctaggggtatcaccggccgcaccacgccgttgccaggcttccccacgtctacgccacaggtaccatggattctgggtattacacaaatctcctagttaatggtattgaagaatctcaagcaactcgtggtgatgtaagaatacagcatggtcgtgcaacagccaagagttctcagggtagaagcaaaaattttagagatgaggaggacattcttcttgtgtcagcttggctgaatgtgggcatggatcctattcaaggagttgatcaaacacatggcacactatggagaaggatacatgaatatttcaatgcaaacaagaagtttgactcaaatcgttctgaagtatctttaatgaatcgttggtccggtatacaacatgatgtgaatctgttttgtggatgtctgtctagggttgaggctaggaatcatagtggttggtcaattgatgacaagatcgcaaatgcatgtgtaatgttcaaggccgaagaccccaaggataagaagttttcatacctgcattgctggaaaatcttgaaggacaagcccaagtggatggataggcggaaggaaattggaagtgcaaaaaaatcagccactaagaaacagaagacaacgacaaattcttctccagcatcaattgcaaatgcaattgtcgtag

SEQ ID NO: 152523 - DNA, 1676 bp, Zea Mays
cctcgtcagcatctacctcacaccaaaacaaactcatccctgaatcccgcaaacaccatagcagatctccgtgttgctcgcgtccattggatgcgctcgggttgctggggttcgacctccctataaagcaaggcaccgtgatttcccctagcatcccacctagccgggacctgagaacgaagagagagcgaggaggatccgccgcgagctcctctgcatctcaccggtaatcagccaatcattgaggccaagaaggggggttcgctagggagtgcacggacactggatcaaggaagacaaacagaagattcaataatttctagccgaacttgggtttcgtcaccggtccgtcccgcggcatggcgaaatcgccgccgcggccatctcatgtgcacaccgctgcgccacccatggagagctactagggatctttgccattggttctgggtcctgcggctacctttctggggtcgaatgggacctcgagtggtggatgattgctcgccggaatcctaggggtatcaccggccgcaccacgccgttgccaggcttccccacgtctacgccacaggtaccatggattctgggtattacacaaatctcctagttaatggtattgaagaatctcaagcaactcgtggtgatgtaagaatacagcatggtcgtgcaacagccaagagttctcagggtagaagcaaaaattttagagatgaggaggacattcttcttgtgtcagcttggctgaatgtgggcatggatcctattcaaggagttgatcaaacacatggcacactatggagaaggatacatgaatatttcaatgcaaacaagaagtttgactcaaatcgttctgaagtatctttaatgaatcgttggtccggtatacaacatgatgtgaatctgttttgtggatgtctgtctagggttgaggctaggaatcatagtggttggtcaattgatgacaagatcgcaaatgcatgtgtaatgttcaaggccgaagaccccaaggataagaagttttcatacctgcattgctggaaaatcttgaaggacaagcccaagtggatggataggcggaaggaaattggaagtgcaaaaaaatcagccactaagaaacagaagacaacgacaaattcttctccagcatcaattgcaaatgcaattgtcgtagatgcccctcttgggggtgctgatcatgatgaaccatcatgcagacccgacggtaagaagaaggagaaacaaaagctacgacaacgtacgtccatggaagttgtagactatctaattgcaaagaagaaagattctgaccttgaaaaggacttgaagaaagaggagaggtgcaataaagcctttgctctacaagaagaaaggatgaaattggacaaagaaaagtttgcgttccaaagacagctcgaagaagacagaataattggtttggaccttagcaccatgaactataaacaacggcagtattatgaagatcgtcagaacgagattcttgcaagacgtttcaatatctagaattttctagttttagttaagtatgctttgtcaacaaacttgttttagttcaacatttcatctaagtaccatcttgttcaagtttcagtttgtaatggtttaaaggtcatgaatcaacttccataagcatgtaataaattaatggcttcatagtc

SEQ ID NO: 152524 - DNA, 114 bp, Zea Mays
gttttctttctattcaaatttcaaattcattccaagtttaaattttctgactggttgaaaagtttattctcagatcacatattcaatttgaacataccaagacaagatttattt

SEQ ID NO: 152525 - DNA, 276 bp, Zea Mays
tagtcggataagacttgcgaaagtacactccgtactcagggtttttgaacccatgttgttgcaggtgatgaggagtactctaagtgttcctgtggctggagggtgtttccagttctggaggaagattagttaggattgtgtataagctttggagggttcctaccttcctgctattgtaataagttatgcactttgagtatatcaggacttgtaataaatgtaactcttcctatgtaataaccttcagttttagaaatgaaaagaatgttttataaa

SEQ ID NO: 152526 - DNA, 1242 bp, Zea Mays
ccaaaagtcgagtaaaagatggacgagtcctactgtcaatctaacatggaattaggtaagcaatccgaattattgggcatcggttgtggacaagtcaaacagagggagggaagggcgacgaagccgcctcctcgtttgtcttggtcgtagtactcgcgccatcagcaccaacccacgccacggcacaccccaaccccaacgaacaacgaggtatacaattcatttcccaacagatcaatcatcctctacatgttacagcgactcggcctgccgcgatttttataatgcgccgcggtggccgtcgctagtggtacatatcagcaccgcccctgcctcgaggttgcgtgttttgttctctgtgagcgtcgtgggtgttgatggcgtcaacggcgtactcgcggccatccaagccgcctgggccggcggccggagacaggagcggaccgcggctggccaaggagctcggcaggatcgagcccaagaagctgggcatcgggctggttgccggctgctgcttcgcgctgctcacctacctctcctttgcccggctgtttgccatctactcgccggttttcggtaaggcctttgaatccgattccctaccaagaattagaattcgtctcttgcgtgtgcggtgagagttccttcaatgaaccgggccgcagacagctcgtcgtccatggtgttgaagaacatgccgccagcaacgacgacggtgccgggtacagctacaggggcgctgccggtggaggagcagaaagaggttcgtgaccctgaggcggacccgcacatgccgaacttaccggaggtcacagaaaaggatcagcaggaggaggccacggcgacgaagccaggtattttgcatttcttgtttgaaagggtatctcattctcaaactactacctattaaccgattaaccaatactacgatgtaagtaatcaagacatacatgcgcaatcctcagccggtggtgccattattacagaggccaagatcacctgcgacgagaacggcgtcgacgagggcttcccgtacgcacggccgccggtttgtgagctagccggcgacatccgtgtcagtcctaaggagaaaaccatgtacttcgttaacccgtccggcgccggcccgttcgactccaacggggagaagaagatccgaccgttcgcccgcaaggacgacttcctcctccccggcgtcgtggaggtcacgatcaagtccgtgtcctcggccgcagccgcgcc

SEQ ID NO: 152527 - DNA, 2036 bp, Zea Mays
ccaaaagtcgagtaaaagatggacgagtcctactgtcaatctaacatggaattaggtaagcaatccgaattattgggcatcggttgtggacaagtcaaacagagggagggaagggcgacgaagccgcctcctcgtttgtcttggtcgtagtactcgcgccatcagcaccaacccacgccacggcacaccccaaccccaacgaacaacgaggtatacaattcatttcccaacagatcaatcatcctctacatgttacagcgactcggcctgccgcgatttttataatgcgccgcggtggccgtcgctagtggtacatatcagcaccgcccctgcctcgaggttgcgtgttttgttctctgtgagcgtcgtgggtgttgatggcgtcaacggcgtactcgcggccatccaagccgcctgggccggcggccggagacaggagcggaccgcggctggccaaggagctcggcaggatcgagcccaagaagctgggcatcgggctggttgccggctgctgcttcgcgctgctcacctacctctcctttgcccggctgtttgccatctactcgccggttttcgacagctcgtcgtccatggtgttgaagaacatgccgccagcaacgacgacggtgccgggtacagctacaggggcgctgccggtggaggagcagaaagaggttcgtgaccctgaggcggacccgcacatgccgaacttaccggaggtcacagaaaaggatcagcaggaggaggccacggcgacgaagccagaggccaagatcacctgcgacgagaacggcgtcgacgagggcttcccgtacgcacggccgccggtttgtgagctagccggcgacatccgtgtcagtcctaaggagaaaaccatgtacttcgttaacccgtccggcgccggcccgttcgactccaacggggagaagaagatccgaccgttcgcccgcaaggacgacttcctcctccccggcgtcgtggaggtcacgatcaagtccgtgtcctcggccgcagccgcgccgcggtgcacccgccggcacgacgtcccggtggtggtcttctccgtggccgggtacacggacaacttcttccacgacaacacggacgtgctgatcccgctgttcctcaccacggcgcacctgcaaggagaggtgcagctcctcgtcaccaactacaagccgtggtgggtgcgcaagttcacgcccctgctcaggaagctctccaactacgacgtcatcgacttcggcaaggacgacgaggtgcactgcttccgggcaggccacctcgggatgtaccgcgaccgcgatctcatcatctcccctcaccccacgcgcaacccgcgcaactactccatggttgactacaaccgcttcctccgccgcgccttcaacctgccgcgcgacgcgccggcggtgctcggggaggagaccagcgccaagcctcagatgctcatcatcgagcggaagggcacgcggaagctgctcaacctacccgaggtgtccgcgctgtgcgaggcgctcggcttcgcggtgaccgtggcagaggccgacgctgacgtgcgtgtgttcgcggagaaggtgaacgcggccgacgtgctcgtgcagatcgtgccgtggggcaagatggactggatggccaccaacttctacggccagccggcgcgcgacatgcgcctccggtacgtcgagtactacgtctcggaggaggagacgacgctcaaggacaagtacccaagggaccactacgtgttcaaggacccaatgcacatccacgcgcaggggtggccagcgatcgccgagatcatcatgaagcaggatgtcatggtcaacatgacaaggttcaaacccttcttgctccaggcgctcaacgagttgcaggactagctgcagctggagaagggtgattccctttgtatggctcgatacggacagttcggatagggcgataggccagcacagatgcggtacaggagggcctttcgtttgtttcccttttttatttgtcattttaaatcaactaaaattgatatttttatt

SEQ ID NO: 152528 - DNA, 2150 bp, Zea Mays
ccaaaagtcgagtaaaagatggacgagtcctactgtcaatctaacatggaattaggtaagcaatccgaattattgggcatcggttgtggacaagtcaaacagagggagggaagggcgacgaagccgcctcctcgtttgtcttggtcgtagtactcgcgccatcagcaccaacccacgccacggcacaccccaaccccaacgaacaacgaggtatacaattcatttcccaacagatcaatcatcctctacatgttacagcgactcggcctgccgcgatttttataatgcgccgcggtggccgtcgctagtggtacatatcagcaccgcccctgcctcgaggttgcgtgttttgttctctgtgagcgtcgtgggtgttgatggcgtcaacggcgtactcgcggccatccaagccgcctgggccggcggccggagacaggagcggaccgcggctggccaaggagctcggcaggatcgagcccaagaagctgggcatcgggctggttgccggctgctgcttcgcgctgctcacctacctctcctttgcccggctgtttgccatctactcgccggttttcgacagctcgtcgtccatggtgttgaagaacatgccgccagcaacgacgacggtgccgggtacagctacaggggcgctgccggtggaggagcagaaagaggttcgtgaccctgaggcggacccgcacatgccgaacttaccggaggtcacagaaaaggatcagcaggaggaggccacggcgacgaagccagaggccaagatcacctgcgacgagaacggcgtcgacgagggcttcccgtacgcacggccgccggtttgtgagctagccggcgacatccgtgtcagtcctaaggagaaaaccatgtacttcgttaacccgtccggcgccggcccgttcgactccaacggggagaagaagatccgaccgttcgcccgcaaggacgacttcctcctccccggcgtcgtggaggtcacgatcaagtccgtgtcctcggccgcagccgcgccgcggtgcacccgccggcacgacgtcccggtggtggtcttctccgtggccgggtacacggacaacttcttccacgacaacacggacgtgctgatcccgctgttcctcaccacggcgcacctgcaaggagaggtgcagctcctcgtcaccaactacaagccgtggtgggtgcgcaagttcacgcccctgctcaggaagctctccaactacgacgtcatcgacttcggcaaggacgacgaggtgcactgcttccgggcaggccacctcgggatgtaccgcgaccgcgatctcatcatctcccctcaccccacgcgcaacccgcgcaactactccatggttgactacaaccgcttcctccgccgcgccttcaacctgccgcgcgacgcgccggcggtgctcggggaggagaccagcgccaagcctcagatgctcatcatcgagcggaagggcacgcggaagctgctcaacctacccgaggtgtccgcgctgtgcgaggcgctcggcttcgcggtgaccgtggcagaggccgacgctgacgtgcgtgtgttcgcggagaaggtgaacgcggccgacgtgctcctcgcggtgcacggcgccgggctcacgaaccagatcttcctgcccacgggcgccgtgctcgtgcagatcgtgccgtggggcaagatggactggatggccaccaacttctacggccagccggcgcgcgacatgcgcctccggtacgtcgagtactacgtctcggaggaggagacgacgctcaaggacaagtacccaagggaccactacgtgttcaaggacccaatgcacatccacgcgcaggggtggccagcgatcgccgagatcatcatgaagcaggatgtcatggtcaacatgacaaggttcaaacccttcttgctccaggcgctcaacgagttgcaggactagctgcagctggagaagggtgattccctttgtatggctcgatacggacagttcggatagggcgataggccagcacagatgcggtacaggagggcctttcgtttgtttcccttttttatttgtcattttaaatcaactaaaattgatatttttatttgggactgtttattaacacgccgttgtgcaatttaaaacagatacaagttagga

SEQ ID NO: 152529 - DNA, 2171 bp, Zea Mays
ccaaaagtcgagtaaaagatggacgagtcctactgtcaatctaacatggaattaggtaagcaatccgaattattgggcatcggttgtggacaagtcaaacagagggagggaagggcgacgaagccgcctcctcgtttgtcttggtcgtagtactcgcgccatcagcaccaacccacgccacggcacaccccaaccccaacgaacaacgaggtatacaattcatttcccaacagatcaatcatcctctacatgttacagcgactcggcctgccgcgatttttataatgcgccgcggtggccgtcgctagtggtacatatcagcaccgcccctgcctcgaggttgcgtgttttgttctctgtgagcgtcgtgggtgttgatggcgtcaacggcgtactcgcggccatccaagccgcctgggccggcggccggagacaggagcggaccgcggctggccaaggagctcggcaggatcgagcccaagaagctgggcatcgggctggttgccggctgctgcttcgcgctgctcacctacctctcctttgcccggctgtttgccatctactcgccggttttcgacagctcgtcgtccatggtgttgaagaacatgccgccagcaacgacgacggtgccgggtacagctacaggggcgctgccggtggaggagcagaaagaggttcgtgaccctgaggcggacccgcacatgccgaacttaccggaggtcacagaaaaggatcagcaggaggaggccacggcgacgaagccagccggtggtgccattattacagaggccaagatcacctgcgacgagaacggcgtcgacgagggcttcccgtacgcacggccgccggtttgtgagctagccggcgacatccgtgtcagtcctaaggagaaaaccatgtacttcgttaacccgtccggcgccggcccgttcgactccaacggggagaagaagatccgaccgttcgcccgcaaggacgacttcctcctccccggcgtcgtggaggtcacgatcaagtccgtgtcctcggccgcagccgcgccgcggtgcacccgccggcacgacgtcccggtggtggtcttctccgtggccgggtacacggacaacttcttccacgacaacacggacgtgctgatcccgctgttcctcaccacggcgcacctgcaaggagaggtgcagctcctcgtcaccaactacaagccgtggtgggtgcgcaagttcacgcccctgctcaggaagctctccaactacgacgtcatcgacttcggcaaggacgacgaggtgcactgcttccgggcaggccacctcgggatgtaccgcgaccgcgatctcatcatctcccctcaccccacgcgcaacccgcgcaactactccatggttgactacaaccgcttcctccgccgcgccttcaacctgccgcgcgacgcgccggcggtgctcggggaggagaccagcgccaagcctcagatgctcatcatcgagcggaagggcacgcggaagctgctcaacctacccgaggtgtccgcgctgtgcgaggcgctcggcttcgcggtgaccgtggcagaggccgacgctgacgtgcgtgtgttcgcggagaaggtgaacgcggccgacgtgctcctcgcggtgcacggcgccgggctcacgaaccagatcttcctgcccacgggcgccgtgctcgtgcagatcgtgccgtggggcaagatggactggatggccaccaacttctacggccagccggcgcgcgacatgcgcctccggtacgtcgagtactacgtctcggaggaggagacgacgctcaaggacaagtacccaagggaccactacgtgttcaaggacccaatgcacatccacgcgcaggggtggccagcgatcgccgagatcatcatgaagcaggatgtcatggtcaacatgacaaggttcaaacccttcttgctccaggcgctcaacgagttgcaggactagctgcagctggagaagggtgattccctttgtatggctcgatacggacagttcggatagggcgataggccagcacagatgcggtacaggagggcctttcgtttgtttcccttttttatttgtcattttaaatcaactaaaattgatatttttatttgggactgtttattaacacgccgttgtgcaatttaaaacagatacaagttagga

SEQ ID NO: 152530 - DNA, 2247 bp, Zea Mays
ccaaaagtcgagtaaaagatggacgagtcctactgtcaatctaacatggaattaggtaagcaatccgaattattgggcatcggttgtggacaagtcaaacagagggagggaagggcgacgaagccgcctcctcgtttgtcttggtcgtagtactcgcgccatcagcaccaacccacgccacggcacaccccaaccccaacgaacaacgaggtatacaattcatttcccaacagatcaatcatcctctacatgttacagcgactcggcctgccgcgatttttataatgcgccgcggtggccgtcgctagtggtacatatcagcaccgcccctgcctcgaggttgcgtgttttgttctctgtgagcgtcgtgggtgttgatggcgtcaacggcgtactcgcggccatccaagccgcctgggccggcggccggagacaggagcggaccgcggctggccaaggagctcggcaggatcgagcccaagaagctgggcatcgggctggttgccggctgctgcttcgcgctgctcacctacctctcctttgcccggctgtttgccatctactcgccggttttcggtaaggcctttgaatccgattccctaccaagaattagaattcgtctcttgcgtgtgcggtgagagttccttcaatgaaccgggccgcagacagctcgtcgtccatggtgttgaagaacatgccgccagcaacgacgacggtgccgggtacagctacaggggcgctgccggtggaggagcagaaagaggttcgtgaccctgaggcggacccgcacatgccgaacttaccggaggtcacagaaaaggatcagcaggaggaggccacggcgacgaagccagaggccaagatcacctgcgacgagaacggcgtcgacgagggcttcccgtacgcacggccgccggtttgtgagctagccggcgacatccgtgtcagtcctaaggagaaaaccatgtacttcgttaacccgtccggcgccggcccgttcgactccaacggggagaagaagatccgaccgttcgcccgcaaggacgacttcctcctccccggcgtcgtggaggtcacgatcaagtccgtgtcctcggccgcagccgcgccgcggtgcacccgccggcacgacgtcccggtggtggtcttctccgtggccgggtacacggacaacttcttccacgacaacacggacgtgctgatcccgctgttcctcaccacggcgcacctgcaaggagaggtgcagctcctcgtcaccaactacaagccgtggtgggtgcgcaagttcacgcccctgctcaggaagctctccaactacgacgtcatcgacttcggcaaggacgacgaggtgcactgcttccgggcaggccacctcgggatgtaccgcgaccgcgatctcatcatctcccctcaccccacgcgcaacccgcgcaactactccatggttgactacaaccgcttcctccgccgcgccttcaacctgccgcgcgacgcgccggcggtgctcggggaggagaccagcgccaagcctcagatgctcatcatcgagcggaagggcacgcggaagctgctcaacctacccgaggtgtccgcgctgtgcgaggcgctcggcttcgcggtgaccgtggcagaggccgacgctgacgtgcgtgtgttcgcggagaaggtgaacgcggccgacgtgctcctcgcggtgcacggcgccgggctcacgaaccagatcttcctgcccacgggcgccgtgctcgtgcagatcgtgccgtggggcaagatggactggatggccaccaacttctacggccagccggcgcgcgacatgcgcctccggtacgtcgagtactacgtctcggaggaggagacgacgctcaaggacaagtacccaagggaccactacgtgttcaaggacccaatgcacatccacgcgcaggggtggccagcgatcgccgagatcatcatgaagcaggatgtcatggtcaacatgacaaggttcaaacccttcttgctccaggcgctcaacgagttgcaggactagctgcagctggagaagggtgattccctttgtatggctcgatacggacagttcggatagggcgataggccagcacagatgcggtacaggagggcctttcgtttgtttcccttttttatttgtcattttaaatcaactaaaattgatatttttatttgggactgtttattaacacgccgttgtgcaatttaaaacagatacaagttaggatctaattg

SEQ ID NO: 152531 - DNA, 246 bp, Zea Mays
atgaagtccggcgagcggccgaagcagatgcggggcgtccggcaggaatctcggcggttccggcttctggtcatcgtcgccggcttcttcctcgtctccctgaccttcgtcgtcatctccaagcccgattccatcctgtccagccgtggacgcgaacggctctggcccatgccacaagcagggggtgaaataggcgatgttggatctgctgaagacatggggtgcatagtttgtagttatagctag

SEQ ID NO: 152532 - DNA, 161 bp, Zea Mays
tcttgtccattgagacatgtgaacagatcttttttctattggctattcttcaacagataagaagcatcatatcaaagaaactggggccttttgagcaggtaaaaaacatggatgaatcacaagcaacttcctaatatatatgaatgcaaatgaagttttgc

SEQ ID NO: 152533 - DNA, 107 bp, Zea Mays
tttattttttaaattttgttcaccaaactttttgtggtatgttcctacgccatgtagacctacatgtatcatttgtggacaattataacagagttttcaatcagtag

SEQ ID NO: 152534 - DNA, 473 bp, Zea Mays
gggtggaaaaaaaacaggcagggcgctgagggagatgggagcggctggaggttgaagacaacggagaagcgctgctcgcagggggaaatgccatggatgatgactggaaaaaaaattctgggcgccattgttggagttggcagccaagggagatgagaaagcagaaaggggcttcggcttccatggggaagaagggggcgaccacagggcaccatgggaagctctgcgcatcccgcagcaagggcgccatgccatggccgccgacgagctcactgcttgagctcggaccagaggagatgccgcgcccatggagaagagcagctcggctgttgggctgctcgccggccatggagaagtccctgcatgcaggggagaaaggttccctgctgtcggacgccgcggagaagagggaaagctccctgcgccatggagagaggagagctggggtgctgctgctcggccacaccatttga

SEQ ID NO: 152535 - DNA, 96 bp, Zea Mays
cctagcctccatggacgccaacagccgatcccatggcgtgctgcccccagcccagcgtcctgctcccccatgggcgctccctgttttcttccacgc

SEQ ID NO: 152536 - DNA, 1032 bp, Zea Mays
gtcgatagatcgatcaaccctgaaacgatagcgctatcgacttttcagtatatatataggatgcggaaggcgaaggctctctacggtattgccgccgccgtcgccttgatggcggtgcttgagcttaggctcgtcggcgccaactttgtgagcgactgcgacatcacgtgggagccgaagaacgccaagacagacgagggaggcaaccacctcacgctgtccctcgtcagcaactcctcaggcagtatgctccggaccaagaagcagttcatctacggcagcgtctccactcggatgaagctggtgaagggcaactcggccggcacggtcaccacctactacacgtcatccatcggagacaaccacgacgagatcgacttcgagttcctgggcaacgagactggaaagccctacaccatccacaccaatgtctttgccgacggcataggtcagaaggagatgcagttccggccgtggttcgaccccaccgccgattaccacaactacaccatcttctggaaccagtgcatgatcgtatggctcatcgacggcatcccgatccgcgtgttccggaaccactcggcgcagggcgtgccgttcccgacgcgcaggcagatgtacgccttctctagcatctgggcggcggaggactgggccacgcagggcggccgcgtcaagacggactggaccaaggcgcctttcgtcgccgagtaccgcgacatcaacctccgcgtctgcgactgcgccttttatggcgccgcagggtgccccgacagctgcgcgtcgtcatcaaactggtacgccgcgccggacctgtgccagctgaccaaggagcagctgcgccagatgcgcgccgtgcagctcggctacaccatctacgactactgcgcagacggcaagaggtacaacggcacggtgccgcccgagtgcagcatgccacagtactgatcaaaataattaggacagcgaccgagcccgccatatatatacggagtagtacattgttcattttgttttctactttcttcattc

SEQ ID NO: 152537 - DNA, 1284 bp, Zea Mays
gtcatcttctagcttccatatgattcctctccactagtcattcctctgaaaaatctccagccgccaccctccatctgatatttctcatccgtcgtatatctcctggcgcgcgcgttccttgtcttgtcccagcgcccggcagctgcgccctgctccagctcatggcgcgtccctgctcctcccatggcagctccccagctcgatttccctccccagccatggccgcgcccagatcctctccctccctgttcggattccgccagacctgcgtagctccctggtgtgtcttcctccctgcgcgctccgcggtgctcagctctccagcgccggtgcccagctcgccagggccgcgtgtgctccagcgtcgcgctctgctcgcggagttccttcgcggcgttcatctccctgctcagctcgccgcgccgaactgtccagcacctctctgctcctttcgttcctagcgcgtcgagttgagcttgccgatgatgctttggctggtcagcctctgctctagctcgcagttgctgcgttgccgagtccctggccgccgtgccctgtgcgctttcctccgctcgccgggctgtacgttgctaggatcggaagcaccgccttcgtttggacagcaacggcgtgcacaaaagctttgttgctgctgttggaggcttctcgacgaaatatctaataaagggttgaagctccagtgcatcgccgtcgtttcgctatgtccggcgtcgtgcttttttgtgccggtcattggtttcctattcatcacaacgccgtcgtccccgcgtcgcgcccggaatttcgtcgcgcgtcctgtttcctgctcgctagcgtgccctctcggctcgctcggctttaattcccaatcgcgtcgtcgattccgccggttagcgttgttcgtcgtcgcgtcgcaggtgcagctctatatacgtcaccctcctgtgacgtcgtcgctccgcgcgtcagcaagaaatcccaagaatcgggtgaagacgaagctagcagcgcgatattccccaagcgttcgacaaattgcctggatcggaaaatcgctaccgatctagcggattcgtgtcagctgtggaaacgataagctgataaattattcagaatagttcgatcgatgaataaattaatgtactagtgcgatgctcattaaggtgctcgataaattgtgtaagtcacgaaactctcgtcgacttcgcagttcttgcgattatcgagccagattcagttatagcgagttatttcgctattctcgtcaattagttgaattagtgt

SEQ ID NO: 152538 - DNA, 204 bp, Zea Mays
atggggattaaggccgagcagagaaaattcgcgcacgcggctggaaggaactggaaagccatggcgccggaggaacttcacagcgcgcagacactagagaactcgacggcggcgcgtgcgcagggagctgaaagagaaccacggcacgagcagggaactggccacggcgaacagagggatatggctgtgcgcacagggagctag

SEQ ID NO: 152539 - DNA, 1921 bp, Zea Mays
acaaattttccagctcactcagcgtttctctctgctcgcctcggcctccaactccggccgtggtggccaccggaagcgcgtctcccggccccggctcagcggtctgcgttctccctgctctcccaagctatgcgcccctgtcctgttccctgcgcgcgctgttcctgctcgctttggcgtccacgccatgaagccctgcgctcgtcgcggcagactccagtcctcctctgccgagcagcttgcccagccttcttctccctacacgccggagctcgcccagccgaccgaagctctaagctccagccatggcgcgtcctcgctccctcttccctgctcgccggttctccttgccgagctcccctacgtgctgagctctctgctgcggctttcctttccccaagctcctccagccgcgcagtccagctgcttcttcctcctcctggcgttcttcctgtgccatgcgccctgcccatctcccagttccagctgccgcatgcgcagctgctccttctgcccagccgccccggatcttgctcggccatagcaagttcctccctttcctctgctcgcgggctgctccagtcggtcgcgcgtccagcttgcccagtctgcacgccacgctcccttgtcgtggctttctgcttcctcgtcgctcgtagcgttctgttgttcctgcgcgtgctgccgcgaagctccctgttcagttcgcctccgtcacgttatcgtgctcgcgaaactgctcgcagtcaatatcaagtccgtgacgcccacgttggacacggtaaaacgctgtgtgtgctggtgtccgaactcgccctggtcatggcgtttggtaccgtgccgtgctgtttctctacgcacgtcctcctgttagctgtcgcgactgccgtcaaatcatcggagtcgttcaacttgccgatcacatcttggtcggtcgtcgatttcctattcgtcatggtacaacactgttattaaatccggtctccaacccgccatggcgtttgtcatcctctagtcccagttcgacccatccgtgtgtttgctcttcatccctcgggcttcacgcgtgctcgcatttgtcatcgagctgttgaacccgtccttccttgctcgtgacttcatcgtcgccagagccctcactaaatttgtgtcctcgctagctcgctccatattcaatctcgtcgtcgttccgtgcgtcagcaagaaatctcaagaatcgggtgaagacgaggctagcagcatggtgttcaccaagtgagcgacaaaaagctcggacatcctgcgcaactcaagttcggttcgtcaaaattattcaatcgaggaaaagatcttcagaaattgattaccgaagaaaagaaggcccctggatgacgtcaaccggaacccatagtcgtgcttgcgactaacgcgtcgaattagtcagggtaagtaaatttgttactcgtgttagtggattggtggatggtttgactaggtttaatatttattagattgcctgagtcgttttagtaatttggtcgatgtcgtaggatgaaaaagatctcaataggtctcagtgtttgcgggattgtaggtgctaaaaatgggaagttatattaatatatatatgatacaccggttaatcggtaaatcaagtaattaagatacacaatttaaagagttaataaaaagctagaaataaaaatagatgttcgagtgttattatgtcaatttgattaatgaatatagtcgatgccctgatattgtataaaatatgcttggttataggttataagtgtttcatccattttagtgtagattatctatcttgtactatttatactcgttatacttgtgctcatacatgtgcatcatgcatctcatgaggtacgataaataatcgcgtgatgcggaagacgacccaagtcgaccccaagcacgg

SEQ ID NO: 152540 - DNA, 300 bp, Zea Mays
atggagagcgcgctcaagaggccgacggcgctctgcgcgatggtccctggctggggcgagcagggcatccgagggagggaagggtgctgtccacggctgggagaaccttgcgcgcactgccccaatgccgatctggaacagagaaggaagaaaggagggctcgaccatcgaagtttgctggtcggccatggggacgggggtgcggccttggagctccggcgttcaagggaagcagcgagagggagttgcagaccggagctcgaatggcatctagccagcgcgcgcagggggagatggtga

SEQ ID NO: 152541 - DNA, 487 bp, Zea Mays
atggcggccagatgggactgctcgagggaatccacggcaaggtggggatggccggacttgagaagggcaggaagccatatgggagagggagcgtacgtgcaggaagcgaacaaggagcccaggccatggggcgagctcacctgctcgagctcggacctagagaaatgccctgcgctaggagcctggggagggggatgctgtgcagggtgccggccagaggtaaggtgcgccagggatagctcgcagccatggataacgcaggggcagagaagagctcgcagggaactcggacgccgtgaccgctggccggatcacaggctgaggagaagttgtacccatggcgccgcttacccagagttggccgagcagaagaggggcggctggccatggagttcctgctgggcaccatggaaaggggagcagaggtgctgcacggtagaaggatgaaggagagcgtggggaggaagaggaggctgttggtggcggc

SEQ ID NO: 152542 - DNA, 1874 bp, Zea Mays
gctcaagttttagtgacaataacgccaggggtgttacaggttcatcctaagcgctgggcatgtgctcccctgcccttctattagccaacaactctccctcaccatctcctcactggttcaagacgcccaaccttcttctccctgctcggatcccactcgtggagatcccttcctctaccttggtcggcgttgagctcacccaacggcccttcctctacctcccgcaagctcccagcgatgcgccccaggtccctgcgcacagccgccacccgccgagctcacccccggcccctttgctcctccatagtcgtgccctggagctcgcccaacgttcttccgtgctgatggtcggtggtctccttacagcgacgccgattcctgctcccgtggatgccggcggcaggagatgcttctcccctgcgctcgcccatggacgccagtcgcgcccccttctcgtcgtggagcttgctgcacccttccagttccctctacccagccatggagcttgccccttgctcggattccagcgccccgctccctatttgcccctactcgcctggccacggcgcagccccctcggcttctcctccccatcacgtcgcgcccagctccctgcgcgcgtccctctgttggccaaagttccttggcccgaccccgtgctacgctggcccagccgtggtctccagctcgtcggccgcgagtccctacccatggccgctgtgccgagttcttctccagcgtcgtgaagcccctgctcctcgctcgcctccatggtgttgccgtagaatttcctcgccgcgcccttgccaagctctagcgcgcgtagtcctgtttcaatgatggccgctcattccttctctggtgctcgccgatggcgcgcagtcgcgtcttctcattcgacctgctccggattcgaagctggtcgccctatgtgctcgactttgtcttatcgcagaaaccccaacgtcgtcgaccttgccgattgtcgtcattcgtcgtcgcatcgtgcgtgcagcagccccggatctgtgcggccctagtcttgttgtcgacatcgctcgtcgtggctcagcttgctagctcgtcgttgtttcgtcgtctcgtcttgatgccagtccctacgtggcatctccgacgtgtgttcacgccgacaaaagaatcccaagaagttatagagaagcaagtccctggtcgatgtccccaagtgctcggtgaaaggccaaaacaagaatcatcgccatttatacggagttctagttaatatggagagattccaagaattgcggatggatgagaaagtaaagctccgttctatactcatcaactatttgatcaaagattttattcggaggctgtcgacgttctctcaagctttgagtcggacttgctttggatgagaaatccctgatgttcgagagaggcctgtaagcgctctcttgggactcgaccaaatgactaaattggaaaaccgtcatcgccctcgcggatatcgaatccattcggtcttggtaagccaatttattatttcggttaatcgaattggattaactagactcattagttgtaataattcttgtgtttagcagatgcgtcgtatctgtgttagatgtttgctaaaatatctcagcccctctggtaatataattgtgtgaaataaatgcgtgatatggtgcaccttaggtgtaaaatgcaggataaataaaatatttaatttagtgagaacttagaatagtaattctagaagttaatgggatgatttctatttttagtctgagtttagatgttgtgctctagtcaagagagatagagtgcttgtaaacggttcgctatggtttgccgttaaaattggatccgagtaagctagaagaccataa

SEQ ID NO: 152543 - DNA, 300 bp, Zea Mays
atttcctgttgtgtttcaatttcagttttatgcttccaaatccaaattttaaactcaattataaccacacaaaaataaatctcagcatgatatgcaagttgtatttttttagttacttaattattattattttatttaggtaatatttccaataaaatgctcacacacacatcatttatttcaagagaatattattttagatatgtagtcaaattaaaagtacattcaaacattccatattttttacttatttataagaaaataacttttattgaaaacccccatcaagaggtcttttaa

SEQ ID NO: 152544 - DNA, 2470 bp, Zea Mays
tcgatctccctcccggctccccgacctttgtaaaccctaaaaatcaatctagttcgcaccaaatcgatcgcgcctcagctcaaaatccgaaacggttcgaacgatcagaacgattcagcttcagctcctgaatccagcagcaatggatcgctcccgctccaagcgcggctaccactacgaccaggactccccgccgccccgctccaagcagcgcttcgaccgccgcagcggtggcggccagaatgctaactcgagctatcaccgccgcggccccctcggcggcggcggctccgaccgccgcgggttcctgccccctgcccccgcgccgcccccgcccccgcccccaccgccgcttcctccctcgtcggccacggcgggtggcggcgctggtcccaccaccaccaccacctccttccgcatcctgtgccccgagtgcaaggcctacggcttcccacccggcttcgttgccaaggtccgggacgacagcggcgcgcttgtcactgtgcacccgcccttcgcgggcgactacgtccgggtcatcgagacggtggacggcgcgaggcgcgaggcagacggccgcccgcccatgttctccccggcccaagaggcccttctcatggtgcaccgccggattctcgagaccgacgctgacgacggcgacgaggatggcgagtatgggcccaggggcaaggactccagggacagggggaagaccaccacacgactcatcgtgcccaagatgcacgtcggatgcttgctcggcaaaggtgggaagatcatagagcaaatgaggatggagaccaagacgcacattaggatcctgccgcgtgaccagcacactccgcgctgcgtttccttgtccgaggaggttgtacaggttgttggagatggaaattgtgttaagaaggctgtagcaataatcactgatcgcctaaaggaaagcttacaccgtgaccgtggtcccttccgtgggcgaatgaattcaccagagcctcgaatttctcaggaagatgattatttgggtgtttcgcagatgcctgcatacgaggaatctctgggacgatctgatcagattaggaacaacactagcatggagccaccaggatatgagtttgattcaaatgatggcaaggtgattgaacatccagatatcctgtacgatgacataatttttcgaattctatgcccaaatgacaaggttgacaatttagttgcaacaaatgatggaatactggagatgctacaggctgatgttggtgttgatgttagactatctgatattattgctggttctgatgaaagggtagtaatcatcacatctagagagggaccagaccatgagcttttcccagctcaggaagcagtgctgcacattcaaactcatattgtagacctcggcccagacaaggataacattatcacaacaagactacttgtaccttcaagtgaaattgcttgctttgatggaagggaggggtcattatctgatatacagcgacagactagtgcaaacgtgcagatattaccaaaagaagatcttccattatgcgctttagagtcagatgaactcatacagattgttggagagattagtgctgctcggaatgctctgatacaagtaacaacaaaattaaggagttttctataccgtgagatgtctggtcctattcaagttggcaatattaatgtacatggagccatttctccagtagcaggctcacctggaggacccaacctcggaaatgatatgccaatgagtgcttatcaccaagcatcacaactggcaacttcatggcattcaaaagatagtggaggcagtgcaagtggctcatttgatcaaggcagcaacattattgatgagatcagacaaggtgctacaaaaaggtaatatgttatccttgcagttgtttcttatggtttgtttatttgatcaccttttttgccctccatcagatttgccgttcctctagtaactaggagcacactagaagttgtcataccaaatagtgctgttgcaagcctcaccatgagagctggtagcaagcttgctcaaataagcgagatctctggtgctactgtaacgctagctgaggacagacctgacatcttagagaaagttgttcgaatatctggtacccctgagcaggctagcaaagctgagaatttgctgcagggatttattctaagcattccagatgacattccttcaggctagttgaagacactctgcatgtcatagttgttagttcgtaaaattcctgtgtatattcgaggtagaatatgctgatgtcatgtgattatttgtttaattgagcagcatgtattcatgtgtggatacatgctgttttccttgtagccgttaactggctgacgggggtgtaagattagcatgtgaatttacagattgattcaacattcaattctcatgtccatatgtgaccgctgaacatgaaacctccaacttatttaa

SEQ ID NO: 152545 - DNA, 2401 bp, Zea Mays
tcgatctccctcccggctccccgacctttgtaaaccctaaaaatcaatctagttcgcaccaaatcgatcgcgcctcagctcaaaatccgaaacggttcgaacgatcagaacgattcagcttcagctcctgaatccagcagcaatggatcgctcccgctccaagcgcggctaccactacgaccaggactccccgccgccccgctccaagcagcgcttcgaccgccgcagcggtggcggccagaatgctaactcgagctatcaccgccgcggccccctcggcggcggcggctccgaccgccgcgggttcctgccccctgcccccgcgccgcccccgcccccgcccccaccgccgcttcctccctcgtcggccacggcgggtggcggcgctggtcccaccaccaccaccacctccttccgcatcctgtgccccgagtgcaaggcctacggcttcccacccggcttcgttgccaaggtccgggacgacagcggcgcgcttgtcactgtgcacccgcccttcgcgggcgactacgtccgggtcatcgagacggtggacggcgcgaggcgcgaggcagacggccgcccgcccatgttctccccggcccaagaggcccttctcatggtgcaccgccggattctcgagaccgacgctgacgacggcgacgaggatggcgagtatgggcccaggggcaaggactccagggacagggggaagaccaccacacgactcatcgtgcccaagatgcacgtcggatgcttgctcggcaaaggtgggaagatcatagagcaaatgaggatggagaccaagacgcacattaggatcctgccgcgtgaccagcacactccgcgctgcgtttccttgtccgaggaggttgtacaggttgttggagatggaaattgtgttaagaaggctgtagcaataatcactgatcgcctaaaggaaagcttacaccgtgaccgtggtcccttccgtgggcgaatgaattcaccagagcctcgaatttctcaggaagatgattatttgggtgtttcgcagatgcctgcatacgaggaatctctgggacgatctgatcagattaggaacaacactagcatggagccaccaggatatgagtttgattcaaatgatggcaaggtgattgaacatccagatatcctgtacgatgacataatttttcgaattctatgcccaaatgacaaggttgacaatttagttgcaacaaatgatggaatactggagatgctacaggctgatgttggtgttgatgttagactatctgatattattgctggttctgatgaaagggtagtaatcatcacatctagagagggaccagaccatgagcttttcccagctcaggaagcagtgctgcacattcaaactcatattgtagacctcggcccagacaaggataacattatcacaacaagactacttgtaccttcaagtgaaattgcttgctttgatggaagggaggggtcattatctgatatacagcgacagactagtgcaaacgtgcagatattaccaaaagaagatcttccattatgcgctttagagtcagatgaactcatacagattgttggagagattagtgctgctcggaatgctctgatacaagtaacaacaaaattaaggagttttctataccgtgagatgtctggtcctattcaagttggcaatattaatgtacatggagccatttctccagtagcaggctcacctggaggacccaacctcggaaatgatatgccaatgagtgcttatcaccaagcatcacaactggcaacttcatggcattcaaaagatagtggaggcagtgcaagtggctcatttgatcaaggcagcaacattattgatgagatcagacaaggtgctacaaaaagatttgccgttcctctagtaactaggagcacactagaagttgtcataccaaatagtgctgttgcaagcctcaccatgagagctggtagcaagcttgctcaaataagcgagatctctggtgctactgtaacgctagctgaggacagacctgacatcttagagaaagttgttcgaatatctggtacccctgagcaggctagcaaagctgagaatttgctgcagggatttattctaagcattccagatgacattccttcaggctagttgaagacactctgcatgtcatagttgttagttcgtaaaattcctgtgtatattcgaggtagaatatgctgatgtcatgtgattatttgtttaattgagcagcatgtattcatgtgtggatacatgctgttttccttgtagccgttaactggctgacgggggtgtaagattagcatgtgaatttacagattgattcaacattcaattctcatgtccatatgtgaccgctgaacatgaaacctccaacttatttaa

SEQ ID NO: 152546 - DNA, 1030 bp, Zea Mays
caagttcaggagtatcaaacaaaacttgttgcattgaaggaacaattatctaagcactaggacaaaaggatgcagctcctggataaacttaagtacatggagcgagaattggtagcaaccaaagggtgggagagtgcattacaggaacgactactaaaggagttgggtgactatcaggggcgtattgtggtcaagtacaattcaatagactggttctaggatcagtacagaatcatcaatatcatccgcgaaggaattgataagggaatttgcatcgattatctgaaatctcaaaaagggagaagaaaactcttaagacggaactttcatatgtgaaagaagacctatctagatcttcttccaaaaataatgctgaggttcatatgtttatactattgcaatatctatttgtggttgcctgttcactcatctattttaaacatttgaggttaatatgagatcagatagtactgctcaccctagattcttttcttatccgtctccgcatagcaaagaaactaaccgaatcagagcaaagagattgcacgaaggagggggcaccggagcagtgacaacagaagagagatcgccagggccgcttgcctgtctggagagaggaaggcaacaagagatggacgagatcatgaacaaggtgggtgtttactggatggggccaccggccaacaaggagatctcggcaggcgacgaccttgaatcactctcgaccagtgtcggggatggagtggaatggctggtgaaaaagttgaagggcaagatgcagaagccactggtggacctgcttagcacaacctctctgtgggtatgttaccatgcgagaataccaactacgagttcccgctgtctctgagttgtggtttgacgccacagtgtcaggtatgctaggcgagggccgcctcacgtgaaggtggacgggatcaagagcaaggtgctcgtctcagctagggtcaccattgttaaggccgccgctgccaaggtctacttcactatgaggatcaagtggtcgcgcaac

SEQ ID NO: 152547 - DNA, 2318 bp, Zea Mays
gtaatcacctgccttgtctacaattcttcctttcctaccctgtatttctaacccagatgggctacccctatagtgttagaagagagcactatagacgtgatccttggtatgtcatggttaagaaaggcaaaggcagtatatacactgtgctaagggaaccatagaactcaccagttccaaaggataaagatttgaagttggagttgcagtaactacccccatcagactagcgacattcttagtagatgagaagttggtgggtgacaacatccgtgcagttagggattttccggatgtctttccagaggagttattagggatgccacctgatagagaagttgagtttgttattgatctcttacctgggactgcccctatttctaaacggccatataggatgttcgtagaagagttaaagaaacttaagaagcagttaactgagttacaagaggctgggtactttcgtccgagttcctcaccttggggagcactggttctgtttgtacagaagaaggatggatcacaacggatgtgtgtggattatagatcacttaatgatgttactgtgaagaacaagtatccgttaccctgcattaaggatttatttaatcagatgagaggtgcaagggtattttcgaagattgatctccgatcgggttaccatcaaatgaagattaggccatcgaatattcccaagacgactttctcgactcgatatggattatatgagttcactgttatgtcgtttggattaactaatgcaccaagttattttatggatttgatgaataaggtgtttatggagtatttggacagattcgtcgtggtgttcattgataatattcttatatattctaagagtgaaagtgaacatgaggaacacctgagattggtgctacaaaagctgagggaccatcaactctacgccaagtatagcaaatgcgagttttggattagcgaggtgctattcctgggacatattatttctaatggaggaatagcagtggatcctgctaaagtgaaggagataatggagtggagagtgcccactacagttactgagattcagagtttcttgggattagcaggatattatcggagatttattgaaggattttctaagattgctaagcctatgacctcacttctggagaagggaagagagttcaagtgggacgagaagtgccaagatagttttgatcaattaaaaaagaggttgatgtcgccaccagtgttggttatgccagatctgcagaaggggtttgacatttattgtgatgcatgtggtcaaggacaggatgtgtgttcctgatattgaaagccttcgtgagactatattgaaggaggcccatgactcagattactctatccaccctggtagcactaagatgtatcaagatttgaagcagaagtattggtggtatggactgaaaagagatgttgctgcacacgtggctaagtgtgatgtgtgtcaaagagttaaggccgaacatcaaagaccagctggactattgcacccattgaagatacccgagtggaaatgggaagaaattggtatggatttcattgttggactacctcgcactccagtaggatatgactctatttgggtaattgtggacagattgacaaaagtggctcatttcataccagtgaggactaattacacgggagccaagctaacagaattgtatatgactcggatagtttgtctacatggagtgcctaaaaagatcgtgtctgatcgaggatcacagtttacttctcggttttggaagaagttgcataagagcttggatacaaagttgaattttagttcagcctaccatccccagactgatggacagacagggaggattaaccaagtgctggaggatatgttaagagcttgtgctcttaaacatggtggaagttgggataagagcttaccatatgcagagttctcttataataatagctaccggaccagtttgaagatgtcaccgtttgaggctctatatggcagaaaatgcaggactcctctgtattgggatcagactggagaaagacagttctttgggcctgagcttattcaagaggcagaagaacaagttcgaatgataagagaaaatttgagaattgcacaatccaggcaaaagagctatgctgataatagaaggagactactggagtttaaggagggtgatcatttctatttgaaggtgtcaccactccggggtgtgaggagatttaaagttaaaggaaagttgtcccctcgcttcattggacctttcttgatcttaaagagagtgggagaagttgcatatcaactggagtta

SEQ ID NO: 152548 - DNA, 372 bp, Zea Mays
gactgcagcgcattctgcacaccgcccacgacgcaccgctcgtggtcgggcacgccgtcctgcatcagctgcagcacggcgaggtcgaacgtccagaggcccaggcgcgaggtcgccacgccggccatgagcatccaggcggacgccacgccggtggccgcccagacggaggccacgcacagcagcaggcagcaccactgcatccagatggaccacagccccgtccggagcgtggtaacccgggagtgcacgagcgggtacagcagggtcgctccgatcccaacaatggcgctgaagccccgcgccaaactgatcacgtatgcaggtatgcctttccagtcaagtgtcgcggtcatcagcgtaccaaagctg

SEQ ID NO: 152549 - DNA, 290 bp, Zea Mays
acaattaatattactaccatctggtgctgatgatgacaataagtcgagctgccatggccatatgcctctggatgttgaagtatggcagaaccgtgaaccaccggcgaggaggtgatcatcgtggtgataggctctactggtgtgttgatgtggaatgctgcagcagttgcagccatgcggcgcctgtgctcttggttgccaaattgattgcggtgaagattatgatcctggtgaaggttgagatgcgctgcatgcatttcctcctcgtccctcatcgaaacctgaactga

SEQ ID NO: 152550 - DNA, 267 bp, Zea Mays
atggccacggtaacactagaggtgaaaggagagacacagctgaataacctggctgagaagctggcaacagctggtgtccggcacaaggacggcttcctgacggtgactaccgcgactacctccgactacagggccgactaccgcgactacagggccgactaccgcgttgctgccgaggggaagagatctggagaccacgtcggcgctagatactcgagaactgaagagaggaagaggcgttgggggattacctcgatggctagataa

SEQ ID NO: 152551 - DNA, 94 bp, Zea Mays
caccacatatcgcaactacttcacgaccagatatacaactaactactacatggaatgagacgcctctatacgcattttatgtgttattaaaata

SEQ ID NO: 152552 - DNA, 213 bp, Zea Mays
atgtcgatacacacattttgttaagtgtttaatgcattcatgtcgatgcacacattttgtttgattttattcccttatataaagtctcttttttttaataatagaaattgcctaaaaattatttagtaagaactttaattattataatattattattagatttcttatacttttgaaatatttaaaacatatttattaacgaataagatattt

SEQ ID NO: 152553 - DNA, 237 bp, Zea Mays
atggcccctgcgcagctcctcctcgcggccaccatggtgctcgacgcctctccccttcaagcgcagcagctccattcctccatggccgagctccctccacggcgccatttctcccagccggctccctcttcctcctcccctatttcttcctcaagtccgcaggccgctccctctgctgtccagggcgcaggcgagcttcgctcgccccttctctcccctggccggatcggcccctag

SEQ ID NO: 152554 - DNA, 201 bp, Zea Mays
gatctgtgcagccccaacacacaccgtcgatctgcgcagctacgaccacgacagctccctcgcatcgtgtgctccgcctcatcgcactcgccgtgctcgacgtcgacctcacacaacaacgtcgttgattcgcgcagccatgacacatgtcgttgtcttcctatttggacagccccggtcacgatgtcatcgaatcccggt

SEQ ID NO: 152555 - DNA, 1639 bp, Zea Mays
aagttcgatccagattatagcagctagctcaccgtcaccgacatacagtacaatagcagcttattagcttgtgtcagtccatccatccatccatggagaaactcgtctacttcgcgaccattatatccttatccatggcggcgctgctagtgccactccgcgtacagtgcgaagaagcagctagagctgctgctgccagaagctgccatgccggcaccggagcttctgcttctgcaccagccgcagcagcagcgtggaaaaggagctgcggcggcggcaaggcggggaagcagcagccgcaggtggagggcatgttcgtgttcgggagctcgctggtggacaacggcaacaacaactttctcaacggctccggcgtgcgcgcagactacctcccctacggcgtggacttccccctcggcccctccggccgtttctccaacggccgcaacgtcatcgacgcgctcggcgagctcctcggcctccccgggctcgtcccacccttcgccgacccgcgcacccggcgggcccgcgccgcgctgcgcggcgtcaacttcgcctccggcggctccggcatcctggagcacaccgggcagggcaaggtggtgagcctgcggcagcagatcaccaactttgagtcggtgacccttcctgacctgcgggcccaactgcgtggaccagctgcggccgccaaccactggatcaagggtcaagattccttccacaagtgctacctctccaagtgcctcttcgtcatcggcacaggtggcaatgactacctgctcgactacttcaaccccgggaacggcacccaaggtgggccgcccttgtcagagttcactgcgtctctcatcaccaagctctccggacatcttcagaggttgtacgctcttggcgcacggaagtttgtgatcttctcgatccagccgaccgggtgcacccccgtggtacgggcgttcctcaacatcaccggcggcgcctgcatcgagccggtgaacgacgcggtggcgctcttcaacgccgagctcaggcggctggtggatggcgcgaggcggcgcatgcccgccgccaggttcgcctttatcgactcctacaggatcatcaaggacatgctggaccaccccgccaaacatggcgttagggagacgagcagagcctgctgcgagatgtcgaggagctcgtcgggcgtgctgtgcaagaagcaggggcccatctgcagcgaccggacggagtacgtcttcttcgacgggctgcacccgacggacgccgtgaacgccaggatcgcgcgcaagggctacggctccagctcgcccgaccacgcctaccccatcaacgtcaagaagctagccatgctgtagcccttgtagaagctagccatgcatgcttgtaacctagctttgtactagtagtaataatctagaattaatgcctacctcatcaacgccaacatcgttcgactacttactagtagtactagttctctgtgaaatagtctaataagccatctcccattcgtctttgctaggcgttaagtgtttttagtgaagagtacgcgcgggcatgcagggtggtctagacaatcctaatgtatagtatccgctacttggtcttttatgtatcatgagtgatgcattcgtctttt

SEQ ID NO: 152556 - DNA, 1269 bp, Zea Mays
atggcaaaatgcacacttgggattcaaacatctgccattcaaccagtaccaatagttcatagggttcatccgggcaccctcattgtgatgaaaatcacattcattaccctaatggaagaaatggagagaaagattagtttcatatttggttggaaggaagaggaggacgaggtgcaacaccatgaggaggaggacgagcaggcccatgaggaggaggaggtgcaggcccatgaggaggaggtgcaggcccatgaggaggaggaggatgtcgcgggcatagatgctgaggcggatgacgataccatcgaggctcctgtcgttcgacaaaggggcactcggaagggccactttgtcctacctctgtcagcgcctgcacaatctgaagctcgggtactaatcatcccggttggtgatagccaatgggatgacacgtctttcgacggtcgaggtcaccatagacaggttaatcaagtcttaggtaacctctgtcatctacataatccaggaattgtcaccgactcgaaaggtgtggtggttccttgcactagctggtcgcacttcggactagctccacatgctacatatggaacagctcaaggcaccgtcaagcacgacttttggagacgctatcgtgtggaacctgaggctcaagagcatgcagatcgagtattagagaaaaatgcgaagaaggtgtgcagggatgcattttccaatgctcgtctacaggttgtgaacgcgtacatgaagcgccaaggtcattctgtcaacaactttcgacaatattcggatgtctacttgactgtagaccagtacatggagggggctcaaactggagttgtcccaagcccaatcgatgtttataggagagggcatagagcgaaaaatagtgaaatctccgatgagctgtgtagtcaagcggccgttgagcgtatggagacatacgggcaggagatggttaggaagtatggagaagactacgattggcgaggagcgcctaccatcgacgttgaagttgtgcattctattggaggcaaggcgcatggacgatattctatgtttaccggtgttatcgattcgacggagttgcgttctcgtggtggctcttcgtcgcaggcgggttgtggtagtagcagccgtagtcgccgctctgtatctagcatggaggacgctatgagggagcagcaagaaaagtttcgtgaagagctgcggcaacaacaaatgacattcctcaaagagcaatcagagtacatggctgcttacaacgcatag

SEQ ID NO: 152557 - DNA, 174 bp, Zea Mays
ccactacatttactttccttcaccagaaatttggaatggtactaagtacgatctggaggtccaccaccttgactccttcttcacccctttcttcttcctcccaccaatcctccaattgagacttgcacaaacccaaaggagatccaagaggaaaggtgtggctgcaccttggag

SEQ ID NO: 152558 - DNA, 1203 bp, Zea Mays
ccccccctcccatctcctcctttctcaagcacttgcagccacacatcaaacgctagccgccccccccccccccccatctcctcctcccaaggtgccattcgttgccgctcggatctccgtcgcgtggtgcaaatcttcaacggtttccggtggagggagggagaaaagggggagaacccaaggtggtggacttccggatcgttcttagagatttgcccaaacttccggtgaaggcaagtaaaactgtgatggttattccgtctgtcaaatgaggagtcttatacttgattatgttgtgctattgtgttcatattcatatttttttattgagtaccatcatttgaaaatgttcatgtttcatggatttcatatgttgagtttgaggtttgatcatgttactcaagtggttattatgtggaatgggtggaagtatatgtctagcacattttatttgggaagaactcatgatgttgtcatgcataatgcactcatcatccattgcattgaagtttcgtcgcgatcttatggtccgaccgtaccggtacattgagcatcatatgttgcccgagaaggggtatgatgcagcttcatatccttagagatatggaggcagaagtcattattgcatctgtagccatgtgcattcatgggagaggtgtggaatctattatgtggatgtggataatctggacttgtgcatggtgattcttcttggcgttaagtatttagttacttgtttacttgctgcaatttaatgttcaaaaaggaagttttgaaccacgtggttgtttaagcacaattgatttacaatgtccaatttgttgttgttatgtttacttgctgagatgtgtcatctctcatcttgcattgtttgatgcaggcacataatttctgctttgggaaaagagggatgtagcagcatggccactacacctttaacaaaggaaccaccacttaataatgtcgttaatcagagagggtcaagtctagtgaattactttgttcttggttgagcgtttgttttggggtgggctgagttccttatctcatttattttgcttctgttgggtcatgaatgtgttttaccacttttgcatttagattctactacgtgaattatctgtctttatatcctgtatgaactacatgtttcccctccttgttatgctagtttcaaaggaggtgctgccggattttgcaata

SEQ ID NO: 152559 - DNA, 1204 bp, Zea Mays
cccccctcccatctcctcctttctcaagcacttgcagccacacatcaaaccctagccgcccccccccatctcctcctcccaaggtgccattcgttgccgctcggatctccgtcgcgtggtgcaaatcttcaacggtttccggtggagggaggaagggaggaagaaaagggggagaacccaaggtggtggacttccggatcgttcttagggatttgcccaaacttccggtgaaggcaagtaaaactgtgatggttattccgtctgtcaaatgaggagtcttatacttgattatgttgtggtattgtgtttatattcatatttttttattgagtaccatcatttgaaaatgttcatgtttcatggatttcatatgttgagtttgaggtttgatcattttactcaagtggttattatgtggaatgggtggaagtatatgtctagcacattttatttgggaagaactcatgatgttgtcatgcataatgcactcatcatccattgcattgaagtttcgtcgcgatcttatggtccgaccgtaccggtacattgagcatcatatgttgcccgagaaggggtatgatgcagcttcatatccttagagatatggaggcagaagtcattattgcatctgtagccatgtgcattcatgggagaggtgtggaatctattatgtggatgtggataatctggacttgtgcatggtgattcttcttggcgttaagtatttagttacttgtttacttgctgcaattaaatgttcaaaaaggaagttttgaaccatgtggttgtttaagcacagttgaattacaatgtccaatttgttgttgttatgtttacttgctgagatgtgtcatctcacatcttgcattgtttgatgcaggcacctaatttctgctttggggaaaagagggatgtagcagcacggccactacacctttaataaaggaaccaccacttaataatgtcgttaatcagagagggtcaagtctagtgaattactttgttcttggttgagcgtttgttttggggtgggctgagttccttatctcatttattttgcttctgttgggtcatgaatgtgttttaccacttttgcatttagattctactatgtgaattatctgtctttatatcctgtatgaactacatgtttcccctccttgttatgctagtttcaaaggaggtgctgccggattttgcaata

SEQ ID NO: 152560 - DNA, 662 bp, Zea Mays
ccttgccggctgacagccggggccagcgccaccccggacctccagctataaatgccgtgcgaattttgcctccagaggaaccaaagccgccaccgttgccgtagccgtgttcttggactctgttacgtgctgccattttgccaaggctagccccctcctcctcttcttcctcttcttcttttcgcgacgatcagagaagaagatgacgatcaccattgaacagccccagctcggtgagcttttttgtgttttctttcttcgctcgtgttcttctccctcccctgtttgcctattgggaagtttcgtttcatggcgatgaatggtcgtcatggcgcagatgcggtggcggagaggaaagtccccggcggaggtgaccccgcggagctggtgctcgacgccggcttcgtcgtgccggacgccaacgccttcggcaataccttcaggtgaaacagcctactgatttgctacggtgggttcttggggatccgtacgtcgacgccaaaactcaaaggccaggcgcaagcagagaagattggggcttatctagatatgcacatatttatataatggaattaaccaatacgtgttgaggtggattttaagatgaaaactaaagtaatttttactttaatctacgtcaacgtggattgataataaatagt

SEQ ID NO: 152561 - DNA, 775 bp, Zea Mays
ccttgccggctgacagccggggccagcgccaccccggacctccagctataaatgccgtgcgaattttgcctccagaggaaccaaagccgccaccgttgccgtagccgtgttcttggactctgttacgtgctgccattttgccaaggctagccccctcctcctcttcttcctcttcttcttttcgcgacgatcagagaagaagatgacgatcaccattgaacagccccagctcgatgcggtggcggagaggaaagtccccggcggaggtgaccccgcggagctggtgctcgacgccggcttcgtcgtgccggacgccaacgccttcggcaataccttcaggtgaaacagcctactgatttgctacggtgggttcttggggatccgtacgtcgacgccaaaactcaaaggccaggcgcaagcagagaagattggggcttatctagatatgcacatatttatataatggaattaaccaatacgtgttgaggtggattttaagatgaaaactaaagtaatttttactttaatctacgtcaacgtggattgataataaatagtacctcagatcagttcacttgtgtgcttctcgttccgagtcaaagacggaaacagacgcgtgacgtgacgcatttttccactcttgtgtttaatgataaagtaaccataaaaagacactcgggcaaatccacatttttacttggcaggataaaaattatttgtctgccaacaagcttgtcatcacaaaacacacacgaagtcggcggacgagaaaggc

SEQ ID NO: 152562 - DNA, 859 bp, Zea Mays
ccttgccggctgacagccggggccagcgccaccccggacctccagctataaatgccgtgcgaattttgcctccagaggaaccaaagccgccaccgttgccgtagccgtgttcttggactctgttacgtgctgccattttgccaaggctagccccctcctcctcttcttcctcttcttcttttcgcgacgatcagagaagaagatgacgatcaccattgaacagccccagctcgatgcggtggcggagaggaaagtccccggcggaggtgaccccgcggagctggtgctcgacgccggcttcgtcgtgccggacgccaacgccttcggcaataccttcagggactacgacgcggagtcggagcggaagcagacggtagaggagttctaccgggtgaaccacgtgaggcagacgcacgagttcgtggcgcggatgcgggcggagtacgggcggctggacaagacggagatgggcatctgggagtgcatcgagctgctgaacgagttcatcgacgacagcgacccggacctggacatgccccagatcgagcacctgctgcagaccgccgaggccatccgcaaggactaccccgacgaggactggctccacctcaccggactcatccacgacctgggcaaggtgctgctgcacccaagcttcggggagctccctcagtgggctgtcgtcggtaagcaaggggaaatcttggcgatgcaatataatactcaaaattcctcctctgaaacctgtagctttcaggtgacaccttccccgtcggctgcgcatacgacgagtgcaacgtccacttcaaggtagtaagcaattgcagttgcaggcttcagtagtgtgctctcctctctt

SEQ ID NO: 152563 - DNA, 1390 bp, Zea Mays
ccttgccggctgacagccggggccagcgccaccccggacctccagctataaatgccgtgcgaattttgcctccagaggaaccaaagccgccaccgttgccgtagccgtgttcttggactctgttacgtgctgccattttgccaaggctagccccctcctcctcttcttcctcttcttcttttcgcgacgatcagagaagaagatgacgatcaccattgaacagccccagctcgatgcggtggcggagaggaaagtccccggcggaggtgaccccgcggagctggtgctcgacgccggcttcgtcgtgccggacgccaacgccttcggcaataccttcagggactacgacgcggagtcggagcggaagcagacggtagaggagttctaccgggtgaaccacgtgaggcagacgcacgagttcgtggcgcggatgcgggcggagtacgggcggctggacaagacggagatgggcatctgggagtgcatcgagctgctgaacgagttcatcgacgacagcgacccggacctggacatgccccagatcgagcacctgctgcagaccgccgaggccatccgcaaggactaccccgacgaggactggctccacctcaccggactcatccacgacctgggcaaggtgctgctgcacccaagcttcggggagctccctcagtgggctgtcgtcggtgacaccttccccgtcggctgcgcatacgacgagtgcaacgtccacttcaagtacttcaaggagaaccccgactaccacaacccgaagctcaacaccaagttgggggtctactcggagggctgcggcctcaacaaggtgctcatgtcatggggccacgacgactacatgtacctggtggccaaggagaacaagtgcacccttccttccgcggggctgttcatcatcagataccactcgttctaccccctgcacaagcatggagcctacacacacctgatggacgatgaggacaaggagaacctcaagtggctgcatgtgttcaacaagtatgacctgtacagcaagagcaacagcaggatcgacgtggaggaggtgaagccctactacatgtccctaatcgacaagtacttcccggccaagctaagatggtgagaaggggcggcctggcctggacctggatggatggaaccccaaggccccaccaagagctgtcgttccaagtgtccatgtaccatatacatatatatagactacgaatacagtatgtgtgccatgtacggtcattttttttacagagttgagaggagtacccatgccgtttcgaataaaagttgcctgcgtttgttccttccaagtgcgtgaattggttctttcttgttttttccagtgctacaataagcgagcctctccttttgttctact

SEQ ID NO: 152564 - DNA, 1282 bp, Zea Mays
gtgttcttctccctcccctgtttgcctattgggaagtttcgtttcatggcgatgaatggtcgtcatggcgcagatgcggtggcggagaggaaagtccccggcggaggtgaccccgcggagctggtgctcgacgccggcttcgtcgtgccggacgccaacgccttcggcaataccttcagggactacgacgcggagtcggagcggaagcagacggtagaggagttctaccgggtgaaccacgtgaggcagacgcacgagttcgtggcgcggatgcgggcggagtacgggcggctggacaagacggagatgggcatctgggagtgcatcgagctgctgaacgagttcatcgacgacagcgacccggacctggacatgccccagatcgagcacctgctgcagaccgccgaggccatccgcaaggactaccccgacgaggactggctccacctcaccggactcatccacgacctgggcaaggtgctgctgcacccaagcttcggggagctccctcagtgggctgtcgtcggtgacaccttccccgtcggctgcgcatacgacgagtgcaacgtccacttcaagtacttcaaggagaaccccgactaccacaacccgaagctcaacaccaagttgggggtctactcggagggctgcggcctcaacaaggtgctcatgtcatggggccacgacgactacatgtacctggtggccaaggagaacaagtgcacccttccttccgcggggctgttcatcatcagataccactcgttctaccccctgcacaagcatggagcctacacacacctgatggacgatgaggacaaggagaacctcaagtggctgcatgtgttcaacaagtatgacctgtacagcaagagcaacagcaggatcgacgtggaggaggtgaagccctactacatgtccctaatcgacaagtacttcccggccaagctaagatggtgagaaggggcggcctggcctggacctggatggatggaaccccaaggccccaccaagagctgtcgttccaagtgtccatgtaccatatacatatatatagactacgaatacatgctacaataagcgagcctctccttttgttctacttcccagattttgtggtgttgcgaaagttccacctgtccgaactgctcttcgacactagtagtaaatatggaaaatctattttagactcggtaagctttttttaaaattaaggggaacaactctcctcaaccactttgtcattgtcttacctatcgtcttatcatttttcaccattttt

SEQ ID NO: 152565 - DNA, 872 bp, Zea Mays
aataaatccgtcgaacacattcatacatcaaactagttagtgaattaacaaaccaactcactaatgctaatttgcctcggaagtcgtggaaacgacaacgagtcccggttcagatgattcattgaacatctgcgtgcaagtgaactagatggaatcaaacgtgcttagcgcaaacggtgatgccccgtagggaaggaacctacacgcaaacatacaaaggaaacaaacatagcgctaaataacgcagatcgccatccaaattaaataccacaaagctgtgtgaacttgcgaagatctcccgcaatacgcagatcaccagcagcgcgtcacgacgaactccaaaaaccacgacggcgatgtggttctggggcgagcgaccttgcgcaccgtcgaggtcacaggacagcggcacacagctcggcgacgggataagcagcagggcggggtcgacgaccggcaacggacatggcaggttcgagacggcgctgtgcacgacaagattaacagcgatttaacggcctggagcacgacacagcagggcgacggtcaggccattgccgagccagtcgagcaccggcgaggctttgtgggtacagatcggcgctcgtaacagagttcgcgtgggtagggaggaaccttggctgggcgcgcacacaagggagctccgcgagcttgcagacggcacgcgcgggagaagcaaggtgtgccatgggaggaaggttgtagcagggacggcgcgtgcagacgaggaggctgaaggccgggcgccatgggagagctcagggacacgcaggccgagctgggccaggcagatggggagaagctgggaggccacgacgcgctaggaacctgaggagcgcgcaacgggcggg

SEQ ID NO: 152566 - DNA, 2133 bp, Zea Mays
acacaatacgcacacttcgcaaagcgtcttcctccgaccccatcgcctctgtggcttcctggctgtctgactgcgtctgcctggtcgtacgcgagcgcgtgcgtcccttcaccgtcacgagcggcgcacaccgtcaccgccacgctccgtcgccttccagaaaatctaaaccccagcggagccggccacggccagtcagccctcacacggactccgacgcgctgcccgctcgcctgccaaacccccaccccctcgccggcgatgctgccgcgtcggtttagcaaccacccgggctcctcctcacccctcccgttcctcgtcgtctgcggcctgctcctcgctgcggccgtagcattttccccggtcgctgccgccgaggccgctggccgcggcggcggcggcggcggcggcggcgctgggcacgagggccgcgcggggaagccggaggtcgaggcggaggcggaggcgcgcggggatggggtggccgtggcggaggccggcggcgaggtggtggctcagggcaatgccacggaggccaaggagggcagcctcgccgacatgatcgaccgcgcgctggagaaggagttcccggagtccgagagcgagcagggcggcggagagaccgatcctggtagcttcaacaacacggtagctgagaagcagggagttcttgaaactgtagctagaagagtaacaaagaagaatgaaaccaaagataacaagtcatttccttttaaggaggtcttcttggatcgatctgagcaagaagatgttcccacattgattgatcggaaggacaatgtttttatcatatcaaacccaaagtcaaaataccctgtgctgcagctggaccttagattgatatcagatcttgttgttgttatcgtgtctgctacatgtggtggaatcgcttttgcttgccttgggcaacctgtgattacaggttatctacttgcaggatctataattgggcctggaggttttagctttgtcaatgaaatggtgcaagttgaaacggtagcccagtttggtgtgatatttctcctgtttgcattgggacttgagttttctactgcaaaacttcgagttgttcgtgctgttgctgttctcggaggaatgctccaaattatgctgttcatgtttctttgtggtattttggctacactatgtggaggcaaaacaaaagaaggtgtttttgttggtgtgcttctctccatgtcttcaacagctgtggttttaaagtttctgatggaaagaaatagtatcaatgctcttcatggccaagttacagttgggacacttatattgcaggattgtgctgttggtctgctgtttgcgcttcttccaattttgagtggtacatctggccttcttcacggagttgcatcaatgacgaagtcgttggtggtattgataacgttcctgaccattctctctatcctctcccgcacgggcgttccttggtttcttaaactgatgataagtctgtcatcacagacaaatgaactataccagctggcagcggttgcgttctgcttgttatttgcttggtgtagtgataagctgggcctgagtctcgagttgggttcatttgcagctggagtaatgatatcaacaacagaccttgcgcaacatactcttgaacaaatcgaacctatccgcaacttattcgctgctcttttccttgccagcattgggatgctaattaatgtccatttcttgtggaaccatgtggatatactccttgcagcggtaattttggtgatcaccgtaaagacatttattgttgctattgtcgtaaaagggtttgggtatagcaacaaaacatctcttcttgtcggcatgtctcttgcacaaataggagagtttgcttttgttctcctaagccgtgcttcaagtatccatctcatcgagggcaagctatacctgcttcttcttggaaccactgcactcagtttggtgacaacccctctgctattcaaaatgatcccagcagtggtccacctcggggttcttttgagatggttttctgtcgataccaatcaggtggagctgggcctaaaaaatgatgtcctccgcattgatagcggcaagcgcataaatctgatagtccaaggctcacatgactcatga

SEQ ID NO: 152567 - DNA, 1287 bp, Zea Mays
cgcacacttcgcaaagcgtcttcctccgaccccatcgcctctgtggcttcctggctgtctgactgcgtctgcctggtcgtacgcgagcgcgtgcgtcccttcaccgtcacgagcggcgcacaccgtcaccgccacgctccgtcgccttccagaaaatctaaaccccagcggagccggccacggccagtcagccctcacacggactccgacgcgctgcccgctcgcctgccaaacccccaccccctcgccggcgatgctgccgcgtcggtttagcaaccacccgggctcctcctcacccctcccgttcctcgtcgtctgcggcctgctcctcgctgcggccgtagcattttccccggtcgctgccgccgaggccgctggccgcggcggcggcggcggcggcggcggcgctgggcacgagggccgcgcggggaagccggaggtcgaggcggaggcggaggcgcgcggggatggggtggccgtggcggaggccggcggcgaggtggtggctcagggcaatgccacggaggccaaggagggcagcctcgccgacatgatcgaccgcgcgctggagaaggagttcccggagtccgagagcgagcagggcggcggagagaccgatcctggtagcttcaacaacacggtagctgagaagcagggagttcttgaaactgtagctagaagagtaacaaagaagaatgaaaccaaagataacaagtcatttccttttaaggaggtcttcttggatcgatctgagcaagaagatgttcccacattgattgatcggaaggacaatgtttttatcatatcaaacccaaagtcaaaataccctgtgctgcagctggaccttagattgatatcagatcttgttgttgttatcgtgtctgctacatgtggtggaatcgcttttgcttgccttgggcaacctgtgattacaggttatctacttgcaggatctataattgggcctggaggttttagctttgtcaatgaaatggtgcaagtaaggtgcttccacctttggggttgctttttccaacctttttaatctttatggcttacatcttcgaaatggatgaatatgcatgcccttgaaaacctgtatagaagagaactgcctgtagacttgtgctaaaacattttgatgcgggattgcctccttggcctcttgagaggggagtggaggagaagagcgggaatggggcagagagcgcagggggtaggaggaagaggaggactgctcctatcgaccagggtgacccaggaagcagcccctgtgtagggagttct

SEQ ID NO: 152568 - DNA, 2599 bp, Zea Mays
cgcacacttcgcaaagcgtcttcctccgaccccatcgcctctgtggcttcctggctgtctgactgcgtctgcctggtcgtacgcgagcgcgtgcgtcccttcaccgtcacgagcggcgcacaccgtcaccgccacgctccgtcgccttccagaaaatctaaaccccagcggagccggccacggccagtcagccctcacacggactccgacgcgctgcccgctcgcctgccaaacccccaccccctcgccggcgatgctgccgcgtcggtttagcaaccacccgggctcctcctcacccctcccgttcctcgtcgtctgcggcctgctcctcgctgcggccgtagcattttccccggtcgctgccgccgaggccgctggccgcggcggcggcggcggcggcggcggcgctgggcacgagggccgcgcggggaagccggaggtcgaggcggaggcggaggcgcgcggggatggggtggccgtggcggaggccggcggcgaggtggtggctcagggcaatgccacggaggccaaggagggcagcctcgccgacatgatcgaccgcgcgctggagaaggagttcccggagtccgagagcgagcagggcggcggagagaccgatcctggtagcttcaacaacacggtagctgagaagcagggagttcttgaaactgtagctagaagagtaacaaagaagaatgaaaccaaagataacaagtcatttccttttaaggaggtcttcttggatcgatctgagcaagaagatgttcccacattgattgatcggaaggacaatgtttttatcatatcaaacccaaagtcaaaataccctgtgctgcagctggaccttagattgatatcagatcttgttgttgttatcgtgtctgctacatgtggtggaatcgcttttgcttgccttgggcaacctgtgattacaggttatctacttgcaggatctataattgggcctggaggttttagctttgtcaatgaaatggtgcaagtaaggttgaaacggtagcccagtttggtgtgatatttctcctgtttgcattgggacttgagttttctactgcaaaacttcgagttgttcgtgctgttgctgttctcggaggaatgctccaaattatgctgttcatgtttctttgtggtattttggctacactatgtggaggcaaaacaaaagaaggtgtttttgttggtgtgcttctctccatgtcttcaacagctgtggttttaaagtttctgatggaaagaaatagtatcaatgctcttcatggccaagttacagttgggacacttatattgcaggattgtgctgttggtctgctgtttgcgcttcttccaattttgagtggtacatctggccttcttcacggagttgcatcaatgacgaagtcgttggtggtattgataacgttcctgaccattctctctatcctctcccgcacgggcgttccttggtttcttaaactgatgataagtctgtcatcacagacaaatgaactataccagctggcagcggttgcgttctgcttgttatttgcttggtgtagtgataagctgggcctgagtctcgagttgggttcatttgcagctggagtaatgatatcaacaacagaccttgcgcaacatactcttgaacaaatcgaacctatccgcaacttattcgctgctcttttccttgccagcattgggatgctaattaatgtccatttcttgtggaaccatgtggatatactccttgcagcggtaattttggtgatcaccgtaaagacatttattgttgctattgtcgtaaaagggtttgggtatagcaacaaaacatctcttcttgtcggcatgtctcttgcacaaataggagagtttgcttttgttctcctaagccgtgcttcaagtatccatctcatcgagggcaagctatacctgcttcttcttggaaccactgcactcagtttggtgacaacccctctgctattcaaaatgatcccagcagtggtccacctcggggttcttttgagatggttttctgtcgataccaatcaggtggagctgggcctaaaaaatgatgtcctccgcattgatagcggcaagcgcataaatctgatagtccaaggctcacatgactcatgacacatggcacactgcaagctacttttttgtatggcttgagtttacaagctctgtaaagtgttttcacctgtattgaagagtttgtagcagatatacaagggtggaggcaagagaactcaactcagatcttgctcatagggtgagatcaatcctcccccatcatggagactgcatgggcagttgggtttgccgtttttgagagcagtgtgtctaggatgattggtggagtgagtggctgtcgaccccaaatgagggtctcgtgtaacataagaatgtatgatggttaattgattggatcagcatgataggatctaggcgtgatcgttatgccattgtatcctttcagcaaaactgtgtatcctcgcaacacgaaagtgtgtacaacagtatccatcagatcacgaatttcgttatgtaaccatatactcgtcctagttcatgattttttttcacgcgaggcttctagtaa

SEQ ID NO: 152569 - DNA, 363 bp, Zea Mays
gcgtcatagcttttccttcgtttggtatctttgccgaggctgtgcgattggccatctccccctcgcgctctcgtgccctcacacgaccttctgctccccgcactgttcgattctgtgtcctcgtgcccttctgtgtgctattccgctcccgcttctgctgccgtgcacaatcgttgccatcacggccgtcttcaccatgttcaggccgccgcgtgctcgtccaacgacgctcgtggaaaccagcgttctagagagtactctcgcttcacagatgcctctagacaggatccgaagccaggtcgttgggtgggggagatggaagactgcggtttggagccctacactgtgtcaatataaactgct

SEQ ID NO: 152570 - DNA, 618 bp, Zea Mays
atggctatgtacttccatgattttcttataactgaatatcaacaattgcaatctctgttggaaactctgagtgcaactgagccacactacatccgctgtgtaaaacccaataatttgttgaagcctgcaatttttgagaaccagaacgttcttcagcaactcagatgtggagttagtatttacattgttgggggtactattattggcttgcctcagggagttatggaggcgattaggatcagttgtgctggatatccgaccagaagaacattctatgaatttatagaccgttttggtattcttgcgcctgatgttttgagtggaagttctgatgaggtcagtgctgtaaggaggttgttggacaagatagatcttcaaggttaccaggattggtgtcatcaaagtgaactattagaggacctttatatctatctgcaaagtacttattcagcagcccaaccttcgcatgatcaacgtgaagataccgctaggctctggagcaaaacaaaggcgaacctccacattgtccacaacttatgcacttggcagatctatctcaggacctggggagttctcattcggaacaggaatcttagctttcaggcttggtgcaggtga

SEQ ID NO: 152571 - DNA, 5097 bp, Zea Mays
gatagcggcgatgcggccatggccgttgttcttggtaagaactaggagaggagacggccgaaccttttatttgcttgctcgtatagatcctttcctctttcttgcttccgtatcgctagatctcagctgttggttggatcaatggtttgccatacctgctgataatataacgagcttgctcttattggttgcctcgatcgcatggcaggctggtcgtcatcttggatctgcggggaagaggacggcgggcggctcaccctcaccgtcgcgtccaagtgcgtgcagaggacactcatagactgcgtcaatgtggtcctgttcatcgcgtacgtctgcacgctggctgccgcctgcgtcaggcggcggcagcgctctgcagatgcgagcagcgggaggagcggcgctcctagtaggtgggtgctgctcgtcgtctccacgtgctgcgtggcagctgccgtggcctactgtgtcacggctctccaagacgcctacgacatcaagacggcggttccttacttcgtcaggggcctggtctggatcgcgctggcggcctcgctgcacgcccagccgacgaggccggcgagggtcgtggccgtgctctggtgggtgctcttgtcgctgctggccaccgcgtacaattcggagatccttgccggggggcacagcctggacctcgcggagatgattgcgtggccggtgagcctcctcctgctgctctgcgccctcggctccctgctgccgcggggcgacgggcaccactaccgggacgcctccaacggcagcagcggcttgtcggagcctctgatcggcaatgacagaaccgtgccaacctcggagttgtaccgcgctggcctgttcggccagcttgccttctcgtggttgaaccctctgctccgtgtcggccgctccaaggcgctggacctcggcgacatcccgctcatcgccaccgacgacaccgcgcaccacacgtcgcagcagttcacggaggcctggagccgccacgtgagcgacaaagccaggagccgccggggcgtgggcagcaacagcctcgccctcgtcttgggcaagtgcttcctcagcgagatcctgctcaccggcttctacgccttcctgagaatgctgtccatagcagttgcccccctgctgctcttcgggttcgtgtggtacagcaaccaggaggaacgagacctccgggtcggcctgtcccttgtcggctgcctgctgctcgccaagctcgtggagtcgctgtcgcagcggcattggttcttcagctcgaggaggaccgggatgcgtatccggtcagcgctgatggcggtcatcttccagaagcagctcaggctgtccattcaggggaggaacaaccactccactggcgagattgtcaactacattgcggttgatgcgtaccggcttggcgacgccatcagctggctgcacatggggtggacctcgccacttcagctcgtctttgcagttgccacgctcttctgggcactcaagcttggggctcttcctggtctagtcccgctagtcatctttggtttcctcaacgtgccattcgcgaaaatgctgcaggggtaccaggccaagttcatggttgcacaggacgagaggctccggtccacgtcggagatactcaacagcatgaagatcatcaagctgcagtcgtgggaagacaagttccgcagcacgatcgagtcgctcagggacggcgagttcaaatggctgaggcagacccagatgaagaaggcctatggtgcagtcatgtactggatgtccccgacggtcgtctctgctgtcatgtacacagcaacggccatcatggggagtgctcccctgaatgctagcacgctcttcacggtcttggccaccctgagggtaatgtctgagccagtgaggatgcttccggaggtcctcacaatgatgatccagtacaaggtggcattagatcgaattgagaagttccttctcgaagacgagatcagagaggacgatgtgaaaagggtaccttcagatgactctggtgtcagagttcgagtccaagccggaaatttcagctggaaggcaagcggagctgatctgtcactgaggaatgttaaccttcgcgtgaaccgaggagagaaggtggccgtatgcggcccagttggctcagggaaatcttcactcctgtatgcattacttggggagataccaagattatcaggatcagttgaagtttttggttcagtagcatacgtttcacagagctcgtggatacagagtgggactgttcgtgacaacatactctttgggaagcctttcaacaaggaactgtatgataaggcgatcaaatcttgtgctctggacaaggatatcgaaaattttgaccatggagacctcacagagatcggtcagagaggactgaacatgagtggaggccagaagcaaaggattcagctggctcgagccgtctacagtgatgcagatgtttatctactggatgacccattcagtgcagttgatgcgcataccgctgcagtccttttctatgaatgtgtgatgacagcacttgcagagaagactgtcgtccttgtgacccaccaggttgaatttctgactgaaaccgataggattctggtaatggaaggtggtcaagttagtcaacaagggaaatattcagaactcctgggatctgggacagcatttgagaaactggtgtctgctcaccagtcttcgatcacagcattggataccagtgctagccaacagaaccaagttcaagggcaacaagagtctgatgaatacatagtgccaagtgcgcttcaggttataaggcaggccagcgacatcgacgtgaccgcaaagggcccttcagcagcaatacagcttacagaagaggaagagaagggcattggcgacctgggatggaagccatacaaagaatatataaatgtatccaagggggctttccaattctctggcatgtgtattgctcaagtgctcttcacgtgcttccagatcgcatccacatattggttggcagtggctgttcagatgggtaacgtcagtgctgcacttcttgttggggcatattctggactctctatcttcagctgcttctttgcctactttagaagctgttttgcggctattctgggtctcaaggcctccaaagcattctttggcgggctaatggactccgtattcaaggctcccatgtcattttttgactcaacaccagtgggaagaattttaacgagggcatcttcagatttgagcattctagacttcgacataccttactccatggcttttgtggcgacgggcggcattgaggttgttaccacagtactggtcatgggtactgtaacttggcaagtcctggttgtagcgatcccagttgctgtcaccatgatatatgttcagaggcactacgtttcctcagctagggagctagtaagactcaacggaacaacaaaggcacctgtaatgaactatgcatcagaatcaattctcggtgtggtgacgatcagggcatttgcagcaactgagaggtttatctacagcaacatgcagctcatcgacactgatgccacactgttcttccataccattgccgcacaagagtgggtactcataagagtagaggcactgcagtccttgacaataatcacagcagcattgttccttgttctggttcctccaggagcaatttctccgggctttgcaggactttgtctctcctatgctttgactttaacttcagcacaaatattcttgacaaggttctattcgtacttggaaaactacatcatctcggttgaacgaatcaagcagtatatgcacctcccagtggagccacctgccattataccagatagtagacctccaacttcgtggccgcaggagggaaggatagacctgcaagatttgaagataagataccgtccaaatgcgccgcttgtcctcaaaggaatcacttgcacttttgctgctgggaacaagattggggttgtagggaggacaggaagtggaaaatcaacacttatcagctcattgttccgtctcgttgatccggcgggtgggaggatacttattgacaagttggatatttgctccattggccttaaggatctaagaactaaactaagtattatccctcaagaacctacacttttcaggggaaccgtgcgcaacaatttggatccccttggccagcattctgatgaagagatatgggaggccttggagaagtgtcaactgaagacagcaatcagcaccacctctgctcttctggatacagttgtgagtgatgatggcgataactggagtgctggacagcgtcagctcttctgtcttggcagagttctcctacgcaggaacaaaattctagttctagacgaggcaacagcatccatcgactctgcaacagatgcaatcctgcagaaagtaatcaggcagcagttctcaagttgcacggttataaccatagctcacagggtaccaactgtgacagacagtgacaaggtcatggtcctgtcctacgggaagcttctagaatatgaaacaccagccaagctgttggaagacaaacaatcagcatttgctaaacttgtggctgagtattgggctaataccaagagaaattcaacatgatctaccattattgcaggacatgataaaagatatgatcattttaatcaagatatcgaaagattcaagggttctcaaattgaatctttaacaagacaaggaatgccatcatgattatttgattgatgtggttactgggagtgaataagatatcaacagaaattcaattttggtaatggaagcaatttttggagtgagggctgatgttcgagagaactccagctggttgattgaacatgtggtattcaatgcaaaatgaaatggaggatccacttctagcatgatcaatggcatttttcatacataagcctttttgaataagagaagcgaagtaccaagtcgtgaattgcaatgaagaatgagtaaagtgcagtgctgagaagaataattttcatgtatcttgtgtactcaataatgataaactttatatgactgagaaggaaactgtcgcaaattgtcaaagtg

SEQ ID NO: 152572 - DNA, 555 bp, Zea Mays
cccttggactgatctaacatatggtttccaaatctgtcggcactcttcctgcgctgaccccttccgctcttgatagatcgatctgtttgagtagtctatgtacaaatggcatcatgcgaggtactcgagggaatcagctttgttcgtttttatgctcgtgcgttttatatatgattacatttttcttgagcgcgagtggtctcatattgatgtaacattgtttgattctagctatatttgtacaaattaggataagtatgttgcattttcactttgtggtcattattagtactttagtttttagtattgatcgataatgaacacaataactggacattgctagaaccattacagtttatcctgtatttaatcaactttgaaactatgctcaagctttcccctacttaggatttggaaaactcttcagttatgagaaggtttggttcagtctctaatgacataatattgaggcactacatttgaataatcgattgatatcagagaaaatacttgttctatcaatagagaagggcaactttttttgagatcagagag

SEQ ID NO: 152573 - DNA, 388 bp, Zea Mays
ccttgcctttggtttgagcaaaacagattcttgtttcaccgaggaaaagagagaagttctggataaattgacaatgtcaacttgaattgactaattcagttccgcctattccacattaatgatagtacatttatgtttctgcttcacgaatatgatattttttggacatttctaataataacaagccttattcctattttggtattttggattttaggacttttagccccggttagtgaaggaccagcgaagctttctagttatgaaccggtatagaacccatgggggggcttggttacaattccgaatatgctattacatgtttgcgctagtttttgttgtttttgatgtggaaataatctttctgtacccttgggcaatgagtttc

SEQ ID NO: 152574 - DNA, 1918 bp, Zea Mays
gggagacgcaggacgcacagagcgacagaggagggagacctcgcccggtcgctccacccctcgcccacatcacttcgtctctctggtcgcatcccaccccacacccctcctctcccatctccgctcgatctcccattcttcctcgtctccgccgccgtctgccccacctccaaccaacgcccaacgatcagtattccagaagcttccccggcaaccttcgtccccgtcccggatccggggcgcccctgatgcggtgcccgcgcggcgcgatcgcgtgacggacggccgccatggatcccccaggccgcggcgaccaaggcgaggcgccgcagccgcagccgctggagtggcggttcgctcaggtcttcggcgaacgtgccgcgggcgaagacgtccaggaagttgacatcatatctgcaattgaatttgacaaatctggtgaccatcttgccactggggataaaggaggacgtgtggttttatttgaaaggacagatgttcgggataatgccagccagagagaactggagagacaagatgttccagttactagacacccagagttccgctacaaaactgaatttcagagtcatgaacctgagtttgactacctcaaaagtttggaaatagaggaaaagatcaacaggatcaagtggtgccagacagccaacaatgctctctcccttttgtctacaaatgataaaacaataaaatactggaaggttcaagagaagaaagtaaaacgatttgcagtcatgaatttggacagttcccaaagtgcaggaagtagtaccactgctattgcaagtaccagtagttctaaggcacctcttccaaatggtggatgctctgatatgcttggttgcctgaataatgatctcacatttcctcctggaggctacccatcactgcgtttgccagttgttaccagtctagaagcaaaccctgttgctagatgtcgacgtgtatttgctcatgctcacgattaccatataaattctatttcaaataatagtgatggtgagacattcatatcagcagatgatctccgaataaatttatggaacttggaaataaacagccagagctttaacattgttgatgtgaagcctacaaacatggaagatctaacagaggtgattacatgtgcggagttccatccatcccattgtaatacactggcctatagtagttcaaagggttctatccgacttattgatctgcgtcaatcagcactgtgtgacaaccattcaaaaatatttgaggaacatgaagcacctggatcaagatccttctttacagaaattattgcatcaatttctgatataaagttttcaaggaatggcaaatatattcttagccgtgattatatgacgctcaagctatgggatctaaacatgaattcaggccctgtttcaaccttccaagtccatgaacatttaagacctaagctctgtgatctgtacgagaatgactcaattttcgacaagtttgagtgctgtcttagtggggatggacttcgtgttgcaactggttcttatggtaatatatttcgtgttttcggtcgtcctccgggaagcatagaggcaacaactttggaagcaagtaggaacccaatgaggcgtcagattgcaaatccagcaaggcccacacggacactaacttcttttgcccgtggtgttcggagaggtcatttcttatcgtcaacattgacttaattactcctgcaacagtatcaattattttgttcacgcagccatcaccgacctattctattacaggtggagaaaatcaaggcgttgatgctaatgggaattcactcgacttctcaacgaagctgctccacctcgcatggcacccgaccgagaattctattgcatgtgctgctgcaaatagcttgtatatgtattatgcgtag

SEQ ID NO: 152575 - DNA, 2383 bp, Zea Mays
gggagacgcaggacgcacagagcgacagaggagggagacctcgcccggtcgctccacccctcgcccacatcacttcgtctctctggtcgcatcccaccccacacccctcctctcccatctccgctcgatctcccattcttcctcgtctccgccgccgtctgccccacctccaaccaacgcccaacgatcagtattccagaagcttccccggcaaccttcgtccccgtcccggatccggggcgcccctgatgcggtgcccgcgcggcgcgatcgcgtgacggacggccgccatggatcccccaggccgcggcgaccaaggcgaggcgccgcagccgcagccgctggagtggcggttcgctcaggtcttcggcgaacgtgccgcgggcgaagacgtccaggaagttgacatcatatctgcaattgaatttgacaaatctggtgaccatcttgccactggggataaaggaggacgtgtggttttatttgaaaggacagatgttcgggataatgccagccagagagaactggagagacaagatgttccagttactagacacccagagttccgctacaaaactgaatttcagagtcatgaacctgagtttgactacctcaaaagtttggaaatagaggaaaagatcaacaggatcaagtggtgccagacagccaacaatgctctctcccttttgtctacaaatgataaaacaataaaatactggaaggttcaagagaagaaagtaaaacgatttgcagtcatgaatttggacagttcccaaagtgcaggaagtagtaccactgctattgcaagtaccagtagttctaaggcacctcttccaaatggtggatgctctgatatgcttggttgcctgaataatgatctcacatttcctcctggaggctacccatcactgcgtttgccagttgttaccagtctagaagcaaaccctgttgctagatgtcgacgtgtatttgctcatgctcacgattaccatataaattctatttcaaataatagtgatggtgagacattcatatcagcagatgatctccgaataaatttatggaacttggaaataaacagccagagctttaacattgttgatgtgaagcctacaaacatggaagatctaacagaggtgattacatgtgcggagttccatccatcccattgtaatacactggcctatagtagttcaaagggttctatccgacttattgatctgcgtcaatcagcactgtgtgacaaccattcaaaaatatttgaggaacatgaagcacctggatcaagatccttctttacagaaattattgcatcaatttctgatataaagttttcaaggaatggcaaatatattcttagccgtgattatatgacgctcaagctatgggatctaaacatgaattcaggccctgtttcaaccttccaagtccatgaacatttaagacctaagctctgtgatctgtacgagaatgactcaattttcgacaagtttgagtgctgtcttagtggggatggacttcgtgttgcaactggttcttatggtaatatatttcgtgttttcggtcgtcctccgggaagcatagaggcaacaactttggaagcaagtaggaacccaatgaggcgtcagattgcaaatccagcaaggcccacacggacactaacttcttttgcccgtggtgttcggagaggtggagaaaatcaaggcgttgatgctaatgggaattcactcgacttctcaacgaagctgctccacctcgcatggcacccgaccgagaattctattgcatgtgctgctgcaaatagcttgtatatgtattatgcgtagagaatgccctacagaaaatttgttttttttgtggcttgctctcggcgaaggcccagggcccttcaactgcaaccagagagatggtgcaggacattgttgtcagttcaccccttggggccagaagccgctgatgtccacaagatcaccaatgctgtgctaacagactgcgccctgttgattctttagtacatgtgtaaattataattctaaacatgggaagttttgatccaaatattcaatcgtggcagttgtattgggagtcggtggaagggacatatcgaagataaaattctgtattggatttgcaggacatgcattgcaatggtgtagtatgactggcaatccttatcatgtaataccacctagacagggataatgttgtttaatgtcagaaaatgatagatatttcccagttattgtcgttactcatcatagttatccttctattagttgtactgttaaaataaggcagcaccgttataattgtgctttttctttttctgaatgccttttgtacactgaggttttcgcaagaaaggaattcacggaattaatgc
